(19) United States
(12) Patent Application Publication
(10) Pub. No.: US 2003/0099974 A1
(43) Pub. Date: May 29, 2003

(54) Novel genes, compositions, kits and methods for identification, assessment, prevention, and therapy of breast cancer

(75) Inventors: James Lillie, Natick, MA (US); Yongyao Xu, Belmont, MA (US); Youzhen Wang, Newton, MA (US); Kathleen Steinmann, Winchester, MA (US)

Correspondence Address: LAHIVE & COCKFIELD, 28 STATE STREET, BOSTON, MA, 02109, US

(73) Assignee: Millennium Pharmaceuticals, Inc., Cambridge, MA

(21) Appl. No.: 10/198,846

(22) Filed: Jul. 18, 2002

Related U.S. Application Data
(60) Provisional application No. 60/306,220, filed on Jul. 18, 2001.

(51) Int. Cl. C12Q 1/68; G01N 33/574; C07H 21/04; C12N 9/00; C12P 21/02; C12N 5/06

(52) U.S. Cl. 435/6; 435/7.23; 435/69.3; 435/183; 435/320.1; 435/325; 530/350; 530/388.8; 536/23.2

(57) ABSTRACT

The invention relates to compositions, kits, and methods for detecting, characterizing, preventing, and treating human breast cancers. A variety of newly identified markers are provided, wherein changes in the levels of expression of one or more of the markers is correlated with the presence of breast cancer.

### RELATED APPLICATIONS

[0001] The present application claims priority from U.S. provisional patent application serial No. 60/306,220, filed on Jul. 18, 2001, which is expressly incorporated by reference.

### FIELD OF THE INVENTION

[0002] The field of the invention is breast cancer, including diagnosis, characterization, management, and therapy of breast cancer.

### BACKGROUND OF THE INVENTION

[0003] The increased number of cancer cases reported in the United States, and, indeed, around the world, is a major concern. Currently there are only a handful of treatments available for specific types of cancer, and these provide no absolute guarantee of success. In order to be most effective, these treatments require not only an early detection of the malignancy, but a reliable assessment of the severity of the malignancy.

[0004] The incidence of breast cancer, a leading cause of death in women, has been gradually increasing in the United States over the last thirty years. In 1997, it was estimated that 181,000 new cases were reported in the U.S., and that 44,000 people would die of breast cancer (Parker et al, 1997, CA Cancer J. Clin. 47:5-27; Chu et al, 1996, J. Nat. Cancer Inst. 88:1571-1579). While the pathogenesis of breast cancer is unclear, transformation of normal breast epithelium to a malignant phenotype may be the result of genetic factors, especially in women under 30 (Miki et al., 1994, Science, 266:66-71). The discovery and characterization of BRCA1 and BRCA2 has recently expanded our knowledge of genetic factors which can contribute to familial breast cancer. Germ-line mutations within these two loci are associated with a 50 to 85% lifetime risk of breast and/or ovarian cancer (Casey, 1997, Curr. Opin. Oncol. 9:88-93; Marcus et al, 1996, Cancer 77:697-709). However, it is likely that other, non-genetic factors also have a significant effect on the etiology of the disease. Regardless of its origin, breast cancer morbidity and mortality increases significantly if it is not detected early in its progression. Thus, considerable effort has focused on the early detection of cellular transformation and tumor formation in breast tissue.

[0005] Currently, the principal manner of identifying breast cancer is through detection of the presence of dense tumorous tissue. This may be accomplished to varying degrees of effectiveness by direct examination of the outside of the breast, or through mammography or other X-ray imaging methods (Jatoi, 1999, Am. J. Surg. 177:518-524). The latter approach is not without considerable cost, however. Every time a mammogram is taken, the patient incurs a small risk of having a breast tumor induced by the ionizing properties of the radiation used during the test. In addition, the process is expensive and the subjective interpretations of a technician can lead to imprecision, e.g., one study showed major clinical disagreements for about one-third of a set of mammograms that were interpreted individually by a surveyed group of radiologists. Moreover, many women find that undergoing a mammogram is a painful experience. Accordingly, the National Cancer Institute has not recommended mammograms for women under fifty years of age, since this group is not as likely to develop breast cancers as are older women. It is compelling to note, however, that while only about 22% of breast cancers occur in women under fifty, data suggests that breast cancer is more aggressive in pre-menopausal women.

[0006] It would therefore be beneficial to provide specific methods and reagents for the diagnosis, staging, prognosis, monitoring, and treatment of diseases associated with breast cancer, or to indicate a predisposition to such for preventative measures.

### SUMMARY OF THE INVENTION

[0007] The invention relates to novel genes associated with breast cancer as well as methods of assessing whether a patient is afflicted with breast cancer. The methods of the present invention comprise the step of comparing the level of expression of a marker in a patient sample, wherein the marker is listed in the Sequence Listing and the normal level of expression of the marker in a control, e.g., a sample from a patient without breast cancer. A significant difference between the level of expression of the marker in the patient sample and the normal level is an indication that the patient is afflicted with breast cancer. Preferably, a protein corresponding to the marker is a secreted protein or is predicted to correspond to a secreted protein. Alternatively, the marker can correspond to a protein having an extracellular portion, to one which is normally expressed in breast tissue at a detectable level, or both.

[0008] In one method, the marker(s) are preferably selected such that the positive predictive value of the method is at least about 10%. Also preferred are embodiments of the method wherein the marker is over- or under-expressed by at least two-fold in at least about 20% of stage 0 breast cancer patients, stage I breast cancer patients, stage IIA breast cancer patients, stage IIB breast cancer patients, stage IIIA breast cancer patients, stage IIIB breast cancer patients, stage IV breast cancer patients, grade I breast cancer patients, grade II breast cancer patients, grade III breast cancer patients, malignant breast cancer patients, ductal carcinoma breast cancer patients, and lobular carcinoma breast cancer patients.

[0009] In one embodiment of the methods of the present invention, the patient sample is a breast tissue-associated body fluid. Such fluids include, for example, blood fluids, lymph and cystic fluids, as well as nipple aspirates. In another embodiment, the sample comprises cells obtained from the patient. In another embodiment, the patient sample is in vivo.

[0010] In accordance with the methods of the present invention, the level of expression of the marker in a sample can be assessed, for example, by detecting the presence in the sample of:

[0011] a protein or a fragment of the protein corresponding to the marker (e.g. using a reagent, such as an antibody, an antibody derivative, or an antibody fragment, which binds specifically with the protein or a fragment of the protein)

[0012] a metabolite which is produced directly (i.e., catalyzed) or indirectly by a protein corresponding to the marker

[0013] a transcribed polynucleotide (e.g. an mRNA or a cDNA), or fragment thereof, having at least a portion with which the marker is substantially homologous (e.g. by contacting a mixture of transcribed polynucleotides obtained from the sample with a substrate having one or more of the markers listed in the Sequence Listing fixed thereto at selected positions)

[0014] a transcribed polynucleotide or fragment thereof, wherein the polynucleotide anneals with the marker under stringent hybridization conditions.

[0015] The methods of the present invention are particularly useful for patients with an identified breast mass or symptoms associated with breast cancer. The methods of the present invention can also be of particular use with patients having an enhanced risk of developing breast cancer (e.g., patients having a familial history of breast cancer, patients identified as having a mutant oncogene, and patients at least about 50 years of age). The methods of the present invention may further be of particular use in monitoring the efficacy of treatment of a breast cancer patient (e.g. the efficacy of chemotherapy).

[0016] The methods of the present invention may be performed using a plurality (e.g. 2, 3, 5, or 10 or more) of markers. According to a method involving a plurality of markers, the level of expression in the sample of each of a plurality of markers independently selected from the markers listed in the Sequence Listing is compared with the normal level of expression of each of the plurality of markers in samples of the same type obtained from control humans not afflicted with breast cancer. A significantly enhanced level of expression of one or more of the markers listed in the Sequence Listing in the sample, relative to the corresponding normal levels, is an indication that the patient is afflicted with breast cancer. The markers of the Sequence Listing may also be used in combination with known breast cancer markers in the methods of the present invention.

[0017] In a preferred method of assessing whether a patient is afflicted with breast cancer (e.g., new detection (“screening”), detection of recurrence, reflex testing), the method comprises comparing:

[0018] a) the level of expression of a marker in a patient sample, wherein at least one marker is selected from the markers of the Sequence Listing, and

[0019] b) the normal level of expression of the marker in a control non-breast cancer sample.

[0020] A significant difference between the level of expression of the marker in the patient sample and the normal level is an indication that the patient is afflicted with breast cancer.

[0021] The methods of the present invention further include a method of assessing the efficacy of a test compound for inhibiting breast cancer in a patient. This method comprises comparing:

[0022] a) expression of a marker in a first sample obtained from the patient and maintained in the presence of the test compound, wherein the marker is selected from the group consisting of the markers listed in the Sequence Listing, and

[0023] b) expression of the marker in a second sample obtained from the patient and maintained in the absence of the test compound.

[0024] A significantly lower level of expression of the marker in the first sample, relative to the second sample, is an indication that the test compound is efficacious for inhibiting breast cancer in the patient. For example, the first and second samples can be portions of a single sample obtained from the patient or portions of pooled samples obtained from the patient.

[0025] The invention further relates to a method of assessing the efficacy of a therapy for inhibiting breast cancer in a patient. This method comprises comparing:

[0026] a) expression of a marker in a first sample obtained from the patient prior to providing at least a portion of the therapy to the patient, wherein the marker is selected from the group consisting of the markers listed in the Sequence Listing, and

[0027] b) expression of the marker in a second sample obtained from the patient following provision of the portion of the therapy.

[0028] A significantly lower level of expression of the marker in the second sample, relative to the first sample, is an indication that the therapy is efficacious for inhibiting breast cancer in the patient.

[0029] It will be appreciated that in these methods the “therapy” may be any therapy for treating breast cancer including, but not limited to, chemotherapy, radiation therapy and surgical removal of tissue, e.g., a breast tumor. Thus, the methods of the invention may be used to evaluate a patient before, during and after therapy, for example, to evaluate the reduction in tumor burden.

[0030] The present invention therefore further comprises a method for monitoring the progression of breast cancer in a patient, the method comprising:

[0031] a) detecting in a patient sample at a first time point, the expression of a marker, wherein the marker is selected from the group consisting of the markers listed in the Sequence Listing;

[0032] b) repeating step a) at a subsequent time point; and

[0033] c) comparing the level of expression detected in steps a) and b), and therefrom monitoring the progression of breast cancer in the patient.

[0034] The invention also includes a method of selecting a composition for inhibiting breast cancer in a patient. This method comprises the steps of:

[0035] a) obtaining a sample comprising cancer cells from the patient;

[0036] b) separately maintaining aliquots of the sample in the presence of a plurality of test compositions;

[0037] c) comparing expression of a marker listed in the Sequence Listing in each of the aliquots; and

[0038] d) selecting one of the test compositions which induces a lower level of expression of the marker in the aliquot containing that test composition, relative to other test compositions.

[0039] In addition, the invention includes a method of inhibiting breast cancer in a patient. This method comprises the steps of:

[0040] a) obtaining a sample comprising cancer cells from the patient;

[0041] b) separately maintaining aliquots of the sample in the presence of a plurality of test compositions;

[0042] c) comparing expression of a marker listed in the Sequence Listing in each of the aliquots; and

[0043] d) administering to the patient at least one of the test compositions which induces a lower level of expression of the marker in the aliquot containing that test composition, relative to other test compositions.

[0044] The invention also includes a kit for assessing whether a patient is afflicted with breast cancer. This kit comprises reagents for assessing expression of a marker listed in the Sequence Listing.

[0045] In another aspect, the invention relates to a kit for assessing the suitability of each of a plurality of compounds for inhibiting breast cancer in a patient. The kit comprises a reagent for assessing expression of a marker listed in the Sequence Listing, and may also comprise a plurality of compounds.

[0046] In another aspect, the invention relates to a kit for assessing the presence of breast cancer cells. This kit comprises an antibody, wherein the antibody binds specifically with a protein corresponding to a marker listed in the Sequence Listing. The kit may also comprise a plurality of antibodies, wherein the plurality binds specifically with a protein corresponding to a different marker which is also listed in the Sequence Listing.

[0047] The invention also includes a kit for assessing the presence of breast cancer cells, wherein the kit comprises a nucleic acid probe. The probe binds specifically with a transcribed polynucleotide corresponding to a marker listed in the Sequence Listing. The kit may also comprise a plurality of probes, wherein each of the probes binds specifically with a transcribed polynucleotide corresponding to a different marker listed in the Sequence Listing.

[0048] The invention further relates to a method of making an isolated hybridoma which produces an antibody useful for assessing whether a patient is afflicted with breast cancer. The method comprises isolating a protein or protein fragment corresponding to a marker listed in the Sequence Listing, immunizing a mammal using the isolated protein or protein fragment, isolating splenocytes from the immunized mammal, fusing the isolated splenocytes with an immortalized cell line to form hybridomas, and screening individual hybridomas for production of an antibody which specifically binds with the protein or protein fragment to isolate the hybridoma. The invention also includes an antibody produced by this method.

[0049] The invention further includes a method of assessing the breast carcinogenic or irregular growth promoting potential of a test compound. This method comprises the steps of:

[0050] a) maintaining separate aliquots of breast cells in the presence and absence of the test compound; and

[0051] b) comparing expression of a marker in each of the aliquots.

[0052] The marker is selected from those listed in the Sequence Listing. A significantly enhanced level of expression of the marker in the aliquot maintained in the presence of (or exposed to) the test compound, relative to the aliquot maintained in the absence of the test compound, is an indication that the test compound possesses breast carcinogenic or irregular growth promoting potential.

[0053] Additionally, the invention includes a kit for assessing the breast carcinogenic potential of a test compound. The kit comprises breast cells and a reagent for assessing expression of a marker in each of the aliquots. The marker is selected from those listed in the Sequence Listing.

[0054] The invention further includes a method of treating a patient afflicted with breast cancer, comprising providing to cells of the patient an antisense oligonucleotide complementary to a polynucleotide corresponding to a marker listed in the Sequence Listing.

[0055] The invention includes a method of inhibiting breast cancer in a patient at risk for developing breast cancer. This method comprises inhibiting expression or overexpression of a gene corresponding to a marker listed in the Sequence Listing.

[0056] It will be appreciated that the methods and kits of the present invention may also include known cancer markers including known breast cancer markers. It will further be appreciated that the methods and kits may be used to identify cancers other than breast cancer.

### DETAILED DESCRIPTION OF THE INVENTION

[0057] The invention relates to newly discovered correlations between expression of certain markers and the cancerous state of breast cells. It has been discovered that the level of expression of individual markers and combinations of markers described herein correlates with the presence of breast cancer in a patient. Methods are provided for detecting the presence of breast cancer in a sample, the absence of breast cancer in a sample, the stage of breast cancer, and other characteristics of breast cancer that are relevant to prevention, diagnosis, characterization, and therapy of breast cancer in a patient.

[0058] Definitions

[0059] As used herein, each of the following terms has the meaning associated with it in this section.

[0060] The articles “a” and “an” are used herein to refer to one or to more than one (i.e. to at least one) of the grammatical object of the article. By way of example, “an element” means one element or more than one element.

[0061] A “marker” is a naturally-occurring polymer corresponding to at least one of the novel nucleic acids listed in the Sequence Listing. For example, markers include, without limitation, sense and anti-sense strands of genomic DNA (i.e. including any introns occurring therein), RNA generated by transcription of genomic DNA (i.e. prior to splicing), RNA generated by splicing of RNA transcribed from genomic DNA, and proteins generated by translation of spliced RNA (e.g. including proteins both before and after cleavage of normally cleaved regions such as transmembrane signal sequences). As used herein, “marker” may also include a cDNA made by reverse transcription of an RNA generated by transcription of genomic DNA (including spliced RNA).

[0062] As used herein a “polynucleotide corresponds to” another (a first) polynucleotide if it is related to the first polynucleotide by any of the following relationships: 1) The second polynucleotide comprises the first polynucleotide and the second polynucleotide encodes a gene product. 2) The second polynucleotide is 5′ or 3′ to the first polynucleotide in cDNA, RNA, genomic DNA, or fragment of any of these polynucleotides. For example, a second polynucleotide may be fragment of a gene that includes the first and second polynucleotides. The first and second polynucleotides are related in that they are components of the gene coding for a gene product, such as a protein or antibody. However, it is not necessary that the second polynucleotide comprises or overlaps with the first polynucleotide to be encompassed within the definition of “corresponding to” as used herein. For example, the first polynucleotide may be a fragment of a 3′ untranslated region of the second polynucleotide. The first and second polynucleotide may be fragments of a gene coding for a gene product. The second polynucleotide may be an exon of the gene while the first polynucleotide may be an intron of the gene. 3) The second polynucleotide is the complement of the first polynucleotide.

[0063] The term “probe” refers to any molecule which is capable of selectively binding to a specifically intended target molecule, for example a marker of the invention. Probes can be either synthesized by one skilled in the art, or derived from appropriate biological preparations. For purposes of detection of the target molecule, probes may be specifically designed to be labeled, as described herein. Examples of molecules that can be utilized as probes include, but are not limited to, RNA, DNA, proteins, antibodies, and organic monomers.

[0064] A “breast-associated” body fluid is a fluid which, when in the body of a patient, contacts or passes through breast cells or into which cells, nucleic acids or proteins shed from breast cells are capable of passing. Exemplary breast-associated body fluids include blood fluids, lymph, cystic fluid, urine and nipple aspirates.

[0065] The “normal” level of expression of a marker is the level of expression of the marker in breast cells of a patient, e.g. a human, not afflicted with breast cancer.

[0066] “Over-expression” and “under-expression” of a marker refer to expression of the marker of a patient at a greater or lesser level, respectively, than normal level of expression of the marker (e.g. at least two-fold greater or lesser level).

[0067] As used herein, the term “promoter/regulatory sequence” means a nucleic acid sequence which is required for expression of a gene product operably linked to the promoter/regulatory sequence. In some instances, this sequence may be the core promoter sequence and in other instances, this sequence may also include an enhancer sequence and other regulatory elements which are required for expression of the gene product. The promoter/regulatory sequence may, for example, be one which expresses the gene product in a tissue-specific manner.

[0068] A “constitutive” promoter is a nucleotide sequence which, when operably linked with a polynucleotide which encodes or specifies a gene product, causes the gene product to be produced in a living human cell under most or all physiological conditions of the cell.

[0069] An “inducible” promoter is a nucleotide sequence which, when operably linked with a polynucleotide which encodes or specifies a gene product, causes the gene product to be produced in a living human cell substantially only when an inducer which corresponds to the promoter is present in the cell.

[0070] A “tissue-specific” promoter is a nucleotide sequence which, when operably linked with a polynucleotide which encodes or specifies a gene product, causes the gene product to be produced in a living human cell substantially only if the cell is a cell of the tissue type corresponding to the promoter.

[0071] A “transcribed polynucleotide” is a polynucleotide (e.g. an RNA, a cDNA, or an analog of one of an RNA or cDNA) which is complementary to or homologous with all or a portion of a mature RNA made by transcription of a genomic DNA corresponding to a marker of the invention and normal post-transcriptional processing (e.g. splicing), if any, of the transcript.

[0072] “Complementary” refers to the broad concept of sequence complementarity between regions of two nucleic acid strands or between two regions of the same nucleic acid strand. It is known that an adenine residue of a first nucleic acid region is capable of forming specific hydrogen bonds (“base pairing”) with a residue of a second nucleic acid region which is antiparallel to the first region if the residue is thymine or uracil. Similarly, it is known that a cytosine residue of a first nucleic acid strand is capable of base pairing with a residue of a second nucleic acid strand which is antiparallel to the first strand if the residue is guanine. A first region of a nucleic acid is complementary to a second region of the same or a different nucleic acid if, when the two regions are arranged in an antiparallel fashion, at least one nucleotide residue of the first region is capable of base pairing with a residue of the second region. Preferably, the first region comprises a first portion and the second region comprises a second portion, whereby, when the first and second portions are arranged in an antiparallel fashion, at least about 50%, and preferably at least about 75%, at least about 90%, or at least about 95% of the nucleotide residues of the first portion are capable of base pairing with nucleotide residues in the second portion. More preferably, all nucleotide residues of the first portion are capable of base pairing with nucleotide residues in the second portion.

[0073] “Homologous” as used herein, refers to nucleotide sequence similarity between two regions of the same nucleic acid strand or between regions of two different nucleic acid strands. When a nucleotide residue position in both regions is occupied by the same nucleotide residue, then the regions are homologous at that position. A first region is homologous to a second region if at least one nucleotide residue position of each region is occupied by the same residue. Homology between two regions is expressed in terms of the proportion of nucleotide residue positions of the two regions that are occupied by the same nucleotide residue. By way of example, a region having the nucleotide sequence 5′-ATTGCC-3′ and a region having the nucleotide sequence 5′-TATGGC-3′ share 50% homology. Preferably, the first region comprises a first portion and the second region comprises a second portion, whereby, at least about 50%, and preferably at least about 75%, at least about 90%, or at least about 95% of the nucleotide residue positions of each of the portions are occupied by the same nucleotide residue. More preferably, all nucleotide residue positions of each of the portions are occupied by the same nucleotide residue.

[0074] A marker is “fixed” to a substrate if it is covalently or non-covalently associated with the substrate such the substrate can be rinsed with a fluid (e.g. standard saline citrate, pH 7.4) without a substantial fraction of the marker dissociating from the substrate.

[0075] As used herein, a “naturally-occurring” nucleic acid molecule refers to an RNA or DNA molecule having a nucleotide sequence that occurs in nature (e.g. encodes a natural protein).

[0076] Expression of a marker in a patient is “significantly” higher or lower than the normal level of expression of a marker if the level of expression of the marker is greater or less, respectively, than the normal level by an amount greater than the standard error of the assay employed to assess expression, and preferably at least twice, and more preferably three, four, five or ten times that amount. Alternately, expression of the marker in the patient can be considered “significantly” higher or lower than the normal level of expression if the level of expression is at least about two, and preferably at least about three, four, or five times, higher or lower, respectively, than the normal level of expression of the marker.

[0077] Breast cancer is “inhibited” if at least one symptom of the cancer is alleviated, terminated, slowed, or prevented. As used herein, breast cancer is also “inhibited” if recurrence or metastasis of the cancer is reduced, slowed, delayed, or prevented.

[0078] A kit is any manufacture (e.g. a package or container) comprising at least one reagent, e.g. a probe, for specifically detecting a marker of the invention, the manufacture being promoted, distributed, or sold as a unit for performing the methods of the present invention.

[0079] Description

[0080] The present invention is based, in part, on identification of novel markers which are expressed at a different level in breast cancer cells than they are in normal (i.e. non-cancerous) breast cells. The markers of the invention correspond to nucleic acid and polypeptide molecules which can be detected in one or both of normal and cancerous breast cells. The presence, absence, or level of expression of one or more of these markers in breast cells is herein correlated with the cancerous state of the tissue. The invention thus includes compositions, kits, and methods for assessing the cancerous state of breast cells (e.g. cells obtained from a human, cultured human cells, archived or preserved human cells and in vivo cells).

[0081] The compositions, kits, and methods of the invention have the following uses, among others:

[0082] 1) assessing whether a patient is afflicted with breast cancer;

[0083] 2) assessing the stage of breast cancer in a human patient;

[0084] 3) assessing the grade of breast cancer in a patient;

[0085] 4) assessing the benign or malignant nature of breast cancer in a patient;

[0086] 5) assessing the histological type of neoplasm (e.g. ductal, lobular, etc.) associated with breast cancer in a patient;

[0087] 6) making an isolated hybridoma which produces an antibody useful for assessing whether a patient is afflicted with breast cancer;

[0088] 7) assessing the presence of breast cancer cells;

[0089] 8) assessing the efficacy of one or more test compounds for inhibiting breast cancer in a patient;

[0090] 9) assessing the efficacy of a therapy for inhibiting breast cancer in a patient;

[0091] 10) monitoring the progression of breast cancer in a patient;

[0092] 11) selecting a composition or therapy for inhibiting breast cancer in a patient;

[0093] 12) treating a patient afflicted with breast cancer;

[0094] 13) inhibiting breast cancer in a patient;

[0095] 14) assessing the carcinogenic potential of a test compound; and

[0096] 15) inhibiting breast cancer in a patient at risk for developing breast cancer.

[0097] The invention thus includes a method of assessing whether a patient is afflicted with breast cancer. This method comprises comparing the level of expression of a marker in a patient sample and the normal level of expression of the marker in a control, e.g., a non-breast cancer sample. A significant difference between the level of expression of the marker in the patient sample and the normal level is an indication that the patient is afflicted with breast cancer. The marker is selected from the group consisting of the markers listed in the Sequence Listing.

[0098] The polynucleotides set forth in the Sequence Listing represent previously unidentified nucleotide sequences. These nucleotide sequences were identified through subtracted library experiments described herein. Also provided by this invention are polynucleotides that correspond to the polynucleotides of the Sequence Listing. In one embodiment, these polynucleotides are obtained by identification of a larger fragment or full-length coding sequence of these polynucleotides. Gene delivery vehicles, host cells, compositions and databases (all describe herein) containing these polynucleotides are also provided by this invention.

[0099] The invention also encompasses polynucleotides which differ from that of the polynucleotides described above, but which produce the same phenotypic effect, e.g. allelic variants. These altered, but phenotypically equivalent polynucleotides are referred to “equivalent nucleic acids.” This invention also encompasses polynucleotides characterized by changes in non-coding regions that do not alter the polypeptide produced therefrom when compared to the polynucleotide herein. This invention further encompasses polynucleotides, which hybridize to the polynucleotides of the subject invention under conditions of moderate or high stringency. Alternatively, the polynucleotides are at least 85%, or at least 90%, or more preferably, greater or equal to 95% identical as determined by a sequence alignment program when run under default parameters.

[0100] Any marker or combination of markers listed in the Sequence Listing, as well as any known markers in combination with the markers set forth in the Sequence Listing, may be used in the compositions, kits, and methods of the present invention. In general, it is preferable to use markers for which the difference between the level of expression of the marker in breast cancer cells and the level of expression of the same marker in normal breast cells is as great as possible. Although this difference can be as small as the limit of detection of the method for assessing expression of the marker, it is preferred that the difference be at least greater than the standard error of the assessment method, and preferably a difference of at least 2-, 3-, 4-, 5-, 6-, 7-, 8-, 9-, 10-, 15-, 20-, 25-, 100-, 500-, 1000-fold or greater.

[0101] It is recognized that certain markers correspond to proteins which are secreted from breast cells (i.e. one or both of normal and cancerous cells) to the extracellular space surrounding the cells. These markers are preferably used in certain embodiments of the compositions, kits, and methods of the invention, owing to the fact that the protein corresponding to each of these markers can be detected in an breast-associated body fluid sample, which may be more easily collected from a human patient than a tissue biopsy sample. In addition, preferred in vivo techniques for detection of a protein corresponding to a marker of the invention include introducing into a subject a labeled antibody directed against the protein. For example, the antibody can be labeled with a radioactive marker whose presence and location in a subject can be detected by standard imaging techniques.

[0102] Although not every marker corresponding to a secreted protein is indicated as such herein, it is a simple matter for the skilled artisan to determine whether any particular marker corresponds to a secreted protein. In order to make this determination, the protein corresponding to a marker is expressed in a test cell (e.g. a cell of a breast cell line), extracellular fluid is collected, and the presence or absence of the protein in the extracellular fluid is assessed (e.g. using a labeled antibody which binds specifically with the protein).

[0103] The following is an example of a method which can be used to detect secretion of a protein corresponding to a marker of the invention. About 8×10⁵ 293T cells are incubated at 37° C. in wells containing growth medium (Dulbecco's modified Eagle's medium {DMEM} supplemented with 10% fetal bovine serum) under a 5% (v/v) CO₂, 95% air atmosphere to about 60-70% confluence. The cells are then transfected using a standard transfection mixture comprising 2 micrograms of DNA comprising an expression vector encoding the protein and 10 microliters of LipofectAMINE™ (GIBCO/BRL Catalog no. 18342-012) per well. The transfection mixture is maintained for about 5 hours, and then replaced with fresh growth medium and maintained in an air atmosphere. Each well is gently rinsed twice with DMEM which does not contain methionine or cysteine (DMEM-MC; ICN Catalog no. 16-424-54). About 1 milliliter of DMEM-MC and about 50 microcuries of Trans-³⁵S™ reagent (ICN Catalog no. 51006) are added to each well. The wells are maintained under the 5% CO₂ atmosphere described above and incubated at 37° C. for a selected period. Following incubation, 150 microliters of conditioned medium is removed and centrifuged to remove floating cells and debris. The presence of the protein in the supernatant is an indication that the protein is secreted.

[0104] Examples of breast-associated body fluids include blood fluids (e.g. whole blood, blood serum, blood having platelets removed therefrom, etc.), lymph, ascitic fluid, cystic fluid, urine and nipple aspirates. In these embodiments, the level of expression of the marker can be assessed by assessing the amount (e.g. absolute amount or concentration) of the marker in a breast-associated body fluid obtained from a patient. The fluid can, of course, be subjected to a variety of well-known post-collection preparative and storage techniques (e.g. storage, freezing, ultrafiltration, concentration, evaporation, centrifugation, etc.) prior to assessing the amount of the marker in the fluid.

[0105] Many breast-associated body fluids (i.e. usually excluding urine) can have breast cells therein, particularly when the breast cells are cancerous, and, more particularly, when the breast cancer is metastasizing. Thus, the compositions, kits, and methods of the invention can be used to detect expression of markers corresponding to proteins having at least one portion which is displayed on the surface of cells which express it. It is a simple matter for the skilled artisan to determine whether the protein corresponding to any particular marker comprises a cell-surface protein. For example, immunological methods may be used to detect such proteins on whole cells, or well known computer-based sequence analysis methods (e.g. the SIGNALP program; Nielsen et al., 1997, Protein Engineering 10:1-6) may be used to predict the presence of at least one extracellular domain (i.e. including both secreted proteins and proteins having at least one cell-surface domain). Expression of a marker corresponding to a protein having at least one portion which is displayed on the surface of a cell which expresses it may be detected without necessarily lysing the cell (e.g. using a labeled antibody which binds specifically with a cell-surface domain of the protein).

[0106] Expression of a marker of the invention may be assessed by any of a wide variety of well known methods for detecting expression of a transcribed molecule or protein. Non-limiting examples of such methods include immunological methods for detection of secreted, cell-surface, cytoplasmic, or nuclear proteins, protein purification methods, protein function or activity assays, nucleic acid hybridization methods, nucleic acid reverse transcription methods, and nucleic acid amplification methods.

[0107] In a preferred embodiment, expression of a marker is assessed using an antibody (e.g. a radio-labeled, chromophore-labeled, fluorophore-labeled, or enzyme-labeled antibody), an antibody derivative (e.g. an antibody conjugated with a substrate or with the protein or ligand of a protein-ligand pair {e.g. biotin-streptavidin}), or an antibody fragment (e.g. a single-chain antibody, an isolated antibody hypervariable domain, etc.) which binds specifically with a protein or a fragment thereof, corresponding to the marker, such as the protein encoded by the open reading frame corresponding to the marker or such a protein which has undergone all or a portion of its normal post-translational modification.

[0108] In another preferred embodiment, expression of a marker is assessed by preparing mRNA/cDNA (i.e. a transcribed polynucleotide) from cells in a patient sample, and by hybridizing the mRNA/cDNA with a reference polynucleotide which is a complement of a polynucleotide comprising the marker, and fragments thereof. cDNA can, optionally, be amplified using any of a variety of polymerase chain reaction methods prior to hybridization with the reference polynucleotide; preferably, it is not amplified. Expression of one or more markers can likewise be detected using quantitative PCR to assess the level of expression of the marker(s). Alternatively, any of the many known methods of detecting mutations or variants (e.g. single nucleotide polymorphisms, deletions, etc.) of a marker of the invention may be used to detect occurrence of a marker in a patient.

[0109] In a related embodiment, a mixture of transcribed polynucleotides obtained from the sample is contacted with a substrate having fixed thereto a polynucleotide complementary to or homologous with at least a portion (e.g. at least 7, 10, 15, 20, 25, 30, 40, 50, 100, 500, or more nucleotide residues) of a marker of the invention. If polynucleotides complementary to or homologous with are differentially detectable on the substrate (e.g. detectable using different chromophores or fluorophores, or fixed to different selected positions), then the levels of expression of a plurality of markers can be assessed simultaneously using a single substrate (e.g. a “gene chip” microarray of polynucleotides fixed at selected positions). When a method of assessing marker expression is used which involves hybridization of one nucleic acid with another, it is preferred that the hybridization be performed under stringent hybridization conditions.

[0110] Because the compositions, kits, and methods of the invention rely on detection of a difference in expression levels of one or more markers of the invention, it is preferable that the level of expression of the marker is significantly greater than the minimum detection limit of the method used to assess expression in at least one of normal breast cells and cancerous breast cells.

[0111] It is understood that by routine screening of additional patient samples using one or more of the markers of the invention, it will be realized that certain of the markers are over- or under-expressed in cancers of various types, including specific breast cancers, as well as other cancers such as ovarian cancer, cervical cancer, etc. For example, it will be confirmed that some of the markers of the invention are over- or under-expressed in most (i.e. 50% or more) or substantially all (i.e. 80% or more) of breast cancer. Furthermore, it will be confirmed that certain of the markers of the invention are associated with breast cancer of various stages (i.e. stage 0, I, II, II, and IV breast cancers, as well as subclassifications IIA, IIB, IIIA, and IIIB, using the FIGO Stage Grouping system for primary carcinoma of the breast; (see Breast, In: American Joint Committee on Cancer: AJCC Cancer Staging Manual. Lippincott-Raven Publishers, 5th ed., 1997, pp. 171-180), of various histologic subtypes (e.g. serous, mucinous, endometroid, and clear cell subtypes, as well as subclassifications and alternate classifications adenocarcinoma, papillary adenocarcinoma, papillary cystadenocarcinoma, surface papillary carcinoma, malignant adenofibroma, cystadenofibroma, adenocarcinoma, cystadenocarcinoma, adenoacanthoma, endometrioid stromal sarcoma, mesodermal (Müllerian) mixed tumor, mesonephroid tumor, malignant carcinoma, Brenner tumor, mixed epithelial tumor, and undifferentiated carcinoma, using the WHO/FIGO system for classification of malignant breast tumors; Scully, Atlas of Tumor Pathology, 3d series, Washington D.C.), and various grades (i.e. grade I {well differentiated}, grade II {moderately well differentiated}, and grade III {poorly differentiated from surrounding normal tissue})). In addition, as a greater number of patient samples are assessed for expression of the markers of the invention and the outcomes of the individual patients from whom the samples were obtained are correlated, it will also be confirmed that altered expression of certain of the markers of the invention are strongly correlated with malignant cancers and that altered expression of other markers of the invention are strongly correlated with benign tumors. The compositions, kits, and methods of the invention are thus useful for characterizing one or more of the stage, grade, histological type, and benign/malignant nature of breast cancer in patients. In addition, these compositions, kits, and methods can be used to detect and differentiate lobular and ductal carcinoma breast cancers.

[0112] When the compositions, kits, and methods of the invention are used for characterizing one or more of the stage, grade, histological type, and benign/malignant nature of breast cancer in a patient, it is preferred that the marker or panel of markers of the invention is selected such that a positive result is obtained in at least about 20%, and preferably at least about 40%, 60%, or 80%, and more preferably in substantially all patients afflicted with an breast cancer of the corresponding stage, grade, histological type, or benign/malignant nature. Preferably, the marker or panel of markers of the invention is selected such that a PPV of greater than about 10% is obtained for the general population (more preferably coupled with an assay specificity greater than 99.5%).

[0113] When a plurality of markers of the invention are used in the compositions, kits, and methods of the invention, the level of expression of each marker in a patient sample can be compared with the normal level of expression of each of the plurality of markers in non-cancerous samples of the same type, either in a single reaction mixture (i.e. using reagents, such as different fluorescent probes, for each marker) or in individual reaction mixtures corresponding to one or more of the markers. In one embodiment, a significantly enhanced level of expression of more than one of the plurality of markers in the sample, relative to the corresponding normal levels, is an indication that the patient is afflicted with breast cancer. In another embodiment, a significantly lower level of expression in the sample of each of the plurality of markers, relative to the corresponding normal levels, is an indication that the patient is afflicted with breast cancer. In yet another embodiment, a significantly enhanced level of expression of one or more markers and a significantly lower level of expression of one or more markers in a sample relative to the corresponding normal levels, is an indication that the patient is afflicted with breast cancer. When a plurality of markers is used, it is preferred that 2, 3, 4, 5, 8, 10, 12, 15, 20, 30, or 50 or more individual markers be used, wherein fewer markers are preferred.

[0114] In order to maximize the sensitivity of the compositions, kits, and methods of the invention (i.e. by interference attributable to cells of non-breast origin in a patient sample), it is preferable that the marker of the invention used therein be a marker which has a restricted tissue distribution, e.g., normally not expressed in a non-breast tissue.

[0115] Only a small number of markers are known to be associated with breast cancers (e.g. BRCA1 and BRCA2). These markers are not, of course, included among the markers of the invention, although they may be used together with one or more markers of the invention in a panel of markers, for example. It is well known that certain types of genes, such as oncogenes, tumor suppressor genes, growth factor-like genes, protease-like genes, and protein kinase-like genes are often involved with development of cancers of various types. Thus, among the markers of the invention, use of those which correspond to proteins which resemble known proteins encoded by known oncogenes and tumor suppressor genes, and those which correspond to proteins which resemble growth factors, proteases, and protein kinases are preferred.

[0116] Known oncogenes and tumor suppressor genes include, for example, abl, abr, akt2, apc, bcl2α, bcl2β, bcl3, bcr, brca1, brca2, cbl, ccnd1, cdc42, cdk4, crk-II, csf1r/fms, dbl, dcc, dpc4/smad4, e-cad, e2fl/rbap, egfr/erbb-1, elk1, elk3, eph, erg, ets1, ets2, fer, fgr/src2, fli1/ergb2, fos, fps/fes, fra1, fra2, fyn, hck, hek, her2/erbb-2/neu, her3/erbb-3, her4/erbb-4, hras1, hst2, hstf1, igfbp2, ink4a, ink4b, int2/fgf3, jun, junb, jund, kip2, kit, kras2a, kras2b, lck, lyn, mas, max, mcc, mdm2, met, mlh1, mmp10, mos, msh2, msh3, msh6, myb, myba, mybb, myc, mycl1, mycn, nf1, nf2, nme2, nras, p53, pdgfb, phb, pim1, pms1, pms2, ptc, pten, raf1, rap1a, rb1, rel, ret, ros1, ski, src1, tal1, tgfbr2, tgfb3, tgfbr3, thra1, thrb, tiam1, timp3, tjp1, tp53, trk, vav, vhl, vil2, waf1, wnt1, wnt2, wt1, and yes1 (Hesketh, 1997, In: The Oncogene and Tumour Suppressor Gene Facts Book, 2nd Ed., Academic Press; Fishel et al., 1994, Science 266:1403-1405).

[0117] Known growth factors include platelet-derived growth factor alpha, platelet-derived growth factor beta (simian sarcoma viral {v-sis} oncogene homolog), thrombopoietin (myeloproliferative leukemia virus oncogene ligand, megakaryocyte growth and development factor), erythropoietin, B cell growth factor, macrophage stimulating factor 1 (hepatocyte growth factor-like protein), hepatocyte growth factor (hepapoietin A), insulin-like growth factor 1 (somatomedia C), hepatoma-derived growth factor, amphiregulin (schwannoma-derived growth factor), bone morphogenetic proteins 1, 2, 3, 3 beta, and 4, bone morphogenetic protein 7 (osteogenic protein 1), bone morphogenetic protein 8 (osteogenic protein 2), connective tissue growth factor, connective tissue activation peptide 3, epidermal growth factor (EGF), teratocarcinoma-derived growth factor 1, endothelin, endothelin 2, endothelin 3, stromal cell-derived factor 1, vascular endothelial growth factor (VEGF), VEGF-B, VEGF-C, placental growth factor (vascular endothelial growth factor-related protein), transforming growth factor alpha, transforming growth factor beta 1 and its precursors, transforming growth factor beta 2 and its precursors, fibroblast growth factor 1 (acidic), fibroblast growth factor 2 (basic), fibroblast growth factor 5 and its precursors, fibroblast growth factor 6 and its precursors, fibroblast growth factor 7 (keratinocyte growth factor), fibroblast growth factor 8 (androgen-induced), fibroblast growth factor 9 (glia-activating factor), pleiotrophin (heparin binding growth factor 8, neurite growth-promoting factor 1), brain-derived neurotrophic factor, and recombinant glial growth factor 2.

[0118] Known proteases include interleukin-1 beta convertase and its precursors, Mch6 and its precursors, Mch2 isoform alpha, Mch4, Cpp32 isoform alpha, Lice2 gamma cysteine protease, Ich-1S, Ich-1L, Ich-2 and its precursors, TY protease, matrix metalloproteinase 1 (interstitial collagenase), matrix metalloproteinase 2 (gelatinase A, 72 kD gelatinase, 72 kD type IV collagenase), matrix metalloproteinase 7 (matrilysin), matrix metalloproteinase 8 (neutrophil collagenase), matrix metalloproteinase 12 (macrophage elastase), matrix metalloproteinase 13 (collagenase 3), metallopeptidase 1, cysteine-rich metalloprotease (disintegrin) and its precursors, subtilisin-like protease Pc8 and its precursors, chymotrypsin, snake venom-like protease, cathepsin 1, cathepsin D (lysosomal aspartyl protease), stromelysin, aminopeptidase N, plasminogen, tissue plasminogen activator, plasminogen activator inhibitor type II, and urokinase-type plasminogen activator.

[0119] Known protein kinases include DAP kinase, serine/threonine protein kinases NIK, PK428, Krs-2, SAK, and EMK, interferon-inducible double stranded RNA dependent protein kinase, FAST kinase, AIM1, IPL1-like midbody-associated protein kinase-1, NIMA-like protein kinase 1 (NLK1), the cyclin-dependent kinases (cdk1-10), checkpoint kinase Chk1, Nek3 protein kinase, BMK1 beta kinase, Clk1, Clk2, Clk3, extracellular signal-regulated kinases 1, 3, and 6, cdc28 protein kinase 1, cdc28 protein kinase 2, pLK, Myt1, c-Jun N-terminal kinase 2, Cam kinase 1, the MAP kinases, insulin-stimulated protein kinase 1, beta-adrenergic receptor kinase 2, ribosomal protein S6 kinase, kinase suppressor of ras-1 (KSR1), putative serine/threonine protein kinase Prk, PkB kinase, cAMP-dependent protein kinase, cGMP-dependent protein kinase, type II cGMP-dependent protein kinase, protein kinases Dyrk2, Dyrk3, and Dyrk4, Rho-associated coiled-coil containing protein kinase p160ROCK, protein tyrosine kinase t-Ror1, Ste20-related kinases, cell adhesion kinase beta, protein kinase 3, stress-activated protein kinase 4, protein kinase Zpk, serine kinase hPAK65, dual specificity mitogen-activated protein kinases 1 and 2, casein kinase I gamma 2, p21-activated protein kinase Pak1, lipid-activated protein kinase PRK2, focal adhesion kinase, dual-specificity tyrosine-phosphorylation regulated kinase, myosin light chain kinase, serine kinases SRPK2, TESK1, and VRK2, B lymphocyte serine/threonine protein kinase, stress-activated protein kinases JNK1 and JNK2, phosphorylase kinase, protein tyrosine kinase Tec, Jak2 kinase, protein kinase Ndr, MEK kinase 3, SHB adaptor protein (a Src homology 2 protein), agammaglobulinaemia protein-tyrosine kinase (Atk), protein kinase ATR, guanylate kinase 1, thrombopoeitin receptor and its precursors, DAG kinase epsilon, and kinases encoded by oncogenes or viral oncogenes such as v-fgr (Gardner-Rasheed), v-abl (Abelson murine leukemia viral oncogene homolog 1), v-arg (Abelson murine leukemia viral oncogene homolog, Abelson-related gene), v-fes and v-fps (feline sarcoma viral oncogene and Fujinami avian sarcoma viral oncogene homologs), proto-oncogene c-cot, oncogene pim-1, and oncogene mas1.

[0120] It is recognized that the compositions, kits, and methods of the invention will be of particular utility to patients having an enhanced risk of developing breast cancer and their medical advisors. Patients recognized as having an enhanced risk of developing breast cancer include, for example, patients having a familial history of breast cancer, patients identified as having a mutant oncogene (i.e. at least one allele), and patients of advancing age (i.e. women older than about 50 or 60 years).

[0121] The level of expression of a marker in normal (i.e. non-cancerous) human breast tissue can be assessed in a variety of ways. In one embodiment, this normal level of expression is assessed by assessing the level of expression of the marker in a portion of breast cells which appears to be non-cancerous and by comparing this normal level of expression with the level of expression in a portion of the breast cells which is suspected of being cancerous. For example, when mammography or other medical procedure, reveals the presence of a lump in a patient's breast, the normal level of expression of a marker may be assessed using the non-affected breast tissue, and this normal level of expression may be compared with the level of expression of the same marker in an affected portion (i.e. the lump) of the affected breast. Alternately, and particularly as further information becomes available as a result of routine performance of the methods described herein, population-average values for normal expression of the markers of the invention may be used. In other embodiments, the ‘normal’ level of expression of a marker may be determined by assessing expression of the marker in a patient sample obtained from a non-cancer-afflicted patient, from a patient sample obtained from a patient before the suspected onset of breast cancer in the patient, from archived patient samples, and the like.

[0122] The invention includes compositions, kits, and methods for assessing the presence of breast cancer cells in a sample (e.g. an archived tissue sample or a sample obtained from a patient). These compositions, kits, and methods are substantially the same as those described above, except that, where necessary, the compositions, kits, and methods are adapted for use with samples other than patient samples. For example, when the sample to be used is a parafinized, archived human tissue sample, it can be necessary to adjust the ratio of compounds in the compositions of the invention, in the kits of the invention, or the methods used to assess levels of marker expression in the sample. Such methods are well known in the art and within the skill of the ordinary artisan.

[0123] The invention includes a kit for assessing the presence of breast cancer cells (e.g. in a sample such as a patient sample). The kit comprises a plurality of reagents, each of which is capable of binding specifically with a nucleic acid or polypeptide corresponding to a marker of the invention. Suitable reagents for binding with a polypeptide corresponding to a marker of the invention include antibodies, antibody derivatives, antibody fragments, and the like. Suitable reagents for binding with a nucleic acid (e.g. a genomic DNA, an mRNA, a spliced mRNA, a cDNA, or the like) include complementary nucleic acids. For example, the nucleic acid reagents may include oligonucleotides (labeled or non-labeled) fixed to a substrate, labeled oligonucleotides not bound with a substrate, pairs of PCR primers, molecular beacon probes, and the like.

[0124] The kit of the invention may optionally comprise additional components useful for performing the methods of the invention. By way of example, the kit may comprise fluids (e.g. SSC buffer) suitable for annealing complementary nucleic acids or for binding an antibody with a protein with which it specifically binds, one or more sample compartments, an instructional material which describes performance of a method of the invention, a sample of normal breast cells, a sample of breast cancer cells, and the like.

[0125] The invention also includes a method of making an isolated hybridoma which produces an antibody useful for assessing whether patient is afflicted with breast cancer. In this method, a protein corresponding to a marker of the invention is isolated (e.g. by purification from a cell in which it is expressed or by transcription and translation of a nucleic acid encoding the protein in vivo or in vitro using known methods). A vertebrate, preferably a mammal such as a mouse, rat, rabbit, or sheep, is immunized using the isolated protein or protein fragment. The vertebrate may optionally (and preferably) be immunized at least one additional time with the isolated protein or protein fragment, so that the vertebrate exhibits a robust immune response to the protein or protein fragment. Splenocytes are isolated from the immunized vertebrate and fused with an immortalized cell line to form hybridomas, using any of a variety of methods well known in the art. Hybridomas formed in this manner are then screened using standard methods to identify one or more hybridomas which produce an antibody which specifically binds with the protein or protein fragment. The invention also includes hybridomas made by this method and antibodies made using such hybridomas.

[0126] The invention also includes a method of assessing the efficacy of a test compound for inhibiting breast cancer cells. As described above, differences in the level of expression of the markers of the invention correlate with the cancerous state of breast cells. Although it is recognized that changes in the levels of expression of certain of the markers of the invention likely result from the cancerous state of breast cells, it is likewise recognized that changes in the levels of expression of other of the markers of the invention induce, maintain, and promote the cancerous state of those cells. Thus, compounds which inhibit breast cancer in a patient will cause the level of expression of one or more of the markers of the invention to change to a level nearer the normal level of expression for that marker (i.e. the level of expression for the marker in non-cancerous breast cells).

[0127] This method thus comprises comparing expression of a marker in a first breast cell sample and maintained in the presence of the test compound and expression of the marker in a second breast cell sample and maintained in the absence of the test compound. A significant alteration in the level of expression of a marker listed in the Sequence Listing, may be is an indication that the test compound inhibits breast cancer (e.g., decreases in expression in those markers that are over-expressed in breast cancer cells or more aggressive breast cancer cells and breast cancer cells from patients with poor clinical outcome or increases expression in those markers that are under-expressed in breast cancer cells or in more aggressive breast cancer cells or breast cancer cells from patients with poor clinical outcome. The breast cell samples may, for example, be aliquots of a single sample of normal breast cells obtained from a patient, pooled samples of normal breast cells obtained from a patient, cells of a normal breast cell line, aliquots of a single sample of breast cancer cells obtained from a patient, pooled samples of breast cancer cells obtained from a patient, cells of a breast cancer cell line, or the like. In one embodiment, the samples are breast cancer cells obtained from a patient and a plurality of compounds known to be effective for inhibiting various breast cancers are tested in order to identify the compound which is likely to best inhibit the breast cancer in the patient.

[0128] This method may likewise be used to assess the efficacy of a therapy for inhibiting breast cancer in a patient. In this method, the level of expression of one or more markers of the invention in a pair of samples (one subjected to the therapy, the other not subjected to the therapy) is assessed. As with the method of assessing the efficacy of test compounds, if the therapy induces a significant alteration in the level of expression of a marker listed in the Sequence Listing, or blocks induction of a marker listed in the Sequence Listing, then the therapy may be efficacious for inhibiting breast cancer. As above, if samples from a selected patient are used in this method, then alternative therapies can be assessed in vitro in order to select a therapy most likely to be efficacious for inhibiting breast cancer in the patient.

[0129] As described herein, breast cancer in patients is associated with levels of expression of one or more markers listed in the Sequence Listing. While, as discussed above, some of these changes in expression level result from occurrence of the breast cancer, others of these changes induce, maintain, and promote the cancerous state of breast cancer cells. Thus, breast cancer characterized by an alteration in the level of expression of one or more markers listed in the Sequence Listing can be inhibited by hampering or increasing expression of those markers.

[0130] Expression of a marker listed in the Sequence Listing can be inhibited in a number of ways generally known in the art. For example, an antisense oligonucleotide can be provided to the breast cancer cells in order to inhibit transcription, translation, or both, of the marker(s). Alternately, a polynucleotide encoding an antibody, an antibody derivative, or an antibody fragment, and operably linked with an appropriate promoter/regulator region, can be provided to the cell in order to generate intracellular antibodies which will inhibit the function or activity of the protein corresponding to the marker(s). Using the methods described herein, a variety of molecules, particularly including molecules sufficiently small that they are able to cross the cell membrane, can be screened in order to identify molecules which inhibit expression of the marker(s). The compound so identified can be provided to the patient in order to inhibit expression of the marker(s) in the breast cancer cells of the patient.

[0131] Expression of a marker listed within the Sequence Listing can be enhanced in number of ways generally known in the art. For example, a polynucleotide encoding the marker and operably linked with an appropriate promoter/regulator region can be provided to breast cancer cells of the patient in order to induce enhanced expression of the protein (and mRNA) corresponding to the marker therein. Alternatively, if the protein is capable of crossing the cell membrane, inserting itself in the cell membrane, or is normally a secreted protein, then expression of the protein can be enhanced by providing the protein (e.g. directly or by way of the bloodstream or another breast-associated fluid) to breast cancer cells in the patient.

[0132] As described above, the cancerous state of human breast cells is correlated with changes in the levels of expression of the markers of the invention. The invention thus includes a method for assessing the human breast cell carcinogenic potential of a test compound. This method comprises maintaining separate aliquots of human breast cells in the presence and absence of the test compound. Expression of a marker of the invention in each of the aliquots is compared. A significant alteration in the level of expression of a marker listed in the Sequence Listing in the aliquot maintained in the presence of the test compound (relative to the aliquot maintained in the absence of the test compound) may be an indication that the test compound possesses human breast cell carcinogenic potential. The relative carcinogenic potentials of various test compounds can be assessed by comparing the degree of enhancement or inhibition of the level of expression of the relevant markers, by comparing the number of markers for which the level of expression is enhanced or inhibited, or by comparing both.

[0133] Various aspects of the invention are described in further detail in the following subsections.

[0134] I. Isolated Nucleic Acid Molecules

[0135] One aspect of the invention pertains to novel isolated nucleic acid molecules that correspond to a marker of the invention, including nucleic acids which encode a polypeptide corresponding to a marker of the invention or a portion of such a polypeptide. Isolated nucleic acids of the invention also include nucleic acid molecules sufficient for use as hybridization probes to identify nucleic acid molecules that correspond to a marker of the invention, including nucleic acids which encode a polypeptide corresponding to a marker of the invention, and fragments of such nucleic acid molecules, e.g., those suitable for use as PCR primers for the amplification or mutation of nucleic acid molecules. As used herein, the term “nucleic acid molecule” is intended to include DNA molecules (e.g., cDNA or genomic DNA) and RNA molecules (e.g., mRNA) and analogs of the DNA or RNA generated using nucleotide analogs. The nucleic acid molecule can be single-stranded or double-stranded, but preferably is double-stranded DNA.

[0136] An “isolated” nucleic acid molecule is one which is separated from other nucleic acid molecules which are present in the natural source of the nucleic acid molecule. Preferably, an “isolated” nucleic acid molecule is free of sequences (preferably protein-encoding sequences) which naturally flank the nucleic acid (i.e., sequences located at the 5′ and 3′ ends of the nucleic acid) in the genomic DNA of the organism from which the nucleic acid is derived. For example, in various embodiments, the isolated nucleic acid molecule can contain less than about 5 kB, 4 kB, 3 kB, 2 kB, 1 kB, 0.5 kB or 0.1 kB of nucleotide sequences which naturally flank the nucleic acid molecule in genomic DNA of the cell from which the nucleic acid is derived. Moreover, an “isolated” nucleic acid molecule, such as a cDNA molecule, can be substantially free of other cellular material, or culture medium when produced by recombinant techniques, or substantially free of chemical precursors or other chemicals when chemically synthesized.

[0137] A nucleic acid molecule of the present invention, e.g., a nucleic acid encoding a protein corresponding to a marker listed in the Sequence Listing, can be isolated using standard molecular biology techniques and the sequence information in the database records described herein. Using all or a portion of such nucleic acid sequences, nucleic acid molecules of the invention can be isolated using standard hybridization and cloning techniques (e.g., as described in Sambrook et al., ed., Molecular Cloning: A Laboratory Manual, 2nd ed., Cold Spring Harbor Laboratory Press, Cold Spring Harbor, N.Y., 1989).

[0138] A process for identifying a larger fragment or the full-length coding sequence of a marker of the present invention is thus also provided. Any conventional recombinant DNA techniques applicable for isolating polynucleotides may also be employed. One such method involves the 5′-RACE-PCR technique, in which the poly-A mRNA that contains the coding sequence of particular interest is first reverse transcribed with a 3′-primer comprising a sequence disclosed herein. The newly synthesized cDNA strand is then tagged with an anchor primer with a known sequence, which preferably contains a convenient cloning restriction site attached at the 5′end. The tagged cDNA is then amplified with the 3′-primer (or a nested primer sharing sequence homology to the internal sequences of the coding region) and the 5′-anchor primer. The amplification may be conducted under conditions of various levels of stringency to optimize the amplification specificity. 5′-RACE-PCR can be readily performed using commercial kits (available from, e.g., BRL Life Technologies Inc., Clontech) according to the manufacturer's instructions.

[0139] Isolating the complete coding sequence of a gene can also be carried out in a hybridization assay using a suitable probe. The probe preferably comprises at least 10 nucleotides, and more preferably exhibits sequence homology to the polynucleotides of the markers of the present invention. Other high throughput screens for cDNAs, such as those involving gene chip technology, can also be employed in obtaining the complete cDNA sequence.

[0140] In addition, databases exist that reduce the complexity of ESTs by assembling contiguous EST sequences into tentative genes. For example, TIGR has assembled human ESTs into a datable called THC for tentative human consensus sequences. The THC database allows for a more definitive assignment compared to ESTs alone. Software programs exist (TIGR assembler and TIGEM EST assembly machine and contig assembly program (see Huang, X., 1996, Genomes 33:21-23)) that allow for assembling ESTs into contiguous sequences from any organism.

[0141] Alternatively, mRNA from a sample preparation is used to construct cDNA library in the ZAP Express vector following the procedure described in Velculescu et al., 1997, Science 270:484. The ZAP Express cDNA synthesis kit (Stratagene) is used accordingly to the manufacturer's protocol. Plates containing 250 to 2000 plaques are hybridized as described in Rupert et al., 1988, Mol. Cell. Bio. 8:3104 to oligonucleotide probes with the same conditions previously described for standard probes except that the hybridization temperature is reduced to a room temperature. Washes are performed in 6×standard-saline-citrate 0.1% SDS for 30 minutes at room temperature. The probes are labeled with ³²P-ATP trough use of T4 polynucleotide kinase.

[0142] A partial cDNA (3′ fragment) can be isolated by 3′ directed PCR reaction. This procedure is a modification of the protocol described in Polyak et al., 1997, Nature 389:300. Briefly, the procedure uses SAGE tags in PCR reaction such that the resultant PCR product contains the SAGE tag of interest as well as additional cDNA, the length of which is defined by the position of the tag with respect to the 3′ end of the cDNA. The cDNA product derived from such a transcript driven PCR reaction can be used for many applications.

[0143] RNA from a source to express the cDNA corresponding to a given tag is first converted to double-stranded cDNA using any standard cDNA protocol. Similar conditions used to generate cDNA for SAGE library construction can be employed except that a modified oligo-dT primer is used to derive the first strand synthesis. For example, the oligonucleotide of composition 5′-B-TCC GGC GCG CCG TTT TCC CAG TCA CGA(30)-3′, contains a poly-T stretch at the 3′ end for hybridization and priming from poly-A tails, an M13 priming site for use in subsequent PCR steps, a 5′ Biotin label (B) for capture to strepavidin-coated magnetic beads, and an AscI restriction endonuclease site for releasing the cDNA from the strepavidin-coated magnetic beads. Theoretically, any sufficiently-sized DNA region capable of hybridizing to a PCR primer can be used as well as any other 8 base pair recognizing endonuclease.

[0144] cDNA constructed utilizing this or similar modified oligo-dT primer is then processed exactly as described in U.S. Pat. No. 5,695,937 up until adapter ligation where only one adapter is ligated to the cDNA pool. After Adapter ligation, the cDNA is released from the streptavidin-coated magnetic beads and is then used as a template for cDNA amplification.

[0145] Various PCR protocols can be employed using PCR priming sites within the 3′ modified oligo-dT primer and the SAGE tag. The SAGE tag-derived PCR primer employed can be of varying length dictated by 5′ extension of the tag into the adaptor sequence. cDNA products are now available for a variety of applications.

[0146] This technique can be further modified by: (1) altering the length and/or content of the modified oligo-dT primer; (2) ligating adaptors other than that previously employed within the SAGE protocol; (3) performing PCR from template retained on the streptavidin-coated magnetic beads; and (4) priming first strand cDNA synthesis with non-oligo-dT based primers.

[0147] Gene trapper technology can also be used. The reagents and manufacturer's instructions for this technology are commercially available from Life Technologies, Inc., Gaithsburg, Md. Briefly, a complex population of single-stranded phagemid DNA containing directional cDNA inserts is enriched for the target sequence by hybridization in solution to a biotinylated oligonucleotide probe complementary to the target sequence. The hybrids are captured on streptavidin-coated paramagnetic beads. A magnet retrieves the paramagnetic beads from the solution, leaving nonhybridized single-stranded DNAs behind. Subsequently, the captured single-stranded DNA target is released from the biotinylated oligonucleotide. After release, the cDNA clone is further enriched by using a nonbiotinylated target oligonucleotide to specifically prime conversion of the single-stranded DNA. Following transformation and plating, typically 20% to 100% of the colonies represent the cDNA clone of interest. To identify the desired cDNA clone, the colonies may be screened by colony hybridization using the ³²P-labeled oligonucleotide as described above for solution hybridization, or alternatively by DNA sequencing and alignment of all sequences obtained from numerous clones to determine a consensus sequence.

[0148] A nucleic acid molecule of the invention can be amplified using cDNA, mRNA, or genomic DNA as a template and appropriate oligonucleotide primers according to standard PCR amplification techniques. The nucleic acid so amplified can be cloned into an appropriate vector and characterized by DNA sequence analysis. Furthermore, oligonucleotides corresponding to all or a portion of a nucleic acid molecule of the invention can be prepared by standard synthetic techniques, e.g., using an automated DNA synthesizer.

[0149] In another preferred embodiment, an isolated nucleic acid molecule of the invention comprises a nucleic acid molecule which has a nucleotide sequence complementary to the nucleotide sequence of a nucleic acid corresponding to a marker of the invention or to the nucleotide sequence of a nucleic acid encoding a protein which corresponds to a marker of the invention. A nucleic acid molecule which is complementary to a given nucleotide sequence is one which is sufficiently complementary to the given nucleotide sequence that it can hybridize to the given nucleotide sequence thereby forming a stable duplex.

[0150] Moreover, a nucleic acid molecule of the invention can comprise only a portion of a nucleic acid sequence, wherein the full length nucleic acid sequence comprises a marker of the invention or which encodes a polypeptide corresponding to a marker of the invention. Such nucleic acids can be used, for example, as a probe or primer. The probe/primer typically is used as one or more substantially purified oligonucleotides. The oligonucleotide typically comprises a region of nucleotide sequence that hybridizes under stringent conditions to at least about 7, preferably about 15, more preferably about 25, 50, 75, 100, 125, 150, 175, 200, 250, 300, 350, or 400 or more consecutive nucleotides of a nucleic acid of the invention.

[0151] Probes based on the sequence of a nucleic acid molecule of the invention can be used to detect transcripts or genomic sequences corresponding to one or more markers of the invention. The probe comprises a label group attached thereto, e.g., a radioisotope, a fluorescent compound, an enzyme, or an enzyme co-factor. Such probes can be used as part of a diagnostic test kit for identifying cells or tissues which mis-express express the protein, such as by measuring levels of a nucleic acid molecule encoding the protein in a sample of cells from a subject, e.g., detecting mRNA levels or determining whether a gene encoding the protein has been mutated or deleted.

[0152] The invention further encompasses nucleic acid molecules that differ, due to degeneracy of the genetic code, from the nucleotide sequence of nucleic acids encoding a protein which corresponds to a marker of the invention, and thus encode the same protein.

[0153] In addition to the nucleotide sequences described herein, it will be appreciated by those skilled in the art that DNA sequence polymorphisms that lead to changes in the amino acid sequence can exist within a population (e.g., the human population). Such genetic polymorphisms can exist among individuals within a population due to natural allelic variation. An allele is one of a group of genes which occur alternatively at a given genetic locus. In addition, it will be appreciated that DNA polymorphisms that affect RNA expression levels can also exist that may affect the overall expression level of that gene (e.g., by affecting regulation or degradation).

[0154] As used herein, the phrase “allelic variant” refers to a nucleotide sequence which occurs at a given locus or to a polypeptide encoded by the nucleotide sequence.

[0155] As used herein, the terms “gene” and “recombinant gene” refer to nucleic acid molecules comprising an open reading frame encoding a polypeptide corresponding to a marker of the invention. Such natural allelic variations can typically result in 1-5% variance in the nucleotide sequence of a given gene. Alternative alleles can be identified by sequencing the gene of interest in a number of different individuals. This can be readily carried out by using hybridization probes to identify the same genetic locus in a variety of individuals. Any and all such nucleotide variations and resulting amino acid polymorphisms or variations that are the result of natural allelic variation and that do not alter the functional activity are intended to be within the scope of the invention.

[0156] In another embodiment, an isolated nucleic acid molecule of the invention is at least 7, 15, 20, 25, 30, 40, 60, 80, 100, 150, 200, 250, 300, 350, 400, 450, 550, 650, 700, 800, 900, 1000, 1200, 1400, 1600, 1800, 2000, 2200, 2400, 2600, 2800, 3000, 3500, 4000, 4500, or more nucleotides in length and hybridizes under stringent conditions to a nucleic acid corresponding to a marker of the invention or to a nucleic acid encoding a protein corresponding to a marker of the invention. As used herein, the term “hybridizes under stringent conditions” is intended to describe conditions for hybridization and washing under which nucleotide sequences at least 75% (80%, 85%, preferably 90%) identical to each other typically remain hybridized to each other. Such stringent conditions are known to those skilled in the art and can be found in sections 6.3.1-6.3.6 of Current Protocols in Molecular Biology, John Wiley & Sons, N.Y. (1989). A preferred, non-limiting example of stringent hybridization conditions for annealing two single-stranded DNA each of which is at least about 100 bases in length and/or for annealing a single-stranded DNA and a single-stranded RNA each of which is at least about 100 bases in length, are hybridization in 6×sodium chloride/sodium citrate (SSC) at about 45° C., followed by one or more washes in 0.2×SSC, 0.1% SDS at 50-65° C. Further preferred hybridization conditions are taught in Lockhart, et al., Nature Biotechnology, Volume 14, 1996 August:1675-1680; Breslauer, et al., Proc. Natl. Acad. Sci. USA, Volume 83, 1986 June: 3746-3750; Van Ness, et al., Nucleic Acids Research, Volume 19, No. 19, 1991 September: 5143-5151; McGraw, et al., BioTechniques, Volume 8, No. 6 1990: 674-678; and Milner, et al., Nature Biotechnology, Volume 15, 1997 June: 537-541, all expressly incorporated by reference.

[0157] In addition to naturally-occurring allelic variants of a nucleic acid molecule of the invention that can exist in the population, the skilled artisan will further appreciate that sequence changes can be introduced by mutation thereby leading to changes in the amino acid sequence of the encoded protein, without altering the biological activity of the protein encoded thereby. For example, one can make nucleotide substitutions leading to amino acid substitutions at “non-essential” amino acid residues. A “non-essential” amino acid residue is a residue that can be altered from the wild-type sequence without altering the biological activity, whereas an “essential” amino acid residue is required for biological activity. For example, amino acid residues that are not conserved or only semi-conserved among homologs of various species may be non-essential for activity and thus would be likely targets for alteration. Alternatively, amino acid residues that are conserved among the homologs of various species (e.g., murine and human) may be essential for activity and thus would not be likely targets for alteration.

[0158] Accordingly, another aspect of the invention pertains to nucleic acid molecules encoding a polypeptide of the invention that contain changes in amino acid residues that are not essential for activity. Such polypeptides differ in amino acid sequence from the naturally-occurring proteins which correspond to the markers of the invention, yet retain biological activity. In one embodiment, such a protein has an amino acid sequence that is at least about 40% identical, 50%, 60%, 70%, 80%, 90%, 95%, or 98% identical to the amino acid sequence of one of the proteins which correspond to the markers of the invention.

[0159] An isolated nucleic acid molecule encoding a variant protein can be created by introducing one or more nucleotide substitutions, additions or deletions into the nucleotide sequence of nucleic acids of the invention, such that one or more amino acid residue substitutions, additions, or deletions are introduced into the encoded protein. Mutations can be introduced by standard techniques, such as site-directed mutagenesis and PCR-mediated mutagenesis. Preferably, conservative amino acid substitutions are made at one or more predicted non-essential amino acid residues. A “conservative amino acid substitution” is one in which the amino acid residue is replaced with an amino acid residue having a similar side chain. Families of amino acid residues having similar side chains have been defined in the art. These families include amino acids with basic side chains (e.g., lysine, arginine, histidine), acidic side chains (e.g., aspartic acid, glutamic acid), uncharged polar side chains (e.g., glycine, asparagine, glutamine, serine, threonine, tyrosine, cysteine), non-polar side chains (e.g., alanine, valine, leucine, isoleucine, proline, phenylalanine, methionine, tryptophan), beta-branched side chains (e.g., threonine, valine, isoleucine) and aromatic side chains (e.g., tyrosine, phenylalanine, tryptophan, histidine). Alternatively, mutations can be introduced randomly along all or part of the coding sequence, such as by saturation mutagenesis, and the resultant mutants can be screened for biological activity to identify mutants that retain activity. Following mutagenesis, the encoded protein can be expressed recombinantly and the activity of the protein can be determined.

[0160] The present invention encompasses antisense nucleic acid molecules, i.e., molecules which are complementary to a sense nucleic acid of the invention, e.g., complementary to the coding strand of a double-stranded cDNA molecule corresponding to a marker of the invention or complementary to an mRNA sequence corresponding to a marker of the invention. Accordingly, an antisense nucleic acid of the invention can hydrogen bond to (i.e. anneal with) a sense nucleic acid of the invention. The antisense nucleic acid can be complementary to an entire coding strand, or to only a portion thereof, e.g., all or part of the protein coding region (or open reading frame). An antisense nucleic acid molecule can also be antisense to all or part of a non-coding region of the coding strand of a nucleotide sequence encoding a polypeptide of the invention. The non-coding regions (“5′ and 3′ untranslated regions”) are the 5′ and 3′ sequences which flank the coding region and are not translated into amino acids.

[0161] An antisense oligonucleotide can be, for example, about 5, 10, 15, 20, 25, 30, 35, 40, 45, or 50 or more nucleotides in length. An antisense nucleic acid of the invention can be constructed using chemical synthesis and enzymatic ligation reactions using procedures known in the art. For example, an antisense nucleic acid (e.g., an antisense oligonucleotide) can be chemically synthesized using naturally occurring nucleotides or variously modified nucleotides designed to increase the biological stability of the molecules or to increase the physical stability of the duplex formed between the antisense and sense nucleic acids, e.g., phosphorothioate derivatives and acridine substituted nucleotides can be used. Examples of modified nucleotides which can be used to generate the antisense nucleic acid include 5-fluorouracil, 5-bromouracil, 5-chlorouracil, 5-iodouracil, hypoxanthine, xanthine, 4-acetylcytosine, 5-(carboxyhydroxylmethyl)uracil, 5-carboxymethylaminomethyl-2-thiouridine, 5-carboxymethylaminomethyluracil, dihydrouracil, beta-D-galactosylqueosine, inosine, N6-isopentenyladenine, 1-methylguanine, 1-methylinosine, 2,2-dimethylguanine, 2-methyladenine, 2-methylguanine, 3-methylcytosine, 5-methylcytosine, N6-adenine, 7-methylguanine, 5-methylaminomethyluracil, 5-methoxyaminomethyl-2-thiouracil, beta-D-mannosylqueosine, 5′-methoxycarboxymethyluracil, 5-methoxyuracil, 2-methylthio-N6-isopentenyladenine, uracil-5-oxyacetic acid (v), wybutoxosine, pseudouracil, queosine, 2-thiocytosine, 5-methyl-2-thiouracil, 2-thiouracil, 4-thiouracil, 5-methyluracil, uracil-5-oxyacetic acid methylester, uracil-5-oxyacetic acid (v), 5-methyl-2-thiouracil, 3-(3-amino-3-N-2-carboxypropyl)uracil, (acp3)w, and 2,6-diaminopurine. Alternatively, the antisense nucleic acid can be produced biologically using an expression vector into which a nucleic acid has been sub-cloned in an antisense orientation (i.e., RNA transcribed from the inserted nucleic acid will be of an antisense orientation to a target nucleic acid of interest, described further in the following subsection).

[0162] The antisense nucleic acid molecules of the invention are typically administered to a subject or generated in situ such that they hybridize with or bind to cellular mRNA and/or genomic DNA encoding a polypeptide corresponding to a selected marker of the invention to thereby inhibit expression of the marker, e.g., by inhibiting transcription and/or translation. The hybridization can be by conventional nucleotide complementarity to form a stable duplex, or, for example, in the case of an antisense nucleic acid molecule which binds to DNA duplexes, through specific interactions in the major groove of the double helix. Examples of a route of administration of antisense nucleic acid molecules of the invention includes direct injection at a tissue site or infusion of the antisense nucleic acid into an breast-associated body fluid. Alternatively, antisense nucleic acid molecules can be modified to target selected cells and then administered systemically. For example, for systemic administration, antisense molecules can be modified such that they specifically bind to receptors or antigens expressed on a selected cell surface, e.g., by linking the antisense nucleic acid molecules to peptides or antibodies which bind to cell surface receptors or antigens. The antisense nucleic acid molecules can also be delivered to cells using the vectors described herein. To achieve sufficient intracellular concentrations of the antisense molecules, vector constructs in which the antisense nucleic acid molecule is placed under the control of a strong pol II or pol III promoter are preferred.

[0163] An antisense nucleic acid molecule of the invention can be an α-anomeric nucleic acid molecule. An α-anomeric nucleic acid molecule forms specific double-stranded hybrids with complementary RNA in which, contrary to the usual α-units, the strands run parallel to each other (Gaultier et al., 1987, Nucleic Acids Res. 15:6625-6641). The antisense nucleic acid molecule can also comprise a 2′-o-methylribonucleotide (Inoue et al., 1987, Nucleic Acids Res. 15:6131-6148) or a chimeric RNA-DNA analogue (Inoue et al, 1987, FEBS Lett. 215:327-330).

[0164] The invention also encompasses ribozymes. Ribozymes are catalytic RNA molecules with ribonuclease activity which are capable of cleaving a single-stranded nucleic acid, such as an mRNA, to which they have a complementary region. Thus, ribozymes (e.g., hammerhead ribozymes as described in Haselhoff and Gerlach, 1988, Nature 334:585-591) can be used to catalytically cleave mRNA transcripts to thereby inhibit translation of the protein encoded by the mRNA. A ribozyme having specificity for a nucleic acid molecule encoding a polypeptide corresponding to a marker of the invention can be designed based upon the nucleotide sequence of a cDNA corresponding to the marker. For example, a derivative of a Tetrahymena L-19 IVS RNA can be constructed in which the nucleotide sequence of the active site is complementary to the nucleotide sequence to be cleaved (see Cech et al. U.S. Pat. No. 4,987,071; and Cech et al. U.S. Pat. No. 5,116,742). Alternatively, an mRNA encoding a polypeptide of the invention can be used to select a catalytic RNA having a specific ribonuclease activity from a pool of RNA molecules (see, e.g., Bartel and Szostak, 1993, Science 261:1411-1418).

[0165] The invention also encompasses nucleic acid molecules which form triple helical structures. For example, expression of a polypeptide of the invention can be inhibited by targeting nucleotide sequences complementary to the regulatory region of the gene encoding the polypeptide (e.g., the promoter and/or enhancer) to form triple helical structures that prevent transcription of the gene in target cells. See generally Helene (1991) Anticancer Drug Des. 6(6):569-84; Helene (1992) Ann. N.Y. Acad. Sci. 660:27-36; and Maher (1992) Bioassays 14(12):807-15.

[0166] In various embodiments, the nucleic acid molecules of the invention can be modified at the base moiety, sugar moiety or phosphate backbone to improve, e.g., the stability, hybridization, or solubility of the molecule. For example, the deoxyribose phosphate backbone of the nucleic acids can be modified to generate peptide nucleic acids (see Hyrup et al., 1996, Bioorganic & Medicinal Chemistry 4(1): 5-23). As used herein, the terms “peptide nucleic acids” or “PNAs” refer to nucleic acid mimics, e.g., DNA mimics, in which the deoxyribose phosphate backbone is replaced by a pseudopeptide backbone and only the four natural nucleobases are retained. The neutral backbone of PNAs has been shown to allow for specific hybridization to DNA and RNA under conditions of low ionic strength. The synthesis of PNA oligomers can be performed using standard solid phase peptide synthesis protocols as described in Hyrup et al. (1996), supra; Perry-O'Keefe et al. (1996) Proc. Natl. Acad. Sci. USA 93:14670-675.

[0167] PNAs can be used in therapeutic and diagnostic applications. For example, PNAs can be used as antisense or antigene agents for sequence-specific modulation of gene expression by, e.g., inducing transcription or translation arrest or inhibiting replication. PNAs can also be used, e.g., in the analysis of single base pair mutations in a gene by, e.g., PNA directed PCR clamping; as artificial restriction enzymes when used in combination with other enzymes, e.g., S1 nucleases (Hyrup (1996), supra; or as probes or primers for DNA sequence and hybridization (Hyrup, 1996, supra; Perry-O'Keefe et al., 1996, Proc. Natl. Acad. Sci. USA 93:14670-675).

[0168] In another embodiment, PNAs can be modified, e.g., to enhance their stability or cellular uptake, by attaching lipophilic or other helper groups to PNA, by the formation of PNA-DNA chimeras, or by the use of liposomes or other techniques of drug delivery known in the art. For example, PNA-DNA chimeras can be generated which can combine the advantageous properties of PNA and DNA. Such chimeras allow DNA recognition enzymes, e.g., RNASE H and DNA polymerases, to interact with the DNA portion while the PNA portion would provide high binding affinity and specificity. PNA-DNA chimeras can be linked using linkers of appropriate lengths selected in terms of base stacking, number of bonds between the nucleobases, and orientation (Hyrup, 1996, supra). The synthesis of PNA-DNA chimeras can be performed as described in Hyrup (1996), supra, and Finn et al. (1996) Nucleic Acids Res. 24(17):3357-63. For example, a DNA chain can be synthesized on a solid support using standard phosphoramidite coupling chemistry and modified nucleoside analogs. Compounds such as 5′-(4-methoxytrityl)amino-5′-deoxy-thymidine phosphoramidite can be used as a link between the PNA and the 5′ end of DNA (Mag et al., 1989, Nucleic Acids Res. 17:5973-88). PNA monomers are then coupled in a step-wise manner to produce a chimeric molecule with a 5′ PNA segment and a 3′ DNA segment (Finn et al., 1996, Nucleic Acids Res. 24(17):3357-63). Alternatively, chimeric molecules can be synthesized with a 5′ DNA segment and a 3′ PNA segment (Peterser et al., 1975, Bioorganic Med. Chem. Lett. 5:1119-11124).

[0169] In other embodiments, the oligonucleotide can include other appended groups such as peptides (e.g., for targeting host cell receptors in vivo), or agents facilitating transport across the cell membrane (see, e.g., Letsinger et al., 1989, Proc. Natl. Acad. Sci. USA 86:6553-6556; Lemaitre et al., 1987, Proc. Natl. Acad. Sci. USA 84:648-652; PCT Publication No. WO 88/09810) or the blood-brain barrier (see, e.g., PCT Publication No. WO 89/10134). In addition, oligonucleotides can be modified with hybridization-triggered cleavage agents (see, e.g., Kro1 et al., 1988, Bio/Techniques 6:958-976) or intercalating agents (see, e.g., Zon, 1988, Pharm. Res. 5:539-549). To this end, the oligonucleotide can be conjugated to another molecule, e.g., a peptide, hybridization triggered cross-linking agent, transport agent, hybridization-triggered cleavage agent, etc.

[0170] The invention also includes molecular beacon nucleic acids having at least one region which is complementary to a nucleic acid of the invention, such that the molecular beacon is useful for quantitating the presence of the nucleic acid of the invention in a sample. A “molecular beacon” nucleic acid is a nucleic acid comprising a pair of complementary regions and having a fluorophore and a fluorescent quencher associated therewith. The fluorophore and quencher are associated with different portions of the nucleic acid in such an orientation that when the complementary regions are annealed with one another, fluorescence of the fluorophore is quenched by the quencher. When the complementary regions of the nucleic acid are not annealed with one another, fluorescence of the fluorophore is quenched to a lesser degree. Molecular beacon nucleic acids are described, for example, in U.S. Pat. No. 5,876,930.

[0171] II. Isolated Proteins and Antibodies

[0172] One aspect of the invention pertains to isolated proteins which correspond to individual markers of the invention, and biologically active portions thereof, as well as polypeptide fragments suitable for use as immunogens to raise antibodies directed against a polypeptide corresponding to a marker of the invention. In one embodiment, the native polypeptide corresponding to a marker can be isolated from cells or tissue sources by an appropriate purification scheme using standard protein purification techniques. In another embodiment, polypeptides corresponding to a marker of the invention are produced by recombinant DNA techniques. Alternative to recombinant expression, a polypeptide corresponding to a marker of the invention can be synthesized chemically using standard peptide synthesis techniques.

[0173] An “isolated” or “purified” protein or biologically active portion thereof is substantially free of cellular material or other contaminating proteins from the cell or tissue source from which the protein is derived, or substantially free of chemical precursors or other chemicals when chemically synthesized. The language “substantially free of cellular material” includes preparations of protein in which the protein is separated from cellular components of the cells from which it is isolated or recombinantly produced. Thus, protein that is substantially free of cellular material includes preparations of protein having less than about 30%, 20%, 10%, or 5% (by dry weight) of heterologous protein (also referred to herein as a “contaminating protein”). When the protein or biologically active portion thereof is recombinantly produced, it is also preferably substantially free of culture medium, i.e., culture medium represents less than about 20%, 10%, or 5% of the volume of the protein preparation. When the protein is produced by chemical synthesis, it is preferably substantially free of chemical precursors or other chemicals, i.e., it is separated from chemical precursors or other chemicals which are involved in the synthesis of the protein. Accordingly such preparations of the protein have less than about 30%, 20%, 10%, 5% (by dry weight) of chemical precursors or compounds other than the polypeptide of interest.

[0174] Biologically active portions of a polypeptide corresponding to a marker of the invention include polypeptides comprising amino acid sequences sufficiently identical to or derived from the amino acid sequence of the protein corresponding to the marker, which include fewer amino acids than the full length protein, and exhibit at least one activity of the corresponding full-length protein. Typically, biologically active portions comprise a domain or motif with at least one activity of the corresponding protein. A biologically active portion of a protein of the invention can be a polypeptide which is, for example, 10, 25, 50, 100 or more amino acids in length. Moreover, other biologically active portions, in which other regions of the protein are deleted, can be prepared by recombinant techniques and evaluated for one or more of the functional activities of the native form of a polypeptide of the invention.

[0175] Preferred polypeptides have amino acid sequences encoded by the nucleic acid sequences described herein. Other useful proteins are substantially identical (e.g., at least about 40%, preferably 50%, 60%, 70%, 80%, 90%, 95%, or 99%) to one of these sequences and retain the functional activity of the protein of the corresponding naturally-occurring protein yet differ in amino acid sequence due to natural allelic variation or mutagenesis.

[0176] To determine the percent identity of two amino acid sequences or of two nucleic acids, the sequences are aligned for optimal comparison purposes (e.g., gaps can be introduced in the sequence of a first amino acid or nucleic acid sequence for optimal alignment with a second amino or nucleic acid sequence). The amino acid residues or nucleotides at corresponding amino acid positions or nucleotide positions are then compared. When a position in the first sequence is occupied by the same amino acid residue or nucleotide as the corresponding position in the second sequence, then the molecules are identical at that position. The percent identity between the two sequences is a function of the number of identical positions shared by the sequences (i.e., % identity=# of identical positions/total # of positions (e.g., overlapping positions)×100). In one embodiment the two sequences are the same length.

[0177] The determination of percent identity between two sequences can be accomplished using a mathematical algorithm. A preferred, non-limiting example of a mathematical algorithm utilized for the comparison of two sequences is the algorithm of Karlin and Altschul (1990) Proc. Natl. Acad. Sci. USA 87:2264-2268, modified as in Karlin and Altschul (1993) Proc. Natl. Acad. Sci. USA 90:5873-5877. Such an algorithm is incorporated into the NBLAST and XBLAST programs of Altschul, et al. (1990) J Mol. Biol. 215:403-410. BLAST nucleotide searches can be performed with the NBLAST program, score=100, wordlength=12 to obtain nucleotide sequences homologous to a nucleic acid molecules of the invention. BLAST protein searches can be performed with the XBLAST program, score=50, wordlength=3 to obtain amino acid sequences homologous to a protein molecules of the invention. To obtain gapped alignments for comparison purposes, Gapped BLAST can be utilized as described in Altschul et al. (1997) Nucleic Acids Res. 25:3389-3402. Alternatively, PSI-Blast can be used to perform an iterated search which detects distant relationships between molecules. When utilizing BLAST, Gapped BLAST, and PSI-Blast programs, the default parameters of the respective programs (e.g., XBLAST and NBLAST) can be used. See http://www.ncbi.nlm.nih.gov. Another preferred, non-limiting example of a mathematical algorithm utilized for the comparison of sequences is the algorithm of Myers and Miller, (1988) CABIOS 4:11-17. Such an algorithm is incorporated into the ALIGN program (version 2.0) which is part of the GCG sequence alignment software package. When utilizing the ALIGN program for comparing amino acid sequences, a PAM120 weight residue table, a gap length penalty of 12, and a gap penalty of 4 can be used. Yet another useful algorithm for identifying regions of local sequence similarity and alignment is the FASTA algorithm as described in Pearson and Lipman (1988) Proc. Natl. Acad. Sci. USA 85:2444-2448. When using the FASTA algorithm for comparing nucleotide or amino acid sequences, a PAM120 weight residue table can, for example, be used with a k-tuple value of 2.

[0178] The percent identity between two sequences can be determined using techniques similar to those described above, with or without allowing gaps. In calculating percent identity, only exact matches are counted.

[0179] The invention also provides chimeric or fusion proteins corresponding to a marker of the invention. As used herein, a “chimeric protein” or “fusion protein” comprises all or part (preferably a biologically active part) of a polypeptide corresponding to a marker of the invention operably linked to a heterologous polypeptide (i.e., a polypeptide other than the polypeptide corresponding to the marker). Within the fusion protein, the term “operably linked” is intended to indicate that the polypeptide of the invention and the heterologous polypeptide are fused in-frame to each other. The heterologous polypeptide can be fused to the amino-terminus or the carboxyl-terminus of the polypeptide of the invention.

[0180] One useful fusion protein is a GST fusion protein in which a polypeptide corresponding to a marker of the invention is fused to the carboxyl terminus of GST sequences. Such fusion proteins can facilitate the purification of a recombinant polypeptide of the invention.

[0181] In another embodiment, the fusion protein contains a heterologous signal sequence at its amino terminus. For example, the native signal sequence of a polypeptide corresponding to a marker of the invention can be removed and replaced with a signal sequence from another protein. For example, the gp67 secretory sequence of the baculovirus envelope protein can be used as a heterologous signal sequence (Ausubel et al., ed., Current Protocols in Molecular Biology, John Wiley & Sons, NY, 1992). Other examples of eukaryotic heterologous signal sequences include the secretory sequences of melittin and human placental alkaline phosphatase (Stratagene; La Jolla, Calif.). In yet another example, useful prokaryotic heterologous signal sequences include the phoA secretory signal (Sambrook et al., supra) and the protein A secretory signal (Pharmacia Biotech; Piscataway, N.J.).

[0182] In yet another embodiment, the fusion protein is an immunoglobulin fusion protein in which all or part of a polypeptide corresponding to a marker of the invention is fused to sequences derived from a member of the immunoglobulin protein family. The immunoglobulin fusion proteins of the invention can be incorporated into pharmaceutical compositions and administered to a subject to inhibit an interaction between a ligand (soluble or membrane-bound) and a protein on the surface of a cell (receptor), to thereby suppress signal transduction in vivo. The immunoglobulin fusion protein can be used to affect the bioavailability of a cognate ligand of a polypeptide of the invention. Inhibition of ligand/receptor interaction can be useful therapeutically, both for treating proliferative and differentiative disorders and for modulating (e.g. promoting or inhibiting) cell survival. Moreover, the immunoglobulin fusion proteins of the invention can be used as immunogens to produce antibodies directed against a polypeptide of the invention in a subject, to purify ligands and in screening assays to identify molecules which inhibit the interaction of receptors with ligands.

[0183] Chimeric and fusion proteins of the invention can be produced by standard recombinant DNA techniques. In another embodiment, the fusion gene can be synthesized by conventional techniques including automated DNA synthesizers. Alternatively, PCR amplification of gene fragments can be carried out using anchor primers which give rise to complementary overhangs between two consecutive gene fragments which can subsequently be annealed and re-amplified to generate a chimeric gene sequence (see, e.g., Ausubel et al., supra). Moreover, many expression vectors are commercially available that already encode a fusion moiety (e.g., a GST polypeptide). A nucleic acid encoding a polypeptide of the invention can be cloned into such an expression vector such that the fusion moiety is linked in-frame to the polypeptide of the invention.

[0184] A signal sequence can be used to facilitate secretion and isolation of the secreted protein or other proteins of interest. Signal sequences are typically characterized by a core of hydrophobic amino acids which are generally cleaved from the mature protein during secretion in one or more cleavage events. Such signal peptides contain processing sites that allow cleavage of the signal sequence from the mature proteins as they pass through the secretory pathway. Thus, the invention pertains to the described polypeptides having a signal sequence, as well as to polypeptides from which the signal sequence has been proteolytically cleaved (i.e., the cleavage products). In one embodiment, a nucleic acid sequence encoding a signal sequence can be operably linked in an expression vector to a protein of interest, such as a protein which is ordinarily not secreted or is otherwise difficult to isolate. The signal sequence directs secretion of the protein, such as from a eukaryotic host into which the expression vector is transformed, and the signal sequence is subsequently or concurrently cleaved. The protein can then be readily purified from the extracellular medium by art recognized methods. Alternatively, the signal sequence can be linked to the protein of interest using a sequence which facilitates purification, such as with a GST domain.

[0185] The present invention also pertains to variants of the polypeptides corresponding to individual markers of the invention. Such variants have an altered amino acid sequence which can function as either agonists (mimetics) or as antagonists. Variants can be generated by mutagenesis, e.g., discrete point mutation or truncation. An agonist can retain substantially the same, or a subset, of the biological activities of the naturally occurring form of the protein. An antagonist of a protein can inhibit one or more of the activities of the naturally occurring form of the protein by, for example, competitively binding to a downstream or upstream member of a cellular signaling cascade which includes the protein of interest. Thus, specific biological effects can be elicited by treatment with a variant of limited function. Treatment of a subject with a variant having a subset of the biological activities of the naturally occurring form of the protein can have fewer side effects in a subject relative to treatment with the naturally occurring form of the protein.

[0186] Variants of a protein of the invention which function as either agonists (mimetics) or as antagonists can be identified by screening combinatorial libraries of mutants, e.g., truncation mutants, of the protein of the invention for agonist or antagonist activity. In one embodiment, a variegated library of variants is generated by combinatorial mutagenesis at the nucleic acid level and is encoded by a variegated gene library. A variegated library of variants can be produced by, for example, enzymatically ligating a mixture of synthetic oligonucleotides into gene sequences such that a degenerate set of potential protein sequences is expressible as individual polypeptides, or alternatively, as a set of larger fusion proteins (e.g., for phage display). There are a variety of methods which can be used to produce libraries of potential variants of the polypeptides of the invention from a degenerate oligonucleotide sequence. Methods for synthesizing degenerate oligonucleotides are known in the art (see, e.g., Narang, 1983, Tetrahedron 39:3; Itakura et al., 1984, Annu. Rev. Biochem. 53:323; Itakura et al., 1984, Science 198:1056; Ike et al., 1983 Nucleic Acid Res. 11:477).

[0187] In addition, libraries of fragments of the coding sequence of a polypeptide corresponding to a marker of the invention can be used to generate a variegated population of polypeptides for screening and subsequent selection of variants. For example, a library of coding sequence fragments can be generated by treating a double stranded PCR fragment of the coding sequence of interest with a nuclease under conditions wherein nicking occurs only about once per molecule, denaturing the double stranded DNA, renaturing the DNA to form double stranded DNA which can include sense/antisense pairs from different nicked products, removing single stranded portions from reformed duplexes by treatment with S1 nuclease, and ligating the resulting fragment library into an expression vector. By this method, an expression library can be derived which encodes amino terminal and internal fragments of various sizes of the protein of interest.

[0188] Several techniques are known in the art for screening gene products of combinatorial libraries made by point mutations or truncation, and for screening cDNA libraries for gene products having a selected property. The most widely used techniques, which are amenable to high through-put analysis, for screening large gene libraries typically include cloning the gene library into replicable expression vectors, transforming appropriate cells with the resulting library of vectors, and expressing the combinatorial genes under conditions in which detection of a desired activity facilitates isolation of the vector encoding the gene whose product was detected. Recursive ensemble mutagenesis (REM), a technique which enhances the frequency of functional mutants in the libraries, can be used in combination with the screening assays to identify variants of a protein of the invention (Arkin and Yourvan, 1992, Proc. Natl. Acad. Sci. USA 89:7811-7815; Delgrave et al., 1993, Protein Engineering 6(3):327-331).

[0189] An isolated polypeptide corresponding to a marker of the invention, or a fragment thereof, can be used as an immunogen to generate antibodies using standard techniques for polyclonal and monoclonal antibody preparation. The full-length polypeptide or protein can be used or, alternatively, the invention provides antigenic peptide fragments for use as immunogens. The antigenic peptide of a protein of the invention comprises at least 8 (preferably 10, 15, 20, or 30 or more) amino acid residues of the amino acid sequence of one of the polypeptides of the invention, and encompasses an epitope of the protein such that an antibody raised against the peptide forms a specific immune complex with a marker of the invention to which the protein corresponds. Preferred epitopes encompassed by the antigenic peptide are regions that are located on the surface of the protein, e.g., hydrophilic regions. Hydrophobicity sequence analysis, hydrophilicity sequence analysis, or similar analyses can be used to identify hydrophilic regions.

[0190] An immunogen typically is used to prepare antibodies by immunizing a suitable (i.e. immunocompetent) subject such as a rabbit, goat, mouse, or other mammal or vertebrate. An appropriate immunogenic preparation can contain, for example, recombinantly-expressed or chemically-synthesized polypeptide. The preparation can further include an adjuvant, such as Freund's complete or incomplete adjuvant, or a similar immunostimulatory agent.

[0191] Accordingly, another aspect of the invention pertains to antibodies directed against a polypeptide of the invention. The terms “antibody” and “antibody substance” as used interchangeably herein refer to immunoglobulin molecules and immunologically active portions of immunoglobulin molecules, i.e., molecules that contain an antigen binding site which specifically binds an antigen, such as a polypeptide of the invention, e.g., an epitope of a polypeptide of the invention. A molecule which specifically binds to a given polypeptide of the invention is a molecule which binds the polypeptide, but does not substantially bind other molecules in a sample, e.g., a biological sample, which naturally contains the polypeptide. Examples of immunologically active portions of immunoglobulin molecules include F(ab) and F(ab′)₂ fragments which can be generated by treating the antibody with an enzyme such as pepsin. The invention provides polyclonal and monoclonal antibodies. The term “monoclonal antibody” or “monoclonal antibody composition”, as used herein, refers to a population of antibody molecules that contain only one species of an antigen binding site capable of immunoreacting with a particular epitope.

[0192] Polyclonal antibodies can be prepared as described above by immunizing a suitable subject with a polypeptide of the invention as an immunogen. Preferred polyclonal antibody compositions are ones that have been selected for antibodies directed against a polypeptide or polypeptides of the invention. Particularly preferred polyclonal antibody preparations are ones that contain only antibodies directed against a polypeptide or polypeptides of the invention. Particularly preferred immunogen compositions are those that contain no other human proteins such as, for example, immunogen compositions made using a non-human host cell for recombinant expression of a polypeptide of the invention. In such a manner, the only human epitope or epitopes recognized by the resulting antibody compositions raised against this immunogen will be present as part of a polypeptide or polypeptides of the invention.

[0193] The antibody titer in the immunized subject can be monitored over time by standard techniques, such as with an enzyme linked immunosorbent assay (ELISA) using immobilized polypeptide. If desired, the antibody molecules can be harvested or isolated from the subject (e.g., from the blood or serum of the subject) and further purified by well-known techniques, such as protein A chromatography to obtain the IgG fraction. Alternatively, antibodies specific for a protein or polypeptide of the invention can be selected or (e.g., partially purified) or purified by, e.g., affinity chromatography. For example, a recombinantly expressed and purified (or partially purified) protein of the invention is produced as described herein, and covalently or non-covalently coupled to a solid support such as, for example, a chromatography column. The column can then be used to affinity purify antibodies specific for the proteins of the invention from a sample containing antibodies directed against a large number of different epitopes, thereby generating a substantially purified antibody composition, i.e., one that is substantially free of contaminating antibodies. By a substantially purified antibody composition is meant, in this context, that the antibody sample contains at most only 30% (by dry weight) of contaminating antibodies directed against epitopes other than those of the desired protein or polypeptide of the invention, and preferably at most 20%, yet more preferably at most 10%, and most preferably at most 5% (by dry weight) of the sample is contaminating antibodies. A purified antibody composition means that at least 99% of the antibodies in the composition are directed against the desired protein or polypeptide of the invention.

[0194] At an appropriate time after immunization, e.g., when the specific antibody titers are highest, antibody-producing cells can be obtained from the subject and used to prepare monoclonal antibodies by standard techniques, such as the hybridoma technique originally described by Kohler and Milstein (1975) Nature 256:495-497, the human B cell hybridoma technique (see Kozbor et al., 1983, Immunol. Today 4:72), the EBV-hybridoma technique (see Cole et al., pp. 77-96 In Monoclonal Antibodies and Cancer Therapy, Alan R. Liss, Inc., 1985) or trioma techniques. The technology for producing hybridomas is well known (see generally Current Protocols in Immunology, Coligan et al. ed., John Wiley & Sons, New York, 1994). Hybridoma cells producing a monoclonal antibody of the invention are detected by screening the hybridoma culture supernatants for antibodies that bind the polypeptide of interest, e.g., using a standard ELISA assay.

[0195] Alternative to preparing monoclonal antibody-secreting hybridomas, a monoclonal antibody directed against a polypeptide of the invention can be identified and isolated by screening a recombinant combinatorial immunoglobulin library (e.g., an antibody phage display library) with the polypeptide of interest. Kits for generating and screening phage display libraries are commercially available (e.g., the Pharmacia Recombinant Phage Antibody System, Catalog No. 27-9400-01; and the Stratagene SurfZAP Phage Display Kit, Catalog No. 240612). Additionally, examples of methods and reagents particularly amenable for use in generating and screening antibody display library can be found in, for example, U.S. Pat. No. 5,223,409; PCT Publication No. WO 92/18619; PCT Publication No. WO 91/17271; PCT Publication No. WO 92/20791; PCT Publication No. WO 92/15679; PCT Publication No. WO 93/01288; PCT Publication No. WO 92/01047; PCT Publication No. WO 92/09690; PCT Publication No. WO 90/02809; Fuchs et al. (1991) Bio/Technology 9:1370-1372; Hay et al. (1992) Hum. Antibod. Hybridomas 3:81-85; Huse et al. (1989) Science 246:1275-1281; Griffiths et al. (1993) EMBO J. 12:725-734.

[0196] Additionally, recombinant antibodies, such as chimeric and humanized monoclonal antibodies, comprising both human and non-human portions, which can be made using standard recombinant DNA techniques, are within the scope of the invention. A chimeric antibody is a molecule in which different portions are derived from different animal species, such as those having a variable region derived from a murine mAb and a human immunoglobulin constant region. (See, e.g., Cabilly et al., U.S. Pat. No. 4,816,567; and Boss et al., U.S. Pat. No. 4,816,397, which are incorporated herein by reference in their entirety.) Humanized antibodies are antibody molecules from non-human species having one or more complementarily determining regions (CDRs) from the non-human species and a framework region from a human immunoglobulin molecule. (See, e.g., Queen, U.S. Pat. No. 5,585,089, which is incorporated herein by reference in its entirety.) Such chimeric and humanized monoclonal antibodies can be produced by recombinant DNA techniques known in the art, for example using methods described in PCT Publication No. WO 87/02671; European Patent Application 184,187; European Patent Application 171,496; European Patent Application 173,494; PCT Publication No. WO 86/01533; U.S. Pat. No. 4,816,567; European Patent Application 125,023; Better et al. (1988) Science 240:1041-1043; Liu et al. (1987) Proc. Natl. Acad. Sci. USA 84:3439-3443; Liu et al. (1987) J. Immunol. 139:3521-3526; Sun et al. (1987) Proc. Natl. Acad. Sci. USA 84:214-218; Nishimura et al. (1987) Cancer Res. 47:999-1005; Wood et al. (1985) Nature 314:446-449; and Shaw et al. (1988) J. Natl. Cancer Inst. 80:1553-1559); Morrison (1985) Science 229:1202-1207; Oi et al. (1986) Bio/Techniques 4:214; U.S. Pat. No. 5,225,539; Jones et al. (1986) Nature 321:552-525; Verhoeyan et al. (1988) Science 239:1534; and Beidler et al. (1988) J. Immunol. 141:4053-4060.

[0197] Antibodies of the invention may be used as therapeutic agents in treating cancers. In a preferred embodiment, completely human antibodies of the invention are used for therapeutic treatment of human cancer patients, particularly those having breast cancer. Such antibodies can be produced, for example, using transgenic mice which are incapable of expressing endogenous immunoglobulin heavy and light chains genes, but which can express human heavy and light chain genes. The transgenic mice are immunized in the normal fashion with a selected antigen, e.g., all or a portion of a polypeptide corresponding to a marker of the invention. Monoclonal antibodies directed against the antigen can be obtained using conventional hybridoma technology. The human immunoglobulin transgenes harbored by the transgenic mice rearrange during B cell differentiation, and subsequently undergo class switching and somatic mutation. Thus, using such a technique, it is possible to produce therapeutically useful IgG, IgA and IgE antibodies. For an overview of this technology for producing human antibodies, see Lonberg and Huszar (1995) Int. Rev. Immunol. 13:65-93). For a detailed discussion of this technology for producing human antibodies and human monoclonal antibodies and protocols for producing such antibodies, see, e.g., U.S. Pat. No. 5,625,126; U.S. Pat. No. 5,633,425; U.S. Pat. No. 5,569,825; U.S. Pat. No. 5,661,016; and U.S. Pat. No. 5,545,806. In addition, companies such as Abgenix, Inc. (Freemont, Calif.), can be engaged to provide human antibodies directed against a selected antigen using technology similar to that described above.

[0198] Completely human antibodies which recognize a selected epitope can be generated using a technique referred to as “guided selection.” In this approach a selected non-human monoclonal antibody, e.g., a murine antibody, is used to guide the selection of a completely human antibody recognizing the same epitope (Jespers et al., 1994, Bio/technology 12:899-903).

[0199] An antibody directed against a polypeptide corresponding to a marker of the invention (e.g., a monoclonal antibody) can be used to isolate the polypeptide by standard techniques, such as affinity chromatography or immunoprecipitation. Moreover, such an antibody can be used to detect the marker (e.g., in a cellular lysate or cell supernatant) in order to evaluate the level and pattern of expression of the marker. The antibodies can also be used diagnostically to monitor protein levels in tissues or body fluids (e.g. in an ovary-associated body fluid) as part of a clinical testing procedure, e.g., to, for example, determine the efficacy of a given treatment regimen. Detection can be facilitated by coupling the antibody to a detectable substance. Examples of detectable substances include various enzymes, prosthetic groups, fluorescent materials, luminescent materials, bioluminescent materials, and radioactive materials. Examples of suitable enzymes include horseradish peroxidase, alkaline phosphatase, β-galactosidase, or acetylcholinesterase; examples of suitable prosthetic group complexes include streptavidin/biotin and avidin/biotin; examples of suitable fluorescent materials include umbelliferone, fluorescein, fluorescein isothiocyanate, rhodamine, dichlorotriazinylamine fluorescein, dansyl chloride or phycoerythrin; an example of a luminescent material includes luminol; examples of bioluminescent materials include luciferase, luciferin, and aequorin, and examples of suitable radioactive material include ¹²⁵I, ¹³¹I, ³⁵S or ³H.

[0200] Further, an antibody (or fragment thereof) can be conjugated to a therapeutic moiety such as a cytotoxin, a therapeutic agent or a radioactive metal ion. A cytotoxin or cytotoxic agent includes any agent that is detrimental to cells. Examples include taxol, cytochalasin B, gramicidin D, ethidium bromide, emetine, mitomycin, etoposide, tenoposide, vincristine, vinblastine, colchicin, doxorubicin, daunorubicin, dihydroxy anthracin dione, mitoxantrone, mithramycin, actinomycin D, 1-dehydrotestosterone, glucocorticoids, procaine, tetracaine, lidocaine, propranolol, and puromycin and analogs or homologs thereof. Therapeutic agents include, but are not limited to, antimetabolites (e.g., methotrexate, 6-mercaptopurine, 6-thioguanine, cytarabine, 5-fluorouracil decarbazine), alkylating agents (e.g., mechlorethamine, thioepa chlorambucil, melphalan, carmustine (BSNU) and lomustine (CCNU), cyclothosphamide, busulfan, dibromomannitol, streptozotocin, mitomycin C, and cis-dichlorodiamine platinum (II) (DDP) cisplatin), anthracyclines (e.g., daunorubicin (formerly daunomycin) and doxorubicin), antibiotics (e.g., dactinomycin (formerly actinomycin), bleomycin, mithramycin, and anthramycin (AMC)), and anti-mitotic agents (e.g., vincristine and vinblastine).

[0201] The conjugates of the invention can be used for modifying a given biological response, the drug moiety is not to be construed as limited to classical chemical therapeutic agents. For example, the drug moiety may be a protein or polypeptide possessing a desired biological activity. Such proteins may include, for example, a toxin such as abrin, ricin A, pseudomonas exotoxin, or diphtheria toxin; a protein such as tumor necrosis factor, .alpha.-interferon, .beta.-interferon, nerve growth factor, platelet derived growth factor, tissue plasminogen activator; or, biological response modifiers such as, for example, lymphokines, interleukin-1 (“IL-1”), interleukin-2 (“IL-2”), interleukin-6 (“IL-6”), granulocyte macrophase colony stimulating factor (“GM-CSF”), granulocyte colony stimulating factor (“G-CSF”), or other growth factors.

[0202] Techniques for conjugating such therapeutic moiety to antibodies are well known, see, e.g., Arnon et al., “Monoclonal Antibodies For Immunotargeting Of Drugs In Cancer Therapy”, in Monoclonal Antibodies And Cancer Therapy, Reisfeld et al. (eds.), pp. 243-56 (Alan R. Liss, Inc. 1985); Hellstrom et al., “Antibodies For Drug Delivery”, in Controlled Drug Delivery (2nd Ed.), Robinson et al. (eds.), pp. 623-53 (Marcel Dekker, Inc. 1987); Thorpe, “Antibody Carriers Of Cytotoxic Agents In Cancer Therapy: A Review”, in Monoclonal Antibodies '84: Biological And Clinical Applications, Pinchera et al. (eds.), pp. 475-506 (1985); “Analysis, Results, And Future Prospective Of The Therapeutic Use Of Radiolabeled Antibody In Cancer Therapy”, in Monoclonal Antibodies For Cancer Detection And Therapy, Baldwin et al. (eds.), pp. 303-16 (Academic Press 1985), and Thorpe et al., “The Preparation And Cytotoxic Properties Of Antibody-Toxin Conjugates”, Immunol. Rev., 62:119-58 (1982).

[0203] Alternatively, an antibody can be conjugated to a second antibody to form an antibody heteroconjugate as described by Segal in U.S. Pat. No. 4,676,980. Accordingly, in one aspect, the invention provides substantially purified antibodies or fragments thereof, and non-human antibodies or fragments thereof, which antibodies or fragments specifically bind to a polypeptide comprising an amino acid sequence selected from the group consisting of the amino acid sequences of the present invention, an amino acid sequence encoded by the cDNA of the present invention, a fragment of at least 15 amino acid residues of an amino acid sequence of the present invention, an amino acid sequence which is at least 95% identical to the amino acid sequence of the present invention (wherein the percent identity is determined using the ALIGN program of the GCG software package with a PAM120 weight residue table, a gap length penalty of 12, and a gap penalty of 4) and an amino acid sequence which is encoded by a nucleic acid molecule which hybridizes to a nucleic acid molecule consisting of the nucleic acid molecules of the present invention, or a complement thereof, under conditions of hybridization of 6×SSC at 45° C. and washing in 0.2×SSC, 0.1% SDS at 65° C. In various embodiments, the substantially purified antibodies of the invention, or fragments thereof, can be human, non-human, chimeric and/or humanized antibodies.

[0204] In another aspect, the invention provides non-human antibodies or fragments thereof, which antibodies or fragments specifically bind to a polypeptide comprising an amino acid sequence selected from the group consisting of: the amino acid sequence of the present invention, an amino acid sequence encoded by the cDNA of the present invention, a fragment of at least 15 amino acid residues of the amino acid sequence of the present invention, an amino acid sequence which is at least 95% identical to the amino acid sequence of the present invention (wherein the percent identity is determined using the ALIGN program of the GCG software package with a PAM120 weight residue table, a gap length penalty of 12, and a gap penalty of 4) and an amino acid sequence which is encoded by a nucleic acid molecule which hybridizes to a nucleic acid molecule consisting of the nucleic acid molecules of the present invention, or a complement thereof, under conditions of hybridization of 6×SSC at 45° C. and washing in 0.2×SSC, 0.1% SDS at 65° C. Such non-human antibodies can be goat, mouse, sheep, horse, chicken, rabbit, or rat antibodies. Alternatively, the non-human antibodies of the invention can be chimeric and/or humanized antibodies. In addition, the non-human antibodies of the invention can be polyclonal antibodies or monoclonal antibodies.

[0205] In still a further aspect, the invention provides monoclonal antibodies or fragments thereof, which antibodies or fragments specifically bind to a polypeptide comprising an amino acid sequence selected from the group consisting of the amino acid sequences of the present invention, an amino acid sequence encoded by the cDNA of the present invention, a fragment of at least 15 amino acid residues of an amino acid sequence of the present invention, an amino acid sequence which is at least 95% identical to an amino acid sequence of the present invention (wherein the percent identity is determined using the ALIGN program of the GCG software package with a PAM120 weight residue table, a gap length penalty of 12, and a gap penalty of 4) and an amino acid sequence which is encoded by a nucleic acid molecule which hybridizes to a nucleic acid molecule consisting of the nucleic acid molecules of the present invention, or a complement thereof, under conditions of hybridization of 6×SSC at 45° C. and washing in 0.2×SSC, 0.1% SDS at 65° C. The monoclonal antibodies can be human, humanized, chimeric and/or non-human antibodies.

[0206] The substantially purified antibodies or fragments thereof may specifically bind to a signal peptide, a secreted sequence, an extracellular domain, a transmembrane or a cytoplasmic domain or cytoplasmic membrane of a polypeptide of the invention. In a particularly preferred embodiment, the substantially purified antibodies or fragments thereof, the non-human antibodies or fragments thereof, and/or the monoclonal antibodies or fragments thereof, of the invention specifically bind to a secreted sequence or an extracellular domain of the amino acid sequences of the present invention.

[0207] Any of the antibodies of the invention can be conjugated to a therapeutic moiety or to a detectable substance. Non-limiting examples of detectable substances that can be conjugated to the antibodies of the invention are an enzyme, a prosthetic group, a fluorescent material, a luminescent material, a bioluminescent material, and a radioactive material.

[0208] The invention also provides a kit containing an antibody of the invention conjugated to a detectable substance, and instructions for use. Still another aspect of the invention is a pharmaceutical composition comprising an antibody of the invention and a pharmaceutically acceptable carrier. In preferred embodiments, the pharmaceutical composition contains an antibody of the invention, a therapeutic moiety, and a pharmaceutically acceptable carrier.

[0209] Still another aspect of the invention is a method of making an antibody that specifically recognizes a polypeptide of the present invention, the method comprising immunizing a mammal with a polypeptide. The polypeptide used as an immungen comprises an amino acid sequence selected from the group consisting of the amino acid sequence of the present invention, an amino acid sequence encoded by the cDNA of the nucleic acid molecules of the present invention, a fragment of at least 15 amino acid residues of the amino acid sequence of the present invention, an amino acid sequence which is at least 95% identical to the amino acid sequence of the present invention (wherein the percent identity is determined using the ALIGN program of the GCG software package with a PAM120 weight residue table, a gap length penalty of 12, and a gap penalty of 4) and an amino acid sequence which is encoded by a nucleic acid molecule which hybridizes to a nucleic acid molecule consisting of the nucleic acid molecules of the present invention, or a complement thereof, under conditions of hybridization of 6×SSC at 45° C. and washing in 0.2×SSC, 0.1% SDS at 65° C.

[0210] After immunization, a sample is collected from the mammal that contains an antibody that specifically recognizes the polypeptide. Preferably, the polypeptide is recombinantly produced using a non-human host cell. Optionally, the antibodies can be further purified from the sample using techniques well known to those of skill in the art. The method can further comprise producing a monoclonal antibody-producing cell from the cells of the mammal. Optionally, antibodies are collected from the antibody-producing cell.

[0211] III. Recombinant Expression Vectors and Host Cells

[0212] Another aspect of the invention pertains to vectors, preferably expression vectors, containing a nucleic acid encoding a polypeptide corresponding to a marker of the invention (or a portion of such a polypeptide). As used herein, the term “vector” refers to a nucleic acid molecule capable of transporting another nucleic acid to which it has been linked. One type of vector is a “plasmid”, which refers to a circular double stranded DNA loop into which additional DNA segments can be ligated. Another type of vector is a viral vector, wherein additional DNA segments can be ligated into the viral genome. Certain vectors are capable of autonomous replication in a host cell into which they are introduced (e.g., bacterial vectors having a bacterial origin of replication and episomal mammalian vectors). Other vectors (e.g., non-episomal mammalian vectors) are integrated into the genome of a host cell upon introduction into the host cell, and thereby are replicated along with the host genome. Moreover, certain vectors, namely expression vectors, are capable of directing the expression of genes to which they are operably linked. In general, expression vectors of utility in recombinant DNA techniques are often in the form of plasmids (vectors). However, the invention is intended to include such other forms of expression vectors, such as viral vectors (e.g., replication defective retroviruses, adenoviruses and adeno-associated viruses), which serve equivalent functions.

[0213] The recombinant expression vectors of the invention comprise a nucleic acid of the invention in a form suitable for expression of the nucleic acid in a host cell. This means that the recombinant expression vectors include one or more regulatory sequences, selected on the basis of the host cells to be used for expression, which is operably linked to the nucleic acid sequence to be expressed. Within a recombinant expression vector, “operably linked” is intended to mean that the nucleotide sequence of interest is linked to the regulatory sequence(s) in a manner which allows for expression of the nucleotide sequence (e.g., in an in vitro transcription/translation system or in a host cell when the vector is introduced into the host cell). The term “regulatory sequence” is intended to include promoters, enhancers and other expression control elements (e.g., polyadenylation signals). Such regulatory sequences are described, for example, in Goeddel, Methods in Enzymology: Gene Expression Technology vol.185, Academic Press, San Diego, Calif. (1991). Regulatory sequences include those which direct constitutive expression of a nucleotide sequence in many types of host cell and those which direct expression of the nucleotide sequence only in certain host cells (e.g., tissue-specific regulatory sequences). It will be appreciated by those skilled in the art that the design of the expression vector can depend on such factors as the choice of the host cell to be transformed, the level of expression of protein desired, and the like. The expression vectors of the invention can be introduced into host cells to thereby produce proteins or peptides, including fusion proteins or peptides, encoded by nucleic acids as described herein.

[0214] The recombinant expression vectors of the invention can be designed for expression of a polypeptide corresponding to a marker of the invention in prokaryotic (e.g., E. coli) or eukaryotic cells (e.g., insect cells {using baculovirus expression vectors}, yeast cells or mammalian cells). Suitable host cells are discussed further in Goeddel, supra. Alternatively, the recombinant expression vector can be transcribed and translated in vitro, for example using T7 promoter regulatory sequences and T7 polymerase.

[0215] Expression of proteins in prokaryotes is most often carried out in E. coli with vectors containing constitutive or inducible promoters directing the expression of either fusion or non-fusion proteins. Fusion vectors add a number of amino acids to a protein encoded therein, usually to the amino terminus of the recombinant protein. Such fusion vectors typically serve three purposes: 1) to increase expression of recombinant protein; 2) to increase the solubility of the recombinant protein; and 3) to aid in the purification of the recombinant protein by acting as a ligand in affinity purification. Often, in fusion expression vectors, a proteolytic cleavage site is introduced at the junction of the fusion moiety and the recombinant protein to enable separation of the recombinant protein from the fusion moiety subsequent to purification of the fusion protein. Such enzymes, and their cognate recognition sequences, include Factor Xa, thrombin and enterokinase. Typical fusion expression vectors include pGEX (Pharmacia Biotech Inc; Smith and Johnson, 1988, Gene 67:31-40), pMAL (New England Biolabs, Beverly, Mass.) and pRIT5 (Pharmacia, Piscataway, N.J.) which fuse glutathione S-transferase (GST), maltose E binding protein, or protein A, respectively, to the target recombinant protein.

[0216] Examples of suitable inducible non-fusion E. coli expression vectors include pTrc (Amann et al., 1988, Gene 69:301-315) and pET 11d (Studier et al., p. 60-89, In Gene Expression Technology: Methods in Enzymology vol.185, Academic Press, San Diego, Calif., 1991). Target gene expression from the pTrc vector relies on host RNA polymerase transcription from a hybrid tip-lac fusion promoter. Target gene expression from the pET 11d vector relies on transcription from a T7 gn10-lac fusion promoter mediated by a co-expressed viral RNA polymerase (T7 gn1). This viral polymerase is supplied by host strains BL21(DE3) or HMS174(DE3) from a resident prophage harboring a T7 gn1 gene under the transcriptional control of the lacUV 5 promoter.

[0217] One strategy to maximize recombinant protein expression in E. coli is to express the protein in a host bacteria with an impaired capacity to proteolytically cleave the recombinant protein (Gottesman, p. 119-128, In Gene Expression Technology: Methods in Enzymology vol. 185, Academic Press, San Diego, Calif., 1990. Another strategy is to alter the nucleic acid sequence of the nucleic acid to be inserted into an expression vector so that the individual codons for each amino acid are those preferentially utilized in E. coli (Wada et al., 1992, Nucleic Acids Res. 20:2111-2118). Such alteration of nucleic acid sequences of the invention can be carried out by standard DNA synthesis techniques.

[0218] In another embodiment, the expression vector is a yeast expression vector. Examples of vectors for expression in yeast S. cerevisiae include pYepSec1 (Baldari et al., 1987, EMBO J. 6:229-234), pMFa (Kurjan and Herskowitz, 1982, Cell 30:933-943), pJRY88 (Schultz et al., 1987, Gene 54:113-123), pYES2 (Invitrogen Corporation, San Diego, Calif.), and pPicZ (Invitrogen Corp, San Diego, Calif.).

[0219] Alternatively, the expression vector is a baculovirus expression vector. Baculovirus vectors available for expression of proteins in cultured insect cells (e.g., Sf 9 cells) include the pAc series (Smith et al., 1983, Mol. Cell Biol. 3:2156-2165) and the pVL series (Lucklow and Summers, 1989, Virology 170:31-39).

[0220] In yet another embodiment, a nucleic acid of the invention is expressed in mammalian cells using a mammalian expression vector. Examples of mammalian expression vectors include pCDM8 (Seed, 1987, Nature 329:840) and pMT2PC (Kaufman et al., 1987, EMBO J. 6:187-195). When used in mammalian cells, the expression vector's control functions are often provided by viral regulatory elements. For example, commonly used promoters are derived from polyoma, Adenovirus 2, cytomegalovirus and Simian Virus 40. For other suitable expression systems for both prokaryotic and eukaryotic cells see chapters 16 and 17 of Sambrook et al., supra.

[0221] In another embodiment, the recombinant mammalian expression vector is capable of directing expression of the nucleic acid preferentially in a particular cell type (e.g., tissue-specific regulatory elements are used to express the nucleic acid). Tissue-specific regulatory elements are known in the art. Non-limiting examples of suitable tissue-specific promoters include the albumin promoter (liver-specific; Pinkert et al., 1987, Genes Dev. 1:268-277), lymphoid-specific promoters (Calame and Eaton, 1988, Adv. Immunol. 43:235-275), in particular promoters of T cell receptors (Winoto and Baltimore, 1989, EMBO J 8:729-733) and immunoglobulins (Banerji et al., 1983, Cell 33:729-740; Queen and Baltimore, 1983, Cell 33:741-748), neuron-specific promoters (e.g., the neurofilament promoter; Byrne and Ruddle, 1989, Proc. Natl. Acad. Sci. USA 86:5473-5477), pancreas-specific promoters (Edlund et al., 1985, Science 230:912-916), and mammary gland-specific promoters (e.g., milk whey promoter; U.S. Pat. No. 4,873,316 and European Application Publication No. 264,166). Developmentally-regulated promoters are also encompassed, for example the murine hox promoters (Kessel and Gruss, 1990, Science 249:374-379) and the α-fetoprotein promoter (Camper and Tilghman, 1989, Genes Dev. 3:537-546).

[0222] The invention further provides a recombinant expression vector comprising a DNA molecule of the invention cloned into the expression vector in an antisense orientation. That is, the DNA molecule is operably linked to a regulatory sequence in a manner which allows for expression (by transcription of the DNA molecule) of an RNA molecule which is antisense to the mRNA encoding a polypeptide of the invention. Regulatory sequences operably linked to a nucleic acid cloned in the antisense orientation can be chosen which direct the continuous expression of the antisense RNA molecule in a variety of cell types, for instance viral promoters and/or enhancers, or regulatory sequences can be chosen which direct constitutive, tissue-specific or cell type specific expression of antisense RNA. The antisense expression vector can be in the form of a recombinant plasmid, phagemid, or attenuated virus in which antisense nucleic acids are produced under the control of a high efficiency regulatory region, the activity of which can be determined by the cell type into which the vector is introduced. For a discussion of the regulation of gene expression using antisense genes see Weintraub et al., 1986, Trends in Genetics, Vol. 1(1).

[0223] Another aspect of the invention pertains to host cells into which a recombinant expression vector of the invention has been introduced. The terms “host cell” and “recombinant host cell” are used interchangeably herein. It is understood that such terms refer not only to the particular subject cell but to the progeny or potential progeny of such a cell. Because certain modifications may occur in succeeding generations due to either mutation or environmental influences, such progeny may not, in fact, be identical to the parent cell, but are still included within the scope of the term as used herein.

[0224] A host cell can be any prokaryotic (e.g., E. coli) or eukaryotic cell (e.g., insect cells, yeast or mammalian cells).

[0225] Vector DNA can be introduced into prokaryotic or eukaryotic cells via conventional transformation or transfection techniques. As used herein, the terms “transformation” and “transfection” are intended to refer to a variety of art-recognized techniques for introducing foreign nucleic acid into a host cell, including calcium phosphate or calcium chloride co-precipitation, DEAE-dextran-mediated transfection, lipofection, or electroporation. Suitable methods for transforming or transfecting host cells can be found in Sambrook, et al. (supra), and other laboratory manuals.

[0226] For stable transfection of mammalian cells, it is known that, depending upon the expression vector and transfection technique used, only a small fraction of cells may integrate the foreign DNA into their genome. In order to identify and select these integrants, a gene that encodes a selectable marker (e.g., for resistance to antibiotics) is generally introduced into the host cells along with the gene of interest. Preferred selectable markers include those which confer resistance to drugs, such as G418, hygromycin and methotrexate. Cells stably transfected with the introduced nucleic acid can be identified by drug selection (e.g., cells that have incorporated the selectable marker gene will survive, while the other cells die).

[0227] A host cell of the invention, such as a prokaryotic or eukaryotic host cell in culture, can be used to produce a polypeptide corresponding to a marker of the invention. Accordingly, the invention further provides methods for producing a polypeptide corresponding to a marker of the invention using the host cells of the invention. In one embodiment, the method comprises culturing the host cell of invention (into which a recombinant expression vector encoding a polypeptide of the invention has been introduced) in a suitable medium such that the marker is produced. In another embodiment, the method further comprises isolating the marker polypeptide from the medium or the host cell.

[0228] The host cells of the invention can also be used to produce nonhuman transgenic animals. For example, in one embodiment, a host cell of the invention is a fertilized oocyte or an embryonic stem cell into which a sequences encoding a polypeptide corresponding to a marker of the invention have been introduced. Such host cells can then be used to create non-human transgenic animals in which exogenous sequences encoding a marker protein of the invention have been introduced into their genome or homologous recombinant animals in which endogenous gene(s) encoding a polypeptide corresponding to a marker of the invention sequences have been altered. Such animals are useful for studying the function and/or activity of the polypeptide corresponding to the marker and for identifying and/or evaluating modulators of polypeptide activity. As used herein, a “transgenic animal” is a non-human animal, preferably a mammal, more preferably a rodent such as a rat or mouse, in which one or more of the cells of the animal includes a transgene. Other examples of transgenic animals include non-human primates, sheep, dogs, cows, goats, chickens, amphibians, etc. A transgene is exogenous DNA which is integrated into the genome of a cell from which a transgenic animal develops and which remains in the genome of the mature animal, thereby directing the expression of an encoded gene product in one or more cell types or tissues of the transgenic animal. As used herein, an “homologous recombinant animal” is a non-human animal, preferably a mammal, more preferably a mouse, in which an endogenous gene has been altered by homologous recombination between the endogenous gene and an exogenous DNA molecule introduced into a cell of the animal, e.g., an embryonic cell of the animal, prior to development of the animal.

[0229] A transgenic animal of the invention can be created by introducing a nucleic acid encoding a polypeptide corresponding to a marker of the invention into the male pronuclei of a fertilized oocyte, e.g., by microinjection, retroviral infection, and allowing the oocyte to develop in a pseudopregnant female foster animal. Intronic sequences and polyadenylation signals can also be included in the transgene to increase the efficiency of expression of the transgene. A tissue-specific regulatory sequence(s) can be operably linked to the transgene to direct expression of the polypeptide of the invention to particular cells. Methods for generating transgenic animals via embryo manipulation and microinjection, particularly animals such as mice, have become conventional in the art and are described, for example, in U.S. Pat. Nos. 4,736,866 and 4,870,009, U.S. Pat. No. 4,873,191 and in Hogan, Manipulating the Mouse Embryo, Cold Spring Harbor Laboratory Press, Cold Spring Harbor, N.Y., 1986. Similar methods are used for production of other transgenic animals. A transgenic founder animal can be identified based upon the presence of the transgene in its genome and/or expression of mRNA encoding the transgene in tissues or cells of the animals. A transgenic founder animal can then be used to breed additional animals carrying the transgene. Moreover, transgenic animals carrying the transgene can further be bred to other transgenic animals carrying other transgenes.

[0230] To create an homologous recombinant animal; a vector is prepared which contains at least a portion of a gene encoding a polypeptide corresponding to a marker of the invention into which a deletion, addition or substitution has been introduced to thereby alter, e.g., functionally disrupt, the gene. In a preferred embodiment, the vector is designed such that, upon homologous recombination, the endogenous gene is functionally disrupted (i.e., no longer encodes a functional protein; also referred to as a “knock out” vector). Alternatively, the vector can be designed such that, upon homologous recombination, the endogenous gene is mutated or otherwise altered but still encodes functional protein (e.g., the upstream regulatory region can be altered to thereby alter the expression of the endogenous protein). In the homologous recombination vector, the altered portion of the gene is flanked at its 5′ and 3′ ends by additional nucleic acid of the gene to allow for homologous recombination to occur between the exogenous gene carried by the vector and an endogenous gene in an embryonic stem cell. The additional flanking nucleic acid sequences are of sufficient length for successful homologous recombination with the endogenous gene. Typically, several kilobases of flanking DNA (both at the 5′ and 3′ ends) are included in the vector (see, e.g., Thomas and Capecchi, 1987, Cell 51:503 for a description of homologous recombination vectors). The vector is introduced into an embryonic stem cell line (e.g., by electroporation) and cells in which the introduced gene has homologously recombined with the endogenous gene are selected (see, e.g., Li et al., 1992, Cell 69:915). The selected cells are then injected into a blastocyst of an animal (e.g., a mouse) to form aggregation chimeras (see, e.g., Bradley, Teratocarcinomas and Embryonic Stem Cells: A Practical Approach, Robertson, Ed., IRL, Oxford, 1987, pp. 113-152). A chimeric embryo can then be implanted into a suitable pseudopregnant female foster animal and the embryo brought to term. Progeny harboring the homologously recombined DNA in their germ cells can be used to breed animals in which all cells of the animal contain the homologously recombined DNA by germline transmission of the transgene. Methods for constructing homologous recombination vectors and homologous recombinant animals are described further in Bradley (1991) Current Opinion in Bio/Technology 2:823-829 and in PCT Publication NOS. WO 90/11354, WO 91/01140, WO 92/0968, and WO 93/04169.

[0231] In another embodiment, transgenic non-human animals can be produced which contain selected systems which allow for regulated expression of the transgene. One example of such a system is the cre/loxP recombinase system of bacteriophage P1. For a description of the cre/loxP recombinase system, see, e.g., Lakso et al. (1992) Proc. Natl. Acad. Sci. USA 89:6232-6236. Another example of a recombinase system is the FLP recombinase system of Saccharomyces cerevisiae (O'Gorman et al., 1991, Science 251:1351-1355). If a cre/loxP recombinase system is used to regulate expression of the transgene, animals containing transgenes encoding both the Cre recombinase and a selected protein are required. Such animals can be provided through the construction of “double” transgenic animals, e.g., by mating two transgenic animals, one containing a transgene encoding a selected protein and the other containing a transgene encoding a recombinase.

[0232] Clones of the non-human transgenic animals described herein can also be produced according to the methods described in Wilmut et al. (1997) Nature 385:810-813 and PCT Publication NOS. WO 97/07668 and WO 97/07669.

[0233] IV. Pharmaceutical Compositions

[0234] The nucleic acid molecules, polypeptides, and antibodies (also referred to herein as “active compounds”) corresponding to a marker of the invention can be incorporated into pharmaceutical compositions suitable for administration. Such compositions typically comprise the nucleic acid molecule, protein, or antibody and a pharmaceutically acceptable carrier. As used herein the language “pharmaceutically acceptable carrier” is intended to include any and all solvents, dispersion media, coatings, antibacterial and antifungal agents, isotonic and absorption delaying agents, and the like, compatible with pharmaceutical administration. The use of such media and agents for pharmaceutically active substances is well known in the art. Except insofar as any conventional media or agent is incompatible with the active compound, use thereof in the compositions is contemplated. Supplementary active compounds can also be incorporated into the compositions.

[0235] The invention includes methods for preparing pharmaceutical compositions for modulating the expression or activity of a polypeptide or nucleic acid corresponding to a marker of the invention. Such methods comprise formulating a pharmaceutically acceptable carrier with an agent which modulates expression or activity of a polypeptide or nucleic acid corresponding to a marker of the invention. Such compositions can further include additional active agents. Thus, the invention further includes methods for preparing a pharmaceutical composition by formulating a pharmaceutically acceptable carrier with an agent which modulates expression or activity of a polypeptide or nucleic acid corresponding to a marker of the invention and one or more additional active compounds.

[0236] The invention also provides methods (also referred to herein as “screening assays”) for identifying modulators, i.e., candidate or test compounds or agents (e.g., peptides, peptidomimetics, peptoids, small molecules or other drugs) which (a) bind to the marker, or (b) have a modulatory (e.g., stimulatory or inhibitory) effect on the activity of the marker or, more specifically, (c) have a modulatory effect on the interactions of the marker with one or more of its natural substrates (e.g., peptide, protein, hormone, co-factor, or nucleic acid), or (d) have a modulatory effect on the expression of the marker. Such assays typically comprise a reaction between the marker and one or more assay components. The other components may be either the test compound itself, or a combination of test compound and a natural binding partner of the marker.

[0237] The test compounds of the present invention may be obtained from any available source, including systematic libraries of natural and/or synthetic compounds. Test compounds may also be obtained by any of the numerous approaches in combinatorial library methods known in the art, including: biological libraries; peptoid libraries (libraries of molecules having the functionalities of peptides, but with a novel, non-peptide backbone which are resistant to enzymatic degradation but which nevertheless remain bioactive; see, e.g., Zuckermann et al., 1994, J. Med. Chem. 37:2678-85); spatially addressable parallel solid phase or solution phase libraries; synthetic library methods requiring deconvolution; the ‘one-bead one-compound’ library method; and synthetic library methods using affinity chromatography selection. The biological library and peptoid library approaches are limited to peptide libraries, while the other four approaches are applicable to peptide, non-peptide oligomer or small molecule libraries of compounds (Lam, 1997, Anticancer Drug Des. 12:145).

[0238] Examples of methods for the synthesis of molecular libraries can be found in the art, for example in: DeWitt et al. (1993) Proc. Natl. Acad. Sci. U.S.A. 90:6909; Erb et al. (1994) Proc. Natl. Acad. Sci. USA 91:11422; Zuckermann et al. (1994). J Med. Chem. 37:2678; Cho et al. (1993) Science 261:1303; Carrell et al. (1994) Angew. Chem. Int. Ed. Engl. 33:2059; Carell et al. (1994) Angew. Chem. Int. Ed. Engl. 33:2061; and in Gallop et al. (1994) J. Med. Chem. 37:1233.

[0239] Libraries of compounds may be presented in solution (e.g., Houghten, 1992, Biotechniques 13:412-421), or on beads (Lam, 1991, Nature 354:82-84), chips (Fodor, 1993, Nature 364:555-556), bacteria and/or spores, (Ladner, U.S. Pat. No. 5,223,409), plasmids (Cull et al, 1992, Proc Natl Acad Sci USA 89:1865-1869) or on phage (Scott and Smith, 1990, Science 249:386-390; Devlin, 1990, Science 249:404-406; Cwirla et al, 1990, Proc. Natl. Acad. Sci. 87:6378-6382; Felici, 1991, J. Mol. Biol. 222:301-310; Ladner, supra.).

[0240] In one embodiment, the invention provides assays for screening candidate or test compounds which are substrates of a marker or biologically active portion thereof. In another embodiment, the invention provides assays for screening candidate or test compounds which bind to a marker or biologically active portion thereof. Determining the ability of the test compound to directly bind to a marker can be accomplished, for example, by coupling the compound with a radioisotope or enzymatic label such that binding of the compound to the marker can be determined by detecting the labeled marker compound in a complex. For example, compounds (e.g., marker substrates) can be labeled with ¹²⁵I, ³⁵S, ¹⁴C, or ³H, either directly or indirectly, and the radioisotope detected by direct counting of radioemission or by scintillation counting. Alternatively, assay components can be enzymatically labeled with, for example, horseradish peroxidase, alkaline phosphatase, or luciferase, and the enzymatic label detected by determination of conversion of an appropriate substrate to product.

[0241] In another embodiment, the invention provides assays for screening candidate or test compounds which modulate the activity of a marker or a biologically active portion thereof. In all likelihood, the marker can, in vivo, interact with one or more molecules, such as but not limited to, peptides, proteins, hormones, cofactors and nucleic acids. For the purposes of this discussion, such cellular and extracellular molecules are referred to herein as “binding partners” or marker “substrate”.

[0242] One necessary embodiment of the invention in order to facilitate such screening is the use of the marker to identify its natural in vivo binding partners. There are many ways to accomplish this which are known to one skilled in the art. One example is the use of the marker protein as “bait protein” in a two-hybrid assay or three-hybrid assay (see, e.g., U.S. Pat. No. 5,283,317; Zervos et al, 1993, Cell 72:223-232; Madura et al, 1993, J. Biol. Chem. 268:12046-12054; Bartel et al ,1993, Biotechniques 14:920-924; Iwabuchi et al, 1993 Oncogene 8:1693-1696; Brent WO94/10300) in order to identify other proteins which bind to or interact with the marker (binding partners) and, therefore, are possibly involved in the natural function of the marker. Such marker binding partners are also likely to be involved in the propagation of signals by the marker or downstream elements of a marker-mediated signaling pathway. Alternatively, such marker binding partners may also be found to be inhibitors of the marker.

[0243] The two-hybrid system is based on the modular nature of most transcription factors, which consist of separable DNA-binding and activation domains. Briefly, the assay utilizes two different DNA constructs. In one construct, the gene that encodes a marker protein fused to a gene encoding the DNA binding domain of a known transcription factor (e.g., GAL-4). In the other construct, a DNA sequence, from a library of DNA sequences, that encodes an unidentified protein (“prey” or “sample”) is fused to a gene that codes for the activation domain of the known transcription factor. If the “bait” and the “prey” proteins arc able to interact, in vivo, forming a marker-dependent complex, the DNA-binding and activation domains of the transcription factor are brought into close proximity. This proximity allows transcription of a reporter gene (e.g., LacZ) which is operably linked to a transcriptional regulatory site responsive to the transcription factor. Expression of the reporter gene can be readily detected and cell colonies containing the functional transcription factor can be isolated and used to obtain the cloned gene which encodes the protein which interacts with the marker protein.

[0244] In a further embodiment, assays may be devised through the use of the invention for the purpose of identifying compounds which modulate (e.g., affect either positively or negatively) interactions between a marker and its substrates and/or binding partners. Such compounds can include, but are not limited to, molecules such as antibodies, peptides, hormones, oligonucleotides, nucleic acids, and analogs thereof. Such compounds may also be obtained from any available source, including systematic libraries of natural and/or synthetic compounds. The preferred assay components for use in this embodiment is an breast cancer marker identified herein, the known binding partner and/or substrate of same, and the test compound. Test compounds can be supplied from any source.

[0245] The basic principle of the assay systems used to identify compounds that interfere with the interaction between the marker and its binding partner involves preparing a reaction mixture containing the marker and its binding partner under conditions and for a time sufficient to allow the two products to interact and bind, thus forming a complex. In order to test an agent for inhibitory activity, the reaction mixture is prepared in the presence and absence of the test compound. The test compound can be initially included in the reaction mixture, or can be added at a time subsequent to the addition of the marker and its binding partner. Control reaction mixtures are incubated without the test compound or with a placebo. The formation of any complexes between the marker and its binding partner is then detected. The formation of a complex in the control reaction, but less or no such formation in the reaction mixture containing the test compound, indicates that the compound interferes with the interaction of the marker and its binding partner. Conversely, the formation of more complex in the presence of compound than in the control reaction indicates that the compound may enhance interaction of the marker and its binding partner.

[0246] The assay for compounds that interfere with the interaction of the marker with its binding partner may be conducted in a heterogeneous or homogeneous format. Heterogeneous assays involve anchoring either the marker or its binding partner onto a solid phase and detecting complexes anchored to the solid phase at the end of the reaction. In homogeneous assays, the entire reaction is carried out in a liquid phase. In either approach, the order of addition of reactants can be varied to obtain different information about the compounds being tested. For example, test compounds that interfere with the interaction between the markers and the binding partners (e.g., by competition) can be identified by conducting the reaction in the presence of the test substance, i.e., by adding the test substance to the reaction mixture prior to or simultaneously with the marker and its interactive binding partner. Alternatively, test compounds that disrupt preformed complexes, e.g., compounds with higher binding constants that displace one of the components from the complex, can be tested by adding the test compound to the reaction mixture after complexes have been formed. The various formats are briefly described below.

[0247] In a heterogeneous assay system, either the marker or its binding partner is anchored onto a solid surface or matrix, while the other corresponding non-anchored component may be labeled, either directly or indirectly. In practice, microtitre plates are often utilized for this approach. The anchored species can be immobilized by a number of methods, either non-covalent or covalent, that are typically well known to one who practices the art. Non-covalent attachment can often be accomplished simply by coating the solid surface with a solution of the marker or its binding partner and drying. Alternatively, an immobilized antibody specific for the assay component to be anchored can be used for this purpose. Such surfaces can often be prepared in advance and stored.

[0248] In related embodiments, a fusion protein can be provided which adds a domain that allows one or both of the assay components to be anchored to a matrix. For example, glutathione-S-transferase/marker fusion proteins or glutathione-S-transferase/binding partner can be adsorbed onto glutathione sepharose beads (Sigma Chemical, St. Louis, Mo.) or glutathione derivatized microtiter plates, which are then combined with the test compound or the test compound and either the non-adsorbed marker or its binding partner, and the mixture incubated under conditions conducive to complex formation (e.g., physiological conditions). Following incubation, the beads or microtiter plate wells are washed to remove any unbound assay components, the immobilized complex assessed either directly or indirectly, for example, as described above. Alternatively, the complexes can be dissociated from the matrix, and the level of marker binding or activity determined using standard techniques.

[0249] Other techniques for immobilizing proteins on matrices can also be used in the screening assays of the invention. For example, either a marker or a marker binding partner can be immobilized utilizing conjugation of biotin and streptavidin. Biotinylated marker protein or target molecules can be prepared from biotin-NHS (N-hydroxy-succinimide) using techniques known in the art (e.g., biotinylation kit, Pierce Chemicals, Rockford, Ill.), and immobilized in the wells of streptavidin-coated 96 well plates (Pierce Chemical). In certain embodiments, the protein-immobilized surfaces can be prepared in advance and stored.

[0250] In order to conduct the assay, the corresponding partner of the immobilized assay component is exposed to the coated surface with or without the test compound. After the reaction is complete, unreacted assay components are removed (e.g., by washing) and any complexes formed will remain immobilized on the solid surface. The detection of complexes anchored on the solid surface can be accomplished in a number of ways. Where the non-immobilized component is pre-labeled, the detection of label immobilized on the surface indicates that complexes were formed. Where the non-immobilized component is not pre-labeled, an indirect label can be used to detect complexes anchored on the surface; e.g., using a labeled antibody specific for the initially non-immobilized species (the antibody, in turn, can be directly labeled or indirectly labeled with, e.g., a labeled anti-Ig antibody). Depending upon the order of addition of reaction components, test compounds which modulate (inhibit or enhance) complex formation or which disrupt preformed complexes can be detected.

[0251] In an alternate embodiment of the invention, a homogeneous assay may be used. This is typically a reaction, analogous to those mentioned above, which is conducted in a liquid phase in the presence or absence of the test compound. The formed complexes are then separated from unreacted components, and the amount of complex formed is determined. As mentioned for heterogeneous assay systems, the order of addition of reactants to the liquid phase can yield information about which test compounds modulate (inhibit or enhance) complex formation and which disrupt preformed complexes.

[0252] In such a homogeneous assay, the reaction products may be separated from unreacted assay components by any of a number of standard techniques, including but not limited to: differential centrifugation, chromatography, electrophoresis and immunoprecipitation. In differential centrifugation, complexes of molecules may be separated from uncomplexed molecules through a series of centrifugal steps, due to the different sedimentation equilibria of complexes based on their different sizes and densities (see, for example, Rivas, G., and Minton, A. P., Trends Biochem Sci 1993 August; 18(8):284-7). Standard chromatographic techniques may also be utilized to separate complexed molecules from uncomplexed ones. For example, gel filtration chromatography separates molecules based on size, and through the utilization of an appropriate gel filtration resin in a column format, for example, the relatively larger complex may be separated from the relatively smaller uncomplexed components. Similarly, the relatively different charge properties of the complex as compared to the uncomplexed molecules may be exploited to differentially separate the complex from the remaining individual reactants, for example through the use of ion-exchange chromatography resins. Such resins and chromatographic techniques are well known to one skilled in the art (see, e.g., Heegaard, 1998, J Mol. Recognit. 11: 141-148; Hage and Tweed, 1997, J. Chromatogr. B. Biomed. Sci. Appl., 699:499-525). Gel electrophoresis may also be employed to separate complexed molecules from unbound species (see, e.g., Ausubel et al (eds.), In: Current Protocols in Molecular Biology, J. Wiley & Sons, New York. 1999). In this technique, protein or nucleic acid complexes are separated based on size or charge, for example. In order to maintain the binding interaction during the electrophoretic process, non-denaturing gels in the absence of reducing agent are typically preferred, but conditions appropriate to the particular interactants will be well known to one skilled in the art. Immunoprecipitation is another common technique utilized for the isolation of a protein-protein complex from solution (see, e.g., Ausubel et al (eds.), In: Current Protocols in Molecular Biology, J. Wiley & Sons, New York. 1999). In this technique, all proteins binding to an antibody specific to one of the binding molecules are precipitated from solution by conjugating the antibody to a polymer bead that may be readily collected by centrifugation. The bound assay components are released from the beads (through a specific proteolysis event or other technique well known in the art which will not disturb the protein-protein interaction in the complex), and a second immunoprecipitation step is performed, this time utilizing antibodies specific for the correspondingly different interacting assay component. In this manner, only formed complexes should remain attached to the beads. Variations in complex formation in both the presence and the absence of a test compound can be compared, thus offering information about the ability of the compound to modulate interactions between the marker and its binding partner.

[0253] Also within the scope of the present invention are methods for direct detection of interactions between the marker and its natural binding partner and/or a test compound in a homogeneous or heterogeneous assay system without further sample manipulation. For example, the technique of fluorescence energy transfer may be utilized (see, e.g., Lakowicz et al, U.S. Pat. No. 5,631,169; Stavrianopoulos et al, U.S. Pat. No. 4,868,103). Generally, this technique involves the addition of a fluorophore label on a first ‘donor’ molecule (e.g., marker or test compound) such that its emitted fluorescent energy will be absorbed by a fluorescent label on a second, ‘acceptor’ molecule (e.g., marker or test compound), which in turn is able to fluoresce due to the absorbed energy. Alternately, the ‘donor’ protein molecule may simply utilize the natural fluorescent energy of tryptophan residues. Labels are chosen that emit different wavelengths of light, such that the ‘acceptor’ molecule label may be differentiated from that of the ‘donor’. Since the efficiency of energy transfer between the labels is related to the distance separating the molecules, spatial relationships between the molecules can be assessed. In a situation in which binding occurs between the molecules, the fluorescent emission of the ‘acceptor’ molecule label in the assay should be maximal. An FET binding event can be conveniently measured through standard fluorometric detection means well known in the art (e.g., using a fluorimeter). A test substance which either enhances or hinders participation of one of the species in the preformed complex will result in the generation of a signal variant to that of background. In this way, test substances that modulate interactions between a marker and its binding partner can be identified in controlled assays.

[0254] In another embodiment, modulators of marker expression are identified in a method wherein a cell is contacted with a candidate compound and the expression of mRNA or protein, corresponding to a marker in the cell, is determined. The level of expression of mRNA or protein in the presence of the candidate compound is compared to the level of expression of mRNA or protein in the absence of the candidate compound. The candidate compound can then be identified as a modulator of marker expression based on this comparison. For example, when expression of marker mRNA or protein is greater (statistically significantly greater) in the presence of the candidate compound than in its absence, the candidate compound is identified as a stimulator of marker mRNA or protein expression. Conversely, when expression of marker mRNA or protein is less (statistically significantly less) in the presence of the candidate compound than in its absence, the candidate compound is identified as an inhibitor of marker mRNA or protein expression. The level of marker mRNA or protein expression in the cells can be determined by methods described herein for detecting marker mRNA or protein.

[0255] In another aspect, the invention pertains to a combination of two or more of the assays described herein. For example, a modulating agent can be identified using a cell-based or a cell free assay, and the ability of the agent to modulate the activity of a marker protein can be further confirmed in vivo, e.g., in a whole animal model for cellular transformation and/or tumorigenesis.

[0256] This invention further pertains to novel agents identified by the above-described screening assays. Accordingly, it is within the scope of this invention to further use an agent identified as described herein in an appropriate animal model. For example, an agent identified as described herein (e.g., an marker modulating agent, an antisense marker nucleic acid molecule, an marker-specific antibody, or an marker-binding partner) can be used in an animal model to determine the efficacy, toxicity, or side effects of treatment with such an agent. Alternatively, an agent identified as described herein can be used in an animal model to determine the mechanism of action of such an agent. Furthermore, this invention pertains to uses of novel agents identified by the above-described screening assays for treatments as described herein.

[0257] It is understood that appropriate doses of small molecule agents and protein or polypeptide agents depends upon a number of factors within the knowledge of the ordinarily skilled physician, veterinarian, or researcher. The dose(s) of these agents will vary, for example, depending upon the identity, size, and condition of the subject or sample being treated, further depending upon the route by which the composition is to be administered, if applicable, and the effect which the practitioner desires the agent to have upon the nucleic acid or polypeptide of the invention. Exemplary doses of a small molecule include milligram or microgram amounts per kilogram of subject or sample weight (e.g. about 1 microgram per kilogram to about 500 milligrams per kilogram, about 100 micrograms per kilogram to about 5 milligrams per kilogram, or about 1 microgram per kilogram to about 50 micrograms per kilogram). Exemplary doses of a protein or polypeptide include gram, milligram or microgram amounts per kilogram of subject or sample weight (e.g. about 1 microgram per kilogram to about 5 grams per kilogram, about 100 micrograms per kilogram to about 500 milligrams per kilogram, or about 1 milligram per kilogram to about 50 milligrams per kilogram). It is furthermore understood that appropriate doses of one of these agents depend upon the potency of the agent with respect to the expression or activity to be modulated. Such appropriate doses can be determined using the assays described herein. When one or more of these agents is to be administered to an animal (e.g. a human) in order to modulate expression or activity of a polypeptide or nucleic acid of the invention, a physician, veterinarian, or researcher can, for example, prescribe a relatively low dose at first, subsequently increasing the dose until an appropriate response is obtained. In addition, it is understood that the specific dose level for any particular animal subject will depend upon a variety of factors including the activity of the specific agent employed, the age, body weight, general health, gender, and diet of the subject, the time of administration, the route of administration, the rate of excretion, any drug combination, and the degree of expression or activity to be modulated.

[0258] A pharmaceutical composition of the invention is formulated to be compatible with its intended route of administration. Examples of routes of administration include parenteral, e.g., intravenous, intradermal, subcutaneous, oral (e.g., inhalation), transdermal (topical), transmucosal, and rectal administration. Solutions or suspensions used for parenteral, intradermal, or subcutaneous application can include the following components: a sterile diluent such as water for injection, saline solution, fixed oils, polyethylene glycols, glycerine, propylene glycol or other synthetic solvents; antibacterial agents such as benzyl alcohol or methyl parabens; antioxidants such as ascorbic acid or sodium bisulfite; chelating agents such as ethylenediamine-tetraacetic acid; buffers such as acetates, citrates or phosphates and agents for the adjustment of tonicity such as sodium chloride or dextrose. pH can be adjusted with acids or bases, such as hydrochloric acid or sodium hydroxide. The parenteral preparation can be enclosed in ampules, disposable syringes or multiple dose vials made of glass or plastic.

[0259] Pharmaceutical compositions suitable for injectable use include sterile aqueous solutions (where water soluble) or dispersions and sterile powders for the extemporaneous preparation of sterile injectable solutions or dispersions. For intravenous administration, suitable carriers include physiological saline, bacteriostatic water, Cremophor EL (BASF; Parsippany, N.J.) or phosphate buffered saline (PBS). In all cases, the composition must be sterile and should be fluid to the extent that easy syringability exists. It must be stable under the conditions of manufacture and storage and must be preserved against the contaminating action of microorganisms such as bacteria and fungi. The carrier can be a solvent or dispersion medium containing, for example, water, ethanol, polyol (for example, glycerol, propylene glycol, and liquid polyethylene glycol, and the like), and suitable mixtures thereof. The proper fluidity can be maintained, for example, by the use of a coating such as lecithin, by the maintenance of the required particle size in the case of dispersion and by the use of surfactants. Prevention of the action of microorganisms can be achieved by various antibacterial and antifungal agents, for example, parabens, chlorobutanol, phenol, ascorbic acid, thimerosal, and the like. In many cases, it will be preferable to include isotonic agents, for example, sugars, polyalcohols such as mannitol, sorbitol, or sodium chloride in the composition. Prolonged absorption of the injectable compositions can be brought about by including in the composition an agent which delays absorption, for example, aluminum monostearate and gelatin.

[0260] Sterile injectable solutions can be prepared by incorporating the active compound (e.g., a polypeptide or antibody) in the required amount in an appropriate solvent with one or a combination of ingredients enumerated above, as required, followed by filtered sterilization. Generally, dispersions are prepared by incorporating the active compound into a sterile vehicle which contains a basic dispersion medium, and then incorporating the required other ingredients from those enumerated above. In the case of sterile powders for the preparation of sterile injectable solutions, the preferred methods of preparation are vacuum drying and freeze-drying which yields a powder of the active ingredient plus any additional desired ingredient from a previously sterile-filtered solution thereof.

[0261] Oral compositions generally include an inert diluent or an edible carrier. They can be enclosed in gelatin capsules or compressed into tablets. For the purpose of oral therapeutic administration, the active compound can be incorporated with excipients and used in the form of tablets, troches, or capsules. Oral compositions can also be prepared using a fluid carrier for use as a mouthwash, wherein the compound in the fluid carrier is applied orally and swished and expectorated or swallowed.

[0262] Pharmaceutically compatible binding agents, and/or adjuvant materials can be included as part of the composition. The tablets, pills, capsules, troches, and the like can contain any of the following ingredients, or compounds of a similar nature: a binder such as microcrystalline cellulose, gum tragacanth or gelatin; an excipient such as starch or lactose, a disintegrating agent such as alginic acid, Primogel, or corn starch; a lubricant such as magnesium stearate or Sterotes; a glidant such as colloidal silicon dioxide; a sweetening agent such as sucrose or saccharin; or a flavoring agent such as peppermint, methyl salicylate, or orange flavoring.

[0263] For administration by inhalation, the compounds are delivered in the form of an aerosol spray from a pressurized container or dispenser which contains a suitable propellant, e.g., a gas such as carbon dioxide, or a nebulizer.

[0264] Systemic administration can also be by transmucosal or transdermal means. For transmucosal or transdermal administration, penetrants appropriate to the barrier to be permeated are used in the formulation. Such penetrants are generally known in the art, and include, for example, for transmucosal administration, detergents, bile salts, and fusidic acid derivatives. Transmucosal administration can be accomplished through the use of nasal sprays or suppositories. For transdermal administration, the active compounds are formulated into ointments, salves, gels, or creams as generally known in the art.

[0265] The compounds can also be prepared in the form of suppositories (e.g., with conventional suppository bases such as cocoa butter and other glycerides) or retention enemas for rectal delivery.

[0266] In one embodiment, the active compounds are prepared with carriers that will protect the compound against rapid elimination from the body, such as a controlled release formulation, including implants and microencapsulated delivery systems. Biodegradable, biocompatible polymers can be used, such as ethylene vinyl acetate, polyanhydrides, polyglycolic acid, collagen, polyorthoesters, and polylactic acid. Methods for preparation of such formulations will be apparent to those skilled in the art. The materials can also be obtained commercially from Alza Corporation and Nova Pharmaceuticals, Inc. Liposomal suspensions (including liposomes having monoclonal antibodies incorporated therein or thereon) can also be used as pharmaceutically acceptable carriers. These can be prepared according to methods known to those skilled in the art, for example, as described in U.S. Pat. No. 4,522,811.

[0267] It is especially advantageous to formulate oral or parenteral compositions in dosage unit form for ease of administration and uniformity of dosage. Dosage unit form as used herein refers to physically discrete units suited as unitary dosages for the subject to be treated; each unit containing a predetermined quantity of active compound calculated to produce the desired therapeutic effect in association with the required pharmaceutical carrier. The specification for the dosage unit forms of the invention are dictated by and directly dependent on the unique characteristics of the active compound and the particular therapeutic effect to be achieved, and the limitations inherent in the art of compounding such an active compound for the treatment of individuals.

[0268] For antibodies, the preferred dosage is 0.1 mg/kg to 100 mg/kg of body weight (generally 10 mg/kg to 20 mg/kg). If the antibody is to act in the brain, a dosage of 50 mg/kg to 100 mg/kg is usually appropriate. Generally, partially human antibodies and fully human antibodies have a longer half-life within the human body than other antibodies. Accordingly, lower dosages and less frequent administration is often possible. Modifications such as lipidation can be used to stabilize antibodies and to enhance uptake and tissue penetration (e.g., into the breast epithelium). A method for lipidation of antibodies is described by Cruikshank et al. (1997) J. Acquired Immune Deficiency Syndromes and Human Retrovirology 14:193.

[0269] The nucleic acid molecules corresponding to a marker of the invention can be inserted into vectors and used as gene therapy vectors. Gene therapy vectors can be delivered to a subject by, for example, intravenous injection, local administration (U.S. Pat. No. 5,328,470), or by stereotactic injection (see, e.g., Chen et al., 1994, Proc. Natl. Acad. Sci. USA 91:3054-3057). The pharmaceutical preparation of the gene therapy vector can include the gene therapy vector in an acceptable diluent, or can comprise a slow release matrix in which the gene delivery vehicle is imbedded. Alternatively, where the complete gene delivery vector can be produced intact from recombinant cells, e.g. retroviral vectors, the pharmaceutical preparation can include one or more cells which produce the gene delivery system.

[0270] The pharmaceutical compositions can be included in a container, pack, or dispenser together with instructions for administration.

[0271] V. Electronic Apparatus Readable Media and Arrays

[0272] Electronic apparatus readable media comprising a breast cancer marker of the present invention is also provided. As used herein, “electronic apparatus readable media” refers to any suitable medium for storing, holding or containing data or information that can be read and accessed directly by an electronic apparatus. Such media can include, but are not limited to: magnetic storage media, such as floppy discs, hard disc storage medium, and magnetic tape; optical storage media such as compact disc; electronic storage media such as RAM, ROM, EPROM, EEPROM and the like; general hard disks and hybrids of these categories such as magnetic/optical storage media. The medium is adapted or configured for having recorded thereon a marker of the present invention.

[0273] As used herein, the term “electronic apparatus” is intended to include any suitable computing or processing apparatus or other device configured or adapted for storing data or information. Examples of electronic apparatus suitable for use with the present invention include stand-alone computing apparatus; networks, including a local area network (LAN), a wide area network (WAN) Internet, Intranet, and Extranet; electronic appliances such as a personal digital assistants (PDAs), cellular phone, pager and the like; and local and distributed processing systems.

[0274] As used herein, “recorded” refers to a process for storing or encoding information on the electronic apparatus readable medium. Those skilled in the art can readily adopt any of the presently known methods for recording information on known media to generate manufactures comprising the markers of the present invention.

[0275] A variety of software programs and formats can be used to store the marker information of the present invention on the electronic apparatus readable medium. For example, the nucleic acid sequence corresponding to the markers can be represented in a word processing text file, formatted in commercially-available software such as WordPerfect and MicroSoft Word, or represented in the form of an ASCII file, stored in a database application, such as DB2, Sybase, Oracle, or the like, as well as in other forms. Any number of dataprocessor structuring formats (e.g., text file or database) may be employed in order to obtain or create a medium having recorded thereon the markers of the present invention.

[0276] By providing the markers of the invention in readable form, one can routinely access the marker sequence information for a variety of purposes. For example, one skilled in the art can use the nucleotide or amino acid sequences of the present invention in readable form to compare a target sequence or target structural motif with the sequence information stored within the data storage means. Search means are used to identify fragments or regions of the sequences of the invention which match a particular target sequence or target motif.

[0277] The present invention therefore provides a medium for holding instructions for performing a method for determining whether a subject has breast cancer or a pre-disposition to breast cancer, wherein the method comprises the steps of determining the presence or absence of a breast cancer marker and based on the presence or absence of the breast cancer marker, determining whether the subject has breast cancer or a pre-disposition to breast cancer and/or recommending a particular treatment for the breast cancer or pre-breast cancer condition.

[0278] The present invention further provides in an electronic system and/or in a network, a method for determining whether a subject has breast cancer or a pre-disposition to breast cancer associated with a breast cancer marker wherein the method comprises the steps of determining the presence or absence of the breast cancer marker, and based on the presence or absence of the breast cancer marker, determining whether the subject has breast cancer or a pre-disposition to breast cancer, and/or recommending a particular treatment for the breast cancer or pre-breast cancer condition. The method may further comprise the step of receiving phenotypic information associated with the subject and/or acquiring from a network phenotypic information associated with the subject

[0279] The present invention also provides in a network, a method for determining whether a subject has breast cancer or a pre-disposition to breast cancer associated with a breast cancer marker, said method comprising the steps of receiving information associated with the breast cancer marker receiving phenotypic information associated with the subject, acquiring information from the network corresponding to the breast cancer marker and/or breast cancer, and based on one or more of the phenotypic information, the breast cancer marker, and the acquired information, determining whether the subject has breast cancer or a pre-disposition to breast cancer. The method may further comprise the step of recommending a particular treatment for the breast cancer or pre-breast cancer condition

[0280] The present invention also provides a business method for determining whether a subject has breast cancer or a pre-disposition to breast cancer, said method comprising the steps of receiving information associated with the breast cancer marker, receiving phenotypic information associated with the subject, acquiring information from the network corresponding to the breast cancer marker and/or breast cancer, and based on one or more of the phenotypic information, the breast cancer marker, and the acquired information, determining whether the subject has breast cancer or a pre-disposition to breast cancer. The method may further comprise the step of recommending a particular treatment for the breast cancer or pre-breast cancer condition.

[0281] The invention also includes an array comprising a breast cancer marker of the present invention. The array can be used to assay expression of one or more genes in the array. In one embodiment, the array can be used to assay gene expression in a tissue to ascertain tissue specificity of genes in the array. In this manner, up to about 7600 genes can be simultaneously assayed for expression. This allows a profile to be developed showing a battery of genes specifically expressed in one or more tissues.

[0282] In addition to such qualitative determination, the invention allows the quantitation of gene expression. Thus, not only tissue specificity, but also the level of expression of a battery of genes in the tissue is ascertainable. Thus, genes can be grouped on the basis of their tissue expression per se and level of expression in that tissue. This is useful, for example, in ascertaining the relationship of gene expression between or among tissues. Thus, one tissue can be perturbed and the effect on gene expression in a second tissue can be determined. In this context, the effect of one cell type on another cell type in response to a biological stimulus can be determined. Such a determination is useful, for example, to know the effect of cell-cell interaction at the level of gene expression. If an agent is administered therapeutically to treat one cell type but has an undesirable effect on another cell type, the invention provides an assay to determine the molecular basis of the undesirable effect and thus provides the opportunity to co-administer a counteracting agent or otherwise treat the undesired effect. Similarly, even within a single cell type, undesirable biological effects can be determined at the molecular level. Thus, the effects of an agent on expression of other than the target gene can be ascertained and counteracted.

[0283] In another embodiment, the array can be used to monitor the time course of expression of one or more genes in the array. This can occur in various biological contexts, as disclosed herein, for example development of breast cancer, progression of breast cancer, and processes, such a cellular transformation associated with breast cancer.

[0284] The array is also useful for ascertaining the effect of the expression of a gene on the expression of other genes in the same cell or in different cells. This provides, for example, for a selection of alternate molecular targets for therapeutic intervention if the ultimate or downstream target cannot be regulated.

[0285] The array is also useful for ascertaining differential expression patterns of one or more genes in normal and abnormal cells. This provides a battery of genes that could serve as a molecular target for diagnosis or therapeutic intervention.

[0286] VI. Predictive Medicine

[0287] The present invention pertains to the field of predictive medicine in which diagnostic assays, prognostic assays, pharmacogenomics, and monitoring clinical trails are used for prognostic (predictive) purposes to thereby treat an individual prophylactically. Accordingly, one aspect of the present invention relates to diagnostic assays for determining the level of expression of polypeptides or nucleic acids corresponding to one or more markers of the invention, in order to determine whether an individual is at risk of developing breast cancer. Such assays can be used for prognostic or predictive purposes to thereby prophylactically treat an individual prior to the onset of the cancer.

[0288] Yet another aspect of the invention pertains to monitoring the influence of agents (e.g., drugs or other compounds administered either to inhibit breast cancer or to treat or prevent any other disorder {i.e. in order to understand any breast carcinogenic effects that such treatment may have}) on the expression or activity of a marker of the invention in clinical trials. These and other agents are described in further detail in the following sections.

[0289] A. Diagnostic Assays

[0290] An exemplary method for detecting the presence or absence of a polypeptide or nucleic acid corresponding to a marker of the invention in a biological sample involves obtaining a biological sample (e.g. a breast-associated body fluid) from a test subject and contacting the biological sample with a compound or an agent capable of detecting the polypeptide or nucleic acid (e.g., mRNA, genomic DNA, or cDNA). The detection methods of the invention can thus be used to detect mRNA, protein, cDNA, or genomic DNA, for example, in a biological sample in vitro as well as in vivo. For example, in vitro techniques for detection of mRNA include Northern hybridizations and in situ hybridizations. In vitro techniques for detection of a polypeptide corresponding to a marker of the invention include enzyme linked immunosorbent assays (ELISAs), Western blots, immunoprecipitations and immunofluorescence. In vitro techniques for detection of genomic DNA include Southern hybridizations. Furthermore, in vivo techniques for detection of a polypeptide corresponding to a marker of the invention include introducing into a subject a labeled antibody directed against the polypeptide. For example, the antibody can be labeled with a radioactive marker whose presence and location in a subject can be detected by standard imaging techniques.

[0291] A general principle of such diagnostic and prognostic assays involves preparing a sample or reaction mixture that may contain a marker, and a probe, under appropriate conditions and for a time sufficient to allow the marker and probe to interact and bind, thus forming a complex that can be removed and/or detected in the reaction mixture. These assays can be conducted in a variety of ways.

[0292] For example, one method to conduct such an assay would involve anchoring the marker or probe onto a solid phase support, also referred to as a substrate, and detecting target marker/probe complexes anchored on the solid phase at the end of the reaction. In one embodiment of such a method, a sample from a subject, which is to be assayed for presence and/or concentration of marker, can be anchored onto a carrier or solid phase support. In another embodiment, the reverse situation is possible, in which the probe can be anchored to a solid phase and a sample from a subject can be allowed to react as an unanchored component of the assay.

[0293] There are many established methods for anchoring assay components to a solid phase. These include, without limitation, marker or probe molecules which are immobilized through conjugation of biotin and streptavidin. Such biotinylated assay components can be prepared from biotin-NHS (N-hydroxy-succinimide) using techniques known in the art (e.g., biotinylation kit, Pierce Chemicals, Rockford, Ill.), and immobilized in the wells of streptavidin-coated 96 well plates (Pierce Chemical). In certain embodiments, the surfaces with immobilized assay components can be prepared in advance and stored.

[0294] Other suitable carriers or solid phase supports for such assays include any material capable of binding the class of molecule to which the marker or probe belongs. Well-known supports or carriers include, but are not limited to, glass, polystyrene, nylon, polypropylene, nylon, polyethylene, dextran, amylases, natural and modified celluloses, polyacrylamides, gabbros, and magnetite.

[0295] In order to conduct assays with the above mentioned approaches, the non-immobilized component is added to the solid phase upon which the second component is anchored. After the reaction is complete, uncomplexed components may be removed (e.g., by washing) under conditions such that any complexes formed will remain immobilized upon the solid phase. The detection of marker/probe complexes anchored to the solid phase can be accomplished in a number of methods outlined herein.

[0296] In a preferred embodiment, the probe, when it is the unanchored assay component, can be labeled for the purpose of detection and readout of the assay, either directly or indirectly, with detectable labels discussed herein and which are well-known to one skilled in the art.

[0297] It is also possible to directly detect marker/probe complex formation without further manipulation or labeling of either component (marker or probe), for example by utilizing the technique of fluorescence energy transfer (see, for example, Lakowicz et al., U.S. Pat. No. 5,631,169; Stavrianopoulos, et al., U.S. Pat. No. 4,868,103). A fluorophore label on the first, ‘donor’ molecule is selected such that, upon excitation with incident light of appropriate wavelength, its emitted fluorescent energy will be absorbed by a fluorescent label on a second ‘acceptor’ molecule, which in turn is able to fluoresce due to the absorbed energy. Alternately, the ‘donor’ protein molecule may simply utilize the natural fluorescent energy of tryptophan residues. Labels are chosen that emit different wavelengths of light, such that the ‘acceptor’ molecule label may be differentiated from that of the ‘donor’. Since the efficiency of energy transfer between the labels is related to the distance separating the molecules, spatial relationships between the molecules can be assessed. In a situation in which binding occurs between the molecules, the fluorescent emission of the ‘acceptor’ molecule label in the assay should be maximal. An FET binding event can be conveniently measured through standard fluorometric detection means well known in the art (e.g., using a fluorimeter).

[0298] In another embodiment, determination of the ability of a probe to recognize a marker can be accomplished without labeling either assay component (probe or marker) by utilizing a technology such as real-time Biomolecular Interaction Analysis (BIA) (see, e.g., Sjolander, S. and Urbaniczky, C., 1991, Anal. Chem. 63:2338-2345 and Szabo et al., 1995, Curr. Opin. Struct. Biol. 5:699-705). As used herein, “BIA” or “surface plasmon resonance” is a technology for studying biospecific interactions in real time, without labeling any of the interactants (e.g., BIAcore). Changes in the mass at the binding surface (indicative of a binding event) result in alterations of the refractive index of light near the surface (the optical phenomenon of surface plasmon resonance (SPR)), resulting in a detectable signal which can be used as an indication of real-time reactions between biological molecules.

[0299] Alternatively, in another embodiment, analogous diagnostic and prognostic assays can be conducted with marker and probe as solutes in a liquid phase. In such an assay, the complexed marker and probe are separated from uncomplexed components by any of a number of standard techniques, including but not limited to: differential centrifugation, chromatography, electrophoresis and immunoprecipitation. In differential centrifugation, marker/probe complexes may be separated from uncomplexed assay components through a series of centrifugal steps, due to the different sedimentation equilibria of complexes based on their different sizes and densities (see, for example, Rivas, G., and Minton, A. P., 1993, Trends Biochem Sci. 18(8):284-7). Standard chromatographic techniques may also be utilized to separate complexed molecules from uncomplexed ones. For example, gel filtration chromatography separates molecules based on size, and through the utilization of an appropriate gel filtration resin in a column format, for example, the relatively larger complex may be separated from the relatively smaller uncomplexed components. Similarly, the relatively different charge properties of the marker/probe complex as compared to the uncomplexed components may be exploited to differentiate the complex from uncomplexed components, for example through the utilization of ion-exchange chromatography resins. Such resins and chromatographic techniques are well known to one skilled in the art (see, e.g., Heegaard, N. H., 1998, J. Mol. Recognit. Winter 11 (1-6):141-8; Hage, D. S., and Tweed, S. A. J Chromatogr B Biomed Sci Appl Oct. 10, 1997;699(1-2):499-525). Gel electrophoresis may also be employed to separate complexed assay components from unbound components (see, e.g., Ausubel et al, ed., Current Protocols in Molecular Biology, John Wiley & Sons, New York, 1987-1999). In this technique, protein or nucleic acid complexes are separated based on size or charge, for example. In order to maintain the binding interaction during the electrophoretic process, non-denaturing gel matrix materials and conditions in the absence of reducing agent are typically preferred. Appropriate conditions to the particular assay and components thereof will be well known to one skilled in the art.

[0300] In a particular embodiment, the level of mRNA corresponding to the marker can be determined both by in situ and by in vitro formats in a biological sample using methods known in the art. The term “biological sample” is intended to include tissues, cells, biological fluids and isolates thereof, isolated from a subject, as well as tissues, cells and fluids present within a subject. Many expression detection methods use isolated RNA. For in vitro methods, any RNA isolation technique that does not select against the isolation of mRNA can be utilized for the purification of RNA from breast cells (see, e.g., Ausubel et al., ed., Current Protocols in Molecular Biology, John Wiley & Sons, New York 1987-1999). Additionally, large numbers of tissue samples can readily be processed using techniques well known to those of skill in the art, such as, for example, the single-step RNA isolation process of Chomczynski (1989, U.S. Pat. No. 4,843,155).

[0301] The isolated mRNA can be used in hybridization or amplification assays that include, but are not limited to, Southern or Northern analyses, polymerase chain reaction analyses and probe arrays. One preferred diagnostic method for the detection of mRNA levels involves contacting the isolated mRNA with a nucleic acid molecule (probe) that can hybridize to the mRNA encoded by the gene being detected. The nucleic acid probe can be, for example, a full-length cDNA, or a portion thereof, such as an oligonucleotide of at least 7, 15, 30, 50, 100, 250 or 500 nucleotides in length and sufficient to specifically hybridize under stringent conditions to a mRNA or genomic DNA encoding a marker of the present invention. Other suitable probes for use in the diagnostic assays of the invention are described herein. Hybridization of an mRNA with the probe indicates that the marker in question is being expressed.

[0302] In one format, the mRNA is immobilized on a solid surface and contacted with a probe, for example by running the isolated mRNA on an agarose gel and transferring the mRNA from the gel to a membrane, such as nitrocellulose. In an alternative format, the probe(s) are immobilized on a solid surface and the mRNA is contacted with the probe(s), for example, in an Affymetrix gene chip array. A skilled artisan can readily adapt known mRNA detection methods for use in detecting the level of mRNA encoded by the markers of the present invention.

[0303] An alternative method for determining the level of mRNA corresponding to a marker of the present invention in a sample involves the process of nucleic acid amplification, e.g., by rtPCR (the experimental embodiment set forth in Mullis, 1987, U.S. Pat. No. 4,683,202), ligase chain reaction (Barany, 1991, Proc. Natl. Acad. Sci. USA, 88:189-193), self sustained sequence replication (Guatelli et al., 1990, Proc. Natl. Acad. Sci. USA 87:1874-1878), transcriptional amplification system (Kwoh et al., 1989, Proc. Natl. Acad. Sci. USA 86:1173-1177), Q-Beta Replicase (Lizardi et al., 1988, Bio/Technology 6:1197), rolling circle replication (Lizardi et al., U.S. Pat. No. 5,854,033) or any other nucleic acid amplification method, followed by the detection of the amplified molecules using techniques well known to those of skill in the art. These detection schemes are especially useful for the detection of nucleic acid molecules if such molecules are present in very low numbers. As used herein, amplification primers are defined as being a pair of nucleic acid molecules that can anneal to 540 or 3′ regions of a gene (plus and minus strands, respectively, or vice-versa) and contain a short region in between. In general, amplification primers are from about 10 to 30 nucleotides in length and flank a region from about 50 to 200 nucleotides in length. Under appropriate conditions and with appropriate reagents, such primers permit the amplification of a nucleic acid molecule comprising the nucleotide sequence flanked by the primers.

[0304] For in situ methods, mRNA does not need to be isolated from the breast cells prior to detection. In such methods, a cell or tissue sample is prepared/processed using known histological methods. The sample is then immobilized on a support, typically a glass slide, and then contacted with a probe that can hybridize to mRNA that encodes the marker.

[0305] As an alternative to making determinations based on the absolute expression level of the marker, determinations may be based on the normalized expression level of the marker. Expression levels are normalized by correcting the absolute expression level of a marker by comparing its expression to the expression of a gene that is not a marker, e.g., a housekeeping gene that is constitutively expressed. Suitable genes for normalization include housekeeping genes such as the actin gene, or epithelial cell-specific genes. This normalization allows the comparison of the expression level in one sample, e.g., a patient sample, to another sample, e.g., a non-breast cancer sample, or between samples from different sources.

[0306] Alternatively, the expression level can be provided as a relative expression level. To determine a relative expression level of a marker, the level of expression of the marker is determined for 10 or more samples of normal versus cancer cell isolates, preferably 50 or more samples, prior to the determination of the expression level for the sample in question. The mean expression level of each of the genes assayed in the larger number of samples is determined and this is used as a baseline expression level for the marker. The expression level of the marker determined for the test sample (absolute level of expression) is then divided by the mean expression value obtained for that marker. This provides a relative expression level.

[0307] Preferably, the samples used in the baseline determination will be from breast cancer or from non-breast cancer cells of breast tissue. The choice of the cell source is dependent on the use of the relative expression level. Using expression found in normal tissues as a mean expression score aids in validating whether the marker assayed is breast specific (versus normal cells). In addition, as more data is accumulated, the mean expression value can be revised, providing improved relative expression values based on accumulated data. Expression data from breast cells provides a means for grading the severity of the breast cancer state.

[0308] In another embodiment of the present invention, a polypeptide corresponding to a marker is detected. A preferred agent for detecting a polypeptide of the invention is an antibody capable of binding to a polypeptide corresponding to a marker of the invention, preferably an antibody with a detectable label. Antibodies can be polyclonal, or more preferably, monoclonal. An intact antibody, or a fragment thereof (e.g., Fab or F(ab′)₂) can be used. The term “labeled”, with regard to the probe or antibody, is intended to encompass direct labeling of the probe or antibody by coupling (i.e., physically linking) a detectable substance to the probe or antibody, as well as indirect labeling of the probe or antibody by reactivity with another reagent that is directly labeled. Examples of indirect labeling include detection of a primary antibody using a fluorescently labeled secondary antibody and end-labeling of a DNA probe with biotin such that it can be detected with fluorescently labeled streptavidin.

[0309] Proteins from breast cells can be isolated using techniques that are well known to those of skill in the art. The protein isolation methods employed can, for example, be such as those described in Harlow and Lane (Harlow and Lane, 1988, Antibodies: A Laboratory Manual, Cold Spring Harbor Laboratory Press, Cold Spring Harbor, N.Y.).

[0310] A variety of formats can be employed to determine whether a sample contains a protein that binds to a given antibody. Examples of such formats include, but are not limited to, enzyme immunoassay (EIA), radioimmunoassay (RIA), Western blot analysis and enzyme linked immunoabsorbant assay (ELISA). A skilled artisan can readily adapt known protein/antibody detection methods for use in determining whether breast cells express a marker of the present invention.

[0311] In one format, antibodies, or antibody fragments, can be used in methods such as Western blots or immunofluorescence techniques to detect the expressed proteins. In such uses, it is generally preferable to immobilize either the antibody or proteins on a solid support. Suitable solid phase supports or carriers include any support capable of binding an antigen or an antibody. Well-known supports or carriers include glass, polystyrene, polypropylene, polyethylene, dextran, nylon, amylases, natural and modified celluloses, polyacrylamides, gabbros, and magnetite.

[0312] One skilled in the art will know many other suitable carriers for binding antibody or antigen, and will be able to adapt such support for use with the present invention. For example, protein isolated from breast cells can be run on a polyacrylamide gel electrophoresis and immobilized onto a solid phase support such as nitrocellulose. The support can then be washed with suitable buffers followed by treatment with the detectably labeled antibody. The solid phase support can then be washed with the buffer a second time to remove unbound antibody. The amount of bound label on the solid support can then be detected by conventional means.

[0313] The invention also encompasses kits for detecting the presence of a polypeptide or nucleic acid corresponding to a marker of the invention in a biological sample (e.g. an breast-associated body fluid). Such kits can be used to determine if a subject is suffering from or is at increased risk of developing breast cancer. For example, the kit can comprise a labeled compound or agent capable of detecting a polypeptide or an mRNA encoding a polypeptide corresponding to a marker of the invention in a biological sample and means for determining the amount of the polypeptide or mRNA in the sample (e.g., an antibody which binds the polypeptide or an oligonucleotide probe which binds to DNA or mRNA encoding the polypeptide). Kits can also include instructions for interpreting the results obtained using the kit.

[0314] For antibody-based kits, the kit can comprise, for example: (1) a first antibody (e.g., attached to a solid support) which binds to a polypeptide corresponding to a marker of the invention; and, optionally, (2) a second, different antibody which binds to either the polypeptide or the first antibody and is conjugated to a detectable label.

[0315] For oligonucleotide-based kits, the kit can comprise, for example: (1) an oligonucleotide, e.g., a detectably labeled oligonucleotide, which hybridizes to a nucleic acid sequence encoding a polypeptide corresponding to a marker of the invention or (2) a pair of primers useful for amplifying a nucleic acid molecule corresponding to a marker of the invention. The kit can also comprise, e.g., a buffering agent, a preservative, or a protein stabilizing agent. The kit can further comprise components necessary for detecting the detectable label (e.g., an enzyme or a substrate). The kit can also contain a control sample or a series of control samples which can be assayed and compared to the test sample. Each component of the kit can be enclosed within an individual container and all of the various containers can be within a single package, along with instructions for interpreting the results of the assays performed using the kit.

[0316] B. Pharmacogenomics

[0317] Agents or modulators which have a stimulatory or inhibitory effect on expression of a marker of the invention can be administered to individuals to treat (prophylactically or therapeutically) breast cancer in the patient. In conjunction with such treatment, the pharmacogenomics (i.e., the study of the relationship between an individual's genotype and that individual's response to a foreign compound or drug) of the individual may be considered. Differences in metabolism of therapeutics can lead to severe toxicity or therapeutic failure by altering the relation between dose and blood concentration of the pharmacologically active drug. Thus, the pharmacogenomics of the individual permits the selection of effective agents (e.g., drugs) for prophylactic or therapeutic treatments based on a consideration of the individual's genotype. Such pharmacogenomics can further be used to determine appropriate dosages and therapeutic regimens. Accordingly, the level of expression of a marker of the invention in an individual can be determined to thereby select appropriate agent(s) for therapeutic or prophylactic treatment of the individual.

[0318] Pharmacogenomics deals with clinically significant variations in the response to drugs due to altered drug disposition and abnormal action in affected persons. See, e.g., Linder (1997) Clin. Chem. 43(2):254-266. In general, two types of pharmacogenetic conditions can be differentiated. Genetic conditions transmitted as a single factor altering the way drugs act on the body are referred to as “altered drug action.” Genetic conditions transmitted as single factors altering the way the body acts on drugs are referred to as “altered drug metabolism”. These pharmacogenetic conditions can occur either as rare defects or as polymorphisms. For example, glucose-6-phosphate dehydrogenase (G6PD) deficiency is a common inherited enzymopathy in which the main clinical complication is hemolysis after ingestion of oxidant drugs (anti-malarials, sulfonamides, analgesics, nitrofurans) and consumption of fava beans.

[0319] As an illustrative embodiment, the activity of drug metabolizing enzymes is a major determinant of both the intensity and duration of drug action. The discovery of genetic polymorphisms of drug metabolizing enzymes (e.g., N-acetyltransferase 2 (NAT 2) and cytochrome P450 enzymes CYP2D6 and CYP2C19) has provided an explanation as to why some patients do not obtain the expected drug effects or show exaggerated drug response and serious toxicity after taking the standard and safe dose of a drug. These polymorphisms are expressed in two phenotypes in the population, the extensive metabolizer (EM) and poor metabolizer (PM). The prevalence of PM is different among different populations. For example, the gene coding for CYP2D6 is highly polymorphic and several mutations have been identified in PM, which all lead to the absence of functional CYP2D6. Poor metabolizers of CYP2D6 and CYP2C19 quite frequently experience exaggerated drug response and side effects when they receive standard doses. If a metabolite is the active therapeutic moiety, a PM will show no therapeutic response, as demonstrated for the analgesic effect of codeine mediated by its CYP2D6-formed metabolite morphine. The other extreme are the so called ultra-rapid metabolizers who do not respond to standard doses. Recently, the molecular basis of ultra-rapid metabolism has been identified to be due to CYP2D6 gene amplification.

[0320] Thus, the level of expression of a marker of the invention in an individual can be determined to thereby select appropriate agent(s) for therapeutic or prophylactic treatment of the individual. In addition, pharmacogenetic studies can be used to apply genotyping of polymorphic alleles encoding drug-metabolizing enzymes to the identification of an individual's drug responsiveness phenotype. This knowledge, when applied to dosing or drug selection, can avoid adverse reactions or therapeutic failure and thus enhance therapeutic or prophylactic efficiency when treating a subject with a modulator of expression of a marker of the invention.

[0321] This invention also provides a process for preparing a database comprising at least one of the markers set forth in the Sequence Listing. For example, the polynucleotide sequences are stored in a digital storage medium such that a data processing system for standardized representation of the genes that identify a breast cancer cell is compiled. The data processing system is useful to analyze gene expression between two cells by first selecting a cell suspected of being of a neoplastic phenotype or genotype and then isolating polynucleotides from the cell. The isolated polynucleotides are sequenced. The sequences from the sample are compared with the sequence(s) present in the database using homology search techniques. Greater than 90%, more preferably greater than 95% and more preferably, greater than or equal to 97% sequence identity between the test sequence and the polynucleotides of the present invention is a positive indication that the polynucleotide has been isolated from a breast cancer cell as defined above.

[0322] In an alternative embodiment, the polynucleotides of this invention are sequenced and the information regarding sequence and in some embodiments, relative expression, is stored in any functionally relevant program, e.g., in Compare Report using the SAGE software (available though Dr. Ken Kinzler at John Hopkins University). The Compare Report provides a tabulation of the polynucleotide sequences and their abundance for the samples normalized to a defined number of polynucleotides per library (say 25,000). This is then imported into MS-ACCESS either directly or via copying the data into an Excel spreadsheet first and then from there into MS-ACCESS for additional manipulations. Other programs such as SYBASE or Oracle that permit the comparison of polynucleotide numbers could be used as alternatives to MS-ACCESS. Enhancements to the software can be designed to incorporate these additional functions. These functions consist in standard Boolean, algebraic, and text search operations, applied in various combinations to reduce a large input set of polynucleotides to a manageable subset of a polynucleotide of specifically defined interest.

[0323] One skilled in the art may create groups containing one or more project(s) by combining the counts of specific polynucleotides within a group (e.g., GroupNormal=Normal1+Normal2, GroupTumor1+TumorCellLine). Additional characteristic values are also calculated for each tag in the group (e.g., average count, minimum count, maximum count). One skilled in the art may calculate individual tag count ratios between groups, for example the ratio of the average GroupNormal count to the average GroupTumor count for each polynucleotide. A statistical measure of the significance of observed differences in tag counts between groups may be calculated.

[0324] C. Monitoring Clinical Trials

[0325] Monitoring the influence of agents (e.g., drug compounds) on the level of expression of a marker of the invention can be applied not only in basic drug screening, but also in clinical trials. For example, the effectiveness of an agent to affect marker expression can be monitored in clinical trials of subjects receiving treatment for breast cancer. In a preferred embodiment, the present invention provides a method for monitoring the effectiveness of treatment of a subject with an agent (e.g., an agonist, antagonist, peptidomimetic, protein, peptide, nucleic acid, small molecule, or other drug candidate) comprising the steps of (i) obtaining a pre-administration sample from a subject prior to administration of the agent; (ii) detecting the level of expression of one or more selected markers of the invention in the pre-administration sample; (iii) obtaining one or more post-administration samples from the subject; (iv) detecting the level of expression of the marker(s) in the post-administration samples; (v) comparing the level of expression of the marker(s) in the pre-administration sample with the level of expression of the marker(s) in the post-administration sample or samples; and (vi) altering the administration of the agent to the subject accordingly. For example, increased administration of the agent can be desirable to increase expression of the marker(s) to higher levels than detected, i.e., to increase the effectiveness of the agent. Alternatively, decreased administration of the agent can be desirable to decrease expression of the marker(s) to lower levels than detected, i.e., to decrease the effectiveness of the agent.

[0326] D. Surrogate Markers

[0327] The markers of the invention may serve as surrogate markers for one or more disorders or disease states or for conditions leading up to disease states, and in particular, breast cancer. As used herein, a “surrogate marker” is an objective biochemical marker which correlates with the absence or presence of a disease or disorder, or with the progression of a disease or disorder (e.g., with the presence or absence of a tumor). The presence or quantity of such markers is independent of the disease. Therefore, these markers may serve to indicate whether a particular course of treatment is effective in lessening a disease state or disorder. Surrogate markers are of particular use when the presence or extent of a disease state or disorder is difficult to assess through standard methodologies (e.g., early stage tumors), or when an assessment of disease progression is desired before a potentially dangerous clinical endpoint is reached (e.g., an assessment of cardiovascular disease may be made using cholesterol levels as a surrogate marker, and an analysis of HIV infection may be made using HIV RNA levels as a surrogate marker, well in advance of the undesirable clinical outcomes of myocardial infarction or fully-developed AIDS). Examples of the use of surrogate markers in the art include: Koomen et al. (2000) J. Mass. Spectrom. 35: 258-264; and James (1994) AIDS Treatment News Archive 209.

[0328] The markers of the invention are also useful as pharmacodynamic markers. As used herein, a “pharmacodynamic marker” is an objective biochemical marker which correlates specifically with drug effects. The presence or quantity of a pharmacodynamic marker is not related to the disease state or disorder for which the drug is being administered; therefore, the presence or quantity of the marker is indicative of the presence or activity of the drug in a subject. For example, a pharmacodynamic marker may be indicative of the concentration of the drug in a biological tissue, in that the marker is either expressed or transcribed or not expressed or transcribed in that tissue in relationship to the level of the drug. In this fashion, the distribution or uptake of the drug may be monitored by the pharmacodynamic marker. Similarly, the presence or quantity of the pharmacodynamic marker may be related to the presence or quantity of the metabolic product of a drug, such that the presence or quantity of the marker is indicative of the relative breakdown rate of the drug in vivo. Pharmacodynamic markers are of particular use in increasing the sensitivity of detection of drug effects, particularly when the drug is administered in low doses. Since even a small amount of a drug may be sufficient to activate multiple rounds of marker transcription or expression, the amplified marker may be in a quantity which is more readily detectable than the drug itself. Also, the marker may be more easily detected due to the nature of the marker itself; for example, using the methods described herein, antibodies may be employed in an immune-based detection system for a protein marker, or marker-specific radiolabeled probes may be used to detect a mRNA marker. Furthermore, the use of a pharmacodynamic marker may offer mechanism-based prediction of risk due to drug treatment beyond the range of possible direct observations. Examples of the use of pharmacodynamic markers in the art include: Matsuda et al. U.S. Pat. No. 6,033,862; Hattis et al. (1991) Env. Health Perspect. 90: 229-238; Schentag (1999) Am. J. Health-Syst. Pharm. 56 Suppl. 3: S21-S24; and Nicolau (1999) Am, J. Health-Syst. Pharm. 56 Suppl. 3: S16-S20.

[0329] The markers of the invention are also useful as pharmacogenomic markers. As used herein, a “pharmacogenomic marker” is an objective biochemical marker which correlates with a specific clinical drug response or susceptibility in a subject (see, e.g., McLeod et al. (1999) Eur. J. Cancer 35(12): 1650-1652). The presence or quantity of the pharmacogenomic marker is related to the predicted response of the subject to a specific drug or class of drugs prior to administration of the drug. By assessing the presence or quantity of one or more pharmacogenomic markers in a subject, a drug therapy which is most appropriate for the subject, or which is predicted to have a greater degree of success, may be selected. For example, based on the presence or quantity of RNA or protein for specific tumor markers in a subject, a drug or course of treatment may be selected that is optimized for the treatment of the specific tumor likely to be present in the subject. Similarly, the presence or absence of a specific sequence mutation in marker DNA may correlate with drug response. The use of pharmacogenomic markers therefore permits the application of the most appropriate treatment for each subject without having to administer the therapy.

[0330] VII. Experimental Protocol

[0331] A. Subtracted Libraries and Transcript Profiling

[0332] Subtracted libraries are generated using a PCR based method that allows the isolation of clones expressed at higher levels in one population of mRNA (tester) compared to another population (driver). Both tester and driver mRNA populations are converted into cDNA by reverse transcription, and then PCR amplified using the SMART PCR kit from Clontech. Tester and driver cDNAs are then hybridized using the PCR-Select cDNA subtraction kit from Clontech. This technique results in both subtraction and normalization, which is an equalization of copy number of low-abundance and high-abundance sequences. After generation of the subtractive libraries, a group of 96 or more clones from each library is tested to confirm differential expression by reverse Southern hybridization.

[0333] B. Proteomics

[0334] Proteins that are secreted by normal and transformed cells in culture are analyzed to identify those proteins that are likely to be secreted by cancerous cells into body fluids. Supernatants are isolated and MWT-CO filters are used to simplify the mixture of proteins. The proteins are then digested with trypsin. The tryptic peptides are loaded onto a microcapillary HPLC column where they are separated, and eluted directly into an ion trap mass spectrometer, through a custom-made electrospray ionization source. Throughout the gradient, sequence data is acquired through fragmentation of the four most intense ions (peptides) that elute off the column, while dynamically excluding those that have already been fragmented. In this way, approximately 2000 scans worth of sequence data are obtained, corresponding to approximately 50 to 200 different proteins in the sample. These data are searched against databases using correlation analysis tools, such as MS-Tag, to identify the proteins in the supernatants.

[0335] In addition, protein profiling experiments are undertaken to assess whether the proteins associated with the expression of individual markers of the invention are secreted. Transcriptional profiling experiments are performed on fractions of RNA that are obtained from either (a) endoplasmic reticulum-associated (ER-associated) ribosomes, or (b) free ribosomes. Eukaryotic RNA which is isolated from ER-associated ribosomes tends to encode secreted and membrane bound proteins rather than intracellular proteins. Accordingly, markers of the invention which exhibit significantly enhanced expression in fractions of RNA from ER-associated ribosomes (in comparison with RNA from free ribosomes) are predicted to be associated with secreted proteins.

[0336] VIII. Summary of the Sequence Listing

[0337] The Sequence Listing is submitted herewith on two identical CD-ROMs and is hereby incorporated by reference. The Sequence Listing sets forth newly identified nucleotide sequences identified through subtracted library experiments. These sequences were determined to be newly identified through various BLAST searches of the available databases.

[0338] The two identical CD-ROMs containing the Sequence Listing are in IBM-PC machine format with operating system compatibility with MS-Windows. The Sequence Listing is named “seqlist.txt,” is 15,722 KB in size and was created Jul. 18, 2001.

[0339] The contents of all references, patents, published patent applications, and database records cited throughout this application are hereby incorporated by reference.

[0340] Other Embodiments

[0341] Those skilled in the art will recognize, or be able to ascertain using no more than routine experimentation, many equivalents to the specific embodiments of the invention described herein. Such equivalents are intended to be encompassed by the following claims.

The application's sequence listing, which the Patent Office published only in electronic form, follows.

SEQUENCE LISTING (14084 sequences)

SEQ ID NO: 1 - DNA, 551 bp, Homo sapiens
  misc_feature 2, 3, 524, 551: n = A,T,C or G
gnngagacactacttagggcgaattggagctccccgcggtggcggccgcccgggcaggtacaataaagttcacccaccctgcactttggcccttagatcaatcctaagtagccattgccagtaggccaagtttaatcagaggacagtgcctaccagtaaatactgaatagttacaatagttatgtccatccaaccagtagcagatgaacagctaatacatcatgatgctatgctctcctaacagggtcccctcagatcctcagtgagcacataaagaaagggaggtcatatcccttacatctctaccaggtattaacacctaactactctctagccagaggcaattccctttatttccttactctcgtcgtcttctctttagcccaatctcctgacaatagttaaaacaaaaagacccccaaaatatctcttgctaaaacagaagtagtccctaaactctctcatcttagactactgtcaggtacctcggccgctctagaactaggtggatcccccggggctgnaggaattcgatatcaagcttatcgatn

SEQ ID NO: 2 - DNA, 511 bp, Homo sapiens
  misc_feature 3, 4: n = A,T,C or G
agnnggccgcgatcgactactatagggcgaattggagctccccgcggtggcggccgaggtacatcatatgcctgctgaagtgctctgactttaggatgagaaactctaacataggccggaagacaaataaaccataaactgtaacaatgactaaacagacacttggcccactgtggtggatttgtataacatctcttcgccaatttatgagctgtttttatttcctgtttagttctcttagccatgagaggtggactctttgacctgcccgggcggccgctctagaactagtggatcccccgggctgcaggaattcgatatcaagcttatcgataccgtcgacctcgagggggggcccggtacccagcttttgttccctttagtgagggttaattgcgcgcttgggcgtaatcatgggcataagctgtttcctgtgtgaaattgttatccgctcacaattccacacaacataccgagccgggagcataaaaagtgtaaagccctgggggtg

SEQ ID NO: 3 - DNA, 539 bp, Homo sapiens
  misc_feature 2, 3, 4, 5, 11, 13: n = A,T,C or G
gnnnngtcccnancactacttagggcgaattggagctccccgcggtggcggccgcccgggcaggtaccgctatatccgccagttgatgactgtccatctctagcccctctaaccatgctatgcacccagtgagtgcagaatgattactagtaattgatgttgactttacaattctatgacatgtaatacaggatgccgaggcacttttaaaattccacctaacatgttctggcactggaaaatcttacttgagattttaatactggttaatataggaaaaattatgcttaagcaccactaacttaaaagtgtaatttcattttcttgaatttaggtaaaagcaaaattctcaaaattctattatggcacatggtttcacagtttcaacctcggccgctctagaactagtggatcccccgggctgcaggaattcgatatcaagcttatcgataccgtcgacctcgagggggggcccggtacccagcttttgttccctttagtgagggttaattgcgcgcttggcgtaatcatggtcatag

SEQ ID NO: 4 - DNA, 533 bp, Homo sapiens
  misc_feature 2, 3, 4, 6, 10, 12, 14, 515, 533: n = A,T,C or G
gnnngnggcncnancactacttagggcgaattggagctccccgcggtggcggccgaggtgtgctatagacgcacaaacgaccgcgagccacaaatcaagcacacatatcaaaaaacaaatgagctcttattttgtaaactcattttgcggtcgctatccaaatggcccggactaccagttgcataattatggagatcatagttccgtgagcgagcaattcagggactcggcgagcatgcactccggcaggtacctgcccgggcggccgctctagaactagtggatcccccgggctgcaggaattcgatatcaagcttatcgataccgtcgacctcgagggggggcccggtacccagcttttgttccctttagtgagggttaattgcgcgcttggcgtaatcatggtcatagctgtttcctgtgtgaaattgttatccgctcacaattccacacaacatacgagccgggagcataaagtgtaaagctggggtgcctaatgagggagctacttacantaattggcgttgcgctcn

SEQ ID NO: 5 - DNA, 505 bp, Homo sapiens
  misc_feature 3, 498, 505: n = A,T,C or G
gcnctatcactacttagggcaattggagctccccgcggtggcggccgcccgggcaggtacctaacctacctttaagactgggataactattggaaacaatagctaataccggatatagttatttatcgcatgatgagtaatagaaaggagcttcacagcttcacttaaaaatgggggtgcggaacattagttagttggtagggtaatggcctaccaagacgatgatgtttagccgggccgagaggctgtacctcggccgctctagaactagtggatcccccgggctgcaggaattcgatatcaagcttatcgataccgtcgacctcgagggggggcccggtacccagcttttgttccctttagtgagggttaattgcgcgcttggcgtaatcatggtcatagctgtttcctgtgtgaaattggtatcccgctcacaattccacacaacatacgagccgggagcataaaagtgtaaaagcctggggtgcctaaatgagngagctan

SEQ ID NO: 6 - DNA, 527 bp, Homo sapiens
  misc_feature 4, 8, 11, 374, 478, 487, 506: n = A,T,C or G
gccnatcnctncttagggcgaattggagctccccgcggtggcggccgcccgggcaggtacaaaataacatcataaataacataaatgagaagttttcaagtatttcaatgtgccttgaaaagtttcaaacagtaattctcacaattggttagacaatcatttttttttcttttcttttcctctcatttagtctcagagcctaaaaagaaatgcctccagtctctgttagccccgatgtttggaatgaaattaacaagattctaccttaaaagagaaaacttatgtgggcttttcaaattgtgaaaatttgttccctcttataaaatataatctttcccctgctgctggtttataaatatgggcatatagcccanagccattataaagaaaaaacaacccaccacaataaactaaggagcctcatctgatggctaagggttctcaggaaaaaatgagaagagccccttgatcaggaaanggaaaaaanggttggagggttaaaaacnggtaacctttacttctatgcc

SEQ ID NO: 7 - DNA, 516 bp, Homo sapiens
  misc_feature 3, 12, 471, 489, 509: n = A,T,C or G
agncggccgcgnatcactactatagggcgaattggagctccccgcggtggcggccgcccgggcaggtactgctagctggaaaaaccatatagaaaacatgatgaccatgttgagttgttggtgctgaggctgtgaactctttggcttccttctgatggccctcttgagaacaatctgtacctcggccgctctagaactagtggatcccccgggctgcaggaattcgatatcaagcttatcgataccgtcgacctcgagggggggcccggtacccagcttttgttccctttagtgagggttaattgcgcgcttggcgtaatcatggtcatagctgtttcctgtgtgaaattgttatccgctcacaattccacacaacatacgagccgggagcataaagtgtaaagcctggggtgcctaatgagtgagctaactcacattaattgcgttgcgctcactgccgcttttcagtcnggaaaccctgtcgtgccnacttgcatttaatgaatcgnccacgcc

SEQ ID NO: 8 - DNA, 409 bp, Homo sapiens
cgcgtaataccgacctcactatagggcgaattggagctccaccgcggtggcggccgaggtacctaacctacctttaagactgggataactattggaaacaatagctaataccggatatagttatttatcgcatgatgagtaatagaaaggagcttcacagcttcacttaaaaatgggggtgcggaacattagttagttggtagggtaatggcctaccaagacgatgatgtttagccgggccgagaggctgtacctgcccgggcggccgctctagaactagtggatcccccgggctgcaggaattcgatatcaagcttatcgataccgtcgacctcgagggggggcccggtacccagcttttgttccctttagtgagggttaattgcgcgcttggcgtaatcatggtcat

SEQ ID NO: 9 - DNA, 395 bp, Homo sapiens
gagcgccccgtaataccgactcactatagggcgaattggagctccaccgcggtggcggccgcccgggcaggtacttgtttatagactcaaaacatgatgaaaattcatttcattgtcttcactgaatagacttaaccttgacagtaagcttaaagcattagtgtcatttaattacatgtctgaggaatttatgctaactagattttgggcttttgcagcgaattttagtcggggcctcattcctgagcccaagtgaccctttcacctcagcttcccaagtagctgggattacaggtgcacaccaactgtgctttgcagttttgtttgtgtgtgtgtgtgtgtgtgtgtgtattttgttttttttacaagcccacaacatcatagctttgcagttt

SEQ ID NO: 10 - DNA, 388 bp, Homo sapiens
  misc_feature 275: n = A,T,C or G
gagccccccgtaataccgactcactatagggcgaattggagctccaccgcggtggcggccgaggtacagcattgatgaacactttcagccgaagcagattgtcaagtctcttatcccttcgtggaacaaactggttttctttgaagtatctcctgtgtcctttcaccaggtgtctgaagtgctgtctgaagaaaagtcacgtttgtctataagtggctggtttcatggtccatcattgactcggcctcccaactactttgaaccccccatacctnggagccctcacatcccacaagatcatgagattttgtatgattggatcaaccctacttatctggacatggattaccaagttcaaattcaagaagagtttgaagaaagttctgaa

SEQ ID NO: 11 - DNA, 507 bp, Homo sapiens
  misc_feature 2, 320, 371, 451, 483, 492, 499, 505, 507: n = A,T,C or G
angccgcccgaaacgactactatagggcgaattggagctccccgcggtggcggccgcccgggcaggtacattgtggtaggtccaggaaatatgacattttcccccttgatgtgttattgttgttgttgggtggggtgggcattttgtttatttgtttggtggcaatcagtggtagtagggagtgggagggcttatattggtttttccagctattaaggggacatattgtgtcgttgtgcttttcacgttataaaatgtttatatttaccagtacctcggccgctctagaactagtggatcccccgggctgcaggaattcnatatcaagcttatcgatacccgtcgacctcgagggggggcccggtacccancttttgttccctttagtgagggttaattgcccgcttggcgtaatcatggtcataactgtttcctgggtgaaaatggtatnccctcacaatttcacacaacatacgagcccgnagcataaantgtaaancttggntn

SEQ ID NO: 12 - DNA, 382 bp, Homo sapiens
cgcgtaatacgactcactatagggcgaattggagctccccgcggtggcggccgaggtacagcactgggctttataaagactgcactcagaaccacactgcacagtccagttttttaaaaagctgctacatgacagacaggtaatcccactgagtgagttttgagaaacaaatcaaacgaagtaaacaagaaacataaaaaccaaatagcaaatgaataaaagcctgttcttgtaacttattcaacttttgccaaattcctaccaatcacttgctttttaaaagaaatgtataacagccaaaagagaaattatgtccctgttgtacctgcccgggcggccgctctagaactagtggatcccccgggctgcaggaattcgatat

SEQ ID NO: 13 - DNA, 390 bp, Homo sapiens
cgcgtaataccgactcactatagggcgaattggagctccaccgcggtggcggccgcccgggcaggtacattcaaatcaggacacctgggtatatggacaaagatatcctacaattaaaatggaatagaagttaaaaaaaaaattcagtcccctacaccacaggcctcaaacatgcttgctgatggattctgggaaggttttggatgaaggacggagatatgggaggaaagtgagaaaacagtggattccctttgaaaagtatgctagcagacaagcatttggttttatgaaagaggcactcttatagagaaagaagctagtatgtggtgtataaaaagcccctaaatcatcaccagaatgtctatccatgattgtacctcggccgctctc

SEQ ID NO: 14 - DNA, 407 bp, Homo sapiens
gagcgccccgtaataccgactcactatagggcgaattggagctccaccgcggtggcggccgcccgggcaggtacgccgtttcttgtaaacacgaggcaccccaagataagaagacagatagagcaagggatggacatggtcatctcctcagtgattggagaaagttaccggcttcagtttgattttcaagaggcagtgaagaatttcttccccccaggaaatgaagtggttaatggagaaaatttaagctttgcatatgaattcaaagctgatgcattatttgatttcttctattggtttgggctcagtaattccgttgtaaaagtaaatggaaaagttctgaatttgtcaagtacctcggccgctctagaactagtggatcccccgggctgcaggaattcgatatc

SEQ ID NO: 15 - DNA, 403 bp, Homo sapiens
gagcgcgcgtaatacgacctcactatagggcgaattggagctccaccgcggtggcggccgaggtactcttggatgtgttttctcaccaagatgagcaaagaaaggtttgcacagaggagtgtgaatgtgtgtttgttgctggctgaatggcaatagatgtctaaggtggattcagtgtctggcacactgagacacctccaagaaggagattgatgcatcaggttcagtttaacctggaatatctgactacccctgaatccacccagaaagggggcccaacacccttgtccatttatgggtattttttttcgaagttattaagcatattccttttccacgaacctcttctgtacctgcccgggcggccgctctagaactagtggatcccccgggctgcaggaat

SEQ ID NO: 16 - DNA, 615 bp, Homo sapiens
  misc_feature 2, 3, 11, 18, 610: n = A,T,C or G
gnngtttttcnagccacnttactatagggcgaattggagctccccgcggtggcggccgaggtacttggcatatattaggccttcaaatgatgatggatggatagacagataaaaggcccaatgaatgattgtaaatgtgtcttctcctatgtatccatgatgatattgcctagtttttaatacaagcttaagaatcaataaaatgatagatctgaaatctgtagatgccagtctggctcagtattaatactgacagtagtttttttgttttttaagaaagcaagtatattaaaatatctctgttagaaaagattacaatttgaaaggatcattctacaatcttagaactaaaaagcaatttaaggcaaagaggtacctgcccgggcggccgctctagaactagtggatcccccgggctgcaggaattcgatatcaagcttatcgataccgtcgacctcgagggggggcccggtcccagcttttgttccctttagtgagggttaattgcgcgcttggccgtaatcatggtcatagctgttttcctgtgtgaaattggtatcccgctcacaattcccacaacatacgagcccgggagcataaagtgtaaagnctggg

SEQ ID NO: 17 - DNA, 518 bp, Homo sapiens
  misc_feature 5, 9, 480: n = A,T,C or G
gcccnaacnctacttagggcgaattggagctccccgcggtggcggccgaggtacctctttgccttaaattgctttttagttctaagattgtagaatgatcctttcaaattgtaatcttttctaacagagatattttaatatacttgctttcttaaaaaacaaaaaaactactgtcagtattaatactgagccagactggcatctacagatttcagatctatcattttattgattcttaagcttgtattaaaaactaggcaatatcatcatggatacataggagaagacacatttacaatcattcattgggccttttatctgtctatccatccatcatcatttgaaggcctaatatatgccaaggtacctgcccgggcggccgctctagaactaggtgggatcccccgggctgcaggaattcgatatcaagcttatcgataccgtcgacctcgaggggggggcccggtcccagctttttgntccctttagggaggggttaattgcgcctttggcgtaat

SEQ ID NO: 18 - DNA, 519 bp, Homo sapiens
  misc_feature 2, 3, 5, 7, 8, 12, 484, 519: n = A,T,C or G
gnngngnncccnatcactacttagggcgaattggagctccccgcggtggcggccgaggtacttggcatatattaggccttcaaatgatgatggatggatagacagataaaaggcccaatgaatgattgtaaatgtgtcttctcctatgtatccatgatgatattgcctagtttttaatacaagcttaagaatcaataaaatgatagatctgaaatctgtagatgccagtctggctcagtattaatactgacagtagtttttttgttttttaagaaagcaagtatattaaaatatctctgttagaaaagattacaatttgaaaggatcattctacaatcttagaactaaaaagcaatttaaggcaaagaggtacctgcccgggcggccgctctagaactaggtggatcccccgggctgcaggaattcgatatcaagcttatcgataccgtcgacctcgagggggggcccggtcccacttttggtnctttagggagggttaattgcgcctttggcgtaatn

SEQ ID NO: 19 - DNA, 612 bp, Homo sapiens
  misc_feature 13, 551, 605, 612: n = A,T,C or G
ggatttgtttcangcctacttagggcgaattggagctccccgcggtggcggccgcccgggcaggtacctaacctacctttaagactgggataactattggaaacaatagctaataccggatatagttatttatcgcatgatgagtaatagaaaggagcttcacagcttcacttaaaaatgggggtgccggaacattagttagttggtagggtaatggcctaccaagacgatgatgtttagccgggccgagaggctgtacctcggccgctctagaactagtggatcccccgggctgcaggaattcgatatcaagcttatcgataccgtcgacctcgagggggggcccggtacccagcttttgttccctttagtgagggttaattgcgcgcttggcgtaatcatggtcatagctgtttcctgtgtgaaattgttatccgctcacaattccacacaacatacgagccgggagcataaaagtgtaaagcctggggtgcctaatgagtgagctaactcacattaattgcgttgcgctcactgcccgctttcagtcnggaaactgtcgtgccagctgcattaatgaatcggccaaccgcccgggagaggcnggttgcn

SEQ ID NO: 20 - DNA, 568 bp, Homo sapiens
  misc_feature 2, 3, 4, 5, 14: n = A,T,C or G
gnnnncgtcccgancactactatagggcgaattggagctccccgcggtggcggccgaggtacaaattctcttcttaaccatttggtcctctgatataaaacttgcttaactggcaagatggctcacttggtcctcaagccaacatcaagaaatatttagctgtcttaacacaggtgggagacttttttttaatgaaatacataggaatccattaagtaacattagcatgtcatgtgttaaatagcttcatttaaaaatgttacagatcaacagaagggaaatcaaaaacttatttttctcagtaactactttacatactagtgtaattaaaggtttaactggaagaaaaattcagcataaaagtataattaaagtaaaaagctggtattccacattcctgttcctatgaacacctgagctggcacaaaagctgagtagtttaatgcatttggcatatatatgccttaaggactgtacctgcccgggcggccgctctagaactagtggatcccccgggctgcaggaattcgatatcaagcttatcgataccgtcgactcgagggggggg

SEQ ID NO: 21 - DNA, 552 bp, Homo sapiens
  misc_feature 3, 9: n = A,T,C or G
gcncgaacnctactatagggcgaattggagctccccgcggtggcggccgaggtactaaaaacacaaaagcacttatcagacaccctatggcatttgttgctgaaatgtctaccggctggagattagccttgagccgaagcagcctcagagccaacactggcttcctcctgtaaatcatctccagcagaggactctgactcagccggagaattttcttcttctagttcagcatattcatcagaggtttcgttctttgttgtatctttatcattatcgatggtgacagcttcatccagggcagcatttgtaaccttgggggttgtttcaggggtttacttccgtgggtttccctcgccgctgcatctgtgacctctggccccggtttcagcactgactgcttgtgggtctccggagcagccttccacgtgacctgggacaggcagatgcctcttttatgaccacaacttggtaggtacctgcccgggcggcccgctctaaaactagggggggatccccccgggctgcaggaattcgatatcaaagcttatcgat

SEQ ID NO: 22 - DNA, 471 bp, Homo sapiens
  misc_feature 1, 8, 9, 15, 18, 20, 23, 24, 25, 26, 27, 28, 29, 31, 32,34, 36, 44, 64, 208, 276, 280, 281, 282, 350, 363, 378,381, 390, 402, 405, 421, 426, 452, 464, 465, 469: n = A,T,C or G
nccccacnnggaganatntntcnnnnnnngnngncncgcgtganacgactcactatagggcganttggagctccaccgcggtggcggccgaggtactctgaaggtaggatgtgcagctttttcttaggcaggatagatgtaacatagatgactgcataaaaaagagggcagaaagggcaggaagcccattttttttttaacacttctncattgtgtctctgcctcacccataatggctggtttattcaattattcatatattcccgtttgtgtttncaannnaggtctacacagcaccagcctacaaaggcaaggtccaatccgtgtaaaaaataaaaacttggataatnggaaggccttgcngtaactaaaattagnccnaagtttcanagtatgtggttncanccaatttttatattgngcccnatccatttggataatactttattaancccttgatgtcnntttntt

SEQ ID NO: 23 - DNA, 387 bp, Homo sapiens
  misc_feature 136, 138, 148, 230, 316, 378: n = A,T,C or G
gagccccccgtaataccgactcactatagggcgaattggagctccaccgcggtggcggccgaggtaccacgcacaggagccgtcacttctcttgatgcaggcgaagaacttggcctggtgcccgttgatgttcttntntgtgacccantccatccagaggcactcgtccggggaggagatgtagcaccgggatcatggggcagctcgtgatcttgcactcgcagcccatntggtacctgcccgggcggccgaccgggcaggtacttactttccccataggaagacagaccataggcaaactctgttttgggatctnaactccatcacctttgtttcaatatttttttttctctcttgaacaaaactgagataatttanaaaacaggc

SEQ ID NO: 24 - DNA, 571 bp, Homo sapiens
  misc_feature 5, 498: n = A,T,C or G
gacgnaacactacttagggcgaattggagctccccgcggtggcggccgaggtcacgcagcaacgcggaggaaacgggagtgaacggagagcgtagtgaccatcatgagcctcctcaacaagcccaagagtgagatgaccccagaggagctgcagaagcgagaggaggaggaatttaacaccggtccactctctgtgctcacacagtcagtcaagaacaatacccaagtgctcatcaactgccgcaacaataagaaactcctgggccgcgtgaaggccttcgataggcactgcaacatggtgctggagaacgtgaaggagatgtggactgaggtacctgcccgggcggccgaggtacctgcagaaggcctacagggtgccaggcacttctttaatgtgttctttctttatgtgattatttgattaatctctgcctcccccactaggactgtaagctccctgaaggcaagaatcctgtgcttatgctcaatattagctcntcccttggcacagagtaggcacttcaacaaatgctccccaaaaggctgagtggctgactgaaattaaagtact

SEQ ID NO: 25 - DNA, 515 bp, Homo sapiens
  misc_feature 8, 13, 457, 475: n = A,T,C or G
tagtcttngggcnattggagctccccgcggtggcggccgaggtactctaacctgggcgacagagtgggaccctgtctcaaaaaaaataaataaataaaagaaagaaaagaaatgatctctcctcatagtttgtgtgtaggaaaagaagtgataaaactgacctaattgaacttcaccttttgctcagtgacagataaagctttccttgatagcatacattggctcagtgccagtagtacctgcccgggcggccgctctagaactagtggatcccccgggctgcaggaattcgatatcaagcttatcgataccgtcgacctcgagggggggcccggtacccagcttttgttccctttagtgagggttaattgcgcgcttggcgtaatcatggtataagctgtttcctgtgtgaaattgttatccgctcacaattccacacaacataccagccgggagntaaaagtgtaaagccctngggtgcctaatgagtgagctaactcacattaatttgcgtt

SEQ ID NO: 26 - DNA, 394 bp, Homo sapiens
cgcgtaataccgactcactatagggcgaattggagctccaccgcggtggccgagcggccgcccgggcaggtacatcatgcctccagttctggagctaacacagatttctccaatttcatctgttttgcagagctggggaggtccatctggtttcacaatgcacatcatcccaccaggcattacatgccctacatcctggaccgtcagtgctgaatttttatcttcagtattgacccgtattaccccatagctcaatccattcattgagagaatggctcttcctggcaaaggggctcctggaactccaggcctgcggattgctacagtcatggcttcagcagacgtggcgcacggtcagatggcctcaggcttcagtccatgactttggaacaga

SEQ ID NO: 27 - DNA, 776 bp, Homo sapiens
  misc_feature 6, 568, 574, 681, 696, 716, 722, 746, 753, 754: n = A,T,C or G
gttttnatccctcttttagggcgcattggagctccacttttggtggcggcccgcccggcaggtactcatcagatggaatgttttaccccgccgaggttttagtcatgatgtgctgagctctctgcgtctgacgtgactgactggtagctgggcgttggcgtgacccttctttccctctaggatcacatcatggagaattccacctatgggaaaattaaaatgattgacatgcccgtggaaaggatgcatccccatctgtccaaaggctatgcgtacctcggccgctctagaactagtggatcccccgggctgcaggaattcgatatcaagcttatcgataccgtcgacctcgagggggggcccggtacccagcttttgttccctttagtgagggttaattgcgcgcttggcgtaatcatggtcatagctgtttcctgtgtgaaattgttatccgctcacaattccacacaacatacgagccgggagcataaagtgtaaaagcctggggtgcctaatgaggtgagctaactcacattaattgggttgcgctcactggccgctttccaantcgggnaaacctgtcgtgccagctgcattaatgaatcggccaaccccccggggagaggcggttttgccgtatttggggccgctttttccgctttccttggtttaactgacttnggttggcgcttcggncccttttcggctttgccggnccaaanccgggttttttcaaagcctttcanccttttnnaaaaaaaaaggggggggggggg

SEQ ID NO: 28 - DNA, 421 bp, Homo sapiens
  misc_feature 5, 6, 7: n = A,T,C or G
gagcnnnccgtaatacgactcactatagggcgaattggagctccaccgcggtggcggccgaggtacacaggccagttattatactgctgacaataataaattgtaaaatcttcagactgcaggctgctgatggtgagagtgaaatctgtcccagacccacggccactgaacctggctgggataccagtggccctggtggatgcaccatagatgaggagcctgggagcctggccaggtttctgctggtacctgcccgggcggccgctctagaactagtggatcccccgggctgcaggaattcgatatcaagcttatcgataccgtcgacctcgagggggggcccggtacccagcttttgttccctttagtgagggttaattgcgcgcttggcgtaatcatggtcatagctgtttcctgtgtg

SEQ ID NO: 29 - DNA, 427 bp, Homo sapiens
  misc_feature 2, 3, 4, 8, 43: n = A,T,C or G
gnnnaggngccgctatacactacttagggcgaattggagctcnccgcggtggcggccgaggtacgggggccagttattatactgctgacagtagtaaactgcagaatcttcaggctgcaggctgctgatggtgagagtgaactctgtcccagacccactgccactgaacctggctgggataccagtggccctggtggatgcaccatagatgaggagcctgggagcctggccaggtttctgctggtacctgcccgggcggccgctctagaactagtggatcccccgggctgcaggaattcgatatcaagcttatcgatacccgtccgacctcgaggggggggcccggtacccagctttttgttccctttagtgaaggggttaaattggcgccgcttgggcggtaatcaatggtcattagcctgttttt

SEQ ID NO: 30 - DNA, 753 bp, Homo sapiens
  misc_feature 9, 15, 175, 178, 208, 221, 226, 228, 235, 248, 250, 252,253, 259, 284, 286, 287, 288, 291, 292, 293, 294, 319, 327,328, 334, 351, 352, 357, 358, 371, 382, 383, 392, 399, 416,429, 438, 450, 471, 473, 481, 491, 493, 501, 523, 525: n = A,T,C or G
  misc_feature 528, 530, 535, 536, 539, 540, 541, 550, 554, 555, 556, 557,559, 567, 574, 577, 584, 590, 591, 617, 646, 648, 652, 654,667, 670, 671, 672, 676, 682, 692, 704, 708, 732, 745, 752,753: n = A,T,C or G
ttggtgacncgacgnctaaacgactactatagggcgaattggagctccaccgcggtggcggccgcccgggcaggtactttggcctctctgggatagaagttattcagcaggcacacaacagaggcagttccagatttcaactgctcatcagatggccgggaagtatgaagacagnatngggtgcagtctcaccagatttccgttttgnattcctttttttnccccngntcccccnaaaaaaagggggntntnncccccnatttttttttttttttttggggggncnnnggnnnnaattttttttttataaccccctttncccccaanncccttntatcccccttttttttnnggggnnggggggggggganttccccccccnnccccccccnaaaaagntaaaaaatttgaaaaanatttttaaaaaanggggggggntttttttttttngggggggattttttttttatnanaaaaaaancccccccccncncccccccntttttttttttacccaccgggngnaananggggnnttnnnttttccccncctnnnnancccccccnggggggnggnggtagtncccccnnaattttttttttttttgacccccccntttttttttttttttaaaaaaaaaaaggngngggngntggaaaaaaaaangtnnnaaanactttncccccccccncttttttttttnttanaaaaaaaaaaaggggggggggtgnttttttttttctnggggggnn

SEQ ID NO: 31 - DNA, 447 bp, Homo sapiens
  misc_feature 3, 4: n = A,T,C or G
agnnccctatacgactactatagggcgaattggagctccccgcggtggcggccgaggtacgggggccagttattatactgctgacagtagtaaactgcagaatcttcagactgcaggctgctgatggtgagagtgaactctgtcccagacccactgccactgaacctggctgggataccagtggccctggtggatgcaccatagatgaggagcctgggagcctggccaggtttctgctggtacctgccccgggcggccgctctagaactagtggatcccccgggctgcaggaattcgatatcaagcttatcgataccgtcgacctcgagggggggccccggtacccagcttttgttcccttttagtggaggggttaaattggcgccgctttggccgtaaatcatgggtcataagcctgtttcctgtgtgaaaaattgttattccgct

SEQ ID NO: 32 - DNA, 909 bp, Homo sapiens
  misc_feature 3, 8, 9, 16, 104, 107, 108, 112, 124, 428, 466, 473, 531,534, 535, 544, 564, 584, 611, 619, 626, 652, 659, 667, 674,679, 686, 693, 694, 702, 703, 704, 717, 718, 728, 738, 756,765, 779, 781, 810, 817, 818, 823, 824, 828, 834, 844: n = A,T,C or G
  misc_feature 847, 849, 871, 874, 881, 897, 907: n = A,T,C or G
tanttaanntaccccnactcactatacgtttaattggagctccaccgcggtggcggcccgaggtacctatgggccaatgaatcccaccattttcaaataaatcnttnntcanactccactcagntggaaagttttgctgaaaatatttctggataaaaaacaaaaaacctcatgttggaaatcaactgtccttcccatttggaacattaagaggagtccccagggaacactggtaataggtgaaaatggttcctggagtcaccagtgttgtacagagccgccaggcgactcaattcacgtgctccttttctggggatgaaaaggtgctcaccagatctttctatgcaactgagagctcctaaatcaagtcaaaggggaccatcgtacctgcccgggcggcccgctctaagaactagtggatccccccnggctgcaggaattcgatatcaagcttatcgataccgtngacctcnagggggggcccggaacccaacttttggttccctttaatgagggttaattgcgcgcttngcnnaaacatggncaataactggtttctgggtnaaaatcgttattccgctcanaattccacacaaacattacgaacccgnggaccatnaaagtgnaaaagcccgggggtgcctaaatgagntgaggcntacctcancattaanttgcnttgcctnactgccnnctttccannngggaaaccttgtnnggccacttgnttaaatgaantcggcccacccccggggngaagggggnttgcgtaatgggcncnttttaccctttccttgcttaattgacttncttgctnngcccnntggntggggntaacggtttnacntnatttaaagggggagtccgggtntcncaaaaanaggggaaaacccccgnaaaaaccttntt

SEQ ID NO: 33 - DNA, 555 bp, Homo sapiens
  misc_feature 6, 9, 10, 397, 439, 467, 477, 487, 488, 491, 496, 503, 511,521, 522, 526, 532, 536, 537, 545, 550: n = A,T,C or G
gagagntcnntctactactacttagggcgaattggagctccccgcggtggcggccggaatttccatcggtttgctgagaagcacaactttgcaaaacccaatgacagccgtgctctccagctgatgaccaaatgtgcgcagactgtgatggaagaactagaaggatattgtgatcgcgtatggacagagtgatgagtacctgcccgggccggccgctctagaactagtggatcccccgggctgcaggaattcgatatcaagcttatcgataccgtcgacctcgagggggggcccggtacccaacttttgttccctttagtgagggttaattgcgcgcttggcgtaatcatggtcatagctgttttcctgtgtgaaattggtattccgctcacaattncacacaacataccagccgggagcataaaagttgtaaagcctnggggtgcctaatgagtgagcctactcanattaattggngttggccttnnacngcccntttttcnagttgggnaaaacctttnntggnccaacnttgnnttaaatgnaatangggcc

SEQ ID NO: 34 - DNA, 432 bp, Homo sapiens
  misc_feature 2, 3, 4, 13, 15, 20, 346, 395, 416: n = A,T,C or G
gnnnaggggatgnancgctncttagggcgaattgggccctctagatgcatgctcgagcggccgccagtgtgatggatatctgcagaattcggcttgaggatcctgtgcgcgatcgcaatggacagctactaatggtcacaacgacctctttctctaatccttactttatacatcaaccttcaggtggctccccaaaatgttataccaaatctgtaaaatgcaaataaaacaaaagacaaatctccatcacgtacaacatgaactgaacagccatttaaaaattcaatgggtgagaacttcttggacctcattggctagattcctttcttaaaatccatacacccgnaatttaacagggaaggttccccattccttggaaggagcaaactttcagnatggtaccaagaccttggagntgaaaattatattttt

SEQ ID NO: 35 - DNA, 699 bp, Homo sapiens
  misc_feature 4, 5, 178, 188, 202, 214, 220, 243, 245, 250, 251, 257, 258,264, 279, 287, 334, 335, 346, 347, 348, 354, 381, 385, 418,419, 420, 425, 428, 435, 438, 449, 454, 456, 459, 469, 470,494, 495, 496, 497, 498, 499, 503, 512, 514, 533: n = A,T,C or G
  misc_feature 539, 540, 541, 542, 543, 550, 551, 552, 553, 554, 555, 556,557, 564, 565, 566, 567, 575, 576, 578, 585, 586, 587, 588,589, 590, 624, 647, 654, 655, 656, 657, 658, 661, 662, 663,664, 665, 666, 667, 692: n = A,T,C or G
ttgnnttgacgccctaatacactcactatagggcgaattggagctccaccgcggtggcggctcgaggtacgggggccagttattatactgctgacagtagtaaactgcagaatcttcagactgcaggctgctgatggtgagagtgaactctgtcccaggacccactgccactggaacnctgggctggngatacccaggtggncccctggttggnggggtntaaaaaaatttttttgggggggngnccccnnaaaaanncccccntccccccaaaaaaantttttttntaaaaaaaaggggggggggaaaaaaaaatttttttttgggggggggnnaaaaaaaaaannntttttnggggggtttttaaaaaaaaaggggggntgtncccccccgcccccccctttttttttggggggtnnnggggnttngggggtnttntaaaaaaaaanggggngnttngccccccctnnccccccttttttttttgggggatnnnnnnattntcccccccntnccccccccaaaaaaaaaangggggnnnnnggggggnnnnnnnnttttttnnnntttttttnntnttttttnnnnnnccccccccccttttttttttgggggggggggganccccccccccctttttttttttntggggtnnnnnggnnnnnnntttttttttttttaaaaaaaaaaanccccccc

SEQ ID NO: 36 - DNA, 712 bp, Homo sapiens
  misc_feature 3, 111, 177, 178, 183, 198, 199, 200, 205, 208, 229, 234,243, 270, 276, 284, 301, 311, 312, 320, 366, 393, 395, 396,408, 409, 410, 412, 416, 419, 438, 439, 444, 447, 450, 451,458, 459, 460, 461, 466, 482, 505, 509, 522, 523, 526: n = A,T,C or G
  misc_feature 528, 535, 536, 537, 543, 544, 545, 554, 578, 581, 582, 589,593, 594, 595, 596, 597, 598, 603, 605, 606, 607, 609, 610,630, 635, 637, 638, 639, 640, 643, 644, 647, 648, 650, 652,653, 654, 655, 656, 657, 658, 664, 665, 671, 673, 674: n = A,T,C or G
  misc_feature 677, 687: n = A,T,C or G
gtntgaccgctatacactcactatagggcgaattggagctccaccgcggtggcggccgcccgggcaggtacgggggccagttattatactgctgacagtagtaaactgcanaatcttcagactgcaggctgctgatggtgagagtgaactctgtcccagacccactgccacatgaannctggncctgggggataccannnggggnccntcccccccccccttttttttnggggnggggggggnttttttttggggggggggggggggtanaaaaantttttttngggaaaaaccccccccnaaaaaaaaanncccccctnccccccccaaaaaaaaaattttttttttttaaaaaaggggggggcncaaaaaaaaaatttttttggggggggngnnaaaaaaaaaaannncncccnggnggttttttaaaaaaaaaannggggnggnggnnccccccnnnnccccntttttttttttttggnaaaaaaaaaaaaataggggggtntttnaaaaaaaaaaaanngtntnttttttnnncccccnnntaacccccnttttttttttttttttgggggggnttnnaaaaaanttannnnnnccccntnnntnncccccccaaaaaaaaaaaanagggngnnnnggnngannanannnnnnntttttnncccctncnnttntttttttttnttttccccccccctttttttttttt

SEQ ID NO: 37 - DNA, 440 bp, Homo sapiens
  misc_feature 177, 319, 324: n = A,T,C or G
gactactatagggcgaattgggtaccgggccccccctcgaggtcgacggtatcgataagcttgatatcgaattcctgcagcccgggggatccactagttctagagcggccgcactttttttttctctgtaggaagtcaacgatagagtgacatgttggctctttcatttcaactganacacctggtagctattggatggcatttctgtaattatgaatagtagttgtgataggcttatttgcaccttgtacattctcttacttgggaacgccatctcatgccatttctacgtttcttatgcagttagtttggggcatgnggtantccactggaaaatgactcaagcgtggaatgtatttatgatcacagataaggaagtggccgtccacaaagctttggatggttgtatttgtcatttgaacaaattataataagtttaa

SEQ ID NO: 38 - DNA, 457 bp, Homo sapiens
  misc_feature 379, 416, 421, 429, 431, 434, 457: n = A,T,C or G
ctatcactacttagggcgaattgggtaccgggccccccctcgaggtcgacggtatcgataagcttgatatcgaattcctgcagcccgggggatccactagttctagagcggccgaggtacctgctttgtgatactgtgaagattagataaagcaaatatccacacaggaaagccctgggtgttagcataaagccggagttgagaaggccagctttctatttacgtgctgaacgatgaatagttaaatagtttccgtctggcccacgtccttacacacaccccttgggttttcttctcttccctggtaggactgcatcggacgcgtgggtcgactcaagctagacctgcccgggcggccgccaccgcggtggagctccancttttgttccctttagtgagggttaattgcgcgcttngcgtnatcatggncntangctggtttcctgtgtgaaattgn

SEQ ID NO: 39 - DNA, 452 bp, Homo sapiens
  misc_feature 2: n = A,T,C or G
tnatacgactactatagggcgaattgggtaccgggccccccctcgaggtcgacggtatcgataagcttgatatcgaattcctgcagcccgggggatccactagttctagagcggccgcgcgggcaggtgtccgctcactatagggatctagatcggacgcgtgggtcgactcaagctagcttgtacaaaaactttcaataaaatgcttcaaataatgattgtccgaagcttgctagacactttgtaaatgtcaggaacacattaaatatgttaaatgagcatgtccaatatccagaaaacaacacgaatgatttactatcaatttcacacatgcctgggaatgtctccctgatgcaagacaaaaaggtcctctttgaccagagcatactgaccccaagttttggtcctggcacagtattcatgggtgccattcatgctcaacatgaactgtg

SEQ ID NO: 40 - DNA, 460 bp, Homo sapiens
  misc_feature 2: n = A,T,C or G
tnatacgactcactatagggcgaattgggtaccgggccccccctcgaggtcgacggtatcgataagcttgatatcgaattcctgcagcccgggggatccactagttctagagcggccggggtacaatggaaaaggggctgtgttactaagactgaccaaagaagagattccaatatcttatgatttgtatggtcactgttaactgcaattgtaacatgaacatattgcctataagcctgtgctctcccctttaaacacaaaataaaaaacaagaaaaacaaaacaaaacaaatgaaccaaaatagaaaaccttttacagcgtgagttgtttctacttaggattggacatcagtgcattgatctgagtctggagatcttaggccaacttaacaacctgtgaaaacttctcaatggggtaaccaatatcctaaagcagagtatagtcagagcttgaatgggg

SEQ ID NO: 41 - DNA, 480 bp, Homo sapiens
  misc_feature 292, 306, 313, 315, 316, 322, 327, 328, 331, 350, 351, 352,353, 354, 358, 359, 361, 377, 379, 380, 381, 389, 395, 398,403, 405, 406, 410, 438, 443, 445, 448, 452, 459, 460, 461,465: n = A,T,C or G
attgggtaccgggccccccctcgaggtcgacggtatcgataagcttgatatcgaattcctgcagcccgggggatccactagttctagagcggccgcccgggcaggtctccggcggacgcgtgggtcgactcaagacttttagcctctaagccatctctctcacccattgatttaaaatattttgctttgtgaattttgaattgtaatttttgctaatataattctatcattttctaccttcatttttctcctttcaatcgcttctatctattctccaattttgctggctttnaaactcatagcctnttttttncnntaactnttttnnccngggcccccccccggggggnnnnncccnncncctttttttccccttntnnngggggggnaaattnggnccccncnngggngggaaaaaaaagggggaaaaaaattgtnttccncngtngggnaaaaaannntgtncccccccccccaccc

SEQ ID NO: 42 - DNA, 467 bp, Homo sapiens
  misc_feature 2, 3, 4, 7, 16, 21, 418: n = A,T,C or G
gnnnggngccccgaancactnctatagggcgaattggagctccccgcggtggcggccgaggtacatgctgttctatatcttgatttttttttttctactttacacatctcatgagttttatccccagcactgggtatagaattgccccattcttttcaagggcttgctgtaaagtattctgggaactgggcgcactctctttaactcttcctctgttgattgttttcagtctccttctttctataaagcaagttaaaggaaacattcttttaacaatgtttttaacaagtcttagcaatggtttttattatctgtaggataatctaggagtagagttgccagtttttagagtatgtgcttttgaaattttgtttgtattcacttgggcagcagtaagtcatcttttgcttattgtcgncgctgtctcgacctgaaatcctttctttttatattcttgccttcttttt

SEQ ID NO: 43 - DNA, 776 bp, Homo sapiens
  misc_feature 13, 14, 16, 17, 20, 24, 32, 33, 42, 44, 46, 49, 50, 52, 58,59, 60, 61, 65, 66, 69, 76, 77, 82, 83, 84, 86, 87, 95,97, 98, 99, 105, 106, 111, 113, 118, 125, 129, 132, 134,151, 152, 154, 157, 168, 188, 348, 349, 362, 367, 372, 375: n = A,T,C or G
  misc_feature 380, 416, 423, 426, 431, 455, 522, 534, 537, 539, 556, 567,574, 599, 605, 610, 626, 639, 654, 668, 670, 673, 684, 693,706, 709, 714, 740, 744, 750, 761, 768, 771, 773: n = A,T,C or G
aaaatataataannannaancgtngtataacnnttatttgantntnttnntnattcannnntaanntancgtattnnttgtnnntnnaattatanannnaagtanntattnantaatntttagtncttngangncgccgtatacgctcctnntnggncgaatgtgganctccacgcgcggtggcggcncgaggtactactggcactgagccaatgtatgctatcaaggaaagctttatctgtcactgagcaaaaggtgaagttcaattaggtcagttttatcacttcttttcctacacacaaactatgaggagagatcatttcttttctttctttttatttaattttnnttttttttggaanaacanggggntcnccacntctgtccgcccatggtttaagaagttaccctggccncggggcnggnccggntacttagtaacctagttgggattnccccagggcctgcaagggaaattttcgatactcaaagctttatccggatacccgcttccgacacttngaagtggggggnggncncccgggtaacccccaancctttttttgntatcccnctttataaagtggaagggggtttanaatatngccgnccgcctttggggcccnttaaattcaattnggggtgcattaggcnttggttttaccctngntgntggaaaaaaantggttttanttcccgccattcnacnaaatnttttccaccaaaccaaccaattaacngaangccccnggggggaggcnaattaanatngntgg

SEQ ID NO: 44 - DNA, 463 bp, Homo sapiens
ctatcactacttagggcgaattggagctccccgcggtggcggccgaggtactctaacctgggcgacagagtgggaccctgtctcaaaaaaaataaataaataaaagaaagaaaagaaatgatctctcctcatagtttgtgtgtaggaaaagaagtgataaaactgacctaattgaacttcaccttttgctcagtgacagataaagctttccttgatagcatacattggctcagtgccagtagtacctgcccgggcggccgctctagaactagtggatcccccgggctgcaggaattcgatatcaagcttatcgataccgtcgacctcgagggggggcccggtacccagcttttgttccctttagtgagggttaattgcgcgcttggcgtaatcatggtcatagctgtttcctgtgtgaaattgttatccgctcacaattccacacaacatacgagccgggagc

SEQ ID NO: 45 - DNA, 468 bp, Homo sapiens
  misc_feature 253, 326, 369, 386: n = A,T,C or G
cctatcactacttagggcgaattggagctccccgcggtggcggccgaggtacgcgggggctctctcagattaaggatatgtgtctgctaggtaaagcgacatctggattcattgtgtaggatgaaagaaaccaaattctgactgcttatttgtggatccgccaaatctggcacgatgcctatctcacgtgggaccgagatcaagtcctggcccgggcggccgctctagaactagtggatcccccgggctgcangaattcgatatcaagcttatcgataccgtcgacctcgagggggggcccggtacccagcttttgttccctttantgagggttaattgcgcgcttggcgtaatcatggtcatagctgnttcctgtgtgaaattgntatccgctcacaattccacacaacatacgagccgggagcataaagtgtaaagcctggggtgcctaatgagtgagctaactca

SEQ ID NO: 46 - DNA, 468 bp, Homo sapiens
cctatcactacttagggcgaattggagctccccgcggtggcggccgcccgggcaggtactgatctcggtcccacgtgagataggcatcgtgccagatttggcggatccacaaataagcagtcagaatttggtttctttcatcctacacaatgaatccagatgtcgctttacctagcagacacatatccttaatctgagaagagcccccgcgtacctcggccgctctagaactagtggatcccccgggctgcaggaattcgatatcaagcttatcgataccgtcgacctcgagggggggcccggtacccagcttttgttccctttagtgagggttaattgcgcgcttggcgtaatcatggtcatagctgtttcctgtgtgaaattgttatccgctcacaatttccacacaacatacgagccgggagcataaagtgtaaagcctggggtgcctaatgagtgagctaactc

SEQ ID NO: 47 - DNA, 490 bp, Homo sapiens
  misc_feature 2, 3, 4, 5, 6, 9, 11: n = A,T,C or G
gnnnnngcnancatactatagggcgaattggagctccccgcggtggcggccgaggtactgtagttaaatgtgggttctacatggttctgcagtttctagccctataaacctcacatgccatgttctctctccatatatcttaatcacctttaatttggaaataacagatctaccctgcttatcttacattgttgcagtgagaagaatgactacgttttttgaaaccaccagcgatgctgtacctgcccgggcggcccgctctagaactagtggatcccccgggctgcaggaattcgatatcaagcttatcgataccgtcgacctcgagggggggcccggtacccagcttttgttccctttagtgagggttaattgcgcgcttggcgtaatcatggtcatagctgtttcctgtgtgaaattgttatccgctcacaattccacacaacatacgagccgggagcataaagtgtaaagcctggggtgcctaatg

SEQ ID NO: 48 - DNA, 456 bp, Homo sapiens
actactatagggcgaattggagctccccgcggtggcggccgcccgggcaggtacaaggcatttttgctaactgtaacttcccacttaatcaacaaaaacaaaaacactcatttctgaacattcagtgcatccatgattaatcttaattacaccacaaaggtatttttcaatggtgattttgcgggagtggggtaacagtttcgaaagcaacattgtcagaaacatagttgattttaaaggttctttctggtgactttgacttctgcttttttagaagaccttacacagagttgtatttatttctcctggaatatttcaagcaattcagagtgaaagggtatacattccaatttgcgtatgagataaaatttagttacattgagaagctattttctttagttacagggaaaaaattgtagggcttttggaagcctctttgatttctaataggaggaa

SEQ ID NO: 49 - DNA, 466 bp, Homo sapiens
  misc_feature 204, 205, 244, 365, 382, 389, 444, 465: n = A,T,C or G
ctatcactacttagggcgaattggagctccccgcggtggcggccggtgccacactgggccagggtggtcatcctgaaatacatgtccagggtcttgtttgtctatgatgtgggtgaaagctgcctcagcccgcaccacagtagagagcgggaccacctcacgaaagtttatagcaaactcccagagtctaaccctgaaaagcanncaggaacaaagacctttccagaaagaaggacatgaacanacgcttaaagaacgacctgggctgccagggtaagaaccctcaggaggccgagagttactgtgcacagtacctcggccgctctagaactagtggatcccccgggctgcaggaattcgatatnaagcttatcgataccgncgacctngagggggggcccggtacccagcttttgtttccctttagtgagggttaattgcgcncttggcgtaatcatggtcatng

SEQ ID NO: 50 - DNA, 483 bp, Homo sapiens
  misc_feature 37, 213: n = A,T,C or G
ctatcactacttagggcgaattggagctccccgcggnggcggccgaggtacaagggcagcagaagcaacaaaggctgtggccagcaacgaaggcagagtccccggtaggcggaggtccccgtgcacagtgtggtgcagcagtgaacccaagattttccttcacagggcaggggaactatttcctaataagcattgggcatttcaggccacaangggcagccattactcagcacttgcactgaccttgggaatttgctgggcaaggaaaatgacgcggccctcatcatcgatggccacaccctgaagtacctgcccgggcggccgctctagaactagtggatcccccgggctgcaggaattcgatatcaagcttatcgataccgtcgacctcgagggggggcccggtacccagcttttgttccctttagtgagggttaattgcgccgcttggcgtaatcatggtcatagctgttttcctgtgtg

SEQ ID NO: 51 - DNA, 500 bp, Homo sapiens
  misc_feature 2, 13, 14: n = A,T,C or G
gnagcctatccannctatagggcgaattggagctccccgcggtggcggccgcccgggcaggtacactttcgtggcttatgggtatcttagtataaccttttctggttgagtgaactgtgtcatttcaaaagcctgaagacattgtgatgagtgctgcctccataatggctacattctaggggctttgccctgaatcgcatatattaactcaaaaaacaaacagtacctcggcccgctctagaactagtggatcccccgggctgcaggaattcgatatcaagcttatcgataccgtcgacctcgagggggggcccggtacccagcttttgttccctttagtgagggttaattgcgcgcttggcgtaatcatggtcatagctgtttcctgtgtgaaattgttatccgctcacaattccacacaacatacgagccgggagcataaagtgtaaagcctggggtgcctaatgagtgagctaactcacattaattgcgttgcgctc

SEQ ID NO: 52 - DNA, 490 bp, Homo sapiens
  misc_feature 216, 490: n = A,T,C or G
ttgacgctctctacttagggcgaattggagctccccgcggtggcggccgaggtacatgaaaaccctaaagcaaatgaacagcttaaccggatatcacaaaggctacaacaattaacagaggtttcaagaaggtcgttacgcagtagagaaattcagggtcaagttcaagcagttaaacagagtttgccaccaactaaaaaagaagcagtgtagcangtacccttgcccgggcggcccgctctagaactaagtggatcccccgggctgcaggaattcgatatcaagcttatcgataccgtcgacctcgagggggggcccggtacccagcttttgttccctttagtgagggttaattgcgcgcttggcgtaatcatggtcatagctgtttcctgtgtgaaattgttatccgctcacaatttccacacaacattacgagccgggaagcataaaagtgtaaagcctggggtgcctaatgagtgagcttaactcn

SEQ ID NO: 53 - DNA, 502 bp, Homo sapiens
  misc_feature 2, 3, 4, 5: n = A,T,C or G
gnnnnatctaacactcttagggcgaattggagctccccgcggtggcggccgaggtaccctaaaacttaaagtataataataaaactaaaaaaaaagttatccatggcctagacaaatcaaaaaagcatgtgacactatatgacatcacatttcaatttcttgtagaaaggaacaagagtagtttaacaccagcagcattcatatgcagagagcatcataagtacctgccccgggccggccggctctagaactagtgggatcccccgggctgcaggaattcgatatcaagcttatcgataccgtcgacctcgagggggggcccggtacccagcttttgttccctttagtgagggttaattgcgcgcttggcgtaatcatggtcatagcttgtttcctgtgtgaaattgtttatccgctcacaaattccacaccaacataccgagccgggagcataaagtgtaaagcctggggtgcctaatgagtgagctaactcacatttaat

SEQ ID NO: 54 - DNA, 485 bp, Homo sapiens
tatcactactatagggcgaattggagctccccgcggtggcggccgaggtacctacattctaaaagtataataaaaatatacaacaataaaaatgtaaactgtaggctataaagaaaaataagaatgttaaaataataacaaattgtgccaagaagttataaatcatctggtaggcagtccactggtaaaattaagagttatacatagaaatgacacactgaaataaaacttttatttctgcctcatttctcaactaaaacaccagtgacacttagcacaaagttcacatgcacaactgttcaatcacagtttataaaagcacctgaacataacacaaagccaaagcaatcctggacaaatggactaaagctggagacatcacactacctgacttcaaaatataatacaaatctatagtagccaaatcagtatggcactggcataaaaacagacacatagaccaatgggaacagatagaaactcaa

SEQ ID NO: 55 - DNA, 472 bp, Homo sapiens
  misc_feature 65, 465: n = A,T,C or G
ggcgaattggagctccccgcggtggcggccgaggtaccagctgccatctgtcagttaaacttcanaacacacataccatagggatgaagataagaaaggaatgattgtgactctggatcaaaatgctcccagttcctgaaggtgcatgatttaactgtgaatgccaactgagatcctaacatcctatacaaccaaagatgaactagtctctgaactggtaactcataaaagacaaatcccacagtacctgcccgggcggccgctctagaactagtggatcccccgggctgcaggaattcgatatcaagcttatcgataccgtcgacctcgagggggggcccggtacccagcttttgttccctttagtgagggttaattgcgcgcttggcgtaatcatggtcattagctgtttcctgtgtgaaaattgttatccgctcacaattccacacaaacatacgagccggngagcata

SEQ ID NO: 56 - DNA, 918 bp, Homo sapiens
  misc_feature 1, 4, 5, 6, 572, 642, 655, 665, 676, 691, 694, 702, 707,716, 723, 726, 738, 740, 746, 754, 755, 767, 773, 777, 778,785, 787, 804, 824, 829, 833, 837, 839, 846, 851, 856, 857,859, 866, 872, 873, 874, 875, 879, 885, 893, 897, 901: n = A,T,C or G
  misc_feature 902, 906, 907, 908, 912: n = A,T,C or G
nggnnncgtatacgactactataggggcgaattggagctccaccgcggtggcggccgaggtaccccctctcgttccctttcagctttatccgtgctacatagggttcacgtcacccatctgaatgtccatcacatcataacatcagatcatggttgagagctgattacatgctaattgcataaactcattgaattttcacaaccaacagacaagatagatatggactgacatcgcctccattacactcatggtacctgcccgggcggccgctctagaactagtggatcccccgggctgcaggaattcgatatcaagcttatcgataccgtcgacctcgagggggggcccggtacccagcttttgttccctttagtgagggttaattgcgcgcttggcgtaatcatggtcatagctgtttcctgtgtgaaattggtatccgctcacaattccacacaacatacgagccgggagcataaagtgtaaagcctggggtgcctaatgagtgagctaactcacattaattgcgttgcgctcactgcccgctttccagtcgggaaacctgtcgtgccanctgcattaatgaatcggccaacgcgcggggagaggcgggttgcgtattgggcgctctttcgctttcttgnttaattgactcgntgcgctcggncgttcggctgnggcgagcgggattanctnattcaaangcggnaatacggtnatccaanaancaggggataacncnggaaanaacatgtnnaccaaaaggcancaaaanggcnnggaaccngnaaaaaggccgggttggntggcgttttcataggctccnccccntganaagntnaaaaaantgacnctaannanagggggnaaaccnnnngggntttaanaacccagngttncccnngaannncctnggccct

SEQ ID NO: 57 - DNA, 924 bp, Homo sapiens
  misc_feature 9, 585, 726, 798, 810, 811, 838, 844, 858, 873, 879, 880,882, 886, 893, 894, 907, 918, 923: n = A,T,C or G
gcgcgcgtnatacgactcactataggggcgaattggagctccccgcggtggcggccgaggtaccatcgatcctagtgggacgcgatccaaaaatatgcctattaaagataatgctttggttatgtttaatgggaaagtctatctgttggctaaaaaggggacagatgttctgccatcacaaattggccaacagaattctgttctcctgatactccagtaagaaaagacacgttacagacagtgagttcaagtccagtcacagaaatatccagagagggttgtaaatattgttttggctaaaagtaaatcttcccagatggagacaaaatcactttccaatacccagcttgcttccatggccaatctaagggcagagaagaataaagtggagaaaccatctccttctaccacaaatccacatatgaaccaatccagtaactacttaaaacagagtaaggactttattcacaaatccaatctttccagttgggatttagtacctgcccgggcggccgctctagaactagtggatcccccgggctgcagggaattcgatatcaagcttatcgatccgtcgacctcganggggggcccgggacccagcttttgttccctttagtgagggttaattgcgcgcttggcgtaatcatgggcatagctggttcctgtgtgaaattggtattccgctcacaattccacacaacatacgagccgggagccttaagngtaaagcctggggtgccttaatgagtgacttactcacattaattgcgttgcgctcactgccgctttcaatcnggaaacctgtcnnccacctgcattaataattggccacccncggggnaaggcggttgggtnttgggcgcttttcgntttctnntnactngctcctnncttggcgttcggntgggggaaacnggttnt

SEQ ID NO: 58 - DNA, 1034 bp, Homo sapiens
  misc_feature 10, 17, 38, 305, 306, 311, 319, 331, 338, 343, 344, 358,359, 360, 362, 369, 370, 386, 395, 400, 407, 408, 415, 418,422, 423, 424, 426, 428, 439, 450, 451, 454, 455, 460, 462,463, 467, 468, 469, 471, 473, 475, 483, 491, 493, 499: n = A,T,C or G
  misc_feature 510, 511, 516, 518, 521, 531, 533, 535, 538, 541, 542, 554,556, 563, 567, 568, 569, 570, 576, 583, 589, 591, 596, 599,602, 603, 605, 606, 607, 612, 615, 617, 618, 619, 620, 627,633, 642, 646, 649, 651, 654, 658, 659, 665, 666, 669: n = A,T,C or G
  misc_feature 671, 672, 677, 683, 685, 688, 695, 703, 704, 705, 709, 712,713, 714, 715, 720, 723, 732, 735, 736, 739, 740, 741, 743,744, 747, 752, 753, 757, 760, 761, 762, 766, 769, 772, 773,780, 787, 790, 791, 793, 795, 796, 805, 808, 811, 812: n = A,T,C or G
  misc_feature 813, 817, 819, 822, 825, 828, 831, 834, 835, 836, 842, 843,845, 852, 853, 856, 860, 865, 870, 873, 874, 875, 877, 878,881, 890, 892, 895, 896, 899, 902, 903, 905, 907, 909, 910,911, 912, 916, 920, 921, 928, 931, 934, 935, 940, 942: n = A,T,C or G
  misc_feature 947, 949, 956, 960, 961, 972, 974, 975, 977, 990, 992, 999,1001, 1002, 1007, 1009, 1012, 1016, 1021, 1023, 1026, 1030,1031, 1032, 1033: n = A,T,C or G
tacgatacgnttattcnactcctataggggcgaattgnagctccaccgcggtggcggcccgaggtactctaacctgggcagcagagtgggaccctgtctcaaaaaaaataaataaataaaagaaagaaaagaaatgatctctcctcatagtttgtgtgtaggaaaagaagtgataaaactgacctaattgaacttcaccttttgctcagtgacagataaagctttccttgatagcatacattggctcagtgccagcagtacctgcccggcggccgctctagaactagtggatcccccgggctgcnngaatncgatatcnagcttatcgatnccgtctncctcnnagggggggcccggnnncnattttgnnacccttttagtgaggnttaatgatnggctngacatanntattctnaantgcnnnancnctggccagaantttctcatacnntanngagantnncgannnanantnaattcccngctttagntnattctnaagttactcgnntaacntnttntcactgtgcnangntantcnnatataggggacncntcgctangagnnnntgacanattctanacgggncnatagntcnctnnannngtgantcntnnnngacaganagtttntacactagngtanatntntantagnntagacnntantnnttgcnatctgntnttngattacnctacaccnnnactnccnnnnatgantanactttattnatnnatnnntnntanaattnnttgnttnnntatntgntgnngtatgtngaccacnatnngntnntgtaataanatngannngtanantantantantangtnnngttgtnncntgatctnnttnattntgatnccatntgnnngnnatnattcgtccntntcnnatntcnntnangnnnngtangtgnnctactanatnatnnagatnangatcngncggacantttnnattttaattcncnncntacactctatgcntnacttttncnnttaantntanttgnctagncnatntaannnnc

SEQ ID NO: 59 - DNA, 956 bp, Homo sapiens
  misc_feature 49, 380, 474, 513, 641, 648, 656, 677, 683, 685, 712, 725,736, 750, 755, 766, 773, 782, 790, 828, 830, 835, 845, 850,855, 860, 870, 878, 883, 885, 891, 895, 899, 916, 920, 935,937, 943, 944, 950, 953, 954: n = A,T,C or G
gctacttagggcgaattggagctccccgcggtggcgtcgcggccgaggnccctgaaggccgcttacttggaaccgtatcttctaaatgctctgaaaacctatccaaaggcaattaaaatcacaaatatcattgaaaacatctaagaactacgtgtaagcacttcgggatagtcaggtaaaggcggcctctaattatgaagcattttgataattaatagaattctaagccaaagcttaaatccggatacacatcataatggttaagccaaataacacttaatcattttaccttttattattgataaagacaacacactgaagtagacagacagtaaagaaaaagtccacatctttttattgggtccaaataacctgattgnaaatacttagcctctgattttcatgtttcagaatttgtatgttaatgaccttagtaagatgtggctttggccagcctcaaaaagggttgctctncagccagggccccttttttccagttactgctcccatctnctttaagtatattcaactggtgagtggaactctttatcccgtgtgacaaatgcgtattgaggccctaacatgcccccagacctcaagatgtgctgctcatacatttgaaggtagccctgacttgtttnggggggngtgggggngggccttttccatcagttgtnttggangntgtggccagcaatccattccaaattgnctgagttttcttnattttactttnggatataaaaaccntaatnttttttgcagnatcgttnaatgatttnaaacccangactttggtttaaaatttttaaattggacaatgtttgnanggatntgcatgtttntgccnttttnctttnagaattgtanaaggaaangcctntnccgctngctntggngggttttacccaaaacnggtnattcagggggtcccntnctaaannccttanggnncg

SEQ ID NO: 60 - DNA, 955 bp, Homo sapiens
  misc_feature 1, 2, 24, 35, 41, 47, 439, 775, 777, 812, 824, 847, 850,856, 877, 890, 898, 901, 902, 915, 919, 922, 943, 950, 955: n = A,T,C or G
nncgactactatacggcgaattgnagctccccgcngcggcngccgangtcaatactagagaagggagagaatatagttaggacaataaattattgaacaagtgatttttctgtgatgactatacccattttccaaaaactaatttcatttttggtgtgtgtgtgaagaaagtttggaggcttcagtttcaatcactgtctcaatacttaattttccattattcacagagaaattgtttttctggaaattggcaagaggaaggaagtaataataaaagatgacttatgcagatcccatgtgaccatcttacattcttactcttgtgccactgtttccctggcagtccgttactggtttaaagagcactgggatataactctagaaatacggattattttctcacctctgacactcattcatggtggagcccttaccttantgccaaggttattggcatttaactttactatttaaccttgctgaactacagtgtccttcctcaatgtcagaagaagcttagatagttaaataacttctaaggattatctatctggattattaggatttttcatcattcttggcgtgattgtcacaaagaaaacaggacatagctaggtggcaagtgcatcctcactcaaagttactttttttttttttaatacagagtcttgctctgtccccacgctagagtgcagtggcgcaatcttggctcactgcagctccgctccgggttcacgccattcttctgcctgaccctccaagtggctgggactgnangccccgcaccacgccccactagtttttggattttngggggagatggngtttaccggttagccaggaaggnctngactcngactatgaccgccgcttcganctttaaaaagctnggattcanacnnaccatgggcccgncgtnttnaactagggaccccggctgcangaattcnattcn

SEQ ID NO: 61 - DNA, 982 bp, Homo sapiens
  misc_feature 3, 5, 49, 273, 280, 281, 286, 497, 499, 590, 625, 630, 665,703, 714, 793, 800, 817, 822, 831, 842, 850, 863, 868, 875,880, 882, 892, 901, 904, 909, 912, 917, 920, 922, 930, 932,935, 944, 958, 959, 979, 981: n = A,T,C or G
tangnctactacgactcactatagggcgaattgggagctccaccgcggnggcggccgaggtaccagtgaggcatttcctgatttttactcataatatttacaaagattaaaagagataaaattccaaatgtgaaggcttaaattgttcaaatccttactcaaagaaatagtgggaaaggtgggtaagtcagagtctgctgcgtgaaggaaaaaaatcaagttaatctcttctgaaattatcatgatttgtttggtttagattcccagaaacanaaaagannaacanaaaaaaaggtccctcggccgctctagaactagtggatcccccgggctgcaggaattcgatatcaagcttatcgataccgtcgacctcgagggggggcccggtcccagcttttgttccctttagtgagggttaattgcgcgcttggcgtaatcatggtcatagctgtttcctgtgtgaaattgttatccgctcacaattcccacaacatacnanccgggagcataaagtgtaaagcctggggtgcctaatgagtgagctaactcacattaattgcgttgcgctcactgcccgctttccagtcggnaaaccttgtcgtgccagctgcattaatgaatcggncaacnccccggggagaggcggtttgcgtaattgggcgctnttccgctttcttggtcactgacttcgctgggcttcggncgttcggctgnggcgagcggtatcagcttactcaaaaggcgggaattccggttatccccaaaatcaggggattaaccccgggaaagaacnttgtganccaaaaggcccccaaanggccnggaacccgnaaaagggcggnttgctggngtttttccttagntcccnccccctngccangnttccaaaatngcccctaantcnaaggnggngaaanccnangggctttnanaanccagcgttnccccggaagccctnnggcctttcttttccaccctncnt

SEQ ID NO: 62 - DNA, 990 bp, Homo sapiens
  misc_feature 1, 3, 144, 255, 270, 291, 318, 319, 320, 321, 322, 323, 324,325, 326, 327, 328, 329, 330, 331, 332, 333, 334, 335, 336,337, 338, 339, 340, 341, 342, 343, 345, 346, 347, 348, 349,350, 351, 352, 353, 354, 355, 356, 357, 358, 359: n = A,T,C or G
  misc_feature 360, 361, 362, 363, 364, 365, 366, 367, 368, 369, 370, 371,372, 373, 374, 375, 376, 377, 378, 379, 380, 381, 382, 383,384, 385, 386, 387, 388, 389, 390, 391, 392, 393, 394, 396,397, 398, 399, 400, 401, 402, 403, 404, 405, 406, 407: n = A,T,C or G
  misc_feature 408, 409, 410, 411, 412, 413, 414, 415, 416, 417, 418, 419,420, 421, 422, 423, 424, 425, 426, 428, 429, 430, 431, 432,433, 434, 435, 436, 437, 438, 439, 440, 442, 443, 444, 446,447, 448, 449, 450, 451, 452, 453, 454, 455, 456, 457: n = A,T,C or G
  misc_feature 458, 459, 460, 461, 462, 463, 464, 465, 466, 467, 468, 469,470, 471, 472, 473, 474, 475, 476, 477, 478, 479, 480, 481,482, 483, 484, 485, 486, 487, 488, 489, 490, 491, 492, 493,494, 495, 496, 497, 498, 499, 500, 501, 502, 503, 504: n = A,T,C or G
  misc_feature 505, 506, 508, 509, 510, 511, 512, 513, 514, 515, 516, 517,518, 519, 520, 521, 522, 523, 524, 525, 526, 527, 528, 529,530, 531, 532, 533, 534, 535, 536, 537, 538, 539, 540, 541,542, 543, 544, 545, 546, 547, 548, 549, 550, 551, 552: n = A,T,C or G
  misc_feature 553, 554, 555, 556, 557, 558, 559, 560, 561, 562, 563, 564,565, 566, 567, 568, 569, 570, 571, 572, 573, 574, 575, 576,577, 578, 579, 580, 581, 582, 583, 584, 585, 586, 587, 588,589, 590, 591, 592, 593, 594, 595, 596, 597, 598, 599: n = A,T,C or G
  misc_feature 600-607,609-657,659,661-695,697-703,705-731,733-756,758-765,767,769-778,780-843,845-849,851,853-862,864-883,885-892,894-912,914-924,926-937,939,941-945,947-962,964-976,978-988: n = A,T,C or G
nangctactatagggcgaattggagctccccgcggtggcggcccgaggtacagaatgagctatagcctgcagtgaccagaaatctccaagtaagggagtatacactgaatgtcatgcccttcattaagttaaggcctgtagttnaagttctttcagtatgtgccatgaacaacaataaacaatgtccttggtgtactcctttgaaagatggacattgaaagttaaaaatcagtcactatatagggcctgttgatnggaaaacccatttgnggttcttacaaattgtaagcnggaatgccttttgagtcctgcccgggnnnnnnnnnnnnnnnnnnnnnnnnnntnnnnnnnnnnnnnnnnnnnnnnnnnnnnnnnnnnnnnnnnnnnnnnnnnntnnnnnnnnnnnnnnnnnnnnnnnnnnnnnnntnnnnnnnnnnnnntnnntnnnnnnnnnnnnnnnnnnnnnnnnnnnnnnnnnnnnnnnnnnnnnnnnnnnnnnnnnnnnnannnnnnnnnnnnnnnnnnnnnnnnnnnnnnnnnnnnnnnnnnnnnnnnnnnnnnnnnnnnnnnnnnnnnnnnnnnnnnnnnnnnnnnnnnnnnnnnnnnnannnnnnnnnnnnnnnnnnnnnnnnnnnnnnnnnnnnnnnnnnnnnnnnnantnnnnnnnnnnnnnnnnnnnnnnnnnnnnnnnnnnntnnnnnnntnnnnnnnnnnnnnnnnnnnnnnnnnnnatnnnnnnnnnnnnnnnnnnnnnnntnnnnnnnntntnnnnnnnnnntnnnnnnnnnnnnnnnnnnnnnnnnnnnnnnnnnnnnnnnnnnnnnnnnnnnnnnnnnnnnnnnntnnnnnantnnnnnnnnnntnnnnnnnnnnnnnnnnnnnntnnnnnnnntnnnnnnnnnnnnnnnnnnntnnnnnnnnnnntnnnnnnnnnnnnantnnnnntnnnnnnnnnnnnnnnntnnnnnnnnnnnnntnnnnnnnnnnncg

SEQ ID NO: 63 - DNA, 476 bp, Homo sapiens
agccctatcgactactatagggcgaattggagctccccgcggtggcggccgaggtacaccgtagcttatttcaagtgacacagaccaggcaactgacaaataccgacaagtaaatattgttcattttcctaggtaatctctataatcaaggggactgatttttattctggaattttccccaaatgttttctttgtagaaattatgttgctctcaattgtgtgcatggtagtacctgcccgggcggccgctctagaactagtggatcccccgggctgcaggaattcgatatcaagcttatcgataccgtcgacctcgagggggggcccggtacccagcttttgttccctttagtgagggttaattgcgcgcttggcgtaatcatggtcatagctgtttcctgtgtgaaattgttatcccgctccaattccacacaacattaccgagccgggagcataaaagtgtaaagcctgggggg

SEQ ID NO: 64 - DNA, 493 bp, Homo sapiens
  misc_feature 2, 3, 4, 9, 11, 16, 469: n = A,T,C or G
gnnnacgcnancactnctatactatagggcgaattggagctccccgcggtggcggccgaggtactctaacctgggcaacagagtgggaccctgtctcaaaaaaaataaataaataaaagaaagaaaagaaatgatctctcctcatagtttgtgtgtaggaaaagaagtgataaaactgacctaattgaacttcaccttttgctcaagtgacagataaagctttccttgatagcatacattggctcagtgccagtagtacctgcccgggcggccgctctagaactagtggatcccccgggctgcaggaattcgatatcaagcttatcgataccgtcgacctcgagggggggcccggtacccagcttttgttccctttagtgagggttaattgcgcgcttggccgtaatcatggtcatagctgtttcctgtgtgaaattgttatccgctcacaattccacacaacataccnagccgggagcataaaagtgtaaag

SEQ ID NO: 65 - DNA, 811 bp, Homo sapiens
  misc_feature 2, 4, 6, 7, 9, 10, 11, 12, 15, 16, 17, 19, 21, 27, 29, 31,32, 39, 41, 46, 49, 52, 53, 54, 60, 61, 62, 63, 67, 68,69, 71, 75, 78, 81, 89, 93, 105, 109, 111, 112, 113, 118,120, 124, 231, 253, 263, 286, 297, 315, 324, 336, 337, 363: n = A,T,C or G
  misc_feature 370, 389, 393, 403, 406, 420, 422, 426, 436, 447, 455, 459,463, 475, 476, 496, 498, 523, 529, 562, 587, 589, 604, 612,620, 622, 635, 640, 651, 671, 690, 693, 696, 698, 703, 720,728, 742, 751, 756, 765, 773, 790, 799, 800, 804: n = A,T,C or G
cntntnntnnnnttnnntntntctatnantnnttttttnanacttnctntannnttctannnntctnnntntatnatnatnattttagngaantttttttttttntttntnnntagcngngctntacgatcctatagggcgaattggagctccaccgcggtggcagcggccgcccgggcaggtactctgacggagttacacacccccagctatgaagtagtcttgccaaancaattgaacatgacatttcatnaagctcttanaaccgactataccaatttatggnataaacagaangaccacgtgaaacaaaanctcattaangtatgctcatanngcaaaaattcacgacttataaaaaanacttttnactgggaccaatagcatcngcangttttcttgncanacaaaaatattgananaaantgtcaataanggggtaatagnaggaacangtantaantgtagataacannaaattggaattatggagggngnagtagtaaggaattcaaagcgcatngtctancaaaccggtggttggggaatggtttaatttttnggtaccccccttagattttggaaananaaaaccaaggttacnttaaaaanaatttttngnaatttcccctctnttttntttcctcttantaggaaaaacaaaccggcanaaccttccaagggtttttnaanaananggatnaattttttttattaagncccttccnggtaattggaaacnttttgggtnttttnttccaattntccaattnttaaaattaaaatttanaattttttnngtanaaattag

SEQ ID NO: 66 - DNA, 486 bp, Homo sapiens
  misc_feature 2, 3, 4, 249: n = A,T,C or G
gnnnagtatcactacttagggcgaattggagctccccgcggtggcggccgaggtacccaattatgatttttaaaaatgcaatggcatgaataaataaatgagtatacccatttgttgatcttattccctattacttcaaatttgtaagtatccttagtggaaaagagtaatgttcattttggaaataatcatgtctcaacatgattggggtctactcaagggggagggtgggaggaagaagaggagcanaaaggataactattgggcactgggcttaacacctgggtggtaagataatatgatcaacaaacccttgttacacatgtttacctatgtaacaaaccttcacatgtacctgcccgggcggccgctctaagaactagtggatcccccgggctgcaggaattcgatatcaagcttatcgataccgtcgacctcgagggggggcccggtacccagcttttgttccctttagtgagggttaaa

SEQ ID NO: 67 - DNA, 828 bp, Homo sapiens
  misc_feature 1, 2, 3, 559, 597, 614, 647, 660, 678, 685, 692, 694, 706,711, 732, 736, 744, 757, 758, 764, 768, 793, 814: n = A,T,C or G
nnngggcgcgcgtatcgactactatagggcgaattggagctccccgcggtggcggccgaggtacttgcaagaaacctcaggacttgagtaacagcaacatggtaagttttctaagttttctttttgtctcccatatacgctgggctgtgctggaatcaccaacaggcacagaaaaaaatgacaacaaaacaacaacaaaacccccaagaatatcctgttgtctttggccaaagttcaggaaaggggagccccaacagagacccagtaggaagctctagcccctgttttgtacctgcccgggcggccgctctagaactagtggatcccccgggctgcaggaattcgatatcaagcttatcgataccgtcgacctcgagggggggcccggtacccagcttttgttccctttagtgagggttaattgcgcgcttggcgtaatcatggtcatagctgtttcctgtgtgaaattgttatcccgctcacaattcacacaacatacgaacccgggagcataaaagtgtaaaagcctggggtgcctaatgagtgagctaacttacantaattggcgtttgcgctcactggcccgcttttcagtcngggaaaacttgtcgtgnccactggatttaatggaattcggccaacccccngggaaaaggccgntttgggtatttgggcgcnttttcgntttcttngnttaattgaattngttgngcttcggtcgttccgggttgnggcnaaccgggnttaaacttacttnnaaaggngggnaattccgggtattccccaaaatcangggggattaaccccaggaaanaaaaattgtggact

SEQ ID NO: 68 - DNA, 813 bp, Homo sapiens
  misc_feature 2, 3, 24, 32, 48, 96, 182, 502, 532, 548, 557, 587, 597,600, 616, 649, 670, 685, 687, 707, 743, 748, 751, 752, 754,755, 756, 758, 762, 763, 764, 765, 775, 781, 782, 788, 791,792, 795, 806, 810, 812: n = A,T,C or G
tnnggggcgtatcgactactatanggcgaatnggagctccaccgcggnggcggccgaggtacttagctttgtcgtctttctttcctcctcttgttngagtttagtattaataaaagttggactgagaaaacctttttttacaatcttatgggttatttttagtgtaaacgttttagaagtanaatatacatataaaaactgcacagatcaaatgtgtgcatctcaaatggtgttccattttcaaaatatgaatacatatgggcagcatttatatttttaaaaagtcagaaggtgcctcctcatgccctttccacttctcactcattgtccctcaacccaggcataactactctcctgacctccaacatcataaactagtttcacaagctttgaaactttatccaaatgagtcatacaggatagatgttcacagagcctacttagatattatggatccttgccaggtatataaaaagtgttgcagataagcccaacaaacatntgggctggtggtgcaggggcaaaataattnacgaagactgttgtanataaacaanggtcgacttatgagagaaaatataaaaatntgttgcaagnaanccatgagcacacccancacgagagaagccaactgcaattaaaccaagtntttctgggatattttataggntaaagtttatgctgngngctggaaaaagagcttttgngccagtaccctgccccgggccggccgaccggggcanggacnggnnannnantttnnnnaaggcccccnaccctnntggganttnnttngaattccaccnacgngnt

SEQ ID NO: 69 - DNA, 411 bp, Homo sapiens
cgcgtaatacgactcactatagggcgaattggagctccaccgcggtggcagcggccgcccgggcaggtaccttgcaagtattagacttagaataaaactgtgttgactgatataactgatgcatggttggaatagtaggttcttgggtaaattaatcctaacatcaatagctcaattccatcatagtccttgaacaggcaaaatgtatgctaatcacaacagccgtacctcggccgctctagaactagtggatcccccgggctgcaggaattcgatatcaagcttatcgataccgtcgacctcgagggggggcccggtacccagcttttgttccctttagtgagggttaattgcgcgcttggcgtaatcatggtcatagctgtttcctgtgtgaaattgttatccgctcac

SEQ ID NO: 70 - DNA, 414 bp, Homo sapiens
gcgtatacgactcactatagggcgaattggagctccaccgcggtggcggccgaggtactattttcagatggtagggatacaaatatattttccctatattcaagggatttacaattcagtagcagaaacagacatgtaagcaaataaccgcaaaacaacgtattaactacaatagcgttgtattcaaaacattatggaaagatagtaattagcaaaactaagtgattaataaagtttcattaaatctggccaggcagggtggctcatacctgtaaccctagcaggttgggaggttgaggcaggcagatcacttgagctcaggagttcggaccagcctgggcaacaaggcgaaaacttctctctaccaaaaaaatacaaaaagattagctaggtatggcgcatacctgtagtccc

SEQ ID NO: 71 - DNA, 396 bp, Homo sapiens
cgcgtaatacgactcactatagggcgaattggagctccaccgcggtggcggccgcccgggcaggtacccttggtttctcagacaactcactgatttatggtcttgagaccataaactcattttccttatatgaatgacatttccacatccacaacaataccaccaaatatatgtatctagttcttactaactgcaaatcctcaaagtgaactgcgtgcattttaatgttgcgtagtttgctgatttatgatttcccttaatgtacctcggccgctctagaactagtggatcccccgggctgcaggaattcgatatcaagcttatcgataccgtcgacctcgagggggggcccggtacccagcttttgttccctttagtgagggttaattgcgcgct

SEQ ID NO: 72 - DNA, 558 bp, Homo sapiens
  misc_feature 2, 3, 4, 7, 14, 360, 369, 385, 431, 475, 480, 483, 501, 516,538, 539, 544: n = A,T,C or G
gnnnagncccgtancactactatagggcgaattggagctccccgcggtggcggccgaggtaccaaccagggctttgattttcatgctgtcccaaagttgcagacatgttcacgacacagctgcgtttgttccttcatcttgttcagcaacctttggtaagaaactaccatatttaagattggtattctagatccaaaagaaaaatgcatgtgtttgctgtgtgtgcatgggcacatgtatgtgtatgtctgtctgtaaggatagagaatggctgaaaattcacaggtttttaaattcttaaaaacaggaacgaaggaattctaacagctatgactcaaaacaagattcttaataaagttncatgacaangtaaaacaactatttnaattgagaatgttaaatagccttggtacctgcccccggccgggcgntcttagaactagtgggatccccccgggccttggaagggaatttngattnttnaagcctttatccgaatancccgtcccacccttngaaggggggggggcccccgggnncccanccttttttggttta

SEQ ID NO: 73 - DNA, 489 bp, Homo sapiens
atacgactactatagggcgaattggagctccccgcggtggcggccgcccgggcaggtacaggaggcaaaaaagcaatcagtatgacttgaactgctgggtttaattactcaatataacacttgccatttaaagatccatatgcccatcagcatggcaacagtctctcataaagattccggtatcatatggcacaatttgtacctcggccgctctagaactagtggatcccccgggctgcaggaattcgatatcaagcttatcgataccgtcgacctcgagggggggcccggtacccagcttttgttccctttagtgagggttaattgcgcgcttggcgtaatcatggtcatagctgtttcctgtgtgaaattgttatccgctcacaattccacacaacatacgagccgggagcataaagtgtaaagcctggggtgcctaatgagtgagctaactcacattaattgcgttgcgctcactgcccgctttcc

SEQ ID NO: 74 - DNA, 501 bp, Homo sapiens
  misc_feature 434, 469, 484, 490, 500: n = A,T,C or G
ggcggctaatacgactactatagggcgaattggagctccccgcggtggcggccgcccgggcaggtacatacgtaacagggactggaccactcctcccttagtttgttgtccatttctccagtcaacatgtatttactgaacaccagttatgcataaggccttctgctgtctctcattagcaacgggagagtgaaccagactagaaaggacagacaggtaactgtctatatctaagaactctttcttttggaaatcaaaactcatctgcagagaattagtcttgcctctgtccaattttcctccttatggcccccaacttccactaagggtcatgaggttggaggagggctcgaggggccactgagtgaatccctctgcctagaatcagcagcacacttataggatcctcaatgcacaagaacctgtcaacacanaacagctttcagagaataccttccctttcctggcncccccagtcaagctntaccgngggaaaacant

SEQ ID NO: 75 - DNA, 500 bp, Homo sapiens
  misc_feature 4, 293, 368, 487, 500: n = A,T,C or G
cgcnaatacgactcactatagggcgaattggagctccccgcggtggcggccgaggtacacgagggaggcacgtgaagtctatcattccatgctctcaaatgttaactttctgctttatatacatagcaatgcctcatttacctaatgttggggagtaaggtattatatgtgaaaattttattttagctataccttttgtggaaaaatttttacaatatatgctttggttattattactagcatactggcagtagttgagtgaggctatgagatgatcgaaaaatgtagtttgntgtccactgcgctttttgaattattgaatctacttgagtcgattcagtagtcagtctttgtcttctttcagtggnggaaagccgctctcttgctgctgttagtatccttgctgccctcttttaaattatgcagcttcttatctgtggagtaggagcttcctgacattgaatgtaaaacagctaaaatggcttanttatgttctaccn

SEQ ID NO: 76 - DNA, 486 bp, Homo sapiens
  misc_feature 10: n = A,T,C or G
cgtatcactnctatagggcgaattggagctccccgcggtggcggccgaggtaccatcatacaacataattttaaaagcttcactgtttcaataaaaaaactaatataatcatgtttatctgacagacccattgctttattcattataatcaaatagaagaagaggaaatttatggtgttttgagaatgcatgcaggttttctttttgttttttctttttgaggtgtgaatacagtaataaaatactgactaatgcttgaaaggcttgaagaagggactagcggtggagtccaaggacaagaagagatgagaagcttttttttcttttcttttccttttggtttcagagggaagaagctatgtaaattggactgggaattaatatccagcttcagtcagagaataagaaatagcttgaaagtacctgcccgggcggccgctctagaactagtggatcccccgggctgcaggaattcgatatcaagct

SEQ ID NO: 77 - DNA, 475 bp, Homo sapiens
  misc_feature 2: n = A,T,C or G
cnatcgactactatagggcgaattggagctccccgcggtggcggccgaggtacttttaaaacattttttccttgagaaatcattgcctaaatctcatacatatgtgcttctctgcagaaaaaaaaatgaaataaaataaaaatctttatttccaatgagctaatgaggaaaaaggggatgatgaaaaaacagggagtgggagcaattttggaaatggaaagaatgctgaatacctacatgatgcctaattcagaagaacattctggtatgtaggacattattttcaactctatcacttacggcagattttttttttatatgcagatgtatctctactctctaaagatgtacctcggccgctctagaactagtggatcccccgggctgcaggaattcgatatcaagcttatcgataccgtcgacctcgagggggggcccggtacccagcttttgttccctttagtgagggttaatt

SEQ ID NO: 78 - DNA, 450 bp, Homo sapiens
  misc_feature 249: n = A,T,C or G
ggcgaattggagctccaccgcggtggcggccgcccgggcaggtactgtgtatcatcgcagtcttgcttttttgagtaatggattcctagattctatgaggataccacaaccacttttaaagaggtttctaaggccaggtgcagtgcttacgcctgggagaccaaggtgggaggatcacttgagctcaggagtttgagaccaacttgtacctcggccgctctagaactatgtggatcccccgggctgcangaattcgatatcaagcttatcgataccgtcgacctcgagggggggcccggtacccagcttttgttccctttagtgagggttaattgcgcgcttggcgtaatcatggtcatagctgtttcctgtgtgaaattgttatccgctcacaattccacacaacatacgagccgggagcataaagtgtaaagcctggggtgcctaatg

SEQ ID NO: 79 - DNA, 468 bp, Homo sapiens
  misc_feature 383, 392, 394, 441, 443, 449: n = A,T,C or G
cctatcgctcctatagggcgaattggagctccccgcggtggcggccgaggtacattttcaaatggttaaaatggtaaattttatgttacatgtattttaccacaatttttttataagaccagattttaaagagaatcaaacagaacctgcagaaataaaagacataataattgaaattagttcgatggatgaatcaaatagcagattagctcagctaaagatgactgtgaatacacaaaatgtagcatggtgatacaaaaattgaatatatcaaacagaagttatgcaacatgaggacagaatagaatgtccaacatatctaaataccattcaagagggaaagaaaagaaaaatggagaaccgaggcaatattttggaggatnttattgctngnacttttccaaaaactgctgtagtttctggaagcacaaaaaattgctngnaggatnataagaaatctatacctag

SEQ ID NO: 80 - DNA, 842 bp, Homo sapiens
  misc_feature 1, 3, 771, 794, 797, 805, 808, 809, 815, 829, 841: n = A,T,C or G
ngnccgtatcgactactatagggcgaattggagctccccgcggtggcggccgcccgggcaggtacttattcccattttataagcaaagaggtaggactggaaaggttaagagcttactcagcgagagagagctggtaaataaaggagtgaagattctaacccagatggaatgtcatgccgaagctattagccactagaagataatacctcacttgcacattctgctgctgctgctgctgcacctgaggccttcacctgggctcggtggtgaatgccctaagatggttcaaaaactgcatgtgaaaaactgttttaggccaagctatcaacaaatcttctggtgatatcaaacctggtggcacagataagagaaatttgaaagtgactttcaaaagcagggtggaagccgtagtacctcggccgctctagaactagtggatcccccgggctgcaggaattcgatatcaagcttatcgataccgtcgacctcgagggggggcccggtacccagcttttgttcctttagtgagggttaattgcgcgcttggcgtaatcatggtcatagctgtttctgtgtgaaattggtatcccgctcacaattccacacaacatacgagccgggagcataaagtgtaaagcctggggtgcctaaatgagtgagctactcacattaattgcgtttgcgctcactggccgctttccatccgggaaacctgtcgtgccagcttgcattaatgaatcggccacccccccgggagagcggttgcgtantgggcgctctttcgctttcttgntantgactcgntgnncttggnccgtcggctgcggngagccggtttant

SEQ ID NO: 81 - DNA, 536 bp, Homo sapiens
  misc_feature 213, 219, 230, 254, 256, 265, 275, 276, 279, 291, 306, 334,355, 362, 364, 373, 376, 384, 391, 410, 413, 418, 446, 465,486, 487, 499, 508, 512, 514, 523, 530, 534, 535: n = A,T,C or G
ctatcactactatagggcgaattggagctccaccgcggtggcggccgaggtactccataatggatgtgggccagggtaaaagcagttgttaatgtatacaggagaatgctctcaacgtaagaggctactcctaggtttaccactaagacaaccaagaagagaggaaccagcaaccaattcaaaagttgggacaccgggtaccttgcccgggcnggccgntctagaactangttggatcccccggggctgcaggnanttcgatatnaagcttatcnntanccgtcgacctcnaaggggggggcccgntacccagcttttttgtttcctttttatngaggggtttaatttgcccccnttggccntnaaattaatnggncattagcntggtttncctggtgttgaaaaattgnttnttccngctttaacaaatttcccaccacaaaaanttaccgaacccccgggganccatttaaatggtgttaaaanncccctggggggngggcccttnaatngnaggtggagncctaaancttnnt

SEQ ID NO: 82 - DNA, 855 bp, Homo sapiens
  misc_feature 3, 470, 728, 730, 738, 752, 770, 778, 789, 807, 810, 850: n = A,T,C or G
agngcgtatacgactcactatagggcgaattggagctccccgcggtggcggccgaggtacattttgaacaatctactcttcaagtggatcatttacaaaacaagaacataattccctgaatcagtaaattttattttcatgaaaggatgacaaagaaattccatttacactatcacgatttacattttcctacaattcatgcagctttcttcaattcacaatctacaaaccacaacaatgcacaaatttgatgttagaggatactttaatgtttagttctcatctcaacagtcactgttgctagtgtctctcattctcactcttcactgttacttaaagaacaaagaactaaagaagccagaaagaactagatcaagcgatgagaccaattttcagggtaaggcataataacattagctagtcaaaaactggagtatttctatcatttaatcctgcaagacaataacctnctgttttccctcactttccttccaataacttgacagaagtctggggaaggatggatcccaagcagaaaaccttcacaaatgtgaaagaaaatggaaatcctagcatagtcacatgactaactagaaatcccagaactctgtcaacaacctttgttttcaatgcagaaatcatttttgtacctgcccgggccggccgctctagaactagtggatccccccgggctgcaggaattcgatatcaaagcttatcgataccgncnacctcgangggggggcccggtncccaacttttggttcccnttagtgangggtaattggnccccttggcgtaatcatnggnatagctggttcctggggggaaaatggtatccggtcacaantccct

SEQ ID NO: 83 - DNA, 894 bp, Homo sapiens
  misc_feature 17, 18, 375, 377, 393, 537, 540, 541, 545, 548, 570, 577,588, 605, 611, 619, 626, 640, 650, 652, 655, 661, 690, 695,702, 703, 720, 738, 740, 753, 755, 756, 767, 768, 770, 786,790, 813, 823, 838, 841, 859, 863, 864, 869, 871, 872: n = A,T,C or G
  misc_feature 885, 888, 893: n = A,T,C or G
atacgactactataggnncgaattgggagctccccgcggtggcggcccgaggtacactgatcgtttctgcagctgcagattctgctgttcgactctggtctaaaaagggtccagaagtaatgtgccttcagactttaaactttggaaatggatttgctttggctctctgcttatcttttttgccaaatactgatgtacctgcccgggcggccgctctagaactagtggatcccccgggctgcaggaattcgatatcaagcttatcgataccgtcgacctcgagggggggcccggtacccagcttttgttccctttagtgagggttaattgcgcgcttggcgtaatcatggtcatagctgtttcctgtgtgaaatngntatccgctcacaattncacacaacatacgagccgggagcataaagtgtaaagcctggggtgcctaaatgagtgagctaactcacattaattgcggttgcgctcactgcccgtttccaagtcgggaaaactgtcgggccagctgcattaattgaatcgggncanngccncgngggaagaggcgggtttgcgtanttgggcngcttttttccnatttcttagcttaactnacttcncttgggcntcgggtncgttccgggttgcnggcgaagccngnatnaaagcncaactcaaaaggcgggtgattaccggttnattcncaggaannaagggggggttaccccnaggaaaagaaccattggngngcaaaaatggccnannaaaaaaggccnngnaaccccgtaaaaaaangccnccgtttctgggcattttttcaanaaggttccgnccccctgaaggagcnttncaaaaaaatggacgcctnaaannaaaangnnggggaaaacccgncanggctnt

SEQ ID NO: 84 - DNA, 819 bp, Homo sapiens
  misc_feature 2, 637, 685, 709: n = A,T,C or G
gnccgtatcgactactatagggcgaattggagctccaccgcggtggcggcccgaggtacgttgtcaggacattttgtaattcggtattcttggtctcctggccccaattctaaaaaaagttcacgttttgatgaaaaaaagatatgggcattatggatgttgaggagatcacagctcaaaagattgacaggggccccagggcatataagaaacatatggtacctgcccgggcggccgctctagaactagtggatcccccgggctgcaggaattcgatatcaagcttatcgataccgtcgacctcgagggggggcccggtacccagcttttgttccctttagtgagggttaattgcgcgcttggcgtaatcatggtcatagctgtttcctgtgtgaaattgttatccgctcacaattccacacaacatacgagccgggagcataaagtgtaaagcctggggtgcctaatgagtgagctaactcacattaattgcgttgcgctcactgcccgctttccagtcgggaaacctgtcgtgccagctgcattaatgaatcggccaacgcgcggggagaggcggtttgcgtattgggcgctcttccgcttcctcgctcactgactcgctgcgctcggtcgttcngctgcggcgagcggtatcaacttactcaaaggcggtaataccggtatncacaaaatcaaggggataacgcangaaaaaaacatgtgaaccaaaaggcaaccaaaaggccaggaaccgtaaaaagggcccgttgctggcgttttttccataggcttccgccccctgacagccttcccaaaatc

SEQ ID NO: 85 - DNA, 852 bp, Homo sapiens
  misc_feature 2, 5, 78, 127, 148, 172, 376, 434, 486, 507, 531, 587, 590,602, 614, 618, 629, 656, 660, 664, 672, 678, 680, 691, 709,711, 727, 745, 778, 779, 783, 784, 789, 796, 800, 801, 817,818, 825, 831, 832, 841, 844, 848, 849, 850, 852: n = A,T,C or G
gnggncgtaatacgactactatagggcgaattggagctccaccgcggtggccggccgcccgggcaggtactggtctgnctgcagaggcaccaagatgatatcttcctccactgtcagagttatttangaaaaataatctctggcatangccgagtgctcataaatacttcangatgagacaataaagccgctcccaggtcctggcatggcccaacctcaggacactggcctacacatttgcaggtagaagcaaaggcctgcgtcaggcctgtggccagcttttgcctgtgcgggaggctctaaaatgaagacaatcttactccaggtctccttccactttgttgcctctagaatgtcatctccctcccctcctctnggaaaggagtcactccaccccaaccatccaaaggctgatgggccccgctgcccaactnaatcccacacagtgccttgagcctagttgtggtccacttgtattgcacaagncctaccacatgtgcctggaangtggaggggcaactttgcttcatntcacgccccccaaggaacttttgcatggggctggtggggaccaatgttgaaaaccncantattcaactgcntcaatggaaagntcanttggcagggtngttatcttagcattccctatatttcanggtncaancccttttncaaggntntccttttgtgnaaacctattgccctatcncnaaccattttttttggnttttaaaaaacctttaantgaccaccccttttgacaagcccttttccaaanntttnnttgtntttacancctnnctttagggaaaacaanncaacctnttgaannggaacaatnaancttnnnan

SEQ ID NO: 86 - DNA, 825 bp, Homo sapiens
  misc_feature 1, 2, 4, 649, 652, 765, 783: n = A,T,C or G
nngngacgcgcgtaatacgactcactatagggcgaattggagctccaccgcggtggcgctctgctctcatttcctgcagattctctgaagcctatctgtgcttctcagtattctctagcggagttgaaaaacgccccttagaggtgcacagttaattatagaagctgttagctttcccatctgtagtcatgccctggagctaagagaaggacttgaatacagaagaggagatgccccctgtacctcggccgctctagaactagtggatcccccgggctgcaggaattcgatatcaagcttatcgataccgtcgacctcgagggggggcccggtacccagcttttgttccctttagtgagggttaattgcgcgcttggcgtaatcatggtcatagctgtttcctgtgtgaaattgttatccgctcacaattccacacaacatacgagccgggagcataaagtgtaaagcctggggtgcctaatgaagtgagctaactcacattaattgcgttgcgctcactgcccgctttccagtcgggaaacctgtcgtgccagctgcattaatgaatcggccaacgcgcggggagaggcggtttgcgtattgggcgctcttccgctttcttcgcttcacttgactcgctgcgctcggnccnttcggctgcggcgagcggtattcagcttcacttaaaggcggtaataccggttatccacagaaatcagggggataccgcaggaaagaacatgtgaagcaaaaaggccaccaaanggcaggaacccgtaaaangccccgtgctggcgtttttcataggctccgccccctgacaag

SEQ ID NO: 87 - DNA, 463 bp, Homo sapiens
  misc_feature 1, 2, 4: n = A,T,C or G
nnancgactactatagggcgaattggagctccccgcggtggcggccgcccgggcaggtactactcagagaatttcattgctactgcctgttcgttaacctagcaagtgagtaaattgaggctttaattaaaaaaaaaaacggttgttgttctttgatatacattttgacatagctcaagcttcaaccctgcccagttcctatgctcagaccccatcttcaaggatgctcctcctgcctaactcctctctcagaatattgttttttcctttcccgtttaatccccaggctcagctcctgggaccaatcctggttcaggctcctgttgcctgcctcatcccacagccgtccataatttggtggttaccgtcatgcacctgaagtggtagtgagcatttatagtaataaaaatcatagtctcacactgccattttcagtcaccactgattatacagcaaggaacat

SEQ ID NO: 88 - DNA, 509 bp, Homo sapiens
  misc_feature 3, 367, 385, 423, 449, 473, 509: n = A,T,C or G
ccnaacgactactatagggcgaattggagctccccgcggtggcggccgaggtgctttctttttctttctttcttctttttttttagccctgagatgtatttgacttctgaacacctagaaccctttgttttcttctttcctgtattccctgaccctttattccagttccagcttgctatttttgtttgatacatttgcagattcactgaagaccacccagcccatatatagctagctcttctgtgagatgtgtatttaaccctgaaaaaactaatgcaagaaaataggagagatgacccgaaggggaaagactcataggattcttttccccccttggcatttggccagggattttcatacattctcnaccacttaagttgaaganggcttgaagcctgctttggcttttaataataacctggnaaccccttggccccggggccgggccnggttcttagaaacttaagtggggnatccccccggggcttgcaagggaaatttccgatatn

SEQ ID NO: 89 - DNA, 475 bp, Homo sapiens
  misc_feature 4, 5, 13, 251, 398, 401, 402, 407, 409: n = A,T,C or G
cgcnnatcgactnctatagggcgaattggagctccccgcggtggcggccgaggtactaacatcaataagtcgagaaaattatattaactgaaagaaaacaaaataatagagaattttattaaacgtatttctaatgtttctcttcatgtttggagaaaagctgccacataattaaaacaattcttaccctgtaaaactgattgtcttccaatctcaggaggttttacattaaacagggaatatagaataangaaacaggcctatggcccgggctccgtggctcacgcctgtaatcccaacactttgggatgccgaggcggacggatcaccgaggtcaggaaatccagaccatcctggctaaccgcggtaaaaacctagttctcttacctaaaaaaatncannaaaananaaaaggaatggaaaggaaaagaaaaaaaaagttacctgcccggggccggcccgctctagaactagt

SEQ ID NO: 90 - DNA, 452 bp, Homo sapiens
  misc_feature 64, 88, 90, 92, 93, 101, 185, 197, 215, 227, 262, 267, 301,368, 370, 378: n = A,T,C or G
ggcgaattggagctccccgcggtggcggccgcccgggcaggtacgcggggatctcactcaatcntactcccttgttgaacaggcgatntntnnaccatgcncacaatgaaatcaatactcagagaaggcagataattctccacgaagccagaaaactaataaatgaacaacttgggtgaaatgtnccaccagacggngtgatatttagtagcccntaaagctgccanggggttgaatgacactatctgaagatatgaaccantttgntctccatagggaggattttatcaacaggaaacanatgcctggaaggcattggatttgctaagtgtctatgccatatgattctgctgttctgcgtttgattnanaatgcctnagctgacttcaaagtgaaacatagtctcgctctgtagccaggctgggagtaccttcgggccgtttctagaaact

SEQ ID NO: 91 - DNA, 473 bp, Homo sapiens
  misc_feature 2, 3, 4, 242, 449: n = A,T,C or G
gnnnagggccgctatcactactatagggcgaattggagctccccgcggtggcggccgcccgggcaggtacgcggggatctcactcaatcttactcccttgtagaacaggcgatatcttcaccatgcgcacaatgaaatcaatactcagagaaggcagataattctccacgaagccagaaaactaataaatgaacaacttgggtgaaatgtcccaccagacggtgtgatatttagtagcccanaaagctgccaaggggttgaatgacactatctgaagatatgaaccagtttgctctccatagggaggatttcatcaacaggaaacagatgcctggaaggcattggatttgctaagtgtctatgccatatgattctgctgtttgcgtttgatttagaatgctgagctgactcaaagtcaaacctagtctcgctctgtagccaggcttggnagtaccttcggccgctctagaaac

SEQ ID NO: 92 - DNA, 458 bp, Homo sapiens
  misc_feature 2, 45, 47, 199, 232, 295, 315, 392, 425, 450, 453: n = A,T,C or G
tnctatagggcgaattggagctccccgcggtggcggccgcccggncnggtactgaacttattttaaggtctccaatttatttgaatataaatttgttgggagctgagaacattttttatttatatgtgtattctgattgtttatctgtgtttggcatataataaaagttgattgagctgaaggacttaaaaacctgaancacaccttccatgcttttcatttgctttacctntgcatggaacacttttaatctgtctctcctgtgtgaaacttctctgaaacccttaccagctgnctgtgctgctacttgtctgntgtacctcggccgctctagaactagtggatcccccgggctgcaggaattcgatatcaaagcttatcgatacccgtcnacctccagggggggcccggtacccagcttttgntccctttagttggaggggttaattngcnccgcc

SEQ ID NO: 93 - DNA, 443 bp, Homo sapiens
  misc_feature 411, 432: n = A,T,C or G
ggcgaattggagctccccgcggtggcggccgaggtacttacaggggaccgccaggggcctcgagaatcggtatcctgagtcctcttgaagagcagtagaggttgtttcattaagtgcaaacacattgttcttaatttgaaaactgtgggcagaaacagaagcccgagactaatttttccattgctaactctagattctcggccactggagtctgaagatactctctttgagaatgcatattattttgctcacagctaaaacatttaagtatcatagctgatcagtggagtgagattaaaaggtttcttttttgaatcatcagctagagatgtgcaagggagacagcaatgcagggtgtgtttcagaagagcttgctgaggtgctcggctcttagcatttaaaaatgtgatngttggtatatcattcctgatngaaaacactgc

SEQ ID NO: 94 - DNA, 457 bp, Homo sapiens
ggcgaattggagctccaccgcggtggcggccgcccgggcaggtacaaatattgaaggggaagaaaatataattgtcctttctatcttttttctcataatttagctctttctccaccacgtcatgcagctgaattgagccaagcattagtggtagggataaaaataatgccggaatcactctcccccatttccaacttccactctcttcatgtgcgcagctgcacttcgtacctcggccgctctagaactagtggatcccccgggctgcaggaattcgatatcaagcttatcgataccgtcgacctcgagggggggcccggtacccagcttttgttccctttagtgagggttaattgcgcgcttggcgtaatcatggtcatagctgttttcctgtgtgaaattgttatccgctcacaatttccacacaacatacgaagcccggggagcataaagtgtt

SEQ ID NO: 95 - DNA, 449 bp, Homo sapiens
ctatagggcgaattggagctccaccgcggtggcggccgaggtacaatactagagaagggagagaatatagttaggacaataaattattgaacaagtgatttttctgtgatgactatacccattttccaaaaactaatttcatttttggtgtgtgtgtgaagaaagtttggaggcttcagtttcaatcactgtgctcaatacttaattttccattattcacagagaaattgtttttctggaaattggcaagaggaaggaagtaataataaaagatgacttatgcagatcccatgtgaccatcttacattcttactcttgtgccactgtttccctggcagtccgttactggtttaaagagcactgggatataactctagaaatacggattattttctcaccctctgacactcattcatggcggagccttaaccttagtgccaaggttattg

SEQ ID NO: 96 - DNA, 453 bp, Homo sapiens
  misc_feature 98, 193, 220, 274, 445: n = A,T,C or G
ggcgaattggagctccccgcggtggcggccgaggtacttcttggtttcttgtttacacgagtaagatatggatccagatttattttatttcaaatggntacccaattgtcccaaaaacctttattaacaatcaaaatcaaccttgactccactcaactattattccaacttcacctaaaactaaattcacaangtgtatatgggtctatttgggaatctntgtcctgtcacactggcctgttattcctgagctgagcactgtagcatggaccanaccccacacacctctcttcttttgccagaggctcatggcacttctgtaggtcattttttttcttttttgaatatacccttggtacctgcccgggcggccgctctagaactagttggatcccccgggctgcagggaattcgatatcaagctttatcgatacccgtcgacctngagggggg

SEQ ID NO: 97 - DNA, 462 bp, Homo sapiens
  misc_feature 39, 289, 291, 327, 454: n = A,T,C or G
ggcaattggagctccaccgcggtggcggccgcccggccnggtacatggaggcaaaaaagcaatcagtatgacttgaactgctgggtttaattactcaatataacacttgccatttaaaaatccatatgcccatcagcatggcaacagtctctcataaagattccggtatcatatggcacaatttgtacctcggccgctctagaactagtggatcccccgggctgcaggaattcgatatcaagcttatcgataccgtcgacctcgagggggggcccggtacccagctttngntccctttagtgagggttaattgcgcgcttggcgtantcatggtcatagctgtttcctgtgtgaaattgttatccgctcacaattccacacaacatacgagccgggagcataaagtgtaaagcctggggtgcctaatgagtgagctaactcacattaattgcgntgcgctcc

SEQ ID NO: 98 - DNA, 456 bp, Homo sapiens
  misc_feature 456: n = A,T,C or G
ggcgaattggagctccaccgcggtggcggccgaggtacatctctagctgatgattcaaaaaagaaaccttttaatctcactccactgatcagctatgatacttaaatgttttagctgtgagcaaaataatatgcattctcaaagagagtatcttcagactccagtggccgagaatctagagttagcaatggaaaaattagtctcgggcttctgtttctgcccacagttttcaaattaagaacaatgtgtttgcacttaatgaaacaacctctactgctcttcaagaggactcaggataccgattctcgaggcccctggcggtcccctgtaagtacctgcccgggcggccgctctagaactagttggatcccccgggctgcaggaattcgatatcaagcttatcgataccgtcgacctcgagggggggcccggtacccagcttttgttccctttagn

SEQ ID NO: 99 - DNA, 466 bp, Homo sapiens
  misc_feature 457: n = A,T,C or G
tacttagggcgaattggagctccccgcggtggcggccgaggtacactgatcgtttctgcagctgcagattctgctgttcgactctggtctaaaaagggtccagaagtaatgtgccttcagactttagactttggaaatggatttgctttggctctctgcttatcttttttgccaaatactgatgtacctgcccgggcggccgctctagaactagtggatcccccgggctgcaggaattcgatatcaagcttatcgataccgtcgacctcgagggggggcccggtacccagcttttgttccctttagtgagggttaattgcgcgcttggcgtaatcatggtcatagctgtttcctgtgtgaaattgttatccgctcacaattccacacaacatacgagccgggagcataaagtgtaaagcctggggtgcctaatgagtgagctaactcacattaattncgttgcgcc

SEQ ID NO: 100 - DNA, 477 bp, Homo sapiens
  misc_feature 25, 28, 30, 51, 470, 477: n = A,T,C or G
actacttagggcgaattggagctcnccngnggtgggcggccgaggtacctntccacaagcctgaacatggagtagatgcatggcacggccagattaatgcaggacgcaacgaaaggcagtaacagcaccgccccagggttactgtgtgtcttcaggaactctaagttgtacctgcccgggcggccgctctagaactagtggatcccccgggctgcaggaattcgatatcaagcttatcgataccgtcgacctcgagggggggcccggtacccagcttttgttccctttagtgagggttaattgcgcgcttggcgtaatcatggtcatagctgtttcctgtgtgaaattgttatccgctcacaattccacacaacatacgagccgggagcataaagtgtaaagcctggggtgcctaatgagtgagctaactcacattaatttgccgttgcgctcactgcccgcttttcaantcgggan

SEQ ID NO: 101 - DNA, 467 bp, Homo sapiens
  misc_feature 64, 457, 463: n = A,T,C or G
gcgaattggagctccaccgcggtggcggccgaggtacctctccacaagcctgaacatggagtanatgcatggcacggccagattaatgcaggacgcaacgaaaggcagtaacagcaccgccccagggttactgtgtgtcttcaggaactctaagttgtacctgcccgggcggccgctctagaactagtggatcccccgggctgcaggaattcgatatcaagcttatcgataccgttcgacctcgagggggggcccggtacccagcttttgttccctttagtgagggttaattgcgcgcttggcgtaatcatggtcataagctgttttcctgtgtgaaatttgttatccgcttacaattccacacaacatacgagccgggagcataaagtgtaaagcctggggtgcctaatgagtgagctaactcacattaattgcgttgcgctcactgcccgctttncagtcnggaa

SEQ ID NO: 102 - DNA, 731 bp, Homo sapiens
  misc_feature 2, 4, 5, 7, 8, 10, 16, 19, 22, 25, 31, 32, 37, 42, 46, 48,49, 51, 52, 53, 58, 63, 65, 66, 68, 69, 71, 74, 77, 82,83, 84, 98, 99, 104, 105, 106, 113, 119, 123, 124, 125,129, 388, 396, 438, 466, 495, 500, 511, 539, 542, 555, 567: n = A,T,C or G
  misc_feature 587, 596, 604, 607, 616, 632, 642, 648, 650, 655, 657, 661,669, 686, 688, 699, 716, 726, 731: n = A,T,C or G
cncnntnncnttcttntanttnaantcttcnnaattnattcnctgntnncnnncatcnatccnanntnntntcntanctatnnntatttatttctttnnattcnnncataaantttagnaggnnncctnaacgatcctatagggcgaattggagctccaccgcggtggcggccgaggtacaaagggaatagataacagggacattgatctaaagggaggttagggaggacttcttggaggaagtggtatttgtgtctgagttatatgggatgtgtgggatttcttaggtgaaagagggcagagcaatacggtggtaggctagatctgtgcagccggcttattagacaagacttgttaccctgcccgggccggctcgctcttagtaacntaggtggnattcaccccggggcctgccagggaatttcccattatcaaagncttattcgcattacccgtgcgaacctcntaggggggggggcccccgggtaccccagnccttntttgtctcccnttttaagatgaagggggtttaaatttgncgnccgcctttgggcngtaaatcattgngtgcaataagacttgttttncctggttgntggaaaanttngtttaattnccgccttcaaccaatnttcccaccancaaacnantaacngnaggncccggggnaaggccattaaaaaagntnggtaaaaaagnccctggggggggttggncccttaaatngaagn

SEQ ID NO: 103 - DNA, 842 bp, Homo sapiens
  misc_feature 2, 6, 13, 14, 17, 21, 22, 27, 28, 29, 30, 35, 38, 45, 46,52, 60, 64, 66, 69, 72, 75, 76, 79, 82, 83, 85, 87, 90,92, 93, 98, 101, 114, 115, 118, 121, 128, 166, 175, 186,299, 304, 311, 333, 353, 402, 406, 409, 425, 445, 446, 460: n = A,T,C or G
  misc_feature 485, 494, 499, 522, 523, 539, 579, 585, 600, 601, 617, 620,634, 637, 652, 676, 688, 704, 730, 735, 744, 745, 754, 765,771, 786, 793, 799, 814, 822, 825, 832: n = A,T,C or G
tntctntttctcnnctnatannaactnnnnattanatnacttctnntatctntttaattncttntngtntcnttnncancanntntnttnannttctngtnactctttattttnnctnctnagatggntcctatacgatcatatagggcgaattggagcttcaccngggggggcngcccgttttcnagtcgggaaacctgtcgtgccagctgcattaatgaatcggccaacgcgcggggaggaggcggtttgcgtattgaggcgctcttccgcttcctcgctcactgactcgctgcgcntcggncgttccngctgcggcgaagccggtatcanctcaactcaaaaggcggggnaaataccgggtgtattcccaccaggaattccatggggggaataaaccgncagnggnaaaagaaacaatggtntagtcaaaaaagggccccannccaaataaggggcncacggtaaaacccggtaaaaaaaangggccccgncgatntggcctggggcggtttttttttnnccaataagggccttcnccggctccccccccttgtaacggaaggccaatttcaaccnaaaaanaaaattccggaaccnncctttcaaaaggttcnaangaaggggttggggncgnaaaaaaccccccggnaccagggggaaccttaatttatanagggaattaacnccaagggggccggttnttttcccccccccttggggaaaaggncattncctcttccnntgggccggncttctttctcntggttntaccccggaaccccnccttggnccccgnctttttaccccgggnaattaacnctngggtccnccggcccttt

SEQ ID NO: 104 - DNA, 462 bp, Homo sapiens
actatagggcgaattggagctccaccgcggtggccgagcggccgcccgggcaggtaccttggcaataagttgctagttatctcagcctataaaatgtagggcatatggacattaagattataaattagctttggtgtaatcaaattttataatttgtaaactggactatgttgtgcatcctttcatagtttaggatgattaagagtttggaccttataagtaaactgccacattttgaatcataggccccaactgggtacctcggccgctctagaactagtggatcccccgggctgcaggaattcgatatcaagcttatcgataccgtcgacctcgagggggggcccggtacccagcttttgttccctttagtgagggttaattgcgcgcttggcgtaatcatggtcatagctgtttcctgtgtgaaattgttatccgctccaattccacacaacatacgag

SEQ ID NO: 105 - DNA, 479 bp, Homo sapiens
  misc_feature 38, 388, 399, 438, 455, 476: n = A,T,C or G
tatacactactatagggcgaattggagctccccgcggnggcggccgcccgggcaggtactactgacactgagccaatgtatgctatcaaggaaagctttatctgtcactgagcaaaaggtgaagttcaattaggtcagttttatcacttcttttcctacacacaaactatgaggagagatcatttcttttctttcttttatttatttattttttttgagacagggtcccactctgtcgcccaggttagagtacctcggccgctctagaactagtggatcccccgggctgcaggaattcgatatcaagcttatcgataccgtcgacctcgagggggggcccggtacccagcttttgttccctttagtgagggttaattgcgcgcttggngtaatcatggncatagcttgtttcctgtgtgaaattgttatccgctcacnattccacacaacatacnagccggggagcataaagtgtnaag

SEQ ID NO: 106 - DNA, 481 bp, Homo sapiens
  misc_feature 29, 454, 465, 472: n = A,T,C or G
actactatagggcgaattggagcttcacngggggggcggccgaggtacccatccagggctccaacatgaaccacacaatggaccttaggcccattccagcacacaataactcaacaaaggatgcttaaaacattaaaaggatctttactatcctcttggcaaagtacctgcccgggcggccgctctagaactagtggatcccccgggctgcaggaattcgatatcaagcttatcgataccgtcgacctcgagggggggcccggtacccagcttttgttccctttagtgagggttaattgcgcgcttggcgtaatcatggtcatagctgtttcctgtgtgaaattgttatccgctcacaattccacacaacatacgagccgggagcataaagtgtaaagcctggggtgcctaatgagtgagctaactcacattaattgcgttgcgctcctgcccnctttccagtcngggaaanctgtcgtgc

SEQ ID NO: 107 - DNA, 475 bp, Homo sapiens
  misc_feature 384, 445, 454, 455: n = A,T,C or G
actacttagggcgaattggagctccccgcggtggcggccgaggtactgatgtgggctgagagagccaaccaaatccaagtggggttttgtcaggaacggtattggaaactctgaactagataaataattcaaaggatattagctaaagtgatcagggaccaggacaggaaggtacctgcccgggcggccgctctagaactaagtggatcccccgggctgcaggaattcgatatcaagcttatcgataccgtcgacctcgagggggggcccggtacccagcttttgttccctttagtgagggttaattgcgcgcttggcgtaatcatggtcatagctgtttcctgtgtgaaattgttatccgctcacaattccacacaacatacnatccgggagcataaagtgtaaagcctgggggtgcctaatgagtgagctaactcacattaanttggcgttnncgctcaactgcccgcttttc

SEQ ID NO: 108 - DNA, 444 bp, Homo sapiens
  misc_feature 9, 32, 444: n = A,T,C or G
ccccgcggnggcggccgcccgggcaggtacangcatcgctggtggtttcaaaaaacgtagtcattcttctcactgcaacaatgtaagataagcagggtagatctgttatttccaaattaaaggtgattaagatatatggagagagaacatggcatgtgaggtttatagggctagaaactgcagaaccatgtagaacccacatttaactacagtacctcggccgctctagaactagtggatcccccgggctgcaggaattcgatatcaagcttatcgataccgtcgacctcgagggggggcccggtacccagcttttgttccctttagtgagggttaattgcgcgcttggcgtaatcatggtcatagctgtttcctgtgtgaaattgttatccgctcacaattccacacaacatacgaagccgggagcataaagtggtaaagccn

SEQ ID NO: 109 - DNA, 885 bp, Homo sapiens
  misc_feature 1, 3, 7, 8, 9, 10, 11, 12, 16, 17, 20, 23, 26, 31, 33, 34,35, 41, 43, 44, 45, 48, 49, 55, 59, 60, 65, 67, 69, 72,73, 77, 81, 82, 86, 87, 97, 100, 101, 102, 105, 107, 112,117, 118, 119, 124, 125, 128, 132, 133, 139, 143, 147, 148: n = A,T,C or G
  misc_feature 316, 355, 361, 386, 393, 406, 443, 457, 458, 481, 488, 492,494, 496, 525, 538, 541, 574, 576, 583, 613, 623, 647, 655,686, 696, 702, 705, 707, 710, 726, 727, 729, 734, 748, 754,764, 766, 768, 772, 779, 793, 805, 820, 822, 849, 860: n = A,T,C or G
  misc_feature 868, 869, 870, 877: n = A,T,C or G
ncnggannnnnnacgnntcnttnatntaagnannntttaantnnntcnntcttanacannaagantntnaannctcntttnnatanntttaaaattntcnnnacncncaatntattnnnatacnnatnatannttagtnatgnggcnncgtttacgatcactatagggcgaattggagctccacccgcggtggggcggcccgcccgggcaggtaccctccaggccctgtgtattattaagatcttttagtagcgagttgctctttctctgggaaatcggctgttaaagtcagagggagctcttaatagtttgcatnggtattttgattaaaatggaacagttgggatcaagtacnctcggnccgctctaggaaacttaggtgggantcccccncggtgcctgcaanggaaatttccgaataattcaaaggcctttattccggnattaccccggtgcnnaactctaccggaggggggggggnggggccncccngngnttaaccccccaagacctttttattgggtntccccctttatantanagtttggaagggggggttttaaaattttgggcngnccggccnttttggggccgtttaaaaattccaattggnggttccaatnaaggcctttggtatttttcccttnggtgggtnggaaaaaattattggttttaattttccccgnctttctaccnaaattntcncnaancaaccaaacctattanncngtaantcccccgggggganggccanttaaaaaagntngngtanaaaaagncccttggggggggntggcccctaaanttggaaggttgggangncccttaaaccttccaaccaattttaanaattttggccngttttgcnnngccttcnaaccttgg

SEQ ID NO: 110 - DNA, 811 bp, Homo sapiens
  misc_feature 1, 4, 11, 12, 17, 23, 24, 25, 29, 30, 33, 34, 37, 41, 42,44, 50, 53, 54, 59, 60, 62, 64, 75, 89, 95, 99, 103, 116,120, 127, 139, 140, 143, 354, 372, 375, 381, 382, 387, 389,392, 395, 397, 414, 423, 425, 426, 439, 442, 444, 466: n = A,T,C or G
  misc_feature 481, 487, 504, 506, 528, 530, 532, 538, 543, 558, 569, 571,572, 579, 586, 587, 590, 592, 600, 601, 607, 609, 613, 614,624, 625, 643, 652, 656, 658, 663, 665, 667, 679, 697, 701,708, 712, 723, 739, 743, 768, 781, 796, 804: n = A,T,C or G
nccncttctannaatantaagtnnnaatnnatnntantttnnantttttntanngtttnntncnatttatttttntatctataacctantatatngatntttnctcttctaatttnttcnttttagnaagagtattcgnntangatactatagggcgaattggagctccaccgcggtggcggctcgaggtacgcggggggatgtggagaggaccatgtgaagagagaagctgagactgaaaaggatttatgtattaatattgacagaagccaaggaacaccatctgaagttctgacggcaacatcagaagctaagagaaaaggcatggaaaagatttctcaccttagtagcatncagagggatgaggttggntcnctgcannacaancnctntgntnttatcttgacccttctngacccttcncnnaaaaccttgtagnagngngaaaagaaaaatttttccttgntttggcttttaaaanaaccancaaccaggcctttggtngnggttaccccttgccccccgggngncngggctncgtcnttctttagtaaaacnctaaggttggngnnatccccnccccccnnggncnttggcaannggaaantnttcnnaattaatttnnaaaagtccttttatttcngaattaccnccgntncagancncnttctgatagggngggggggggcccccgggnttanccccccnaaancttttttttgntttcccccttttttangttngaaggggggttttaaatatttgccngccggccttttgngccggtataaattcnaattgggntttcaat

SEQ ID NO: 111 - DNA, 454 bp, Homo sapiens
  misc_feature 356, 377, 454: n = A,T,C or G
ggcgaattggagctccccgcggtggcggccgaggtacatgcagaagatatacaccatcctgttgccatatatctaagtttttaacaattttttcttaatatctatctcctccccagattctgaaacaatagatgcacaaatatgaaacgattaaactaacttgattagctgaagccaataataactacccaaacaaaagctgaacacttaaacctactcagccataaacagaagagcttgaaagctgcaggctttgtccctaaagctagggcctgctgttgtggtgttaacatcgagaagcttgagataaaggtgtctgtcccatagaaggctcagttaggtaggcagtatcattngctcatttgctccagccagtnggagggtaagattttccattcttaattttctcatccactaggatcatcaggtagagaatggagagattggggaaccn

SEQ ID NO: 112 - DNA, 454 bp, Homo sapiens
  misc_feature 2, 3, 4, 5, 8, 9, 10, 26: n = A,T,C or G
gnnnnagnnnggcgccgaatcgactnctatagggcgaattggagctccccgcggtggcggccgaggtacgcgggggaacttgtgtgcttagacctgacgctgggaggagatgctgccacctaggttacttgtaggaccctatacggcaacctcctttgccaggaactatttataaacatcctgcaggaaaatggtaagcccttggttaaatttattggcttcatttatgtatctcacaacacttcttttctgttttagttctaggaatagaaacttacttttggaaatacagtacctgcccgggcggccgctctagaactagtggatcccccgggctgcaggaattcgatatcaagcttatcgatacccgtcgacctcgagggggggcccggtacccagcttttgttccctttagtgagggttaattgcgcgcttggcgtaatcatggtcatag

SEQ ID NO: 113 - DNA, 750 bp, Homo sapiens
  misc_feature 5, 7, 12, 14, 16, 17, 18, 19, 20, 21, 27, 30, 36, 37, 41,45, 50, 55, 56, 57, 60, 63, 64, 65, 71, 74, 75, 80, 85,89, 90, 92, 93, 96, 97, 109, 113, 116, 122, 128, 130, 132,135, 319, 360, 364, 418, 428, 447, 494, 522, 533, 600, 607: n = A,T,C or G
  misc_feature 682, 688, 690, 746: n = A,T,C or G
ctggntnttttncntnnnnnnttgttngtngtattnntgtnactngtatnttatnnnatnttnnnattatntannacgtnttctntttnntnnttnntttttctttttnattnttntaagtntgggtntncngcnatacgactcctatagggcgaattggagctccaccgcggtggcggccgaggtacaggcaaaacacatttcttgtttcacacttccttataacacccagcaaaataccagggaaaaatagcaaatatgaatcaatctttagtaagttttattctaaacaaaaggagtgactgatgaatcacatggnaacaggagggggattgaattgtttttgttttttaaaatggngatncaaattccaagggaggagaagatgaaattattacctaaaacccaggcttctccncaattattgnatcccttaaaacctttagncaacccattttttgccccgcccttgttggaaacatggcttctttttncaaggaacctccgttccaaattggggtngttggaaaagntggcctttttccttggaatggttggttttcccctttaattcaaaaccccccaccaattccttttggncttaagnccaaccttccccttaattaaccttttccttcccctttttcaaaaaaccttccttaaaattttggggggtgggttncaaccncntttccccttggttaagggggaattggcctttaaacccccccccaaaaaaattttcncccg

SEQ ID NO: 114 - DNA, 424 bp, Homo sapiens
cgaattggagctccaccgcggtggcggccgaggtacgtatctaaaccccgtgagctaggcactccccacccatctgcatacactttgtcatctttgcaactacagcgtttaacaagggctgggagatttcaactaaaacagacagaatgaactttcttttagggatcttagaacattttgcatggataggtggagaatttgaataaaatgacctatagggataactgtctttctaaaggtctaaaaacaaactgtccccagttcattaaccaacatatttattgccactagaaatcaattttcaaagagtggtaaaaatgacagggactgtagccactgcccaaaacccgactgacagggtctcagcactaaatcaagtaaaatttaataagtgtcactgtcccaggtgtgacagctaggatag

SEQ ID NO: 115 - DNA, 459 bp, Homo sapiens
  misc_feature 2, 3, 4, 5, 9, 14, 17: n = A,T,C or G
gnnnnaggnggcgncgnatcgactactatagggcgaattggagctccccgcggtggcggccggtgccacactgggccagggtagtcatcctgaaatacatgtccagggtcttgtttgtctatgatgtgggtgaaagctgcctcagcccgcaccacagtagagagcgggaccacctcacgaaagtttatagcaaactcccagagtctaacctgaaagcagccaggaacaaagacctttccagaaagaaggacatgaacaaacgcttaaagaacgacctgggctgccagggtaagaaccctcaggaggccgagagttactgtgcacagtacctcggccgctctagaactagtggatcccccgggctgcaggaattcgatatcaagcttatcgatacccgtcgacctcgaggggggggcccggtacccagctttttggtttccctttagtgagggttaattg

SEQ ID NO: 116 - DNA, 876 bp, Homo sapiens
  misc_feature 2, 496, 541, 554, 590, 601, 641, 647, 675, 693, 695, 722,723, 747, 798, 807, 813, 830, 844, 846, 851, 870: n = A,T,C or G
tngcgcgtatcgactcctatagggcgaattggagctccccgcggtggcggccgcccgggcaggacgtatgttgaaagaggtaaataaatgtatgaaaatataaagcattcagaagacaattgtccataaaaaagaaccaagtgggtatcctggaaattcaaaatacaatgtctgaagttgagaattagatttgttacaaaccagatggcacacatcagaaatctgaatgagaaaactcagaagcaagttaacagaaaatatccaaactgaatcacagaagaagactaaaagagagcatgggagttatgtgagacacagacaaaagttccaacatcgatgaaattggaatcctggaagaagagagaggggaagggcaagagaaatatttaaagaaaaaagtaattgagaattttccaaatctgatgagaaactttaaatcactgaatcaaaaagttcactaagcccaacagggtggacacaagtgcacacccaaacnttccacacaaaacccatccaagtacctcgggccgctctagaaccnagtggatcccccnggctgcaggaattcgatatcaagcttatcgatcccntcgacctcgangggggggccccggtacccaacttttgttccctttagtggngggttnattgcccgctttggcgttaatcattggncattagctggttcctggngngaaattggtattccgttcacaatttcnncccacaatccgagcccgggagccntaaagggtaaaggcctggggtggcctaagggtgagcctacttcacattaantggggttgngcttanttgcccggttttcaagncggggaaactgttngngcccnctggatttattaattcggncacccc

SEQ ID NO: 117 - DNA, 897 bp, Homo sapiens
  misc_feature 51, 65, 67, 86, 167, 188, 190, 195, 267, 281, 283, 288, 304,330, 336, 340, 351, 365, 373, 382, 393, 398, 401, 406, 409,419, 431, 440, 445, 476, 493, 498, 503, 509, 515, 517, 523,542, 545, 555, 557, 561, 563, 564, 566, 568, 569: n = A,T,C or G
  misc_feature 579, 613, 620, 633, 644, 646, 649, 650, 656, 663, 664, 668,675, 676, 681, 692, 696, 701, 705, 706, 717, 727, 728, 732,737, 739, 744, 755, 759, 764, 770, 774, 776, 779, 780, 781,786, 787, 795, 800, 802, 805, 808, 809, 815, 816, 819: n = A,T,C or G
  misc_feature 826, 829, 830, 837, 838, 840, 843, 854, 856, 860, 868, 874: n = A,T,C or G
tagggcgaattggagctccccgcggtggcggccgcccgggcaggtactttntttttttttttttntnttttcgaatgacagcctantctttattgcaggttttttattttaatttaataccagagagccctaagccaggatttatttttcccatatgaaaatatttnggtctgactctgaagtctcanancggtngctgaattcttcaaagtgaagagtgaaaagctttgtaagtttcttcaaggcatttcatgtgtcattgttttntcctcccaataganantgaangtaatggtgatgtccnccagcacatcacctggattaaatttntgctgngcangaaatgcatcngcacctttaccgtnacctaatnaatttaacngcccaggcccntgggnaancaatnccngcaaggttcncattttttcttnaccaagaangtttnttacttttcagatctcgatggggcaaattgntggtttgccttgaagtnccctngccgnttctanaactangngggatncccccggctgcaaaggaantcnaatttctaancnttantnnantnnccggcaaacntgagggggggggcccggggccccaccttttggtnccttttnatgggggggttanattgccgcgcntngcnnaaatcntgggtcnntagnctgggtnncctgnggggaaatggnttantccgnttcnnaatttcccccnaaaattaccnncccngggancnttaanagggtaaaaanccgnggggngcctanatgnanggnnncctanntccccttnattgncnttnccnncctctnnccntttcccngtnngggaaanntngcngggcccccctnanttanggataacngccccncccccgggggaaaaggggtttgg

SEQ ID NO: 118 - DNA, 888 bp, Homo sapiens
  misc_feature 3, 4, 5, 560, 595, 620, 631, 638, 647, 687, 739, 751, 776,787, 789, 796, 803, 824, 830, 853, 862, 865, 872, 881: n = A,T,C or G
tgnnngacgcgcgtaatacgactactatagggcgaattggagctccccgcggtggcggcccgcccgggcaggtacagactttattctctatttcaggggccttgtttattaagcagacagaactctgcttgattattccatgaagtcgccaaccattaatcatgcacatttgtttaacaggtcaaatgaagagaggaaatttgtgtgcagtcacggcaaatactgcctcattttacccactgtgatactaaaggtacctcggccgctctagaactagtggatcccccgggctgcaggaattcgatatcaagcttatcgataccgtcgacctcgagggggggcccggtacccagcttttgttccctttagtgagggttaattgcgcgcttggcgtaatcatggtcatagctgtttcctgtgtgaaattgttatccgctcacaattccacacaacatacgagccgggagcataaagtgtaaagcctggggtgcctaatgagtgagctaactcacattaattgcgttgcgctcactgcccgcttttccaagtcgggaaacctntcgtgccagctgcattaatgaatcggcccaacccnccggggagaggccggtttgccgtanttgggcgcttnttccgcntttcttggntcaactgactcgcttgcgctcggtcgttcggcttgcggcnaagccgtatcaagctcacttcaaaaggcgggtaataccgggtattccacaanaatcaagggganaaccgcaaggaaaaaacattgtgancaaaaagggcnancaaaaanggccggnaaccgtaaaaaagggccccgnttgctngcgttttttccataggcttccgnccccctggncgngctttanaaaaatcgncctcaaa

SEQ ID NO: 119 - DNA, 874 bp, Homo sapiens
  misc_feature 2, 3, 5, 9, 10, 695, 734, 758, 763, 778, 793, 795, 797, 800,804, 809, 813, 829, 830, 854, 857, 862, 864, 869, 872: n = A,T,C or G
tnngncgtnncgcgcgtaatacgactcactatagggcgaattggagctccaccgcggtggcggcccgcccgggcaggtacctctaggcaattcattacagtagcattaaaagacaccaaggccaaatgctttggggtcactcttctaaaacaccgtgtctagacaagagtcatcaagcaatgattgcttgactgattttttaaaattataagtcacacaaacacacagtcatctaataaaaaaaaactgattttcttaagattctcagagtggtaacactcacaactgtcatgtcagcaagtggaactttcttctaagtaaacatcagaattccaatcagcctttgaaccactgcaaatatttcacagtctcaaaattcacctaccttaaaaccaagcgcgtacctcggccgctctagaactagtggatcccccgggctgcaggaattcgatatcaagcttatcgataccgtcgacctcgagggggggcccggtacccagcttttgttccctttagtgagggttaattgcgcgcttggcgtaatcatggtcatagctgtttcctgtgtgaaattgttatccgctcacaattccacacaacatacgaagccgggagcataaagtgtaaaagcctggggtgcctaatgagtgagctaacttacattaattgcgttgcgctcactggccgctttccangtcgggaaacctgtcgtgccagctgctttaatggaatcnggccaacgccgccggggagaggcnggttncgtatttgggcgctntttccgcttcttcgntnanttnactngcttngctncggtcctttcggctgnngcgaaccggtatcaacttcacttnaangccgngnatacnggnat

SEQ ID NO: 120 - DNA, 1162 bp, Homo sapiens
  misc_feature 1, 8, 11, 13, 15, 19, 22, 24, 26, 29, 34, 37, 42, 45, 46,47, 49, 50, 53, 61, 63, 64, 67, 68, 69, 70, 79, 83, 88,89, 90, 93, 94, 96, 101, 102, 112, 143, 164, 199, 202, 206,212, 231, 240, 256, 304, 313, 323, 325, 332, 333, 346, 350: n = A,T,C or G
  misc_feature 354, 360, 376, 379, 380, 385, 393, 396, 399, 401, 413, 420,421, 423, 432, 448, 453, 459, 460, 467, 469, 470, 475, 477,481, 483, 490, 491, 496, 505, 519, 520, 522, 523, 537, 539,552, 570, 579, 585, 589, 594, 599, 601, 607, 611, 613: n = A,T,C or G
  misc_feature 621, 623, 638, 646, 662, 670, 677, 682, 694, 704, 707, 709,711, 715, 724, 725, 730, 736, 740, 745, 746, 747, 755, 762,764, 778, 785, 787, 789, 792, 815, 817, 818, 822, 835, 839,841, 842, 843, 844, 845, 848, 850, 853, 860, 866, 867: n = A,T,C or G
  misc_feature 870, 875, 884, 896, 900, 901, 919, 922, 926, 928, 929, 932,938, 940, 944, 949, 950, 951, 954, 961, 980, 982, 986, 998,1008, 1009, 1010, 1016, 1020, 1026, 1033, 1038, 1043, 1050,1053, 1068, 1078, 1080, 1083, 1086, 1100, 1104, 1110: n = A,T,C or G
  misc_feature 1116, 1118, 1120, 1124, 1129, 1137, 1138, 1139, 1140, 1142,1144, 1154, 1157, 1158, 1159, 1161: n = A,T,C or G
naccattntanantnttanatntnanttnctctntcnatttnatnnntnntantgataatnannatnnnnatttctttnattnatatnnnagnngnagggnntcgctcattnggcgaattggactccaccgcggtggctgccnacgtaccatgtctgcaccaanagtggcaataaggaggaggtggcatgtggtggacngangganagccanattctgtttcaggttacancatgcaaanaagggcgatgagaatntttgcattatacataaccaaagatgaaggaaaactctgctaatgattnagtcctttnatccacccantntttggannacctgcccggacnggcncggntctaanaactagtggatccccncgnnctgcnaggaaatnttnatntncaaggccttatncgatacnngntcgaccctngaaagtggggggcccngggtncccaanntttttgntnnccttntngtgnanggattannttgcngccgcttgncggtaaattatgcnncnntaaattgttgaccntngggggaaaattgnttttcgcggaataataanttcctaaantagacnatancaaanccggnanccaatnaaantngtaaatancnctggggggtggcccntaattganggtgaaccttaccgcnacaattanatttggngttanccgctccaactncacctcgttnttncnanatcngggtaaacnnctgtnccttgnccangattnnnttttaacngtaaatntntccctaacgccccngtgggtntnangcncgcgtttttccaatattgggccnanncctntttacaatatttncttntnnnnnaantnagnctctcgntttggnngcnatatnatctctctnatagtattttancgcnnaatccgcaaaattctacnctngcancnnaanaaaagngngggnataannncanattttcntcccacggaaatacaatgngngatnataccccacatnctaatgaaannntgtgtntatnccaatnagggccnaattnaaatngggccanagnacctttacaaaaggnccctctttcntnggngcnttataaacattatngcgnccggancactangncngggntatanacaaaatnnnnantnctctaatatntcnnngng

SEQ ID NO: 121 - DNA, 460 bp, Homo sapiens
actactatagggcgaattggagctccccgcggtggcggccgcccgggcaaggtaccactatttgagttctgcagttggccagggttgtgggaggggcctcaaagttaagtggagacactgagatggacaagaccagatgctatgcacaatggaaatgcatggttgaagttttccttcctgcctgtgtggggccttagggccacaagggcagccattactcagcactgcactgaccttgggaatttgctgggcaaggaaaatgacgtggccctcatcatcgatggccacaccctgaagtacctcggccgctctagaactagtggatcccccgggctgcaggaattcgatatcaagcttatcgataccgtcgacctcgagggggggcccggtacccagcttttgttccctttagtgagggttaattgcgcgcttggcgtaatcatggtcatagctgtttcct

SEQ ID NO: 122 - DNA, 511 bp, Homo sapiens
  misc_feature 2, 3, 4, 6, 14, 18, 367, 423, 455, 477, 510: n = A,T,C or G
gnnngnggcccganctantcgactactatagggcgaattggagctccccgcggtggcggccgcccgggcaggtacaacgatctcttttgtggtcttctatgtcaactctcaaactaatctcctacaacttttccaccccccacgcaccgtgccacaaatcatctgttacctaacacataagtgacaacacaattctgttcctgccattttctgctgaagattgttccaatttacttctctgttgacatataaagtagcctttaaagcttttaaggtctttaaagctttaaagtagcttcaacatgattttgattctgctttttattctcattaaaatgaaatatttctgggattgaacaatgagagnaaaataatagaagagtaggtggtgaaaaattaaaaaagtagggcataagcaaagtngtccctattggtcacaagaccgtcaattaaanggcaatgaaaaatacagaagcntgaaatggtggaatttaaatggccacagatcgnt

SEQ ID NO: 123 - DNA, 459 bp, Homo sapiens
atacgactactatagggcgaattggagctccccgcggtggcggccgaggtactgatgtgggctgagagagccaaccaaatccaagtggggttttgtcaggaacggtattggaaactctgaactagataaataattcaaaggatattagctaaagtgatcagggaccaggacaggaaggtacctgcccgggcggccgctctagaactagtggatcccccggctgcaggaattcgatatcaagcttatcgataccgtcgacctcgagggggggcccgggacccagcttttgttccctttagtgagggttaattgcgcgcttggcgtaatcatggtcatagctgtttcctgtgtgaaattgttatccgctcacaattccacacaacatacgagccgggagcataaagtgtaaagcctggggtgcctaatgagtgagctaactcacattaattgcgttgcgct

SEQ ID NO: 124 - DNA, 471 bp, Homo sapiens
  misc_feature 1, 4, 143, 281, 303, 348, 365, 447: n = A,T,C or G
nggnccctatcactacttagggcaattggagctccccgcggtggcggccgaggtactgaccatagatatccctgggggatgtagtggattcaaaacatgagttggattctccaacgtgccatcggaattcttctaatattcancagctttgattgttgttttacatctgacctgtatttagatttctctgattcctggaatatttgtggaaaataagtacctgcccgggcggccgctctagaactagtggatcccccgggctgcaggaattcgatatcaancttatcgataccgtcgacctcnagggggggcccggtacccagcttttgttccctttagtgagggttnattgcgcgcttggcgtnatcatggtcatagctggtttcctgtgtgaaattgttatccgctcacaattccacacaacatacgagccgggagcataaagtntaaagcctgggggtgcctaatgag

SEQ ID NO: 125 - DNA, 479 bp, Homo sapiens
  misc_feature 2, 3, 4: n = A,T,C or G
gnnngaggccgcgaatcactactatagggcgaattggagctccccgcggtggcggccgcccgggcaggtactatgctgtttggattactacagctttgtagtatattttgatgtcaggtggtataatgcctccaactttgttttctttgatcaagatggcattggtgccagcctcgtggctcacacctgtaatccaagcactttgggaggccaaggcaggtggataactttgaggtcaggagttcaagaccagcctggccaacatggtgaaaccccatctctatcaaaaaatacaaaaattggctgggcatggtggtacctggaaacccaagattcttgaatttacctcctgaatcttcattgcttgtaagctgagtttctcagctctactgtaacttgcttcttaagtttctagttataaacttcaggttgtagaccctgccttacttagttgcaaagaagttgtgaaaatgagtgtt

SEQ ID NO: 126 - DNA, 511 bp, Homo sapiens
  misc_feature 15, 77, 96, 165, 208, 283, 306, 357, 359, 366, 367, 384,392, 403, 412, 449, 464, 478, 482, 487, 494, 496, 498, 499,505, 508, 511: n = A,T,C or G
gatgccctatcactncttagggcgaattggagctccccgcggtggcggccgaggtacgcgggaacaaaggatctganaaaagttgggaaagagtancttgggtcaggaaaggaggaaggtaggtggcactatggaagttgaccctgtcaagaagagaatggtcanaaatcaggaagggaacttgtcttctaaagaataggtggctaanagaaagtaacagtgacctgaggtgaaaccaagtgggtaaccattgtaaacttgtgagtgctggactctgacagcnccctggggtgtggctgtacctgnccgggcggccgctctagaactagttgatcccccgggctgctagggaattcnantataaanntttatcaataccgtctnacctcttngggggggcccngttacccanctttttgtttcccttttaggtgaggggtttaattttncgccgctttggccgnaattcattggttcntaancttgnttcctgnantnnaaattnttnttn

SEQ ID NO: 127 - DNA, 556 bp, Homo sapiens
  misc_feature 2, 6, 189, 207, 311, 328, 347, 360, 361, 375, 405, 408, 414,418, 425, 439, 463, 492, 493, 498, 502, 503, 504, 507, 524,528, 529, 530, 536, 540, 547, 555: n = A,T,C or G
gncccnaacactacttagggcgaattggagctccccgcggtggcggccgaggtactaggaaggttattgcacagctccttaactgatcggggtcagggcagagtggtcactttccccacagccaggctctggatttgcctcctgtgaagacaccatgcctagcacaggctgacggggcggctgcagtcnaaccttgcctccagattnatgaaaccagttaagtagcacaatttctcgttggctactttcacttcaagagtgtcatgtttattgatgtggagctttctgaatagggaaggttaaggcacacntgctgagtaaaacaaanatttcttgtgtagcgttcnagattgagggcanncagtcaatggtaanaataaacttcaaatagcatgttcctgtcanganatatgngtanccctggncttaagggattttntttccccctgcaccgaatcctaanactgtttggctagctgattcttttgtttnntggcnaatnnnatnggtttttgatgaatttngctnnnatcccncggnggttgtnataaagant

SEQ ID NO: 128 - DNA, 603 bp, Homo sapiens
  misc_feature 173, 174, 192, 206, 214, 221, 234, 238, 242, 245, 251, 258,282, 299, 301, 302, 317, 322, 324, 333, 341, 348, 351, 352,357, 369, 370, 374, 378, 380, 381, 385, 389, 396, 401, 410,428, 436, 444, 450, 451, 453, 457, 458, 459, 468, 471: n = A,T,C or G
  misc_feature 482, 485, 492, 494, 496, 497, 500, 507, 510, 517, 524, 525,527, 532, 535, 536, 540, 545, 549, 551, 552, 556, 558, 559,563, 567, 572, 573, 588, 589, 591, 595, 596, 597, 600, 601,602: n = A,T,C or G
ggcgaattggagctccccgcggtggcggccgaggtacttattgtctctcatcttgtccatcatgttgtttctcctttttaggcgtatatatatctatggaagaaaaaagtttaaatagaaacactcatttgatgaggaattttggtgtaaagaaagggtaaaaatgggaaatnnataggaaaaaaaagtttncttaccttgaagtnaccaaatnaaatatnaaaccaaagtggnaccnaaanttncttggntgccacnaagaagggagaagtggggtttaangaccaccccaatgagangnnccgattgggaaaatnggaancnaaagccccncggtttantgccttnggnnccctncccccggcgctnncccncttntnnaaancctntagtggnaatcncccccgggnctgtgcaggggaatttcnaaataccngggccttntatttnnancccnnnacccacccnctntaacggggggnggnaccccgngngnnccnctatatntcntggatcnctatttnngntctanggnnttanataancgcngnncctngnncacnacantatanntgtccccacatgcgnnanttannnccnnng

SEQ ID NO: 129 - DNA, 499 bp, Homo sapiens
  misc_feature 9: n = A,T,C or G
tatacactnctatagggcgaattggagctccccgcggtggcggccgaggtacgcggggacagcaacttccttgatccctgccacgcacgactgaacacagacagcagccgcctcgccatgaagctgctgatggtcctcatgctggcggccctcctcctgcactgctatgcagattctggctgcaaactcctggaggacatggctgaaaagaccatcaattccgacatatctatacctgaatacaaagagcttcttcaagagttcatagacagtgatgccgctgcagaggctatggggagattcaagcagtgtttcctcaaccagtcacatagaactctgaaaaactttggactgatgatgcatacagtgtacctgcccgggcggccgctctagaactagtggatcccccgggctgcaggaattcgatatcaagcttatcgataccgtcgacctcgagggggggcccggtacccagcttttgttccctttagtgagggtt

SEQ ID NO: 130 - DNA, 491 bp, Homo sapiens
  misc_feature 246, 252, 339, 382, 452, 456, 461, 469, 489, 490: n = A,T,C or G
ggagctccccgcggtggcggccgaggtacctgcaggcctcctacacctacctctctctgggcttctatttcgaccgcgatgatgtggctctggaaggcgtgagccacttcttccgcgaattggccgaggagaagcgcgagggctactgagcgtctcctgaagatgcaaaaccagcgtggcggccgctctagaactagtggatcccccgggctgcaggaattcgatatcaagcttatcgataccgtngacctngagggggggcccggtacccagcttttgttccctttagtgagggttaattgcgcgcttggcgtaatcatggtcatagctgtttcctgngtgaaattgttatccgctcacaattccacacaaacataccgangccggggagcataaaagtgtaaagcctggggtgcctaatgagttgagctaactcacattaattgcgttgngctnactgncccctttncaagtcgggaaacctggtcnnt

SEQ ID NO: 131 - DNA, 536 bp, Homo sapiens
  misc_feature 130, 150, 186, 188, 189, 192, 196, 204, 215, 261, 264, 297,301, 305, 327, 328, 342, 343, 346, 351, 363, 372, 373, 382,386, 388, 392, 396, 400, 403, 411, 412, 415, 425, 437, 440,442, 445, 454, 456, 459, 463, 465, 466, 467, 471, 475: n = A,T,C or G
  misc_feature 477, 478, 482, 488, 497, 501, 507, 517, 521, 528, 529, 534,535: n = A,T,C or G
cgaattggagctccaccgcggtggcggccgaggtacccaagtgatgtcatctccccatcctcttgagagtgtctgaggaggcctcttttccttttttattgcaatggcaaggttggaagaaactgtgacnagtaagaggcagagacccanagctgagtgtagcatcatgtcttctagagactctcncnnaanaaanctgacttnggccagtgctntggttggaaatgtattctggatccccgcagtacctgcccgggcggncgntctagaactagtggatcccccgggctgcaggantaanaatntcaagcttatcgataccgaatnnactgggaggggggnnccnggaanaacagcttttgntccctttanngaggggtangatntnaatngctngccnggntcaaggannttntccccctgcncgattgaaaaanganantcntgctcaccntnacncatngnnnttgnccantnntggnatggcnttataattnaaanagcctngggatccccngggntggttcnnaactnnt

SEQ ID NO: 132 - DNA, 488 bp, Homo sapiens
  misc_feature 67, 76, 206, 208, 299, 349, 442, 460, 482: n = A,T,C or G
ggagctccccgcggtggcggccgaggtaccattggtggtggtatctttcaagcaatcaaaggttttngcaattctncagtgggagtaaaccacagactacgagggagtttgacagctattaaaaccagggctccacagttaggaggtagctttgcagtttggggagggctgttttccatgattgactgtattatggttcaagtcanangaaaggaagatccctggaactccatcacaagtggtgccttaacgggagccatactggcagcaagaaatggaccagtggccatggttgggtnagccgcaatgggtgggcattctcctagctttaattgaaggagctggtatnttgttgacaagatttgcctctgcacagtttcccaatggtcctcagtttgcagaagacccctcccagtttgccttcaactcagttaccttcctnaccttttggaggactatngaccaatattagtatgactttnttttcc

SEQ ID NO: 133 - DNA, 561 bp, Homo sapiens
  misc_feature 228, 312, 343, 349, 380, 411, 415, 432, 443, 445, 446, 453,460, 461, 463, 464, 466, 474, 489, 502, 510, 513, 519, 526,538, 540, 552, 556, 559, 560: n = A,T,C or G
cgaatcactactatagggcgaattggagctccccgcggtggcggccgaggtacaggtccgaaagtatgaagaacacagaaggcaggccaggggcactgtgagatggtaaaagagatctgaagggatccagaattcaagccaggaagaagcagcaatctgtcttctggattaaaactgaagatcaacctactttcaacttactaagaaaggggatcatggacattgaancatatcttgaaagaattggctataagaagtctaggaacaaattggacttggaaacattaactgacattcttcaacaccagatcncgagctgttccctttgagaaccttaacatcncattgngggggatgccctgggaccttagggctttaanaggcccattttttgatcaaagtttgttgagnaaantaaaattcctgggggtngaatgggttgntnnccaaggnttcaaanncnncnttttttgntccctttcccccggngccgggcccgggntttttaanaancttagntgggaantcccccccgggncntttctaaggaantttntannt

SEQ ID NO: 134 - DNA, 571 bp, Homo sapiens
  misc_feature 4, 102, 190, 193, 333, 340, 343, 346, 350, 355, 364, 367,370, 371, 374, 395, 399, 400, 403, 404, 407, 413, 414, 416,419, 422, 427, 437, 439, 441, 443, 445, 447, 448, 449, 450,456, 459, 468, 473, 477, 480, 483, 484, 491, 492, 495: n = A,T,C or G
  misc_feature 505, 507, 508, 510, 512, 514, 515, 516, 519, 529, 539, 542,545, 553, 554, 557, 561, 562, 563, 566, 568, 570: n = A,T,C or G
ggcnattggagctccccgcggtggcggccgcccgggcaggtacgtggacggcgtggaggtgcataatgccaagacaaagccgcgggaggagcagtactcagntaaaatatttcttcataaatagttacaaaacctgccaaaacacaaaggggaaagtatttttcattcaaaaaaatgacatttgaatgtnacncaacacaagaaacaatgcttagagacatgttattgtttccagaagaaaatggtcagtaaactacttagctgaagacaaaagactaccctttcccagggatcacaggtgcacaaaaagcaataatgtttaacaatcagttnccttggncgnttnttanaactnggtgggatnccnccnngcntgcaatgaatttttatatttntatnnttnnatntattanncngtncgnctctntgatgggggngngntncntnnnnactccnctntattttgtntatcncttnaantannatgtgtnnctntctttgtatntnntntntnnnttntaactctttntatctatccntcnatntatctctnnatntaannnatntngnt

SEQ ID NO: 135 - DNA, 590 bp, Homo sapiens
  misc_feature 184, 210, 312, 329, 341, 342, 347, 357, 362, 373, 374, 375,380, 383, 392, 396, 409, 422, 433, 443, 449, 450, 454, 459,462, 477, 497, 498, 515, 527, 532, 534, 545, 547, 558, 571,585: n = A,T,C or G
ttaggccctaacactacttagggcaattggagctccccgcggtggcggccgtcgcactcatttacccggagacagggagaggctcttctgcgtgtggtggttgtgcagaccctcatgcatcacggagcatgagaagacgttcccctgctgccacctgctcttgtccacggtgagcttgctgtanaggaagaaggagccgtcggagtccancacggggaggcgtggtcttgtagttgttctccggcttgcccactgctctcccactccacggcgatgtcgctgggatagaagcctttgacccccgcgtacctnggccgctctagaactantggatccccccnnctgcncgaatttttnttcantttaatgaggnnnaattngcncccttaggncgtnaatcattgggtcnataagcttgtttntttctcgtttntaaaaaaatnggttanntacntcttncancaattttccacaaanaaccaatacccaatccctgnnagccttttaaaggttgntaaaaagccctnggggntngcccttaatgnangtgaagcctanaacttcacaattnaaatttgccgattnccgcc

SEQ ID NO: 136 - DNA, 524 bp, Homo sapiens
  misc_feature 3, 207, 225, 237, 264, 282, 291, 298, 300, 303, 312, 320,322, 403, 428, 431, 455, 491, 496, 497, 502, 504, 508, 511,521, 522: n = A,T,C or G
ggnccctaacactacttagggcgaattggagctccccgcggtggcggccgatacctcaccgtggctgctgtcttccgtggtcggatgtccatgaaggaggtcgatgagcagatgcttaacgtgcagaacaagaacagcagctactttgtgggatggatccccaacaatgtcaagacagccgtctgtgacatcccacctcgtggcctnaagatggcagtcaccttnattggcaacagnacagccatccaggagctcttcaagcgnataactagtggatccccngggctgtangaattcnanatnaagcttatngataccgncnacctcgagggggggcccggtacccagcttttgttccctttagtgagggttaattgcgcgcttggcgtaatcatggtcatanctgttttctgtgtgaaattgttatncgntcacaattccacacaacatacganccgggaggcataaagtgttaaagcctgggggtgccntaatnngtgancntaanttnacattaattnncg

SEQ ID NO: 137 - DNA, 498 bp, Homo sapiens
  misc_feature 150, 209, 467, 498: n = A,T,C or G
ctactatagggcgaattggagctccccgcggtggcggccgaggtacttttttttttttttttttttttgttgcagttagtttattgaaatggaaatgaatttgaggtttcaacagttgtctagcagtttccacataaaaagacaacacangaaagaaaagtggtttctagcaatcaacagatgagttctggccatagtctgtagccctntgagccaaacgccttgggtaaagttaattactcttcatattacaccaaatgctgtcgtacctgcccgggcggccgctctagaactagtggatcccccgggctgcaggaattcgatatcaagcttatcgataccgtcgacctcgagggggggcccggtacccagcttttgttccctttagtgagggttaattgcgcgcttggcgtaatcatggtcatagctgtttcctgtgtgaaattgttattccgcttacaattccncacaacatacgagccggggagcataaagtgn

SEQ ID NO: 138 - DNA, 509 bp, Homo sapiens
tatacactactatagggcgaattggagctccccgcggtggcggccggaaggaggatggtatcactcaggctctcagggtgacactgaagcaagacactcatggggtaggacatgaccctgccaaggagttcacaaaccactggtggaatgagctcttcaacaagactgcggccaacttggtagtggaaactgggcaggatggagtacctgcccgggcggccgctctagaactagtggatcccccgggctgcaggaattcgatatcaagcttatcgataccgtcgacctcgagggggggcccggtacccagcttttgttccctttagtgagggttaattgcgcgcttggcgtaatcatggtcatagctgtttcctgtgtgaaattgttatccgctcacaatttccacacaacataccgagccgggagcataaagtgtaaagcctggggtgcctaatgagttgagctaactcacattaattgccgttgcgctcactgccccgctttcccaa

SEQ ID NO: 139 - DNA, 421 bp, Homo sapiens
  misc_feature 5, 6: n = A,T,C or G
gagcnncccgtaatacgactcactatagggcgaattggagctccaccgcggtggcggccgaggtacacttttggccaggggaccaagctggagatcaaacgaactgtggctgcaccatctgtcttcatcttcccgccatctgatgagcagttgaaatctggaactgcctctgttgtgtgcctgctgaataacttctatcccagagaggccaaagtacctgcccgggcggccgctctagaactagtggatcccccgggctgcaggaattcgatatcaagcttatcgataccgtcgacctcgagggggggcccggtacccagcttttgttccctttagtgagggttaattgcgcgcttggcgtaatcatggtcatagctgtttcctgtgtgaaattgttatccgctcacaattccacacaaca

SEQ ID NO: 140 - DNA, 525 bp, Homo sapiens
  misc_feature 281, 361, 409, 411, 415, 425, 480, 486, 497, 520, 521, 522: n = A,T,C or G
taacactactatagggcgaattggagctccccgcggtggcggccgtggtactccatcctgcccagtttccactaccaagttggccgcagtcttgttgaagagctcattccaccagtggtttgtgaactccttggcagggtcatgtcctaccccatgagtgtcttgcttcagtgtcaccctgagagcctgagtgataccattctccttccggccgctctagaactagtggatcccccgggctgcaggaattcgatatcaagcttatcgataccgtcgacctngagggggggcccggtacccagcttttgttccctttagtgagggttaattgcgcgcttggcgtaatcatggacatagctgnttcctgtgtgaaatttgttatccgctcacaattccacacaacattacnanccgngagcataaangttgtaaaagcctgggggtgccctaaatgagttgaagcttaacctcacatttaantttgcngttggggcttnaactgggccccgcttttccaagnnncgg

SEQ ID NO: 141 - DNA, 485 bp, Homo sapiens
  misc_feature 380, 402: n = A,T,C or G
ggagctccaccgcggtggcggccgaggtacttttattaaaaaatagtcacgcagacagtgccctggtggctctgccccgcatcccaactctggggtgggggaaaggggtcaacgttttcgcagccccaaaccgggccatcacttgcccaccgagtcgaatatgatgcggttctgctcggcgcgctcccgcgtacctgcccgggcggccgctctagaactagtggatcccccgggctgcaggaattcgatatcaagcttatcgataccgtcgacctcgagggggggcccggtacccagcttttgttccctttagtgagggttaattgcgcgcttggcgtaatcatggtcatagctgtttcctgtgtgaaattgttatccgntcacaattccacacaacatacngagccgggagcataaagtgtaaagcctggggtgcctaatgagtgagctaactcacattaattgcgttgcgctcactgccccgg

SEQ ID NO: 142 - DNA, 541 bp, Homo sapiens
  misc_feature 210, 368, 369, 375, 386, 388, 401, 403, 408, 422, 425, 426,427, 437, 438, 442, 454, 466, 467, 471, 485, 497, 499, 526,527, 529, 539, 541: n = A,T,C or G
ggcgaattggagctccccgcggtggcggccgaggtacataagttccctatggcttatggagagttatttattaattaactttatggtagggctagtatgaatacctttttaacaattgcgtgctattacaacaatgaagattcaaatgactccgctttgaaggatgttttctctatatggtaaaatatatatgaagaagtcttgattacngtggaagatcacttgactcagaatacttcaatgtattttgttcacattaccactaagcatattatcagtaaactattaactgactgcacattatgtaatacgttgtacctcggcgcgctctagaactaggtggatccccccggggctggcatggattnnaatatnaaggctaattngnatacccggcttancnatganggggggggggcccnggnnnaccccggggnntgangttaaccttttnaatggccggggnngaanccctaactggaggnggaggctaaacncncgattaaattgcggtttgccgctcacnngncccggttttncn

SEQ ID NO: 143 - DNA, 494 bp, Homo sapiens
  misc_feature 179, 181, 189, 191, 193, 202, 205, 210, 213, 216, 368, 382,471: n = A,T,C or G
ggagctccccgcggtggcggccgaggtactcccttgtggataaacgcttctagttcttggcgtgtttgggttgcttttcctcctaaaaactgaatggaactagaactttctaggaaccctttcaagctgcagtaatgatttactgaagcagaaagaacatggttattttgagtctcacnanaataaaanananataaaagtncanatttncanctntttgaatcaggttcaggaaaaaagcaaacatgcacacctaaaacttaaaagaccgtttcatcactatgcatacgtttatcatttgacatccatcaactgtatacctggtttcaaaagtaaatttaacttgtgatctcagcatagctcatgtncacatttcatgcanagggtccaggaaactcaaatcacactttggtaagtcaccatgttcactcatttttaagaagcgtaccctgcccgggcggccgcttttanaactaagagggatccccccgggc

SEQ ID NO: 144 - DNA, 1061 bp, Homo sapiens
  misc_feature 3, 7, 9, 11, 12, 13, 14, 16, 19, 21, 27, 28, 30, 33, 35,36, 39, 40, 41, 42, 43, 45, 46, 47, 49, 57, 59, 60, 62,63, 66, 67, 69, 71, 73, 75, 76, 77, 78, 79, 80, 81, 82,83, 84, 85, 86, 87, 88, 89, 90, 101, 211, 216, 217, 219,221: n = A,T,C or G
  misc_feature 246, 317, 322, 350, 356, 417, 418, 485, 491, 524, 526, 541,578, 586, 592, 604, 606, 615, 633, 651, 664, 667, 683, 690,699, 704, 715, 719, 723, 726, 731, 738, 739, 741, 744, 747,751, 767, 769, 770, 771, 772, 781, 782, 796, 798, 799: n = A,T,C or G
  misc_feature 801, 805, 811, 812, 818, 839, 840, 847, 853, 858, 861, 862,864, 867, 872, 876, 878, 880, 884, 890, 891, 894, 903, 909,911, 914, 916, 933, 941, 946, 958, 964, 971, 975, 976, 980,996, 997, 1002, 1003, 1012, 1014, 1026, 1028, 1038: n = A,T,C or G
  misc_feature 1042, 1046, 1049: n = A,T,C or G
atntgtngngnnnnangancnacactnntngtngnnatnnnnnannntnttatgtgngnnanngtnnantntntnnnnnnnnnnnnnnnngctatcgatgnttcgatcattaggcgaattggactccaccgcggtggcggccgcccggccaggtactccatctagtctgggtgacggagcgagggtccatctaaaaaaaaaaaaagacatngaagnncngnagaactgagttagaaaccttcttcnattccgtgtttggaccttgggaaggctgttaagcctcctggtgcctagtttttctcatctgtaaacaggcntaatnaacaccatttgcacatggttggtacctnggccgntctagaactagtggatcccccgggctgcaggaattcgatatcaacgcttatcgataccgcnnacctcgagggggggcccggtacccagcttttgttcccttttagtgagggttaattggcgcgccttgncgtaantcattggtcatagcttgtttcctggtgggaaantnggttatcccggtcanaaaatttccacacaaacattaccggagcccggggaancataaaantgtaanaggccctggggngngccctaaangaagtgaggcctaacctnacattaaatttgccgttngcgcttcaattgnccnggtttttcaaagtccnggaaaancctggtctntgccnaacttgcattnaatngatncgncccancctcccnngnaanaanggcnggttgccgcttttgtngnnnnatttttccnntttcttttgagttnanntnaatncgattnnacctcnggccgatcagggcttgctggnnaagccgngtatcnaagtntanntntanaaggncggnananctcnttttcnnccnagaattcgngggggnanccncnacgaaaaaacatttttnccaaaagnccacnataagggctcangaaccntaaaaanggcnngttntcttgaggatttttanntgggnnccccccccntntgaggacgcttntnaaaaatcganggcntacnagnataagggggccg

SEQ ID NO: 145 - DNA, 540 bp, Homo sapiens
  misc_feature 103, 174, 175, 181, 238, 254, 263, 321, 329, 330, 365, 367,456, 457, 460, 464, 468, 475, 482, 489, 498, 501, 519, 522,530, 534: n = A,T,C or G
ggcgaattggagctccaccgcggtggcggccgaggtgcggtatccttgcaccttgcttctcatacttcaagctactgcttgggtgggtcccgttgtaaactanatgaacactcatctgactatggatatcatcactcctagatactcctgctcatatgatccacttaccagagnntctgtntggacatcttttaaccaagctagtagtaactgcccgggcggccgctctagaactagnggatcccccgggctgnaggaattcnatatcaagcttatcgataccgtcgacctcgagggggggcccggtacccagctttgttnccctttanngagggttaatttgccgccgcttggccgtaatcatngntcaataactgtttacctgtgtgaaaattgttatttcccgcctcaacaaatttttccaccaccaatcaattaccgtagccccgggaagcnntanaaanttgntaaaagnccctggngggtggncttaaatgnagntggagccttcactttacnaantttaattngccntttccc

SEQ ID NO: 146 - DNA, 558 bp, Homo sapiens
  misc_feature 2, 3, 4, 9, 10, 80, 410, 423, 429, 475, 477, 481, 485, 492,499, 502, 519, 521, 525, 528, 529, 536, 547, 549, 550, 553: n = A,T,C or G
gnnngtggnngaccgctaaacgactactatagggcgaattggagctccaccgcggtggcggccgcccgggcaggtaccangctgtaaccaatacgattctggggcaggttgtgggcgagtagaagaacctccttcccctctgcgacattgaacggcgtggattcaatagtgagcttggcagtagtgggtgggttccagaaggttagaagtgaggctgtgagcaggacctccttccaggggacatgcaatctgcagggaggggctgaggggggtcccatggtctctgctgtcttctctgtccacctctttgtagaggagcttgagctccaaggaatgctctggtcagggctgctgtgactgttggccctgctgtccttccttcttcttgtccccgcgtaccttcggcccgnttcttaaaaactngtggantccccccgggccttgcagggaattttcgaatattcaaagccttatncnattncccngccgaancctttcnaangggggggggccccgggnancccnaanntttttgntttcccttttnanntgnagggg

SEQ ID NO: 147 - DNA, 850 bp, Homo sapiens
  misc_feature 3, 4, 7, 9, 10, 12, 16, 20, 33, 36, 38, 41, 44, 49, 54, 56,61, 70, 72, 74, 75, 78, 84, 88, 92, 93, 94, 97, 100, 106,107, 109, 110, 112, 113, 116, 117, 124, 127, 130, 135, 141,148, 332, 359, 371, 401, 416, 417, 426, 441, 446, 451: n = A,T,C or G
  misc_feature 459, 461, 472, 485, 489, 501, 509, 510, 511, 520, 531, 533,536, 556, 569, 576, 586, 590, 607, 613, 626, 638, 642, 646,647, 651, 669, 690, 692, 698, 708, 712, 714, 728, 741, 746,748, 752, 769, 770, 777, 781, 783, 785, 788, 793, 809: n = A,T,C or G
  misc_feature 824, 825, 828, 840, 842: n = A,T,C or G
cgnntcnanntngtcntatnttctcatgtcttnttnanttnttnttatnttttntntctanttcctattntntnnatngtattntatnttcnnnatnctntcatanntnntnntanntctattnttnagntgagntactgncgcgctntacgactcactatagggcgaattggagctccaccgcggtggctggccgaggtactttggcctctctgggatagaagttattcagcaggcacacaacagaggcagttccagatttcaactgctcatcagatggcgggaagatgaagacagatggtgcacgccacagtttcgttttgatttccacncttggtcccttggctcgaaacgtcggnaaatactataantatttgcatgacaggttaaataatactgcncacattcaagctagnncctgcaggncttgcctggattggntggantaagntgaaaaantntgttccccaanaactcccgcttgntcanctcggaaacccngtgtccannngggaccctnccggtatttcncnccngggtttccgaattgcccccnaattttaaaatangaaatcnaatgatcttnaatngaaaggggcttgtttcnctttgnggtttttctttgnctttggggatancccntggnncccncgggggcccggggtcccngcattccttaatcaaaacctnanggttgngggatttccnctcncngggcccttggcatnggggaaaattttntgaanantttnaaataagcttttattcnntatttancccngntntcngaacncttatccaaatggggnggggggggccccccnnggntatcccccatangntttttttt

SEQ ID NO: 148 - DNA, 504 bp, Homo sapiens
  misc_feature 31, 355, 374, 454, 480, 486: n = A,T,C or G
tatacactactatagggcgaattggagctcnccgcggtggcggccgcccgggcaggtacaacggcctcaatttctcgggcagcatcagctccactttatcgaggagccggtggtaggtggcccgcaggcctcgggcaccggcggccgacatcgccgccgagggatcgttggcagccgggtgggagcgtggctgtgttctcgtccctggctgacaacgaaggggagctagtcacttttcctgccacgacgactcgcgtccgcctctcgcctggagtacctcggccgctctagaactagtggatcccccgggctgcaggaattcgatatcaagcttatcgataccgtcgacctcganggggggccccggtacccancttttgtttcctttaatgaggggtaaattgcgcgcttggcgtaaatcatggtcataactgtttcctgtgggaaaatgttnttccggttaacaatttccacacaaanataacngaaacccggggaggcatt

SEQ ID NO: 149 - DNA, 514 bp, Homo sapiens
  misc_feature 2, 3, 4, 7, 88, 252, 255, 316, 382, 402, 432, 434, 443, 445,514: n = A,T,C or G
gnnnggnccctatcactactatagggcgaattggagctccccgcggtggcggccgaggtactttttttttttttttttttttttttgngtggagcatgggacctttattcgttaagacatcaggctccagatatgaactttcagcaaaagcgcttgccgggagcaaagggacagaaaagctgagatgaacagtgcctggcagcaatcacagccgggcaagggtgctccgagcctcgcatcccccggccgctntanaactagtggatcccccgggctgcaggaattcgatatcaagcttatcgataccgtcgacctngagggggggcccggtacccaacttttgttccctttagtgagggttaattgcgcccttggcgtaatnatggtcatagctgtttcctntgtgaaaatgttattccgcttacaatttcncncaacatacnancccggagcataaagtgtaaagcctggggtgcctaatgagtgagctaactccattaattgcgttgcgccn

SEQ ID NO: 150 - DNA, 523 bp, Homo sapiens
  misc_feature 2, 4, 40, 431, 459, 468, 482, 523: n = A,T,C or G
gngnccgcgtatacactactatagggcgaattggagctcnccgcggtggcggccgcccgggcaggtaccagcagaaacctggccaggctcccaggctcctcatctatggtgcatccaccagggccactggtatcccaggcaggttcagtggcagtgggtctgggacagagttcactctcaccatcagcagcctgcagtctgacgattttgcaagtttattactgtctccagtataataactggcctccgtacctcggccgctctagaactagtggatcccccgggctgcaggaattcgatatcaagcttatcgataccgtcgacctcgagggggggcccggtacccagcttttgttccctttagtgagggttaattgcgcgctttggcgtaatcatggtcataagctgtttcctgtgtgaaattgttattncgcttacaatttcacaccacataccgangcccggganccttaaaagtggtnaagccttggggtgcctaatgaagtgaagcttacttacattn

SEQ ID NO: 151 - DNA, 874 bp, Homo sapiens
  misc_feature 539, 546, 551, 570, 586, 598, 609, 612, 638, 649, 665, 676,733, 761, 762, 767, 769, 770, 781, 788, 789, 808, 809, 810,814, 825, 826, 828, 836, 840, 861, 864, 871: n = A,T,C or G
agccgtatacactactatagggcgaattggagctccccgcggtggcggcccgcccgggcaggtactgaactagctccttctggttaatttgttgattggattggaaattagaacatggagctggtcaatgcacggtatctggtaattgtggatgggggagatgactggggcagaactgagctctatttttgccaacatagtacctcggccgctctagaactagtggatcccccgggctgcaggaattcgatatcaagcttatcgataccgtcgacctcgagggggggcccggtacccagcttttgttccctttagtgagggttaattgcgcgcttggcgtaatcatggtcatagctgtttcctgtgtgaaattgttatccgctcacaattccacacaacatacgagccgggagcataaagtgtaaaagcctggggtgcctaatgagtgagctaactcacattaattgcgttgcgctcactgccgctttccagtcgggaaacctgtcgtgccaactgcattaatgaatcggcccacgccnccggganaggcngttgcgtatttgggcgctnttttcgctttctttgnttacttaactcnttggcttcggncgntcgggttggggggagccgggattaanttacttcaaanggcgggaataccggtnttcccaaaatngggggaaaacccaggaaaaaaattttgaccaaaaggccccaaaaggccaggaaccgnaaaaaggcccgtttctggggtttttccnngggtncnnccccctggcangctttannaaaaatttgaccctaaatnnnaggnggggaaacccnncnggactttnaaanaacaaggctttccccctggangcncctttgncct

SEQ ID NO: 152 - DNA, 485 bp, Homo sapiens
  misc_feature 21, 435, 476: n = A,T,C or G
cgaattggagctccccgcggnggcggccgcccgggcagggactttcttctgtgtgacaattactgcacagtctttccctctgacagctactgatgtaaggccaccctggttaatagccttaaaagcatattctacttggtagagccgaccctcgggtgaaaaaatggtaatgtggcggtcaaaaccggcgctggaaccacgggacatgttggtacctcggccgctctagaactagtggatcccccgggctgcaggaattcgatatcaagcttatcgataccgtcgacctcgagggggggcccggtacccagcttttgttccctttagtgagggttaattgcgcgcttggcgtaatcatggtcatagctgtttcctgtgtgaaattgttatccgctcacaatttcacacaacatacgagccgggagcattaagtgnaaaagcctggggtgccctaatggagtgagcctaacttcacnatttaattg

SEQ ID NO: 153 - DNA, 512 bp, Homo sapiens
  misc_feature 2, 4, 425, 465, 469, 493, 505, 509: n = A,T,C or G
gngngccgcgaatacactactatagggcgaattggagctccaccgcggtggcggccgaggtacacttttggccaggggaccaaactggagatcaaacgaactgtggctgcaccatctgtcttcatcttcccgccatctgatgagcagttgaaatctggaactgcctctgttgtgtgcctgctgaataacttctatcccagagaggccaaagtacctgcccgggcggccgctctagaactagtggatcccccgggctgcaggaattcgatatcaagcttatcgataccgtcgacctcgagggggggcccggtacccagcttttgttccctttagtgagggttaattgcgcgcttggccgtaatcatggtcatagctgtttcctgtgtgaaattgttatcccgcttcacaattccacacaacatacnagccgggagcataaagtgtaaaagcctggggggcctaatnagtnagctaacttacattaatttgcttncgccttaacttncccnttt

SEQ ID NO: 154 - DNA, 538 bp, Homo sapiens
  misc_feature 2, 3, 4, 14, 21, 405, 426, 445, 448: n = A,T,C or G
gnnngcggcgccgnatcactnctatagggcgaattggagctccccgcggtggcggccgaggtactttggcctctctgggatagaagttattcaacaggcacacaacagaggcagttccagatttcaactgctcatcagatggcgggaagatgaagacagatggtgcagccacagttcgtttgatctccagcttggtcccctggccaaaagtgtacctgcccgggcggccgctctagaactagtggatcccccgggctgcaggaattcgatatcaagcttatcgataccgtcgacctcgagggggggcccggtacccagcttttgttccctttagtgagggttaattgcgcgcttggcgtaatcatggtcataagctgttcctgtgtgaaaattgttatcccgctnacaattttcacacaacattcnaacccgggagccataaaangtngtaaaagccttggggggtgccttaattggagtggaagcttaacttcacaattttaatttggcggtttgccgccttacctgggccccgctt

SEQ ID NO: 155 - DNA, 562 bp, Homo sapiens
  misc_feature 2, 3, 4, 6, 8, 326, 402, 407, 417, 436, 450, 480, 491, 494,506, 509, 510, 521, 524, 530, 542, 548: n = A,T,C or G
gnnngngngcgccgtaatcactactatagggcgaattggagctccccgcggtggcggccgaggtacaactaaatattagctaatggtagcacaagtagaacctgtttaaaatttttaaaaaacaacctgttcactgtaagaatgagatacccaaggaaagaacaggaaagaggtgtatttttaatcctgccttttgtatttagtgtgccccatgactagcttgttcatctaacatgcttcttggttctcggcaggtgaatggctatgtcgtgaaccttttctgggcatttgacacccacaagcaagagaggagagctttgaacttncgaggaaagcatattgtcacacaaaggtaacactttttggtgctggtcagtgttgtgtgccaggaagggggtaaanggctnggacccaatnccttttccccgcccgtaanaagcctttgaactnggggggttccccaggggaaaaggggggaanggtatttcttnttnggaaaagccttnttnnttgtggttttnaanaaggtnttctttggtgcnatttgnagggattccctatt

SEQ ID NO: 156 - DNA, 506 bp, Homo sapiens
  misc_feature 3, 32, 40, 47, 60, 441, 468, 471, 501, 506: n = A,T,C or G
ggnccgctaatcactactatagggcgaaattngaacctcnccgcggnggcggccgaggtncgggggccagttattatactgctgacagtagtaaactgcagaatcttcagactgcaggctgctgatggtgagagtgaactctgtcccagacccactgccactgaacctggctgggatactagtggccctggtggatgcaccatagatgaggagcctgggagcctggccaggtttctgctggtacctgcccgggcggccgctctagaactagtggatcccccgggctgcaggaattcgatatcaagcttatcgataccgtcgacctcgagggggggcccggtacccagcttttgttccctttagtgagggttaatttgcgcgcttggcgtaatcatggtcatagctgtttcctgtgtgaaattgttattcgcttcacaattncacacaacatacgagccccggagcatnaantgtaaaagccttggggtggcctaaatgagntgaan

SEQ ID NO: 157 - DNA, 387 bp, Homo sapiens
  misc_feature 376: n = A,T,C or G
gtaataccactcactatagggcgaattggagctccaccgcggtggcggccgcccgggcaggtacgcgggggaggaactgctcagttaggacccagacggaaccatggaagccccagcgcagcttctcttcctcctgctactctggctcccagataccactggagaaatagtgatgacgcagtctccagccaccctgtctgtgtctccaggggaaagagccaccctctcctgcagggccagtcagagtgttggcagcaactttgcctggtacctcggccgctctagaactagtggatcccccgggctgcaggaattcgatatcaagcttatcgataccgtcgacctcgagggggggcccggtacccagcttttgttncctttagtgag

SEQ ID NO: 158 - DNA, 692 bp, Homo sapiens
  misc_feature 536, 549, 558, 584, 608, 610, 629, 642, 672, 685: n = A,T,C or G
gcgattggagctccaccgcggtggcggccgaggtacctgcaggcctcctacacctacctctctctgggcttctatttcgaccgcgatgatgtggctctggaaggcgtgagccacttcttccgcgaactggccgaggagaagcgcgagggctacgagcgtctcctgaagatgcaaaaccagcgtggcggccgctctagaactagtggatcccccgggctgcaggaattcgatatcaagcttatcgataccgtcgacctcgagggggggcccggtacccagcttttgttccctttagtgagggttaattgcgcgcttggcgtaatcatggtcatagctgtttcctgtgtgaaattgttatccgctcacaattccacacaacatacgagccgggagcataaagtgtaaagcctggggtgcctaatgagtgagctaactcacattaattgcgttgcgctcactgcccgctttccagtcgggaaacctgtcgtgccagctgcattaatgaatcggccaacgcgcggggagaggcggtttgngtattgggcgctnttccgcttnctcgctcactgactcgttggctcggncgttcggttgcggcgagcggtatnanctcactcaaaggcggaatncgggtatccacanaatcaggggataacccaggaaagaacatgngagcaaaaggccngcaaaag

SEQ ID NO: 159 - DNA, 868 bp, Homo sapiens
  misc_feature 668, 678, 718, 747, 775, 824, 867: n = A,T,C or G
gcgcgtatcgactactatagggcgaattggagctccccgcggtggccggccgcccgggcaggtacagctattcaacatgtttaaacagatgtttgctgacagcactgacttctccaagagcctaagagaggagagcagccaattaaactccactgtcttctaaaattttaatcctagattggtttcagatgggttaagacagtcattcaacccacaagtatttaaggaaggcacctgggactgactcagttcctagatttaaacctattctgtgaactgcccacccctaccttcaaagtacctcggccgctctagaactagtggatcccccgggctgcaggaattcgatatcaagcttatcgataccgtcgacctcgagggggggcccggtacccagcttttgttccctttagtgagggttaattgcgcgcttggcgtaatcatggtcatagctgtttcctgtgtgaaattgttatccgctcacaattccacacaacatacgagccgggagcataaagtgtaaagcctggggtgcctaatgagtgagctaactcacattaattgcgttgcgctcactgcccgctttccagtcgggaaacctgtcgtgccagctgcattaatgaatcggccaacgcgcggggagaggcggtttgcgtattggggcgctntttcgctttncttggttcactgactcgcttgcgctcggtcgttcggcttncggcgagccggtttcaacttcactcaaangcggtaataccggttttcccagaatcanggggataacccaggaaagaacatttgagcaaaaggccaccaaaaggccnagaacccgtaaaaaggccccgtttgctggcgtttttcaaaggnt

SEQ ID NO: 160 - DNA, 516 bp, Homo sapiens
  misc_feature 2, 10, 220, 412, 450, 482, 501: n = A,T,C or G
gntggccgcnatcactactatagggcgaattggagctccccgcggtggcggccgcccgggcaggtacaagagttacagcccttatgacatgttggaaagcatcaggaaagaggttaaaggagacctggaaaatgctttcctgaacctggttcagtgcattcagaacaagcccctgtattttgctgatcggctgtatgactccatgaagggcaaggggacncgagataaggtcctgatcagaatcatggtctcccgcagtgaagtggacatgttgaaaattaggtctgaattcaagagaaagtacctcggccgctctagaactagtggatcccccgggctgcaggaattcgatatcaagcttatcgatacccgtcgaccttcgagggggggcccggtacccagctttttgttncccttttaagtgagggttaattgcgccgctttggcgtnatcatggtcataagctgtttcctgtgtgaaanttgtattcgcttacaattncccacaaacattacc

SEQ ID NO: 161 - DNA, 529 bp, Homo sapiens
  misc_feature 2, 10, 446, 459, 475, 505: n = A,T,C or G
gnggcgccgnatacactactatagggcgaattggagctccaccgcggtggcggccgtcgcactcatttacccggagacagggagaggctcttctgcgtgtagtggttgtgcagaccctcatgcatcacggagcatgagaagacgttcccctgctgccacctgctcttgtccacggtgagcttgctatagaggaagaaggagccgtcggagtccagcacgggaggcgtggtcttgtagttgtcctccggctgcccattgctctcccactccacggcgatcccgcgtacctcggccgctctagaactagtggatcccccgggctgcaggaattcgatatcaagcttatcgatacccgtcgacctcgagggggggcccggtacccaacttttgttccctttagtgagggttaattgcgcgcttggcgtaaatcatgggtcatagcttgntttccttgtggtnaaaaatggttaatccngctttcacaaattttcccccacaaacattnaccgaacccggggaagcaataaat

SEQ ID NO: 162 - DNA, 528 bp, Homo sapiens
  misc_feature 252, 309, 315, 329, 404, 422, 425, 428, 451, 465, 473, 476,477, 486, 488, 501, 512, 515, 521, 528: n = A,T,C or G
gggccctatcactacttagggcgaattggagctccccgcggtggcggccgaggtacaaagggaatagataacagggacattgatctaaagggaggttagggaggacttcttggaggaagtggtatttgtgtctgagttatatgggatgtgtgggatttcttaggtgaaagagggcagagcaatacggtggtaggctagatctgtgcagccggcttatagacaagactgtacctgcccgggcggccgctctanaactagtggatcccccgggctgcaggaattctatattcaagcttatcgataccgtcnacctcnagggggggcccggnacccaacttttgttccctttagtgagggttaattgcgccctttggcgttaattcatgggtcatagctgttttccntgtgtgaaaattggtatnccnctnaacaatttccccacaacataccnaggcccggggagcnataaaaangtnntaaaagccntngggggttgccttnaaatggaggtnaanccttanctcaccn

SEQ ID NO: 163 - DNA, 545 bp, Homo sapiens
  misc_feature 3, 7, 8, 286, 306, 322, 361, 368, 380, 391, 415, 417, 445,454, 457, 464, 476, 484, 507, 509, 514, 517, 520, 521, 525,534, 535, 537, 539, 541, 544: n = A,T,C or G
gtncggnntgacgccgtaatacgactactatagggcgaattggagctccaccgcggtggcggccgcccgggcaggtacgcggggccgcagtagttggagtctaaggactcgtgacaatcttcgggtgcccttcgagagaaaaggggaggatgccactggagtcatcctcttcaatgccactatccttcccatctctcttaccctcagtacctcggccgctctagaactagtggatcccccgggctgcaggaattcgatatcaagcttatcgataccgtcgacctcnagggggggcccggtacccancttttgttccctttantgagggttaattgcgcgcttggcgtaatcatggtcatanctgtttnctgtgtgaaaanttgttattccncttacaatttcacacaaacatacnanccggggaagcatttaaaaattgttaaancctgggggntgnccttaantgaaggtgaagnccttaaanttcaaaatttaatttggggtttncngcttnaantgnncccngcttttttnnanancnggna

SEQ ID NO: 164 - DNA, 600 bp, Homo sapiens
  misc_feature 11, 268, 323, 331, 341, 349, 353, 362, 364, 369, 373, 390,405, 410, 411, 416, 418, 423, 441, 442, 444, 450, 452, 454,455, 456, 457, 458, 472, 473, 477, 481, 485, 488, 493, 501,502, 510, 523, 526, 527, 530, 536, 538, 541, 542, 543: n = A,T,C or G
  misc_feature 548, 551, 553, 563, 579, 582, 589, 594, 598: n = A,T,C or G
gttgggcctancatacttagggcgaattggagctcaccgcggtggcggccgccaccatgtccgcctcggctgtcttcattctggacgttaagggcaagccattgatcagccgcaactacaagggcgatgtggccatgagcaagattgagcacttcatgcctttgctggtacctcggccgctctagaactagtggatcccccgggctgcaggaatttcgatatcaagcttatcgataccgtcgacctcgagggggggcccggtacccanctttttgttccctttaagtgaggggttaattgcgcgcttggccgtaaatcatggncaatagcntggttcctgntgtgaaanttgnttattccgntnacaantccnccacaaacaataccgancccgggggagccatnaaagnntaaananccctngggggtgccctaattganngnagcctnancnnnnnatttaaattggtgnntggnggcntcanttngcccngctttttnnaaattcgngggaaaaaacttnttnnttncccccncnttnnntttanaantnaaaatatggnccaaaccccccggggnatngaagggngtggngttntt

SEQ ID NO: 165 - DNA, 607 bp, Homo sapiens
  misc_feature 3, 14, 271, 288, 294, 299, 309, 316, 331, 336, 359, 361,381, 383, 385, 395, 396, 404, 408, 410, 421, 466, 483, 497,498, 511, 522, 532, 541, 547, 552, 555, 563, 568, 581, 590,597, 601, 604, 605: n = A,T,C or G
ggnccctatcactncttagggcgaattggagctccccgcggtggcggccgaggtacagacatcattttcaagaagttttgccataaaagtgaaaaatggtaatagctgaaaaaatttagcgttgacagaaggctttttttaaagacaggaaaaattatggcgcagagggaaatgctgatgatacaagatggagagagagaaattactggagtaatgactctgagcagatgtggatggcattaataaagagaatggccttagataggcacanagatatatcatcaattngaaacngaaanccaaaggatngtttacnagggaaccagattcnaggtnggccattagtaaattaaaagccntntgggaaaggttcttcatttncngnctgggttccnnggttttcnttangntaaaaatatangaaaattgaaggtttttccggggttggaggccctaaaataaattntggggaagggaaagtgnttacccgggttctnnaagggaggggganggaaaaaaggntcctttcttnaataaaaangggganaaaanttnaaaggggnttttnaaaagggaacccnccccccttngggttgnaaanttnnct

SEQ ID NO: 166 - DNA, 875 bp, Homo sapiens
  misc_feature 4, 11, 12, 18, 20, 22, 27, 424, 454, 485, 545, 594, 614,640, 655, 683, 695, 718, 735, 762, 764, 783, 798, 806, 809,827, 834, 851, 861, 864, 865, 873: n = A,T,C or G
acgngtatacnntactantnantatanggcgaattggagctccccgcggtggcggcccgaggtactactggcactgagccaatgtatgctatcaaggaaagctttatctgtcactgagcaaaaggtgaagttcaattaggtcagttttatcacttcttttcctacacacaaactatgaggagagatcatttcttttctttcttttatttatttattttttttgagacagggtcccactctgtcgcccaggttagagtacctgcccgggcggccgctctagaactagtggatcccccgggctgcaggaattcgatatcaagcttatcgataccgtcgacctcgagggggggcccggtacccagcttttgttccctttagtgagggttaattgcgcgcttggcgtaatcatggtcatagctgtttnctgtgtgaaattgttatccgctcacaattncacacaacataccagccgggagcataaagtntaaaagcctggggtgcctaatgagttagctactcacattaatttgcgttgcgctcactgnccgcttttcagtcgggaaacctgtcgtccagctgcattaatgaatcggncaaccgcggggagaggcggnttgcgtattgggcgctcttccgcttnctcgctcactgactngctgcgcctcggtcgttcggctgcggcnagcggtttcaantcactcaaaggcggtaaataccngttattccacagaaatnaggggataaccccaggaaagaacattntnagccaaaaggccacaaaangccaggaaccctaanaaaggccncgnttgctggcgtttttccanaggctcngcccccttgacagcatnacaaaaatcnacnntaaagtgngg

SEQ ID NO: 167 - DNA, 523 bp, Homo sapiens
  misc_feature 310, 400, 402, 438, 442, 459, 488, 489, 496, 498, 499, 502,512, 519, 520, 521, 522: n = A,T,C or G
ggcgaattggagctccaccgcggtggcggccgcccgggcaggtacagtagtcagctacttggatatcaagactaagtgctgatatgaagacttgcctttgtgttttgttatgaaacacgcaagcataaagcaggactcaagcacaaggctgactgttctactttgaataacagcttccttgcagtctcctccacatgggtggtacctcggccgctctagaactagttggatcccccgggctgcaggaattcgatatcaagcttatcgataccgtcgacctcgagggggggcccggtacccaagcttttgntccctttagtgagggttaattgcgcgcttggcgtaatcatggtcatagctgtttcctgtgtgaaattgttatccgctcacaatttcacancnacatacgaagccggggagccttaaagtggtaaaagncctnggggtgccctaatggangtggagctaacttcaacatttaattttgnngtttggngnntanctgggccccnttttcannnnc

SEQ ID NO: 168 - DNA, 547 bp, Homo sapiens
  misc_feature 2, 3, 4, 7, 8, 9, 401, 412, 414, 425, 437, 462, 474, 484,510, 520, 533, 546: n = A,T,C or G
gnnnggnnngcgccgaaacgactactatagggcgaattggagctccccgcggtggcggccgcccgggcaggtacagaacttttggaaacaccgtcccttcaaatgctaccttacttaaaatatgtagacattagtccatccaacctctgctaccaggcagtaacctttcatagatcttccaaagaaaatgttcttgataaaaccagaagaatcttctcagagagacccaggggagtgatctgaccctcactgctatcttgacttaagttttagctgcagccatggcgactcaagtacctcggcccgctctagaactagtggatcccccgggctgcaggaattcgatatcaagcttatcgatacccgtcgacctcgagggggggcccggtacccagcttttnttcccttttantngaggggttaantggcgcgctttnggcgtaatcattgggcatagcctgnttttccttgtgntgaaaattgntatttccgcttcacaaatttccccancaaaaataancaaacccgggggngccattaaaaagng

SEQ ID NO: 169 - DNA, 467 bp, Homo sapiens
  misc_feature 4, 30, 31, 33, 37, 41, 45, 51, 76, 117, 120, 159, 302, 307,311, 359, 409, 411, 429, 433, 436, 445, 451, 456, 459, 463,467: n = A,T,C or G
cgcnatacgactactatagggcgaattggnncncggncccngcgncgaggncgacggtatcgataagcttgatatngaattcctgcagcccgggggatccactagttctagagcggncgnccgggcaggtactaacccaacaatagaattacctatccntaactcgttagcccaacacaggcgtgctttaaggaaagattaaaaaaagtaaaaggaactcggcaaacacgaaccccgcctgtttaccaaaaacatcacctctagcataacaagtattagaggcattgcctgcccagtgactnaagtnaaanggccccacccgcggtggagcttcagcttttgttccctttagtgagggnttaatttgccgccgcttgggcgtaatcatggtcatagctgtttcctgggntnaaaaattgggtaattccncttnacnaatttcccncaaccnaaacnatnccgnaccn

SEQ ID NO: 170 - DNA, 924 bp, Homo sapiens
  misc_feature 435, 446, 459, 731, 735, 752, 776, 783, 786, 800, 802, 804,819, 830, 832, 837, 838, 850, 860, 863, 866, 870, 874, 906,907, 909, 912, 915: n = A,T,C or G
cgaacgcgtatacgactactatagggcgaattggagctccccgcggtggcggccgcccgggcaggtacctgaatttaccagtattttctcttacggcttttggatttgactcatagttgaaaaggtctaccatgttcaaggtcattaagaaagtatcctgtttttctcctagatcttgggtagcttttggtgttgacctttacattttttattcatttgaaatttggcctggtgtaagacaggctttcccctagaatgctgcccaggtagctcagtatcaaatattgaactatccctattttcattccactctgatttataatgcaatttttatcccacatatatttggatctatttctgaactttttttttttaacatacatatttttacacgttccaactcttagaaatgttccatgctgtttctgtttttangctccttttangtacctcggccgntctagaactagtggatcccccgggctgcaggaattcgatatcaagcttatcgatccgtcgacctcgagggggggcccggtacccagcttttgttccctttaagtgagggtaattgcgcgcttggcgtaatcatggtcatagctgtttcctgtgtgaaattggtatccgctcacaattcccacaacatccagccgggaacataaagtgtaaacctggggggcctaatgagtgagctactcacattaattgcgttgcgctcactggcccctttnccantccgggaaacctgtcgngccaactggcattaatgaattggncaacccnccngggagaggcggttncntnttgggcgcttttccntttcttgcttnantgaannggtggactcggncgttcggttnggnaancggnattnacttacttcaaagggggtaattccggtattcnnanaancangggataccg

SEQ ID NO: 171 - DNA, 481 bp, Homo sapiens
  misc_feature 2, 3, 479, 481: n = A,T,C or G
gnnagctaacactactatagggcgaattggagctccaccgcggtggcggccgcccgggcaggtactcttgtttaaccatcagaggtgattccatcaccttcacagccccagcctctgctccagtccctccccagcgaaaagggccgcccatgccatcctgctgctggtgatttgctttgtggtcatggactcagtggacatcattattttattaaccgtgtggtaggtttttaactcagttatcctggatatccaaaggtttgtggtccatctttaggcttccgtttgttctttggtacctcggccgctctagaactagtggatcccccgggctgcaggaattcgatatcaagcttatcgataccgtcgacctcgagggggggcccggtacccagcttttgttccctttagtgagggttaattgcgcgcttgggcgtaatcatggtcatagctgtttcctgtggtgaaaattggttatncn

SEQ ID NO: 172 - DNA, 469 bp, Homo sapiens
  misc_feature 2, 4, 27, 37: n = A,T,C or G
cnanacactactatagggcgaattggnagctcaccgnggtggcggccgaggtacaagatgcacttggtcacccggttgtaggctccaggctccatgaaccaacagaagcttctctaagtaggaaaactgtgcgatggcgtaatccgagttgttggtggcctgcatgccttcattcccactgattcccacacccacgtgggctgtctggatcatcccgacatcgttggcgccgtctccgatggcgagggtgatggccttcacccgcttcttcaccacatccactatctcagacttctgcagaggagacactctgcagcatatgaccgctttgcacgagagtgccaaatccaggaaactcctccggacttcgaaggagagcgcgacctgcccgggcgggctctagaactagtggatcccccgggctgcagggaattcgatatcaagcttatcgataccgtcgacctcgagg

SEQ ID NO: 173 - DNA, 493 bp, Homo sapiens
  misc_feature 2, 3, 5, 7, 14, 478: n = A,T,C or G
gnngngngccgcgnatacgctactatagggcgaattggagctccccgcggtggcggccgaggtaccctcggttgcaagcacaagcaaatgtgccagggtggttgatgcagctgtggtcacaggtcctatccaaagagcactcatccacatcttggcaagacttctcatctgttaataatttaaatcctttcttgcggccgctctagaactagtggatcccccgggctgcaaggaattcgatatcaagcttatcgataccgtcgacctcgagggggggcccggtacccagcttttgttccctttagtgagggttaattgcgcgcttggcgtaatcatggtcatagctgtttcctgtggttgaaattgttatcccgctcacaaaattcccacacaaaccataccgaagcccggggaggcattaaagtgtaaaagcctggggttgcctaatgagtggagcctaaacctcaccattaatttncgtttgccgcttcac

SEQ ID NO: 174 - DNA, 873 bp, Homo sapiens
  misc_feature 2, 4, 5, 7, 10, 15, 20, 23, 24, 32, 37, 39, 44, 47, 54, 55,58, 60, 62, 74, 76, 82, 91, 95, 99, 101, 106, 107, 113,116, 122, 138, 142, 146, 148, 149, 150, 152, 153, 325, 337,362, 367, 369, 381, 392, 400, 420, 428, 441, 450, 452: n = A,T,C or G
  misc_feature 453, 455, 462, 464, 468, 474, 486, 488, 496, 499, 505, 507,509, 534, 539, 552, 560, 565, 571, 582, 585, 588, 592, 598,615, 618, 619, 634, 638, 641, 647, 648, 650, 652, 653, 658,660, 666, 667, 673, 674, 679, 685, 688, 693, 697, 700: n = A,T,C or G
  misc_feature 701, 707, 710, 711, 713, 714, 720, 722, 724, 732, 735, 739,744, 746, 747, 753, 758, 761, 763, 772, 779, 784, 802, 805,806, 816, 821, 829, 832, 837, 839, 843, 850, 851, 853, 855,863, 864, 869, 872: n = A,T,C or G
cncnnantcnctatnaattnaanntgttgtgnatacntnttatnctnttgaacnnatntntntattctctttantntcattntaatataanattntaangnttttnntattcntgnttttanatttttatttatattnagtntagngnnntnncgcgtatacgactcactatagggcgaattggagctccaccgcggtggcggccgaggtactttttttgtttgtttttttttttcaccttaagggaggatttaatttgctcccaactgattgttcacttaaatgaaaatttaaaaatgaataaaaagacatactttcttcagcngcgaaaatattnatggaagaattggtggccacccacnaaggnanatgatataagangaaaaagccangtttaccntaaacttttcataaataccncaattttntggggtacccctnggcccccgngnncngggcccngntttncttaanaaaacattaagntngggaattnccncccccngngngccttggcaaaggggaaaatttccnaaatnaatttacaaaggncttttaantcctnaaattnccccgttccanaanccntttntttaanaggggggggggggcccnccnnaggtttaccccccanaaanttnttttanngntnnccccntntttaannttggannggggntctaanaanattgncccnccnncctttnggnncnnataaantncnataggggntcnaatnaaagncnntggttntcccnctngngcggttggnaaaaaantttgntatatttttcagtctttntannaaaaattttnccccnacccaacnatntatcntnatancccccgnntnangcctttannaaaanttng

SEQ ID NO: 175 - DNA, 892 bp, Homo sapiens
  misc_feature 388, 429, 500, 512, 542, 547, 550, 618, 620, 628, 629, 653,662, 667, 670, 671, 674, 681, 690, 696, 707, 734, 739, 742,750, 756, 757, 758, 762, 767, 769, 773, 776, 778, 783, 785,791, 819, 824, 828, 835, 837, 838, 851, 860, 864, 868: n = A,T,C or G
  misc_feature 870, 871, 872, 874, 875, 876, 878, 879, 881, 883, 884, 891: n = A,T,C or G
gactcactatagggcgaattggagctcccccgcggtggcggccgaggtacattatatacaaatatatatacgatgcatatgtagatgtatacatgtatgtatatactgttgtatagagatatgagtatacatgtatgtgtatatctctttatatagatataggtatagatatagatataatcatataggttgtatagcgtttccaaggctctttcataactagttctcaactgggagcaatcttgcctcccatggaacattttggcaatgcccaaagatatctatatttgtcacaactgagggggagggtttactagtgacaggtacctcggccgctctagaactagtggatcccccgggctgcaggaattcgatatcaagcttatcngataccgccgacctcgagggggggcccggttcccagctttngttccctttatgtgagggttaattgcgcgcttggcgtaatcatgggtcatagctgtttcctgtgtgaaaantggtattcgctnacaattccacacatcaatacgagcccgggnagcantanagtgtaaaagcctgggggtgcctaaatgaggggagcctaactcaccattatattggcggttgctgccntncctgcccnnttttccaagtccgggaaaacctgncgcgccagnctgcnatnnaanggaaacnggcccaacnctcggnggagaggcgcngtttcgtatttggggccgctttttccngctanctnagataaantggatnnnatgngcttngntaanccntntgtgngntaagcnggattcaacttcactcaaaaaggcgggnaatancggntatctcncnnaatacagggggantaccctccngaanatanannntnnnanncnannaaggccng

SEQ ID NO: 176 - DNA, 440 bp, Homo sapiens
actacttagggcgaattggagctccaccgcggtggcggccgaggtactttgatcttggacttccagcctccagaactgcagtgttggtctgcaagcttcaagagccagtgccctgactgccaagtgatttgccgaagggaattatggggaattcgcaggtattcctgatctgctatgtattccagaaaggccatgggcaaaaggaagtacctgcccgggcggccgctctagaactagtggatcccccgggctgcaggaattcgatatcaagcttatcgataccgtcgacctcgagggggggcccggtacccagcttttgttccctttagtgagggttaattgcgcgcttggccgtaatcatggtcatagctgtttcctgtgtgaaattgttatccgctcacaattccacacaacatactagccgggagcataaagtgtaa

SEQ ID NO: 177 - DNA, 708 bp, Homo sapiens
  misc_feature 3, 9, 13, 15, 17, 21, 22, 25, 26, 30, 31, 32, 35, 37, 41,42, 44, 46, 51, 56, 57, 60, 66, 83, 87, 90, 93, 102, 109,110, 112, 322, 329, 343, 347, 368, 378, 387, 390, 391, 401,427, 458, 467, 470, 482, 503, 515, 517, 518, 527, 529: n = A,T,C or G
  misc_feature 536, 540, 547, 558, 568, 582, 599, 612, 644, 645, 650, 676,686, 689, 691, 702: n = A,T,C or G
acncctacntgtnantntttnnttnnattnnntancntatnntntnttttnttttnnatntttttntttttttttatagattntttngtnatntttctatanctatatnngnttgacgcgctatagatcactatagggcgaattggagctccaccgcggtggcggccgaggtaccgatttagcgtggtcccaggcatgtcggatgtgggagcattcgatccgcggcgctgccttccgtcgagcattccggttcagacgctttcggttgacactgtaaccaaacttctgcctccgggttttgcccttggccttggggcaattngcgctgnacacacccggcacncagncaagactcaaacaacgctgcnctctgtactnttcaaaacnctnngtgttcccangccgataaccttgcaccggggccggncccgtttcttaggaaccttagttggggaatncccccccgnggncttggcaagggnaaatatccgaaatattcaaangccttttattcngnnataacccgntncagaacncttntgaaagnggggggggggnccactcgggnttaacccccaagancttttttattggttatncccctttttaagnttgggaagggggggttttaaaatttttgatcnncccgncccttttgggggcccggttaaaattncaaatggggnttncnaattaaagccnttgggt

SEQ ID NO: 178 - DNA, 466 bp, Homo sapiens
  misc_feature 2, 4, 5, 6, 7, 9, 13, 400, 413, 415, 427, 436, 438, 455,456, 460: n = A,T,C or G
gntnnnntnggcngcgaatacgactactatagggcgaattgggtaccgggccccccctcgaggtcgacggtatcgataagcttgatatcgaattcctgcagcccgggggatccactagttctagagcggccgaggtacctatgattcgataattgacaatggttatccgggttgtcatacacttgtgctaggagaattggttcttgttactcatattaacagtatttcatctatggatctatagattagcccaatttgtaatataggaatttattgaggtttgtggaattagtgtgtgtgtaagtatgtatgttgagcttgaacgctttctttattgatggctgcttttaagcctacaatggttaagtggattgtagttgttttattcactatttaaggntttttcccgggancnccgtggagttcnacaccctgntngggcggccgccacccgnntgtngagctt

SEQ ID NO: 179 - DNA, 465 bp, Homo sapiens
  misc_feature 9: n = A,T,C or G
cccgtatcnctacttagggcgaattggagctccccgcggtggcggccgaggtacaactaaaaactctggacattacattaaagcaaacataacaaaacattgaagggtggggaagaaaaagcaaggtggctagaaatgacatggtggtaagttccctgggtttcctttttgcccaatatatcccagacttgaagctgaagaaaccagtaacctagaaacgccaatgggtacctgcccgggcgggctctagaactagtggatcccccgggctgcaggaattcgatatcaagcttatcgataccgtcgacctcgagggggggcccggtacccagcttttgttccctttagtgagggttaattgcgcgcttggcgtaatcatggtcataggctgtttcctgtgtgaaattgttatccgctcacaattccacacaacataccgagccgggagcataaaagtggtaaagc

SEQ ID NO: 180 - DNA, 459 bp, Homo sapiens
  misc_feature 2, 3, 4, 7, 101: n = A,T,C or G
gnnnggngccttaacactatttagggcgaattgggtaccttccccccctcgaggtcgacggtatcgataagcttgatatcgaattcctgcagcccgggggntccactagttctagagcggccgaggttcttcagcaagccagcttctcggatggcggctgggccatattccactcctttctttttctgtgaatcatacaaatcccacagacataagagaaggtgagaaaaggagcagaaacactttacacacaaatctctgatgctacacggagttcctaacagattcctctgcaaatctttcacagcatcaaaacttcttcggtagaaggctcgtcggttcattaaatattaatgaatggaggaaggaagattttgttcttgaaagcaaatcaaccttctgggtccctcactgagagccagaccagaggagtctgtcttccgatcggggaaagggctt

SEQ ID NO: 181 - DNA, 461 bp, Homo sapiens
  misc_feature 14, 379, 401: n = A,T,C or G
gttttgcgccgtancactactatagggcgaattggagctccccgcggtggcggccgaggtacgggggccagttattatactgctgacagtagtaaactgcagaatcttcagactgcaggctgctgatggtgagagtgaactctgtcccagacccactgccactgaacctggctgggataccagtggccctggtggatgcaccatagatgaggagcctgggagcctggccaggtttctgctggtacctgcccgggcggccgctctagaactagtggatcccccgggctgcaggaattcgatatcaagcttatcgataccgtcgacctcgagggggggcccggtacccagcttttgttccctttagtgagggttaattgcngcgcttggccgtaatcatgggncataggctgttttcctgtgtgaaaattgttatcccgctcacaatttccacacaacattac

SEQ ID NO: 182 - DNA, 449 bp, Homo sapiens
  misc_feature 7, 341, 392, 448: n = A,T,C or G
cgaaacnctactatagggcgaattgggtaccgggccccccctcgaggtcgacggtatcgataagcttgatatcgaattcctgcagcccgggggatccactagttctagagcggccgcacgggcaggtacacatattacaagagcctgctactgggaactaactgaattcacaaagaaacagtgattcaagttcgttaaaacttttgctctatcttgaataacaagcttattacatgcgaaacctattggggaccaactgaattcaccgtaatacttagattccgttctttaaatgttgctatatatttaaatgcacactcatataagcatgtcccattggnaactctctgaaatcgtctagaaattttgactccattcgtgaaaattttttntacatccgggaacagtccacttattactttctgtggcctattggggaactaacagna

SEQ ID NO: 183 - DNA, 431 bp, Homo sapiens
  misc_feature 338, 379, 418: n = A,T,C or G
aattgggtaccgggccccccctcgaggtcgacggtatcgataagcttgatatcgaattcctgcagcccgggggatccactagttctagagcggccgccggggcaggtacatgcgaatcctattgggaacctactgaattcaccatgatacttagattccgttccacaaaatgttgctctataattgaaaagcaaactcatacaagcatgtcccattgggaactcactgaattcgcctagaaattttgattccattcgtgaaaatttttgtatatcccgaacagtccacttattactactgcggcctactgggaactaaccgaattcaccatgttactnagatttcggctcacccaagtttggataaatctttgaaaagnaccttcggccgccaccgcggtggagctccagccttttgntccctttagtgag

SEQ ID NO: 184 - DNA, 834 bp, Homo sapiens
  misc_feature 4, 6, 9, 10, 12, 14, 15, 26, 28, 33, 34, 36, 37, 43, 49,50, 51, 53, 55, 59, 60, 67, 68, 70, 78, 79, 81, 86, 88,92, 95, 100, 102, 103, 115, 116, 117, 122, 347, 353, 367,381, 383, 385, 401, 411, 429, 439, 443, 445, 453, 460, 463: n = A,T,C or G
  misc_feature 470, 474, 481, 492, 499, 505, 507, 508, 514, 516, 519, 523,554, 559, 564, 566, 575, 596, 601, 603, 611, 641, 649, 684,686, 699, 700, 703, 704, 708, 709, 718, 726, 733, 738, 741,745, 747, 748, 749, 755, 757, 765, 783, 785, 787, 791: n = A,T,C or G
  misc_feature 809, 811, 812, 826, 832, 834: n = A,T,C or G
aatnantanncntnntcaattaatanantattnnanntagaanaataannngnangatnnttatagnntntaatcaanntnttacnantaanatntaatnannatagattcatcnnnacaantcaggcgctctaaacgattctatagggcgaattggagcttcaccgcggtggcggccgcccgggcaggtacacttttggtcaggggaccaagctggagatcaaacgaactgtggctgcaccatctgtcttcatcttcccgccatctgatgagcagtttgaaatctggaacctgctctctgtttgtgtgccctgcttgaaattaactttcctaatcccccagaaagnagggcnccaataagatatcncttcgggggctcgncntncttaagaaaccttaanttggggtaanttctccccccggggggcnttggccaagnggananttatccgnaattaanttnataaggncctnttaattnctggaattaanccccggntgcctnannctcctncngtnaagnggggggggggggggacccccccggggggatnaaccnccccnangcccttttnttttggtatttaccccccttnttatnangcataggnaagggggggggtttttaaaaatttttggcnagacccgnccattatggggccgggttaaaaaatcctaattggngngtccaaattaagnncannggtnnttttccccnttgggtanggttggnaaaanaantttngnnnttaaantntccggccntccaaccaagatttttcncnanccanccaaactaattaaacctnanngccccgcgggggangccaantn

SEQ ID NO: 185 - DNA, 465 bp, Homo sapiens
  misc_feature 2, 3, 4, 5, 6, 8, 9: n = A,T,C or G
gnnnnngnnaggcgccgatacgactactatagggcgaattggagctccccgcggtggcggccgcccgggcaggtacaactttaaactgtattgtattcatgttgctaaacaatattggccttctcgatgattttattcatgttgctccaaagttaaaaccctgtagaactaagtaggtgaagagatattttgtataagtgccacagaagagaaaatataataaattaaatagtgaattgagcatcactagaataaaataaaatgagtaggcattcctaagatgtgaaatgatcacctaagatatacatgctccaaccatattgattttagaacaaaacacagcagcccataacagtttgtggcctccactaactgtcctctgctgtcccatctaagagggttatgtttctcctatttttaaaaataaaatggtagtttaaaattagcctgacgggatgtttcctc

SEQ ID NO: 186 - DNA, 470 bp, Homo sapiens
  misc_feature 3, 352, 357, 470: n = A,T,C or G
ggnccctatcatacttagggcgaattggagctccccgcggtggcggccgcccgggcaggtacctacttaccagcccttgaaccatttctatatgatgctcctcccaatattctgaaacatgtggttggacagttcagtaaggtaagaaatgccagcctctaaggggaggaagaaaattaaaatgatttgttgttatttttttttctgttgggtcagtagctttttctgtaacacggggtcatggttttactgcttaactctcaccaatctgtatggacagagaagttaccttaataaaattcacatgtaattaaaaaaaaaaaaaaaaaaaaaaaaaaagtccctcggccgntctanaactagtggatcccccgggctgcaggaattcgatatcaagcttatcgataccgtcgacctcgagggggggcccggtacccagcttttgttccctttagtgagggttaattgcn

SEQ ID NO: 187 - DNA, 554 bp, Homo sapiens
  misc_feature 2, 3, 4, 5, 177, 192, 513, 549, 554: n = A,T,C or G
gnnnngggcgcgcgtaatacgactactatagggcgaattggagctccaccgcggtggcggccgaggtacgcggggcttttcacaagatggcgccgaaagcgaaagaaaggaagctctgcccccttcttaaagcctgaagccccaaaagccgaagggcttttaaaggccaagaaaggncagtgttgaaaggtngtccacaagccacaaaaagaagaagatcccgcacgtcacccaccttccggcggccgctctagaactagtggatcccccgggctgcaggaattcgatatcaagcttatcgataccgtccgaccttcgaggggggggccccggtacccagcctttttgttccctttagtgaaggggttaaattggcgcgctttggccgtaaattcatgggtcattaagcctgttttccctgtggtggaaaaatttggttatcccgcttcaacaaaatttcccacaccaaaacattaaccgaagcccggggaggcattaaaaggtggttaaaancctggggggtgcctaatggagtggagcctaaacttnaacan

SEQ ID NO: 188 - DNA, 730 bp, Homo sapiens
  misc_feature 2, 4, 5, 6, 8, 9, 11, 18, 19, 20, 22, 26, 29, 30, 31, 33,34, 37, 38, 39, 40, 41, 42, 43, 44, 45, 46, 48, 51, 53,54, 56, 60, 61, 62, 64, 65, 66, 67, 68, 70, 73, 76, 77,78, 79, 80, 81, 82, 86, 88, 89, 92, 94, 100, 101, 102, 103,105: n = A,T,C or G
  misc_feature 106, 107, 110, 112, 115, 117, 126, 143, 175, 204, 224, 236,249, 253, 270, 294, 300, 306, 311, 322, 323, 343, 367, 446,481, 489, 512, 527, 594, 605, 607, 647, 649, 651, 653, 665,667, 676, 699, 707: n = A,T,C or G
cncnnntnncntctcttnnnantttntannncnnttnnnnnnnnnncnctntnntnattnnntnnnnntnttnttnnnnnnntttntnnttntncctttnnnntnnnttntnggngnccctaatcnatcctatagggcgaatnggagctccaccgcggtggcggccgcccgggcnggtaccactcatgaaacctggccaggctnccaggctcctcatctatggngcatccacccanggccactggtatnccanccaggttcagtggccgngggtctgggacagatttcactctnaccatnagcagnctgcnccctgaagatnnttacaaattttaattattgncagccagttattaataaacctggnccctggtgtaccctcggggcccgcttctaagaaacctaagtgggaatcccccccggggccttggcaagggaaaatttcngaatattcaaagccttattcgaattaccccgttcnaaccttcnaagggggggggggcccccgggtnacccccaagcctttnttggtgtccctttttaagttggaggggttataaattttgccggccggcttttggggccgataaaatncaattggggtncnattaggcctggtttttccccttggtggttggaaaaatttngntntnattcccccggcntncaccaaaanttttcccaaccaaccaaaccaantaaaccgnaaggccccggggggaagggccat

SEQ ID NO: 189 - DNA, 475 bp, Homo sapiens
cctatcactacttagggcgaattggagctccccgcggtggcggccgaggtacgcgggggggcggggggatagctgtccaaggtctcccccagcactgaggagctcgcctgctgccctcttgcgcgcgggaagcagcaccaagttcacggccaacgccttggcactagggtccagaatggctacaacagtccctgatggttgcccgcaatggcctgaaatccaagtacctgcccgggcggccgaggtaccaacagaaacctggccaggctcccagactcctcatctatgatgcatccgacagggccactggcatcccagccaggttcagtggcagtgggtctgggacagacttcactctcaccatcagcagcctagagcctgaagatttttgcagtttattactgtcagcagcgtagcaactcgtacctgcccgggcgggccgctctagaactagtggatcccccgggctgcaggg

SEQ ID NO: 190 - DNA, 526 bp, Homo sapiens
  misc_feature 2, 3, 4, 5, 12, 14, 316, 385, 403: n = A,T,C or G
gnnnnttaggananttcactatagggaattggagctccaccgcggtggcggcccgaggtacgggggccaagttattatactggctgaaagtaataaaattgcaaaattttaaaactgcaggcttgcttgatggtgagagtgaactttgtcccagacccactgccactgaacctggctgggataccagtggccctggtggatgcaccatagatgaggagcctgggaagcctggccaggttttctgctggtaccctgcccgggcggccgctctagaactagtgggatcccccgggctgcaggaatttcgatatcaagncttatcgataccgttcgaccttcgagggggggggccccggtacccagcttttggttccctttttagtgnagggtttaaatttgccgncgcttgggcgtaatcaatgggtcatagctgttttcctgtgttgaaaaattgttatccgctcacaaatttccacacaacattaaccgagcccggggagcattaaaagtgttaaaagccttgggg

SEQ ID NO: 191 - DNA, 464 bp, Homo sapiens
ccctaacactacttagggcgaattggagctccccgcggtggcggccgaggtacaagtgtcttgattatagtagcttcatagcgagtcttaaagtcaggtagcaggtagcataatttctcatttgttctttttcaagattgtggtagatattatttttattattattttttttgagacgaattctcactcttgtcccccaggctggaagtgcagtggtgtgatcacagctcactgcctccgccacctcctgggctccccgcgtacctgcccgggcggccgctctagaactagtggatcccccgggctgcaggaattcgatatcaagcttatcgataccgtcgacctcgagggggggcccggtacccagcttttgttccctttagtgagggttaattgcgcgcttggcgtaatcatggtcatagctgtttcctgtgtgaaattgttatccgctcacaattccacac

SEQ ID NO: 192 - DNA, 476 bp, Homo sapiens
  misc_feature 3, 4, 6, 11, 254: n = A,T,C or G
ggnngngcgcnatacactactatagggcgaattggagctccccgcggtggcggccgaggtactttttttttacttttttttttttttttttaagaaactgggtctctctgtcacccaggctggagtgcagtggcaacgatcatagctaactgcagctttgacctcctgggctcaagtgatcctcctgcctcagcctcctgagtagctaggactacaggtgtatgccaccatgcctggctaatacaaaaaaattnttttaagagatgggatccctcccttttaaaatcagaacttgttcacatggtggttgcttgtggcaaaacggagttcaaattttgctctcctattgctataattctgctagcaatctgttgaggtgaaacttgggatctgactcttcagcaagcagcaaatgacctagtaactcagggacaactatttttgaactttaagtgccactttaatgcagttagttt

SEQ ID NO: 193 - DNA, 502 bp, Homo sapiens
  misc_feature 1, 7, 266, 274: n = A,T,C or G
nagcgcnatacactacttagggcgaattggagctccccgcggtggcggccgaggtaccacctatgtggaggagactgcaaggaagctgttattcaaagtagaacagtcagccttgtgcttgagtcctgctttatgcttgcgtgtttcataacaaaacacaaaggcaagtcttcatatcagcacttagtcttgatatccaagtagctgactactgtacctgcccggggcggccgctctagaaactagtggatccccccgggctgcanggaattcnatatcaagcttatcgataccgtcgacctcgaggggggggcccggtacccagcttttgttccctttagtgagggttaattgcgcgcttggcgtaatcatggtcatagctgtttcctgtgtgaaattgttatccgctcacaattccacacaacatacgagccgggagcataaagtgtaaagcctggggtgcctaatgagtgagctaactcacattaattgccgttgcgct

SEQ ID NO: 194 - DNA, 490 bp, Homo sapiens
  misc_feature 1, 5, 64, 71, 73, 75, 87, 89, 94, 105, 106, 112, 123, 126: n = A,T,C or G
nagcnatcatcttagggcgaattggagctccccgcggtggcggccgaggtacgcgggggtgganaggaccntntnaaaaaaaaaacntnaaacngaaaaggattnntgtttnaatattgacanaanccaaggaacaccatctgaagttctgatggcaacatcagaagctaagagaaaggcatggaaaagattctcacctagagcatccagaggagaaggttggtcctgcagacaccttgttttctgacctctgacctccgcaactgtgagggaagaaatttctgttgcttaaagacacacagcttgtggtacctgcccgggcggccgctctagaactagtggatcccccgggctgcaggaattcgatatcaagcttatcgataccgtcgacctcgagggggggcccggtacccagcttttgttccctttagtgagggttaattgcgcgcttggccgtaatcatggtcataagctgtttcctgtgtgaaat

SEQ ID NO: 195 - DNA, 819 bp, Homo sapiens
  misc_feature 8, 10, 15, 19, 31, 32, 34, 35, 40, 41, 49, 51, 53, 59, 61,64, 66, 70, 71, 78, 80, 82, 89, 92, 97, 98, 102, 105, 107,108, 109, 118, 119, 124, 126, 127, 140, 306, 312, 318, 321,325, 326, 333, 353, 355, 362, 370, 388, 391, 396, 398: n = A,T,C or G
  misc_feature 407, 411, 428, 436, 454, 456, 464, 466, 486, 489, 493, 516,518, 552, 559, 565, 570, 572, 585, 592, 612, 621, 635, 636,657, 658, 678, 684, 696, 698, 700, 749, 755, 777, 790, 802,807, 819: n = A,T,C or G
atacttantnaacanaaantcaaatgtattnntnnttccnnaatataanantntcatgntnttnanctcnnttaattntntnttctttnatntaaanntttnttnannntggttcccnnaacgncnntatagggcgaatnggagctccaccgcggtggcggccgcccgggcaggtacgcggggaaggaaccagaggccacttgtatatataggtctcttcagcatttattggtggcagaagaggaagatttctgaagagtgcagctgcctgaaccgagccctgccgaacagctgaggaattgcacntgcaancccttnaantgannaaccaantaagaaatttccctttgggnanaagcaangccctacngggcaaaccttaaaaaantgncccantnttccacccntggnaaaacctttgtattggngaaggggngggaaaaaacctcccctntnggaatagnanttttttggaaaggaaccaanagntttntttttttaccccggggaacttgnangttttttccaggaaaattctgtttgaaaatttcnaaaaagnccccanccaantngattggcaaaacncttaacnttgggggccccttaattccntaaaacagnccaaccccttccannaaaggggggccaaaaaaaacnnaaagggccaatagccccccnttgggnaaaattggcttntnanccgtttaaaaaaggccttggaaaaggaaggtttttaaaattccccaagnccaaanggaaggccatttgcctttggancccaagggtcccnaagaaaaaattnaaagnaaaaggttcttn

SEQ ID NO: 196 - DNA, 920 bp, Homo sapiens
  misc_feature 2, 5, 7, 8, 9, 31, 95, 274, 277, 305, 552, 642, 681, 683,725, 735, 764, 776, 798, 813, 830, 837, 852, 859, 878, 880,884, 885, 918: n = A,T,C or G
gnccncnnntctactcactatagggcgaatnggagctcccccgcggtggcggcccgaggtactttttttttttttttttttttttttttgggggnaattgggcataatttactagccaatttaggaagttcccctcacatcagtaacatacagtacatcacccagtatgtcagaggacacaatggcataagtttgcctttgcaaggtttgagggatggccatttcccgacctgactcaggaaagtctgtagctgatatccatcttcaagtttgnggntctttctctctatatatatatttgagtncagcagtcatgctggagtccagagtaggtgattctttctgctttagcttgactcctccttaagattgcaactctctcagttttacatttttttgtcagacgtaagctgacattccacaaggagaggaggaaattctgtggttcacatccagtggtgcttggaacctgattggttgtcattcttccagctagtttgtcacgagtggatatctgtcctggattcccaaggatcaaggctgccccattanccaggaagtagggagatagaggaggtcacttgaaaaagagctgcttctttgccgcctccaggttgggtctggttcctctcatatctgaanacagatgtgctggcaaaaaacaaaaatcctttgtccggncncgtgcaaatgcatgggacataaatatgaacaaaaattcttgnccccctctanaaaaaggtaaaggtcatcttggttccaangggacaagtaangcttgagggttttttgacttcnttcccgggtacctgnccgggcgggcgttttanaactagngacccccggctgcangaattcnaattaacttattgatcccncncctnnagggggggcccggacccacttttgtcccttaangg

SEQ ID NO: 197 - DNA, 477 bp, Homo sapiens
gactactatagggcgaattggagctccccgcggtggcggccgcccgggcaggtacaacttcctcctagcgtttctggttaactatgtgaacacacaggcagacagatcaagccgctatgtgagggacaaataaacatactgaagacctaaaaatgtgaagtcagctgagcctcaattcaatccaaacctttggggggcttatgcaccattagtctgtatcatggcctccagtcatttgtccctctagaacaggaactctgaaaggcctgacaaagaagaatggacaatcacagatgctggttttgccttctcattccctgcaagtctactggatgcaggaagagggtgggggggttcaagctgcctgcttaggagcttaaacatgacaagggattttctaatgaaaagctaacccagagattcctctttttcctatgataccacagcatccatcattcaaaaaccgaaaaagggacc

SEQ ID NO: 198 - DNA, 938 bp, Homo sapiens
  misc_feature 686, 696, 702, 756, 759, 770, 840, 842, 866, 868, 870, 874,880, 887, 892, 899, 929, 935: n = A,T,C or G
acgaacactactatagggcgaattggagctcccccgcggtggcggcccgaggtacaaggaccaccagcatcagcatcacctgagaactttttaaaaatgcagaatcccaagtcagctgaatcacagtgtgaattgttaactaggtttcccgctgattttctatgaaaatttctggtctatacggagtgtatatgacaaatatatacatgtgtggccatgcagacatgcttattctcacctatggcaaatagaacacagctctccatggtcaggtgcttccatccctaatggcttcccaccagtgagaaagacattaagagtcagaatacttttgctgtaattctctggtaaattttggtacctgcccgggcggccgctctagaactagtggatcccccgggctgcaggaattcgatatcaagcttatcgataccgcgacctcgagggggggcccggtacccagcttttgttccctttagtgagggttaattgcgcgcttggcgtaatcatggtcatagctgtttcctgtgtgaaattgttatccgctcacaattccacacaacatacgagccgggagcataaagtgtaaagcctggggtgcctaatgagtgagctaactcacattaattgcgttgcgctcactggccgctttccagtcgggaaacctgtcgtgccagcttgcattnatgaatcggncacgcnccggggagaggccggttgcgtattgggcgctcttccgctttctcgctcactganttngttgggcctcngtcggttccggctggcggcgaaccggtttaacttacttaaaaggcggatataccggtattcaccagaatnangggataaccccaggaaaaaacttntnanccanagggcnacaaaanggcangaacctnaaaaaaggcccgttgctggcgtttttcaanggttcncct

SEQ ID NO: 199 - DNA, 938 bp, Homo sapiens
  misc_feature 479, 489, 493, 629, 641, 645, 659, 671, 716, 733, 751, 771,773, 803, 818, 822, 829, 857, 858, 871, 881, 883, 895, 898,902, 929, 932, 937: n = A,T,C or G
ggtatcgactactatagggcgaattggagctccaccgcggtggcggcccgaggtacagaagaaacttgattctataattgatttgacaaaagaaggcctatccaactgcaatacagaaagtccagtatcccccctggagtcacattcgaaagctgcttcaaactcaaaggaaacaaccccattggcacaaaatgcagtccaggttcctgagtcctttgagcacctgccacctctcccagaaccaccagcaccactacctgaattagtagacaaaacccgagacacacttcctccccagaagcctgagtcgagcggccgcccgggcaggtactttggcctctctgggatagaagttattcagcaggcacacaacagaggcagttccagatttcaactgctcatcagatggcgggaagatgaagacagatggtgcagccacagttcgtttgatctccaacttgggcccctggcccaaagtntaccttcggnccgntctagaactagtgggatcccccgggctgcaggaattcgatatcaagcttatcgataccgtcgacctcgagggggggcccggtcccagcttttgtccctttagtgagggttaattgcgcgcttggcgtaatcatggncatagctggttnctgngtgaaaatggtatncgcttacaattnccacaacataccaaccgggagcataaaagtgtaaagcctgggggnggctaatgagtgagctnacttacattaattgggtnggctactggccgcttttcantngggaaaactgtcgggcaactggattaatgnaatgggccacccccngggngaggggntttggtattgggcgctttttcccttctnntcaattgatcctnggcttgggcntnggttgggggacnggntaanttactttaagggggggatacggttttncanaaaang

SEQ ID NO: 200 - DNA, 937 bp, Homo sapiens
  misc_feature 2, 5, 8, 15, 22, 24, 262, 264, 274, 282, 298, 299, 337, 354,360, 370, 375, 376, 379, 386, 402, 404, 414, 421, 422, 423,425, 428, 447, 451, 465, 467, 468, 469, 470, 474, 477, 478,485, 486, 495, 498, 503, 504, 508, 509, 511, 515: n = A,T,C or G
  misc_feature 517, 521, 529, 535, 541, 542, 545, 551, 555, 556, 557, 558,559, 561, 564, 565, 574, 579, 582, 583, 584, 586, 588, 590,592, 599, 602, 604, 608, 611, 612, 613, 614, 616, 617, 618,621, 622, 623, 625, 630, 631, 632, 633, 634, 637, 638: n = A,T,C or G
  misc_feature 639, 641, 642, 644, 647, 648, 649, 650, 652, 654, 655, 656,657, 658, 659, 660, 662, 664, 665, 666, 667, 668, 669, 672,673, 674, 676, 677, 678, 681, 682, 683, 684, 686, 687, 690,694, 695, 700, 703, 704, 709, 710, 711, 712, 717, 718: n = A,T,C or G
  misc_feature 719, 722, 723, 728, 730, 734, 735, 737, 740, 741, 743, 744,745, 746, 747, 748, 749, 750, 751, 752, 753, 754, 755, 756,757, 758, 759, 760, 761, 762, 763, 764, 765, 766, 767, 768,769, 770, 771, 772, 773, 774, 775, 777, 778, 779, 782: n = A,T,C or G
  misc_feature 783, 784, 786, 787, 788, 789, 790, 791, 792, 793, 794, 795,796, 797, 798, 799, 800, 801, 802, 803, 804, 805, 806, 808,811, 813, 814, 815, 816, 817, 818, 819, 820, 821, 822, 823,824, 826, 827, 828, 830, 831, 832, 833, 834, 835, 836: n = A,T,C or G
  misc_feature 837, 838, 839, 840, 841, 842, 843, 844, 845, 846, 847, 848,849, 850, 851, 852, 853, 854, 855, 856, 857, 859, 860, 861,862, 863, 864, 865, 866, 867, 868, 869, 870, 871, 872, 873,874, 875, 876, 877, 878, 879, 880-915, 917-933, 935-936: n = A,T,C or G
tntgnctnactatanggcgaantnggagctccaccgcggtggcggcccgaggtactggaggacactgtgcttggtctcattgatcctgttaacttgactgactgctcgatggtccagccacatggtgacgtttcgatgggaatccccttcctggttgactggtaatgggtgaaactgcttatcaaaacaaccagagaacacgtggcatcaaacccaagtcctcgaatttggtttaaatcaatcccttgtacctgcccgtgtntnttaaatctanaatgatgnaaagttttgaataagnngactatcttacttcatgcaaagaagggacacatatganattcatcatcacatganacagcnaatactaaangtgtnnttngattatnagagtttagataaatntntgaaatgcangaccacnnnanggnatgtttatggggcacgttngtancctgggatgtgaancnnnngcanggnncctatannccttatatnatntactnnattnntntatntntatnacaatatncacaancttttnncanaattcntgcnnnnnanatnnccaaaggtnacctntannncntntnanggggagngcncnttanaannnngnnnaannntnctggnnnnntannntnnanttnnnnangnnnnnnncntnnnnnnaannnannnaannnngnnctnttgnnaccanttnnggttnnnnctggnnntannaattncnaagnntnttnnannnnnnnnnnnnnnnnnnnnnnnnnnnnnnnnncnnnggnnntnnnnnnnnnnnnnnnnnnnnntnttnannnnnnnnnnnncnnntnnnnnnnnnnnnnnnnnnnnnnnnnnnnannnnnnnnnnnnnnnnnnnnnnnnnnnnnnnnnnnnnnnnnnnnnnnnnnnnnnnnntnnnnnnnnnnnnnnnnntnnc

SEQ ID NO: 201 - DNA, 499 bp, Homo sapiens
  misc_feature 2, 3, 4, 5, 10, 14, 16, 17: n = A,T,C or G
gnnnnacgcnccgnanncttagggcgaattggagctccccgcggtggcggccgaggtaccttcaaagagccagttgggttggctgtgttctttctattcgtggaaaacagctgtgggtgccgggtgttgaagtcaggcttttgttccatgctaaggtaggaaggtttgttcttgagacctatcactcttctgtggaggaggagttcacagaatggtgagccgctttatcaccatctcggaggcttttgaaatatgttgataatgacctgggaaagagggccgagtgggatgagggtgggagtaggaaagaaacattcggcccacacagtgttcatatcttctcttgtttttgtatctgtggcaactgcagattaaatgaattaggttattcttttccattgccttctaccaaataagaagtacctgcccgggcggccgctctagaactagtggatcccccgggctgcagggaattccgatatcaagcttatcgataccg

SEQ ID NO: 202 - DNA, 474 bp, Homo sapiens
  misc_feature 207, 287, 290, 322, 403, 405, 426, 428, 470: n = A,T,C or G
taccctatcgactactatagggcgaattggagctccccgcggtggcggccgaggtactttttttttttttttttttttttttttttaaggaactggaaactaaaaactgccctggcctatcataagggaaaagatgggagtcttttgctgtccatcttgaatgtaattcacattgtccatgagtgctgatctaaccccatatgcctntgcccgactgcctttatgaaatatggtaatttaatgcttaaacaactgtttcatttgtgtacctgcccgggcggccgctntanaactagtggatcccccgggctgcaggaattcnatatcaagcttatcgataccgtcgacctcgagggggggcccggtacccagcttttgttccctttagtgagggttaattgcncncttggccgtaatcatggtcananctgtttcctgtgtgaaattgttatccgctcacaattccccanaaac

SEQ ID NO: 203 - DNA, 478 bp, Homo sapiens
  misc_feature 2, 3, 11: n = A,T,C or G
gnncgccctancgactactatagggcgaattggagctccccgcggtggcggccgcccgggcaggtacgcgggggtttgtagatggaaggaagaacctgtgtgcttagacctgacgctgggaggagatgctgccacctaggttacttgtaggaccctatacggcaacctcctttgccaggaactatttataaacatcctgcaggaaaatgagtctatatgtcagaatacacatttcccaccttgcccaacagtagaaaaacataagaagagaaaaaaaaaaaaaaaaaaaggtccctcggccgctctagaactagtggatcccccgggctgcaggaattcgatatcaagcttatcgataccgtcgacctcgagggggggcccggtacccagcttttgttccctttagtgagggttaattgcgcgcttggcgtaatcatggtcatagcctgtttcctgtgtgaaattgttatccgctcac

SEQ ID NO: 204 - DNA, 978 bp, Homo sapiens
  misc_feature 2, 3, 4, 5, 6, 7, 8, 9, 11, 12, 14, 15, 17, 18, 19, 20, 21,22, 23, 24, 26, 27, 28, 29, 30, 31, 32, 33, 35, 37, 38,39, 41, 42, 43, 44, 45, 46, 47, 48, 49, 50, 51, 53, 54,55, 56, 57, 58, 59, 60, 61, 63, 64, 65, 67, 68, 69, 70,71: n = A,T,C or G
  misc_feature 72, 73, 74, 75, 76, 77, 78, 79, 80, 81, 82, 83, 84, 85, 86,88, 89, 90, 91, 92, 94, 96, 97, 99, 100, 101, 102, 103,104, 116, 121, 125, 127, 130, 142, 144, 145, 189, 190, 209,235, 242, 244, 246, 248, 254, 292, 293, 294, 301, 308: n = A,T,C or G
  misc_feature 333, 413, 420, 422, 440, 448, 454, 471, 478, 480, 486, 634,646, 654, 658, 676, 705, 711, 718, 720, 725, 749, 754, 760,768, 780, 784, 796, 825, 838, 848, 851, 867, 871, 879, 894,903, 913, 915, 917, 918, 927, 934, 937, 940, 943, 944: n = A,T,C or G
  misc_feature 951, 961, 966, 967, 972, 975: n = A,T,C or G
tnnnnnnnngnngnntnnnnnnnntnnnnnnnnantnnnannnnnnnnnnntnnnnnnnnntnnntnnnnnnnnnnnnnnnnnnnnannnnntntnntnnnnnntagggggcgccnatcanatantntanttggactccacncnntcgcggccgagtacaggggccagttattatactgctgacagtannaaactgcaacaatcttcanactgcacgctgctgatggtgagagtnaactctncncnanacccantgccactgaacctggctgggataccattgcccctggcnnnatgcacnatacatnaggagcctgggatcctggccaggtntctgctgttacctgcccgggccggccgctctagaactagtggatcccccgggctgcaggaattccatatcaagcttatanataccgncnacctcgagggggggcccngtacccancttttnttccctttaagtgaggngttaatngngcgctnggccgtaatcatggtcatagctgtttcctgtgtgaaattgttatccgctcacaattccacacaacatacgagccggggagccataaaagttgttaaagcctgggggtgcctaatgaagtgaagctaacctcaacattaattgccgttnccgcttcactgnccgatttnccanttcgggaaaacctgttcnttgccaagcttgcattaattgaatccggncaaacnccgccgngnaaaangcggggtttgcggtatttgggcanctttntccgcntttctttncttcaattgaanttcncttgcgccttgnttccgtttcgggtttttgccaaactgtantcaagtttacttnaaaagggcgntanattccggcttattccnccanaaattcangggggataaccgccntgaaaaagnaaactttttnancnnaaaatgccncacaaanaanggncanngaaaccngtaaaaaaangcccnngtttnttngcc

SEQ ID NO: 205 - DNA, 407 bp, Homo sapiens
cgcgtaataccgactcactatagggcgaattggagctccaccgcggtggcggccgaggtactgttgaatgtaacattagaaattgggcggttaattaacattccctaagtcatatgctttaatttgataatgattgcaatccaagctctgtggttccgaaaatgagatttgtaaattcagtttgcattcccccatctttaggagtacctgcccgggcggccgcccgggcaggtacagaaagaaatatgtcatctacatcgagcgggtgcagcgcgagaaggccaacggcacaactgtccacgtgggcattcacccaagcaaggtggttatcaccaggctaaaactggacaaggatcggaaaaaaattcttgaacgcaaagccaagtctcgacaagttggaaaagaga

SEQ ID NO: 206 - DNA, 403 bp, Homo sapiens
cgcgtaatacgactcactatagggcgaattggagctccaccgcggtggcggccgcccgggcaggtactcatcagatggaatgttttaccctgccgaggttttagtcatgatgtgctgagctctctgcgtctgacgtgactgactggtagctgggcgtcggcgtgacccttctttccctctaggatcacatcatggagatattttccacctatgggaaaattaaaatgattgacatgcccgtggaaaggatgcatccccatctgtccaaaggctatgcgtacctcggccgctctagaactagtggatcccccgggctgcaggaattcgatatcaagcttatcgataccgtcgacctcgagggggggcccggtacccagcttttgttccctttagtgagggttaa

SEQ ID NO: 207 - DNA, 520 bp, Homo sapiens
  misc_feature 400, 474, 475, 478, 483, 515: n = A,T,C or G
ctaacactactatagggcgaattggagctccccgcggtggcggccgcccgggcaggtacaaacttttactttggttttgttatctgactattgggtctttgacacttaatgggcacttctttttttttttatttaatttagaagttatgtaacttctaaagctatggttctcaagtgtgatatcaggattcctggaatttcctgagagcctttcatggtgtctatgaggtccttgtttttccaactatgtatctgtgtcaggtcaggttttcttcatgtacctcggccgctctagaactagtggatcccccgggctgcaggaattcgatatcaagccttatcgaatacccgtcgacctcgagggggggcccggtacccaacttttgttccctttagtganggttaattgcgcgcttggcgtaatcatggtcaaagctgttcctggggtgaaaaatgtatcccgctcacaaattnnacnacaanataccagcccgggggcataaaaaatgttaaancccgg

SEQ ID NO: 208 - DNA, 497 bp, Homo sapiens
  misc_feature 389, 489, 492: n = A,T,C or G
gccctaacactactatagggcgaattggagctccccgcggtggcggccgaggtactgtgggatttgtcttttatgagttaccagttcagagactagttcatctttggttgtataggatgttaggatctcagttggcattcacagttaaatcatgcaccttcaggaactgggagcattttgatccagagtcacaatcattcctttcttatcttcatccctatggtatgtgtgttctgaagtttaactgacagatggcagctggtacctgcaggcctcctacacctacctctctctgggcttctatttcgaccgcgatgatgtggctctggaaggcgtgagccacttcttccgcgaattggccgaggagaagcgcgagggctacgagcgtntcctgaagatgcaaaaccagcgtggcggccgctctagaactagtggatcccccgggctgcaggaattccgatatcaagcttatcgataccgtcgacctcnaanggggg

SEQ ID NO: 209 - DNA, 495 bp, Homo sapiens
  misc_feature 472, 485: n = A,T,C or G
cctaacactacttagggcgaattggagctccccgcggtggcggccgaggtacgaagtttgcgttcatcgtccacttcaatgagtttctggcagccagtggctgggaaggagatgttcagcttcatcttgaagcagctgaacgcctccgaggcgccacggaaaagaggccccgcgtacgcgggattgggattggggggaaagagggagcaacggcccatagccttggggttggacatctctagtgtagctgccacattgatttttctataatcacttggggtttgtacctgcccgggcggccgctctagaactagtggatcccccgggctgcaggaattcgatatcaagcttatcgataccgtcgacctcgagggggggcccggtacccagcttttgttccctttagtgagggttaattgcgcgcttggcgtaatcatggtcataagctgtttcctgtgtgaaattggttatnccgctcacaattncacacaacat

SEQ ID NO: 210 - DNA, 513 bp, Homo sapiens
  misc_feature 204, 286, 290, 328, 333, 369, 371, 383, 384, 391, 396, 412,428, 464, 472, 473, 480, 481, 484, 487, 490, 491, 502: n = A,T,C or G
taatacgactactatagggcgaattggagctccccgcggtggcggccgcccgggcaggtacgcgggggaaatctgcaagccagcttcacccctcccatcgagttctggtcaggaggcttctggttgagttcaaattgctataaagttcagctggagccttccttctccctgtggccttttcccagtactttttttttctttttntttttttttccaatacttgtcttagcttgtttttcattttctatcttgaaactcttgacaatattttcattttctatcttgnttantatcttccaattttcttctaagtttgtacctcggccgntctanaactagtggatcccccgggctgcaggaatttcgatntnaagcttatcgannaccgtcnacctngagggggggcccggtnccccagcttttttgtntccctttagtgagggttaaattgcgccgcctttggncgataaannattgggnncanagnctnntttccttgtgntggaaaattgg

SEQ ID NO: 211 - DNA, 905 bp, Homo sapiens
  misc_feature 4, 8, 13, 499, 684, 711, 763, 771, 774, 782, 798, 799, 803,809, 840, 857, 866, 879, 885, 888: n = A,T,C or G
atgncgtntactnctcctatagggcgaattggagctccccgcggtggcggcccgaggtactttttttttttttttttttttttttggaatgggttatgaggaattgtggtcaaaaaacgagaacttctttttggtgttaacagggctatgtctgctttgctctagtgattcctaacctactgtgcgaaggaggcatagcaaggcaagactgtttaagtataaccataaagggactcacgcactctcaggtgaagtgcaaaaatactgatcacggtgctcaaacattctggaggagtaagcattcaaattcagaaatgtaagacgatttctcaaagaaaagaggaaaaacctatcattaattttttaaaatataccttccagagcaggtttctcaacaattttacatagaagacgagtatttttgtctccttaagatttggacttaaggtcaaagttgttgaaggttgatcggctattgtaagcttcaggtgaaacctanagaggagaagggaagaagataaatctactatcctagattctttttaagaagcagcacgttccactcctgactctcccgaagatggtctcaggtcttcaggtgaccctatgcaaggaccctactgggcactctgctgagtgttctggctctctggtatcaaggcactgggcctctctacttttggngtcattctggccctgtgaaagaaactntgaggagaatctgggcgaagcattttgaagttaacaccgcaaaggacatganaaacttanccngagagctnttaaagtggcgaccanngacnctgctncttttacccatctttcttgggtgccttaaanatggaaaaaacccaaanctgacttancccttcctaaagngaacanacnctctttttaaggttctg

SEQ ID NO: 212 - DNA, 478 bp, Homo sapiens
  misc_feature 287, 409, 476: n = A,T,C or G
gccctatcatacttagggcgaattggagctccccgcggtggcggccgaggtactttggcctctctgggatagaagttattcagcaggcacacaacagaggcagttccagatttcaactgctcatcagatggcgggaagatgaagacagatggtgcagccacagttcgtttgatctccagcttggtcccctgaccaaaagtgtacctgcccgggcggccgctctagaactagtggatcccccgggctgcaggaattcgatatcaagcttatcgataccgtcgacctcnagggggggcccggtacccagctttttgttcccttttagtgagggttaatttgcgcgctttggccgtaattcatggtcatagcctgtttcctgtgtgaaaattgttatccgctcacaaatttnccacacaacataccgagccggggaagccattaaaaaggtgtaaaagcccttgggggtggccttaatnga

SEQ ID NO: 213 - DNA, 469 bp, Homo sapiens
  misc_feature 2, 4, 6, 8, 13, 217, 337, 365: n = A,T,C or G
cngnantncttanggcgaattggagctccccgcggtggcggccgaggtacgcggggatccatgaatacatttccaacaagagcactggccaagtcagcttcttctgagagagtctctagaagacatgatgctacactcagctttgggtctctgcctcttactcgtcacagtttcttccaaccttgccattgcaataaaaaagggaaaaagaggcctnctcagacactctcaagaggatggggagatgacatcacttgggtacctgcccgggcggccgctctagaactagtggatcccccgggctgcaggaattcgatatcaagcttatcgataccgncgacctcgagggggggcccggtacccancttttgttccctttagtgagggttaatttgccgccgcttggccgtaatcatggtcataagctgtttcctgtgtggaaattgtttatccgctcacaatttccaca

SEQ ID NO: 214 - DNA, 887 bp, Homo sapiens
  misc_feature 3, 4, 6, 7, 10, 12, 13, 14, 17, 18, 19, 20, 21, 26, 27, 29,34, 37, 41, 47, 48, 49, 50, 52, 53, 54, 55, 56, 57, 58,60, 61, 62, 63, 65, 66, 68, 69, 71, 72, 83, 85, 96, 97,100, 102, 103, 106, 107, 108, 109, 110, 111, 112, 113, 114: n = A,T,C or G
  misc_feature 115, 116, 120, 121, 127, 136, 138, 142, 334, 338, 346, 368,430, 442, 459, 465, 486, 488, 494, 495, 501, 504, 510, 517,518, 520, 524, 536, 540, 542, 551, 552, 561, 573, 583, 590,597, 598, 601, 608, 612, 615, 622, 630, 641, 649, 651: n = A,T,C or G
  misc_feature 653, 661, 667, 675, 677, 681, 688, 693, 705, 706, 710, 722,728, 729, 737, 748, 750, 752, 764, 770, 771, 772, 774, 775,786, 788, 789, 793, 797, 800, 801, 805, 810, 815, 816, 823,825, 826, 836, 842, 844, 845, 848, 853, 857, 861, 863: n = A,T,C or G
  misc_feature 865, 867, 872, 875, 876, 877: n = A,T,C or G
canngnnctntnnncgnnnnntctanncnttttntcnctgnttcttnnnntnnnnnnncnnnnanncnncnntattatctttntntttttgtttcnntcntnntannnnnnnnnnnaagnnagaggncggcgcgtncnatcntatagggcgaattggagctccaccgcggtggcggccgcccgggcaggtacagatctctgcagttacaggaacatcgtctgcttcatggtaaatgcaatttcctgttcagaaaccacactaacattacttctttcagtatttctgcctcaaagttggtttaagattatcatcattataaagaaaaattttgtnctanttgctggnccaaagggaaaatgggggtctngtgtttttcctttttgggcaatggaggccttcttgggaaatgggccttgtaatttttcgggnaggggagggggnggttaaaagggcaaatnttccantaattcctcaaccctaacttngnccggtnntttcanttngtcccnccaacgnnantggncacccaattgtncaancnaccctaggnnattggtccnaccaattggtcnttccggaaanaaaaccnatagggnncanccctttngggntangatattnttttttanggaaaaaacanatcaattntngngtgggtanaaaagnaattttancncctntataacnttttntccccttcttcnntatnttttttatagtntgggannttgtgaanaatattaccantntntctcgtctgganaaaaannncnnaatttcctacngnngggntttntanngaangggcncgctnntaattantnntttttttttnttaaanannccntattntaanaacncntntnaaaanttnnnattctttttc

SEQ ID NO: 215 - DNA, 847 bp, Homo sapiens
  misc_feature 2, 4, 6, 8, 12, 14, 16, 17, 22, 23, 32, 33, 34, 39, 43, 44,45, 49, 50, 51, 52, 56, 59, 60, 62, 63, 67, 78, 79, 85,87, 88, 95, 97, 103, 106, 108, 110, 112, 113, 116, 332,357, 376, 380, 452, 457, 465, 476, 490, 494, 503, 509, 529: n = A,T,C or G
  misc_feature 550, 574, 580, 595, 623, 634, 636, 663, 668, 674, 682, 712,719, 749, 767, 774, 784, 788, 800, 825: n = A,T,C or G
cntnantntcangntnnatttnnattttttannntttgnactnnnactnnnntcgnatnnanncttntcttttttttnnattttntnnatctctnancttccnaantngngnnccnccctatacgatcctatagggcgaattggagctccaccgcggtggcggccgaggtacacttttggccaggggaccaagctggagatcaaacgaactgtggctgcaccatctgtcttcatcttcccgccatctgatgagcagttgaaatctggaactgcctctgttgtgtgcctgctgaataacttctatcccagagaggccaaaagtaaccttcccngggcgggcccgcttcttaagaaacntaggttgggatcccccccngggncttgccatgggaaatttccgaattattcaaaaggcctttattccgaattaaccccggttctgaacccctacngaagngggggggngggcctcccgngtttacccctcaangccnttttttttngttttncccccttttttaaggtcggnaaggggggttttaaaattttnggccggcccggccttttggggtcnggttanaattccaattggggntaccaattaaaggccttgggtttattcnccttgggtggntnggaaaaaaatttggggttttaattccnccggnctttcnaaccaaanttttccccaacccaaccaaaacccaattancccgganggcctccgggggggtaaggccaattaaaanaaggttggttaaaaaagnccccttngggggggggnttgncccccttaaaantggaaaggttgggaagccctttaanaaccttccaaccaattttaaag

SEQ ID NO: 216 - DNA, 486 bp, Homo sapiens
  misc_feature 2, 3, 7, 12, 460, 461, 469, 481: n = A,T,C or G
gnnagtntttgnacgccactctactatagggcgaattggagctccccgcggtggcggccgcccgggcaggtacaggccaaggtcctctgtgactcgccgcccactacccaagtgaatgagtctcccctagagctttgctactcagaggggtctgaggacaacagcatgggccaacacgtgcactcgagctgcctggagatcttgttcaaaggcagattctgaatgagtaggtctgggttggagcctgagagtctgtacctcggccgctctagaactagtggatcccccgggctgcaggaattcgatatcaagcttatcgataccgtcgacctcgagggggggcccggtacccagcttttgttccctttagtgagggttaattgcgcgcttggcgtaatcatggtcatagctgtttcctgtgtgaaattgttatccgctcacaattccacacaacatacgnngcccgggnagcattaaagtngtaaa

SEQ ID NO: 217 - DNA, 494 bp, Homo sapiens
  misc_feature 13, 451, 471: n = A,T,C or G
gaaaaagttgtgnaccatttgggaatacggcgaattggtctccccgcggtggcggccgaggtaccatgcagaaacctggccaggctcccaggctcctcatttttggtgcatccaccagggccactggtatcccagccaggttcagtggcagtgggtctgggacagagttcactctcaccatcagcagcctgcagtctgaagattctgcaagtttactactgtcagcagtataataactggcccccgtacctgcccgggcggccgctctagaactagtggatcccccgggctgcaggaattcgatatcaagcttatcgataccgtcgacctcgagggggggcccggtacccagctttttgttccctttagtgagggttaattgcgcgcttggcgtaatcatgggtcatagctgtttcctgtgttgaaattgttattccgctcacaattccancacaaacatacgagcccggntagcataaagtggtaaaagcctg

SEQ ID NO: 218 - DNA, 875 bp, Homo sapiens
  misc_feature 1, 2, 13, 107, 252, 345, 445, 554, 563, 582, 599, 613, 618,633, 640, 644, 645, 648, 662, 671, 672, 685, 708, 717, 734,744, 758, 780, 782, 790, 802, 832, 833, 840, 842, 846, 854,861, 862, 864, 865, 873: n = A,T,C or G
nngcccgtatcgngcgcgtaatacgactactatagggcgaattggagctccaccgcggtggcggccgcccgggcaggtacttttttttttttttttttttttttttngctataaaattggtatttgtatcttcctcccattctgcgctcccccaaccctgcaggaaggtggattcttcaagggaactggaggagactcttctgttaccaccaagccaggaagtttcatggcttgggaagccccgcgtacctnggccgctctagaactagtggatcccccgggctgcaggaattcgatatcaagcttatcgataccgtcgacctcgagggggggcccggtacccancttttgttccctttagtgagggttaattgcgcgcttggcgtaatcatggtcatagctgtttcctgtgtgaaattgttatccgctcacaattccacacaanatacgagccgggagcataaagtgtaaagcctggggtgcctaatgagtgagctaactcacattaattgcgttgcgctcactgcccgctttccagtcgggaaacctgtcgngccagctgnattaatgaatcggccaacncccggggaagaggccgnttgcgtatttgggncgctnttccgcttccttggntaatganttanntcnccttgggtccttcnggttggggnnaagcgggttttancttacttcaaaagggggggaatnccggttttncacaaaaatcagggggntaacccaggnaaaaaacattttgncaaaaagggcccccaaaaaggncnaggaaccngtaaaaaggccngtttggtgggggttttttccaaaggccccnnccccccntngaangcctttanaaaaatnngnnccttaaantt

SEQ ID NO: 219 - DNA, 477 bp, Homo sapiens
  misc_feature 2, 3, 4, 5, 7, 9, 465: n = A,T,C or G
gnnnngngnggcgaatcgctactataggggcgaattggagctccaccgcggtggcggccgaggtacgcgggaacacatttctttgggattttgcccttcctggggtataggggatcagaaatattgatccatgtgcacgcagataaaatggcttctgctaaacagactaaaatctttctctctagtctttctcacttgtacctgcccgggcggccgctcgaccgtctttccctttcgccctccacctccttcctgagaccagctgtgtttcagctcccccttccctgggcccacactgaatctctgttacccttacaaacccctgctgcctctaagagtaaggacccctatcccatcccaaactcaaacctaagcacatgcagcctcatcccatttctccaaaacatgtgaaagcaaaagaaaataaaaaactaactcagcaatcttgttctttcctacagtggncttttggctact

SEQ ID NO: 220 - DNA, 786 bp, Homo sapiens
  misc_feature 7, 8, 9, 13, 14, 18, 19, 20, 24, 30, 32, 34, 35, 47, 52,53, 55, 57, 60, 64, 71, 74, 75, 78, 79, 80, 81, 84, 86,90, 93, 94, 97, 98, 101, 108, 126, 129, 130, 131, 162, 377,403, 417, 481, 488, 500, 518, 524, 529, 580, 582, 584, 617: n = A,T,C or G
  misc_feature 620, 621, 647, 670, 671, 673, 677, 682, 684, 715, 723, 741,758, 760, 763, 773, 782: n = A,T,C or G
ccctcgnnnatanntctnnnaaanaatttntntnnttaattattatntcttnntntnttnttantaatttnatnntannnnatnantacnttnnttnnatnttagtanttgatttcttcaagattnggnnngtctttacgatcatatagggcgaaattgganctccaccgcggtggcgggccgcccgggcaggtacgcagggggcctctgtaaggcacatggaggtgatgatgtttcttagagagaagatcacttgaagaaacttctgctttaatgactttacgaagctggcaatattacaatccttgacctcagttgaaaagcagtcatcttcagccgtttttccagcacctataagccaccccccaagtgtggtntattgccctccctcggattgcctccngttaccttcgggcncgcttctaagaaaacctaggttgggaatccccccccggggccttgccagggaaatttcggaatnatcaaanggccttaatttngaatacccggttcgaacnccttcnggagngggggggggggcccccgggttaaccccccaaccctttttttggttttcccncntntttaagttggaaggggggttttaaaattttggnccnncggccttttggggccgtttaaaaatnccaattggggtttccaattaagnncnttgnttatntnccccttggttggattggaaaaaattttggtntaatttcnccggccttccaaccaaantttttctccaccaaccnanacnaatttaaccngaaggcccngggg

SEQ ID NO: 221 - DNA, 794 bp, Homo sapiens
  misc_feature 1, 3, 5, 6, 9, 12, 14, 15, 17, 18, 20, 22, 25, 26, 28, 30,36, 38, 39, 40, 45, 46, 47, 51, 56, 58, 59, 62, 65, 67,68, 71, 74, 75, 80, 81, 83, 86, 88, 92, 97, 100, 105, 106,112, 115, 137, 144, 145, 147, 158, 346, 396, 416, 422, 427: n = A,T,C or G
  misc_feature 473, 481, 487, 496, 499, 502, 541, 551, 552, 563, 573, 599,601, 618, 636, 650, 655, 668, 673, 683, 686, 694, 702, 734,760, 761, 763, 777, 781: n = A,T,C or G
ncncnncantcntnntnnancnttnnantncattantnnnttttnnnctcntattnanntgntantnnttntanntatcnncnatntnattngattnagnttttnnaggctnggnttctctacgatactatagggcngattggnncntccaccgcggnggcggccgcccgggcaggtaccagcagaaacctggccaggctcccaggctcctcatctatggtgcatccaccagggccactggtatcccagccaggttcagtggcagtgggtctggggcagagttcactctcaccatcagcagccctgcagttctggaagatttcttgcagttttacttactggtcangccagtataaataaaactgggccccccggtaccttcggcccgcttctaanaaacttaggttgggaattcncccccngtggncttgccaagggaaattttcggaataattcaaaagcctttaattcgnaattaccncggtanccgaacccnttncgnaaggggggggggggggccccccggggttaaccccccaancctttttttnngttttcccccntttttaaagnttggaaggggggtttaaaatttttgncnggcccgccctttggggnccggttaaaaattccaanttggggtttccaanttaangccttggtttttnccccnttggttggtnggnaaaaaatnttggtttnaattccccggcctttccaaccaaaatttttcncacccaacccaaaaccaatttaaccnngnaagccccggggggnaagnccaataaaaaaag

SEQ ID NO: 222 - DNA, 487 bp, Homo sapiens
  misc_feature 2, 3, 4, 5, 7, 8, 10: n = A,T,C or G
gnnnngnncngctaatcgctactatagggcgaattggagctccccgcggtggcggccgcccgggcaggtacgagttgctacgctgctgacagtaataaactgcaaaatcttcaggctctaggctgctgatggtgagagtgaagtctgtcccagacccactgccactgaacctggctgggatgccagtggccctgttggatgcatcatagatgaggagcctgggagcctggccagggtttcttgttggtacctcggcccgctctagaactaagtggatcccccgggctgcaggaattcgatatcaagcttatcgataccgtcgacctcgagggggggcccggtacccagcttttgttcccttttagtgagggttaattggcgccgcttggccgtaaatcattggtcattaagctgttttcctgtgtggaaaattggtttatcccgcttcacaatttccacacaacaataccgaagccgggggagcata

SEQ ID NO: 223 - DNA, 458 bp, Homo sapiens
  misc_feature 2, 3: n = A,T,C or G
gnnacgactcctatagggcgaattggagctccaccgcggtggcggccgcccgggcaggtacaaacttatgaagaaggtctcttttatgctcaaaaaaggagacaaggtctcaggaaaggagtgggtaaaacacttatctccagaaagccagcaagagggaagaaggaagaaaaccccatcctgcatggtatgatgctgagattcctcacatatcttcaaagcatcctaagaaaaattgaaggacccatgttttcagatcaagatgctccagctagtaacctgaacaatggagaaaaaggaactcacagcagaacatctacctggaaaatgcaaccactttgggaaaaggggaaatactaaaagtttcagagaacagaagtgtgtcacatacaaaagaccaacaatgagaatggcttttaacttttcaatatcagctctagatgtttaaagacaataaa

SEQ ID NO: 224 - DNA, 497 bp, Homo sapiens
  misc_feature 3, 4, 5, 6, 9, 15: n = A,T,C or G
gtnnnngtnccgcgnatcgactactatagggcgaattggagctccaccgcggtggcggccgaggtacgcggggacacttccgggcgcggcgccggcttgctgccactgcagagccccgccatggaagacacgccgttggtgatatcgaagcagaagacggaggtggtgtgcggggtccccacccaggtggtgtgtacctgcccgggcggccgctctagaactagtggatccccccgggcttgcaggaattcgatatcaaagcttatcgatacccgtcgacctcgagggggggcccggtacccagcttttgtttccctttagtgagggttaattgcgcgcttggcgtaatcattggttcataagctgttttccctgtgtgaaaattgttatcccgctcacaatttccacacaaacattaccgagcccggggagccattaaaagttgtaaaagccctgggggttgccctaatggagttgagctaactcacatttaattg

SEQ ID NO: 225 - DNA, 465 bp, Homo sapiens
  misc_feature 314: n = A,T,C or G
ctaacactacttagggcgaattggagctccaccgcggtggcggccgaggtacgggggccagttattatactgctgacagtagtaaactgcagaatcttcagactgcaggctgctgatggtgagagtgaactctgtcccagacccactgccactgaacctggctgggataccagtggccctggtggatgcaccatagatgaggagcctgggagcctggccagggtttctgctggtacctgcccgggcggcccgctctagaactagtggatcccccgggctgcaggaattcgatatcaagcttatcgataccgtcnacctcgaggggggggcccggtacccagcttttgttccctttagtgagggttaattgccgccgcttggcgttaatcattggtcatagctggtttcctgtgtgaaaatttgtttattccgctcacaattttcccacaccaacataccgaagcc

SEQ ID NO: 226 - DNA, 466 bp, Homo sapiens
  misc_feature 7, 8, 11, 19, 404, 437: n = A,T,C or G
gcgctannaantactatanggcgaattggagctccccgcggtggcggccgaggtacgggggccagttattatactgctgacagtagtaaactgcagaatcttcagactgcaggctgctgatggtgagagtgaactctgtcccagacccactgccactgaacctggctgggataccagtggccctggtggatgcaccatagatgaggagcctgggagcctggccaggtttctgctggtacctgcccgggcggcccgctctagaactagtggatcccccgggctgcaggaattcgatatcaagcttatcgataccgtcgacctcgagggggggcccggtacccagcttttgttccctttagttgaaggggttaattgccgcgcttggcgtaatcatgggtcatagncttgtttcctgtgttgaaaattgtttatccgcntcacaaattccacacaaacataccgaagc

SEQ ID NO: 227 - DNA, 486 bp, Homo sapiens
  misc_feature 2, 3, 214, 376: n = A,T,C or G
gnnaggccctatcatacttagggcaattggagctccccgcggtggcggccgaggtacgcgggggatgtggagaggaccatgtgaagagagaagctgagactgaaaaggatttatgtattaatattgacagaagccaaggaacaccatctgaagttctgacggcaacatcagaagctaagagaaaggcatggaaaagattctcacctagagcatncagaggagaggttggtcctgcagacaccttgttttctgacctctgacctccgcaactgtgagggaagaaatttctgttgcttaaagacacacagcttgtggtacctgcccgggccggccgctctagaactagtgggatcccccgggcttgcagggaatttcnatatcaaagccttatccgatacccgtcgacctcgaaggggggggggcccccgggtacccaagcttttgttcccttttagttgaaggggtttaattttgccgcgcctttgg

SEQ ID NO: 228 - DNA, 457 bp, Homo sapiens
  misc_feature 391, 425: n = A,T,C or G
tatcgactactatagggcgaattggagctccccgcggtggcggccgcccgggcaggtacgcgggggatgtggagaggaccatgtgaagagagaagctgagactgaaaaggatttatgtattaatattgacagaagccaaggaacaccatctgaagttctgatggcaacatcagaagctaagagaaaggcatggaaaagattctcacctagagcatccagaggagaggttggtcctgcagacaccttgttttctgacctctgacctccgcaactgtgagggaagaaatttctgttgcttaaagacacacagcttgtggtacctcggccgctctagaactagtggatcccccgggctgcagggaattcgatatcaagcttatcgatacccgtncgacctcgagggggggggccccggttacccagcnttttgttccctttagtgaggggttaattgcgc

SEQ ID NO: 229 - DNA, 457 bp, Homo sapiens
  misc_feature 289, 389, 412, 444, 453, 454: n = A,T,C or G
ctatcgactactatagggcgaattggagctccccgcggtggcggccgaggtacgggggccagttattatactgctgacagtagtaaactgcagaatcttcagactgcaggctgctgatggtgagagtgaactctgtcccagacccactgccactgaacctggctgggataccagtggccctggtggatgcaccatagatgaggagcctgggagcctggccaggtttctgctagtacctgcccgggcggccgctctagaactagtggatcccccgggctgcaggaattcnatatcaagcttatcgataccgtcgacctcgagggggggcccggtacccagcttttgttccctttagtgagggttaattgccgcgcttggcgtaattcatnggtcatagcctgtttcctgtgtngaaattgttattccgctcacaattccacaccnacatacgannccg

SEQ ID NO: 230 - DNA, 464 bp, Homo sapiens
  misc_feature 3, 364, 462: n = A,T,C or G
tancgactactatagggcgaattggagctccccgcggtggcggccgaggtacgcgggattgatgatgggaggcagtgagtcttgatgataagggtgagaaactgaaatcccaaacactgttttgttgcttgttttattatgacctcagattaaattgggaaatattggcccttttgaataattgtcccaaatattacattcaaataaaagtgcaatgggagaaaaaaaaaaaaaaaaaaaaggtacctgcccgggcggccgctcgatgcttggtgctgaagtataattaatatttgagtgtttgctatgtgccataaacttttctaaatgccctttacatacattagttatcaaaacaaccctntcctgggtaggggcatttatccccattcttcaagatgagggaaactgaggccaccaaagaaatggtttccaaggtttggtaccctcggccgctctaanaa

SEQ ID NO: 231 - DNA, 470 bp, Homo sapiens
cgctatacactacttagggcgaattggagctccaccgcggtggcggccgcccgggcaggtaccatgcagaaacctggccaggctcccaggctcctcatctatggtgcatccaccagggccactggtatcccagccaggttcagtggcagtgggtctgggacagagttcactctcaccatcagcagcctgcagtctgaagattttgcagtttattactgtcagcagtataataactggcccccgtacctcggccgctctagaactagtggatcccccgggctgcaggaattcgatatcaagcttatcgataccgtcgacctcgagggggggcccggtacccagcttttgttccctttaagtgagggttaattgcgccgcttggcgtaatcatgggtcatagcctgttttcctgtgtggaaaattgttatcccgctcacaatttccacacaacataccgagccggggagcat

SEQ ID NO: 232 - DNA, 408 bp, Homo sapiens
  misc_feature 172, 178, 216, 408: n = A,T,C or G
gcgcgcgtaataccgactcactatagggcgaattggagctccaccgcggtggcggccgaggtacttttttttttttttttttttttttttttttgtttcttggtttctgagtccagtcccctttgcataaacgcccggcgtggctctctcagcgtccccgcaccttcatgcncagcanattcttggacaactttgtctttctctcggccgctctanaactagtggatcccccgggctgcaggaattcgatatcaagcttatcgataccgtcgacctcgagggggggcccggtacccagcttttgttccctttagtgagggttaattgcgcgcttggcgtaatcatggtcatagctgtttcctgtgtgaaattgttatccgctcacaattccacacaacatacgagccn

SEQ ID NO: 233 - DNA, 480 bp, Homo sapiens
  misc_feature 2, 3, 7, 8, 9, 376, 418, 466: n = A,T,C or G
gnntagnnngccgctaaacgactactatagggcgaattggagctccaccgcggtggcggccgaggtaccagcagaaacctggccaggctcccaggctcctcatctatggtgcatccaccagggccactggtatcccagccaggttcagtggccgtgggtctgggacagatttcactctcaccatcagcagcctgcagtctgaagattttacaatttattattgtcagcagtataataactgggcctgtgtacctgcccgggcggccgctctagaactagtggatcccccgggctgcaggaattcgatatcaagcttatcgataccgtcgacctcgagggggggcccggtacccagcttttgttccctttagtgagnggttaattgccgcgcttgggccgtaatcattgggtcatagcntgttttcctggtggtgaaaatttgttatccgctcacaaattccacacnaacattaccgaagc

SEQ ID NO: 234 - DNA, 405 bp, Homo sapiens
gcgtaataccgactcactatagggcgaattggagctccaccgcggtggcggccgaggtacagataatgagggttgtaaaatgaaagagagaggagaggtgagacgaaatgaagacagctaatttttcattcgacaaaatcagggttcagagacatttgtagctacactgcccaatgcagctactattagccacatgtggctacttaaatttaaattaattaaaattaagtacctgcccgggcggccgctctagaactagtggatcccccgggctgcaggaattcgatatcaagcttatcgataccgtcgacctcgagggggggcccggtacccagcttttgttccctttagtgagggttaattgcgcgcttggcgtaatcatggtcatagctgtttcctgtgtgc

SEQ ID NO: 235 - DNA, 472 bp, Homo sapiens
  misc_feature 7: n = A,T,C or G
ggcccgnaacgactactatagggcgaattggagctccccgcggtggcggccgaggtaccaagtcaggttgttcatttgagccaacaacagatttcttggttattgtgctattgccacagtaggtcctatttgcattgaatttgtgtgtttttagcttctctccttttacgtgttgctttatgctactctccaaaagtctttcttgtagaagtttattaagttgtataatttttctttgctctgttttgttttgtttgacagcctgggttggtggttttataagccatttccatcatcagtttcctgtctctgctgggggttatcttagtgcctctcatgaatcgggtgtttttcaaatttctcctgagtttccttgtggcactggcccgtttgggactttggagtggtggatgcttttttacaccctttcttccacatttctcatgccaaggtcacccaccattagttcata

SEQ ID NO: 236 - DNA, 448 bp, Homo sapiens
  misc_feature 39, 66, 77, 194, 264, 318, 420, 446: n = A,T,C or G
ggcgattggagctccaccgcggtggcggccgaggtacanataaagatgatgtctttttgttattgnctgtctgtttngtatgtgtctgagataagggatagagaggaaacatccgtcaggctaatttaactacattttattttaaaaatagagaaacataacctctagatgggacagcagaggacagttagtanaggccacaaactgttatgggctgctgtgttttgttctaaaatcaatatggttggagcatgtatatcttangtgatcatttcacatcttaggaatgcctactcattttattttattctagtgatngctcaattcactatttaatttattatattttctcttctggggcaccttatacaaaatatctcttcacctacttagttctacagggttttaactttggagcancatgaataaaatcatcgagaaaggcnaa

SEQ ID NO: 237 - DNA, 444 bp, Homo sapiens
ggcgaattggagctccaccgcggtggcggccgcccgggcaggtaccttcttggcagagccaaagtcacccgttctgcttttgagggaaggaattatgagaaattccaacttctgccttcaagcaggaactttcccagccatttccttgaaaggttgtttacaaggtcacaggcagccacaaacatgataaaaattcattcctgtacctcggccgctctagaactagtggatcccccgggctgcaggaattcggatatcaagcttatcgataccgtcgacctcgagggggggcccggtacccagcttttgttccctttagtgagggttaattgcgcgcttggcgtaatcatggtcatagctgtttcctgtgtgaaattgttatccgctcacaattccacacaacatacgaagccgggagcataaagtgtaaagcctggggttgcc

SEQ ID NO: 238 - DNA, 813 bp, Homo sapiens
  misc_feature 4, 8, 12, 14, 15, 18, 23, 27, 34, 37, 41, 43, 45, 50, 52,55, 60, 64, 68, 70, 73, 76, 77, 79, 81, 86, 97, 98, 101,103, 113, 116, 118, 122, 125, 128, 134, 138, 139, 367, 395,416, 421, 423, 436, 447, 471, 481, 493, 497, 510, 512, 514: n = A,T,C or G
  misc_feature 522, 543, 544, 546, 548, 555, 583, 585, 590, 597, 607, 614,622, 629, 644, 646, 649, 659, 678, 683, 688, 698, 703, 707,709, 716, 722, 729, 738, 771, 777, 787, 792, 796, 799, 805,809: n = A,T,C or G
cacncacnccanannaanttttncctntatattntgnaaanantntttcnancanaattnaatntatntntanacnntnanttctnaaatttcaacnnctntntttaacttanctnanagcntgnttnacaatnttgnncgactcactatagggcgaattggagctccaccgcggtggcggccgcccgggcaggtactccaaagattcaggtttactcacgtcatccagcagagaatggaaagtcaaatttcctgaattgctatgtgtctgggtttcatccatccgacattgaagttgacttactgaagaatggagagagaattgaaaaagtggagcattcagactttgttctttcggcaaaggacntgggtctttctatcctctagtacccttnggaccgcctcttagaacctangttgngnattcccccccggnggcttggcaanggaaatttcttattaattcaaagncttttattcngcattaacccgntccngaaccccttctgnangngggggggnggggggcccccccggggttanncncnccaaggncctttttttttggttttttccccccttntnttaanggttggnaagggggggnttttaanaaattttnggcccgncccggcccttttggngnccnggttaaaaanttccaatttggggttcccnatttnaaggncattgggttnttttncccntngggtggnttcggnaaaaaanttttggttntaattccccggtctttccaaccaaaaatttttncccaanccaacccaanaccanttanccngtaagncccnccgg

SEQ ID NO: 239 - DNA, 944 bp, Homo sapiens
  misc_feature 3, 4, 5, 6, 7, 12, 16, 32, 34, 36, 39, 40, 41, 42, 43, 49,51, 56, 59, 60, 64, 73, 77, 82, 90, 97, 99, 101, 104, 108,111, 115, 126, 127, 134, 138, 144, 157, 206, 235, 254, 279,318, 320, 324, 336, 343, 357, 366, 381, 389, 396, 407: n = A,T,C or G
  misc_feature 412, 416, 417, 422, 428, 432, 438, 440, 443, 447, 448, 471,473, 475, 477, 490, 491, 496, 506, 517, 529, 531, 535, 537,547, 549, 553, 559, 562, 563, 574, 577, 584, 589, 591, 595,596, 600, 605, 612, 625, 629, 633, 635, 639, 643, 654: n = A,T,C or G
  misc_feature 664, 674, 685, 688, 699, 705, 722, 726, 753, 763, 765, 770,772, 782, 783, 784, 789, 791, 796, 799, 801, 803, 804, 815,824, 830, 832, 834, 838, 849, 857, 860, 861, 871, 873, 885,890, 894, 897, 901, 908, 910, 915, 926, 932, 938, 942: n = A,T,C or G
  misc_feature 943: n = A,T,C or G
cannnnnatctnattnttattattataaatcntntnctnnnnnaatttntntttantannatanttattattntcantaatnttattatncataatnanantanattnatnttantatcaatattnngcattantttnttttcncctaatactactnactatagggcgaattggagctccacccgcggtggcggccgaggtactgnaaatcgtcaagggtgaaaggtcgatcgcntgccagcttgcttccactngattctcggatttttttaccggtantgatgttgtaacattcgtatccaaggctccgcaaagttngncacntcggtatgtganaaggctntcctcattcccacntatattggngttacccttggcccncgggtccnaggcccnccttaattaanaaacnttanntttgntattcnccanccgggncntgncaanngtaaatttttcgtaattaatacnanangncttttaattccgnnattancccggttctntaaccccctangataggggtggngngtgngnccacaccggngnttancacccnaannatccttttttntgnatatttnacccntntttnnatgnttggnaaggggnggtaattaaaaantatngacncntccntccntattgggaacngaataaaaanttcaaattgngggattccaanttnagtccatttgnctattnttcccccttggttgganttgntaaaaaaaatttttgttttttaaattncacccgacantnctaancnaaaaattttnnntccancnaaacnaanantnnaattaaaccgntaaaggtcncctgtngntnaaantcctaattaanaaaaaggnttnnattaaaaaangntcacctttgggnggggnttgnccncttnaaaattngnaaggnatttggaatgnccttantaaccnttcnng

SEQ ID NO: 240 - DNA, 461 bp, Homo sapiens
  misc_feature 52, 190, 210, 234, 265, 301, 382, 412, 426, 436, 444, 447: n = A,T,C or G
ggcgaattggagctccaccgcggtggcggccggaagagcaaccgagatgaanggtgaagatgctgagccggaatccggacaattatgtccgcgaaaccaagttggacttacagagagttccaagaaactatgatcctgctttacatccttttgaggtcccacgagaatatataagagctttaaatgcttnccaaaactggaacgagtatnttgcaaaaccattccttgcttcgntggatggtcaccgtgatggagtcaattgctnggcaaagcatccagagaagctggctactgtcctttntggggcgtgtgatggagaggttagaatttggaatctaactcagcggaattgtatccgtacctcggccgctctagaactagnggatcccccgggctgcaggaatttcgatancaagccttatttcnataccctagntaccctanaanggggggtcaccgga

SEQ ID NO: 241 - DNA, 460 bp, Homo sapiens
tatcgactactatagggcgaattggagctccccgcggtggcggccgcccgggcaggtacgcgggggagcagaagcagaaaagggttgttgttaccaacttgaatggtcacaccgcccgagtcaattgcatacagtggatttgtaaacaggatggctccccttctactgaattagtttctggaggatctgataatcaagtgattcattgggaaatagaggataatcagcttttaaaagcagtgcatcttcaaggccatgaaggacctgtttatgcggtgcatgctgtttaccagaggaggacatcagatcctgcattatgtacctcggccgctctagaactagtggatcccccgggctgcaggaatttcgatatcaagccttattcgataccgtcgacctcgaggggggggcccggtacccagcttttgttccctttagtgagggttaaattgccgccgcc

SEQ ID NO: 242 - DNA, 881 bp, Homo sapiens
  misc_feature 2, 4, 7, 9, 12, 15, 18, 27, 29, 32, 34, 35, 37, 38, 47, 48,50, 54, 63, 65, 68, 70, 79, 85, 94, 102, 109, 110, 112,121, 126, 136, 258, 286, 291, 339, 341, 371, 382, 385, 387,401, 402, 405, 411, 430, 433, 436, 458, 464, 477, 479: n = A,T,C or G
  misc_feature 492, 507, 515, 520, 525, 532, 543, 558, 595, 603, 609, 618,620, 621, 627, 637, 643, 646, 669, 671, 673, 681, 694, 698,707, 711, 714, 726, 733, 734, 743, 750, 775, 787, 789, 792,793, 794, 797, 800, 803, 805, 815, 818, 823, 827, 837: n = A,T,C or G
  misc_feature 842, 846, 848, 852, 861, 866, 868, 872, 873, 875, 876, 881: n = A,T,C or G
tntntancnaanttnatnttatttatntnatntnntnntattttttnntntttntattattananttntnattattatnatagantattaattnatcttttnttttaanntngattataanatttntcgctatacnactcactatagggcgaattggagctccaccgcggtggcggccgaggtacagatacatggacacaatcatggcagccagctcgaggcccccaattccagctgccacaccacccacggtgactngcattagttcggatgtcatacaaaagcntgatntgaagcaacacctctacgtttttggtcgtagagctctttttgctttgngntgcaaggattttcattttggggcttgttgntttgggattgnacngntttgttcattttgnnaanaccatnaaattgggtgtgtgtaaanaanggnccaaccttgattttcattcttntttggnatagtatatgggngnttgtaaggtttcncctttcaaaaaaaanttccccgntttanttagnatttggngtttgtaaaangactccaaccatgtncaaaccttttggaaggccccccttttttttcaattgnggattggngtttgnttattcccnanncaaacnttttggtaangtttgnaanaagattccttttttctccttggngngngaaaaccncaaattaaaattncctntttttcctnttgnaantgggggccatgnggtccannctttaaccnccaaggnccaataaccggtttctcaaggggtnaaaaggtttggncnttnnnaanccnccnantttttgattnggnggttngccnaacccatccncaaangggngntcanaaatccccnaaccntnttcnnanntcccn

SEQ ID NO: 243 - DNA, 827 bp, Homo sapiens
  misc_feature 1, 4, 7, 11, 21, 25, 28, 29, 37, 45, 47, 51, 59, 61, 63,65, 68, 70, 72, 77, 78, 80, 85, 89, 90, 92, 102, 106, 115,131, 326, 334, 352, 359, 382, 385, 423, 439, 443, 454, 460,463, 464, 465, 471, 475, 477, 478, 483, 489, 495, 497: n = A,T,C or G
  misc_feature 502, 509, 513, 535, 541, 548, 550, 555, 599, 601, 607, 626,629, 645, 649, 683, 686, 690, 695, 699, 728, 741, 768, 787,789, 793, 797, 802, 811, 823, 827: n = A,T,C or G
nccnttntatnaatatatttnattntannttctatcnattatatntntatntatatatntnancnatntntntaatnntnatatnttannanattttatttntttntttatactntatcggctgggcgatnatatagggcgaattggagctccaccgcggtggcggccgaggtacgtgggcctgtctgcaaaccagtgtgccgtgccagccaaggacagggtggactgcggctacccccatgtcacccccaaggagtgcaacaaccggggctgctgctttgactccaggatccctggagtgccttggtgtttcaagcccctgcaangaaagcangaatgcacctttcttganggccacnctccagctgacccccggcactgnttntagtaacctagctgggtaatctccccgggtgcctggcnaagggaaattttccgnatanttcaaaaggcntttatnccnnnttaacncggntnngtacnccttcngtaagngnggggnggggccnctcngggtttacccccaaatcttttntatggnttttccncnttttnaagcttggaaggggggttataaaattctggaccgtccggccttntngggccnggttaacatttctaattgngtntccaattaagggtccntggnttttattctccttggattggttggaaaaaaaaanttnggtnttaanttcnccggctcttccaaccaaattttttctcancctacccaaaacnaattaaccggtatggtcccccgggtgntaaggccaatttaaaacangnttgnttanaaaangcccccttnggggggggactngccn

SEQ ID NO: 244 - DNA, 460 bp, Homo sapiens
  misc_feature 241, 321, 324, 346, 422, 438, 448, 452, 454, 455, 459: n = A,T,C or G
gcgattggagctccccgcggtggcggccgcccgggcaggtaccagtgaggcatttcctgatttttactcataatatttacaaagattaaaagagataaaattccaaatgtgaaggcttaaattgttcaaatccttactcaaagaaatagtgggaaaggtgggtaagtcagagtctgctgccgatgaaggaaaaaaatcaagttaatctcttctgaaattatcatgatttgtttggtttatnattcccaaaaaaaaaaaaaaaaaaaaaaaagtccctcggccgctctagaactagtggatcccccgggctgcaggaattcnatntcaagcttatcgataccgtccnacctccagggggggcccggtacccagcttttgttccctttagtgagggttaattgcgcgcttggcgtaatcatggncatacctgttccctgngtgaaattgntttncnnctcnc

SEQ ID NO: 245 - DNA, 757 bp, Homo sapiens
  misc_feature 1, 5, 7, 9, 10, 13, 15, 16, 20, 21, 22, 24, 34, 35, 40, 43,48, 49, 50, 53, 55, 57, 64, 68, 72, 74, 75, 84, 86, 90,96, 102, 104, 114, 115, 117, 129, 132, 276, 329, 336, 352,382, 392, 397, 418, 420, 425, 438, 441, 450, 461, 464, 470: n = A,T,C or G
  misc_feature 480, 490, 509, 522, 527, 543, 560, 567, 575, 590, 592, 609,654, 668, 671, 683, 686, 697, 701, 712, 714, 743, 750, 752,757: n = A,T,C or G
natancntnntcntnnaatnnnangcatatattnncccangtntgtannnaancntnatttatncatntttngnnttatctatntnattntatacnttctananatatttattnnantatttctctctntangactcactatagggcgaattggagctccaccgcggtggcggccgaggtactaaagcattcatggaggctcttcaggctggtgcagacatctccatgattgggcagtttggtgttggcttttattctgcctacttggtggcaganaaagtggttgtgatcacaaagcacaacgatgatgaacagtatgcttgggagtnattctgntggaggtttcctttcnactgtggcgtgctgacccattgggtggagncccatttggnacagngggctacccttgctccgaggncnggcangcttgctactagnaancttagatgngatccccccgnggnctggcnagggaacttncgtattatcnaaggccttattccggatancccgctccgtacncctanggatagggggtgggcnccccggttaccaccaancattttntggtttcnccctttaaaggatgnangggggttttaaaatatngctgccggcctttgggccggttaaaattccaaattggggttcaantaagtccttggatnttnccccttggtcgnttngaaaaaaattnttgntattaattacncnggtcttccaaccaaaaatttcctcaactnaccatancnaattn

SEQ ID NO: 246 - DNA, 468 bp, Homo sapiens
tatcgactactatagggcgaattggagctccccgcggtggcggccgcccgggcaggtaccagggtcctggtgggatggtgaaccgtgacgagtacgccatcagggtaaagaactcgtccagactgtcaactgtgatcctggactcgctgtaggtgagtagcgagttcttagatcctaagagactgatgcatacatggggaaaaacaaatataaaacctggcagttgtacctcggccgctctagaactagtggatcccccgggctgcaggaattcgatatcaagcttatcgataccgtcgacctcgagggggggcccggtacccagcttttgttccctttagtgagggttaattgcgcgcttggcgtaatcatggtcatagctgtttcctgtgtgaaattgttatccgctcacaattccacacaacatacgagccgggagcataaagtgtaaagcctggggtgcctaat

SEQ ID NO: 247 - DNA, 888 bp, Homo sapiens
  misc_feature 1, 3, 4, 7, 12, 14, 17, 18, 19, 22, 23, 24, 25, 27, 28, 29,30, 31, 32, 33, 34, 46, 47, 49, 53, 57, 61, 63, 65, 66,67, 70, 71, 73, 81, 82, 84, 87, 90, 99, 100, 101, 102, 104,109, 113, 116, 120, 121, 122, 129, 131, 146, 147, 148: n = A,T,C or G
  misc_feature 150, 151, 153, 159, 161, 175, 184, 194, 195, 241, 318, 338,340, 344, 410, 432, 438, 443, 448, 452, 466, 471, 477, 479,492, 509, 521, 530, 539, 544, 548, 556, 560, 564, 566, 569,571, 573, 578, 587, 588, 593, 594, 604, 622, 649, 660: n = A,T,C or G
  misc_feature 664, 674, 676, 684, 685, 709, 722, 727, 738, 746, 758, 764,775, 776, 788, 791, 803, 813, 846, 850, 860, 861, 865, 867,884: n = A,T,C or G
ncnnaanacacnanacnnnatnnnnannnnnnnnctaccctcactnntnatanctcncacntntnnnccnncnactctaanncntcnttnactgaccannnnanttctnaacncancaannnctaaacnancctatcacttcagannngnncnactccncnatcactatacggtngaattgganctccaaccgnnggtgggcgggcccgcccgggcaggtacatttccttgtagactctgntaatttcctgcagctcctggttggttctggagcagatgatctcaatggagagagtcctcgtcggttcccagcccctntcattgcgaaagctttttancntcanaaagccgttcattacctgaggccagggtggtctttcaaataagggccccaaacaattcaaccggtncttccaaggggtggggccaagnataaangggcntggancttntcaagctggcttgnattgncaaagntntcccttttttttngggtgcccttactactnggtaaggggcgnaaaagggcnaaattaatnccctngttncttcttgntcgncaanantgncntngccgnggtattggnntccannaaaattggtntggaaccaaaatggggtnggaaccctttcaattctccaaccaacncttttttgggntacnttaggcaatngnggccttgnntttcccaaaattggtttaccacanaaggccaaattcncccgncctttcaagancaatttcnaaaaccggtttnaaggtnaattaaggggnncttttttgggancangggaaccccccnattaatttgnccaaccttttggggggggggggtgggttaagcnaagngttgggaatnncaancnccccctttcccaaaagncctg

SEQ ID NO: 248 - DNA, 817 bp, Homo sapiens
  misc_feature 7, 10, 11, 13, 14, 16, 17, 20, 21, 23, 24, 25, 27, 29, 31,36, 37, 39, 40, 42, 44, 45, 51, 52, 54, 57, 58, 62, 66,70, 72, 73, 74, 76, 77, 78, 82, 90, 93, 94, 95, 96, 99,100, 101, 106, 109, 116, 122, 125, 126, 134, 188, 396, 400: n = A,T,C or G
  misc_feature 417, 441, 468, 479, 491, 500, 514, 522, 525, 533, 567, 580,581, 590, 608, 638, 647, 660, 662, 664, 674, 759, 776, 799,811: n = A,T,C or G
cctcacnttnnanncnnaanntnnnantntntattnnannananntaaacnntncannaatntttncaanannnannnattnttttattntannnntannnacctnaanaaatatnattttnaannaagttggntctctatacgatcctatagggcgaattggagctccaccgcgggtgggcgggccngcccgggcaggtacagctgaagcctcgtaacccagactacagaagcaataaacccattattctcagagctctctgtgactacaaacaagatcagaaaatcgtgcataagggggatgagtgtatcctgaagggacaacaaacgagccgcagcaagtggtaccctcggcccgcttctaagaaactaggtgggatccccccggggcctgcnaggnaatttccgaatattcanagccttatacgaatacccgttcgnaccttctgaaggggggggggcgccggntaccccaagantttttttgtttnccccttttnagatgaagggggtntaaaaatntgncgccgccntttgggccgttaaattcaatggggttccattaangcctggtattttnncttggttgnttggaaaaaatttgggtntaattccccggccttccaaccaaaattttntccaccaancaaaaccaattancngnaaggccccgnggggaaggccaattaaaaaaaggttggttaaaaaaggccccttgggggggggttggcccccttaaaattggaagggttggaaggnccttaaaacccttccancaattttaaaatttttggcccgntttttggccggnccttcg

SEQ ID NO: 249 - DNA, 785 bp, Homo sapiens
  misc_feature 4, 5, 6, 8, 9, 10, 11, 12, 14, 17, 24, 25, 27, 35, 36, 38,39, 41, 42, 48, 51, 52, 56, 58, 59, 60, 61, 62, 72, 73,74, 76, 82, 83, 84, 89, 90, 94, 100, 104, 106, 107, 111,115, 131, 133, 164, 166, 383, 393, 427, 442, 482, 483, 499: n = A,T,C or G
  misc_feature 513, 523, 535, 544, 545, 548, 553, 565, 570, 576, 582, 609,624, 629, 638, 641, 644, 651, 663, 695, 701, 712, 713, 722,726, 743, 760, 778: n = A,T,C or G
aacnnncnnnnntnctnaattttnntnaattcttnnannanntcggantanncaanannnnnacataaatcnnnanatactnnnttttnntaanagtttnctantnnactnaaanataagtaggggacctntngatcatatagggcgaattggagctccaaccngngggggcgggccgcccgggcaggtaccaacagaaacctggccaggctcccaggctcctcatctatgatgcatccaacagggccactggcatcccagccaggttcagtggcagtgggtctgggacagacttcactctcaccatcagcagcctagtagcctgaagattttgcagttttattacttgttcagcagcggtaagcaacttcgtaccctcggcncgcttctagnaacataagttgggaatcccccccggggcctgcanggaaattccgcatantcaaagccttaatccggaataacccggtccggacccttcnntaggggggggggggcncccgggttaccccncaagactttntttgtttttccnctttttaannttngaagngggttttaaatnttggncggccncccttngggccgggtaaaatttcaattggggtncaattaagccttggnttttncccctggtnggnggnaaaaaanttggtttaattncccggccttcaaccaaaattttctcaacccanccaaanccatttaactnnaggccccgngggnaaggccattaaaaaagnttggttaaaaaaagccncctgggggggggtgggcncttaaaa

SEQ ID NO: 250 - DNA, 751 bp, Homo sapiens
  misc_feature 2, 3, 6, 7, 14, 18, 20, 22, 27, 28, 32, 40, 49, 51, 54, 55,57, 58, 68, 71, 73, 76, 77, 85, 90, 102, 103, 104, 109,111, 117, 124, 125, 128, 131, 135, 253, 258, 310, 319, 328,332, 342, 360, 372, 383, 387, 393, 401, 406, 417, 428: n = A,T,C or G
  misc_feature 458, 468, 470, 472, 488, 492, 499, 504, 509, 527, 566, 568,575, 587, 599, 610, 618, 636, 641, 647, 654, 683, 708, 719,724, 733, 736, 741: n = A,T,C or G
cnnctnnccacctnctantncntgtannaatntggaaatnatccattancntcnntnnattctaatanacngncannccacttcnacttncacacctctccnnntctcntnactaanagacggnnccntcnatcntatagggcgaattggagctccaccgcggtggcggccgaggtacagctggagcagagttgcacttcactgtgtagaatggctttatctgagccactacattctgccattgactgcgttncttcncaatctttcccaagatctcccacaaaaaaatgcatttttccctgtcagggtnatgttcatnaaacatacncttntcaataacantttcccaaagggttttgntttccttcaatnccaacaagggntcanaccggnagttaagnttttngccattccatncaaataaaaantccccttttcattcttccacccaccttatnttctcaacanananacccggaacagtttanttanaaacccnagggnaaaangaaccaaaggaggaacgnggcccacccaaagcctaatggtcttgggggtccctttangnaaattantgccaaacaaanaaatggtaccanagtttgggggnaggaatgnggaaccccccccttatcnattcnagcctngcgtttnccccaaaggggtgggcttcaaaccgtttngaaaagtccgaaacatggcttcttnttaataacaanacaanttttttttnccnttaanggcccccctc

SEQ ID NO: 251 - DNA, 874 bp, Homo sapiens
  misc_feature 2, 3, 4, 5, 6, 7, 8, 11, 12, 13, 14, 15, 16, 17, 18, 19,20, 21, 22, 23, 24, 25, 26, 27, 28, 29, 30, 31, 32, 33,34, 36, 37, 38, 39, 40, 41, 42, 43, 44, 45, 46, 47, 49,50, 51, 52, 53, 54, 55, 56, 57, 58, 60, 61, 62, 63, 64,65, 66: n = A,T,C or G
  misc_feature 67, 68, 70, 71, 72, 76, 77, 78, 80, 81, 82, 84, 85, 86, 87,88, 89, 90, 92, 94, 95, 96, 97, 98, 99, 100, 102, 103, 105,106, 107, 108, 109, 112, 114, 115, 116, 118, 119, 120, 121,122, 123, 124, 125, 126, 127, 128, 129, 130, 131, 132: n = A,T,C or G
  misc_feature 134, 137, 138, 142, 143, 145, 153, 188, 314, 319, 429, 469,488, 525, 600, 604, 613, 619, 673, 687, 688, 696, 721, 753,768, 785, 790, 832: n = A,T,C or G
tnnnnnnnatnnnnnnnnnnnnnnnnnnnnnnnntnnnnnnnnnnnnannnnnnnnnncnnnnnnnnngnnncccnnntnnnannnnnnnantnnnnnnncnnannnnnacnannnannnnnnnnnnnnnnnantannaagnnanggacgctntacgatcctatagggcgaattgggagctccaccgnggtggcgggccgaggtactatgggaacaggttcaaaatgaatataagggagttatttatatattaggtaaagcacaaaaatgataattactggactgcacactcacaggttaaaggtcatttgggngcagnaaaaatgtccggacccgtttggggaaacaagaaccattaaacctgcttgtaaaaaggaagcccaaggggggagggggtaaacccaaaaaagccgttatttcaagaaatangcttggtgggaaaagcttggggggggaggaccacccttgnaaaaaaaatcctaagccanattaaggccgttggaaaaaaattcaacctttaaaagnttaaaaaaaaaattaaaaaacctttttcaaggagggggcctggaaaggccttattttttgaaaattttaacccanacgnaatttttangtaagnattgaaaattggccccaaaaaaggaaggggaatttaaggtaaaaaaaattttcntttcccattggccnnaaaaaatnaccaaaccaaggttaaattggggcntccccaattccaaccggaaccattttggttanaaaaccccccaaaangcccccgaaggaggttncaccnttattggttaaaggttggaggaaggttttggaaggttgccanaatttttggttaaattaaagggaaaattaaaaaaaaaccaat

SEQ ID NO: 252 - DNA, 508 bp, Homo sapiens
  misc_feature 244, 268, 325, 346, 348, 352, 355, 362, 363, 373, 377, 385,393, 414, 421, 425, 431, 433, 437, 441, 442, 448, 449, 458,465, 466, 467, 475, 476, 479, 482, 485, 496, 497, 504, 508: n = A,T,C or G
taaacactactatagggcgaattggagctccccgcggtggcagcggccgcccgggcaggtaccatcaccccttcatgctggccctaagctttctccagcagtcccacttcctgatattcgttctcttcagcagcctaaaatacagctttcttctgtccccaaagtaagccgctgtgctcattgccctaatgaaccctccacttcgccaatgcgttttggtggtggtggtggcggtagcggaggnacctcggccgctctagaactaaanggatcccccgggctgcagagaattcgatatcaagcttatcgataccgtttgaccttnagggggggcccggtacccaantnttgnttncctttanngagggttaantgcncgcttggncgttaatnaatggaacaatagctgttttncctgtgntganaattgnantatnccgnnttcacnnaattttccnccacaannnataacgannccnagngcnggcattaaaanntggttanaagn

SEQ ID NO: 253 - DNA, 833 bp, Homo sapiens
  misc_feature 1, 2, 3, 6, 8, 11, 15, 16, 20, 21, 22, 23, 27, 28, 29, 33,36, 39, 41, 42, 43, 44, 46, 49, 61, 63, 64, 70, 74, 79,82, 83, 86, 90, 95, 99, 101, 104, 117, 126, 127, 130, 228,325, 337, 340, 352, 355, 356, 359, 362, 376, 394, 400, 403: n = A,T,C or G
  misc_feature 420, 425, 432, 441, 444, 450, 482, 483, 485, 487, 494, 498,506, 511, 522, 541, 624, 631, 650, 662, 672, 683, 700, 701,713, 748, 760, 762, 771, 772, 773, 777, 787, 802, 809, 821,822: n = A,T,C or G
nnnctntnttntctnnattnnnnaacnnntaanatntgntnnnntnttntaagaaacatgntnnatatancaanatatntanntanttanttttnttantnatntaatagtagttanctaagtagnnttntgcgcgctttacgactcactatagggcgaattggagctccacccgcggtggcggccgaggtaccaacatgtcccgtggttccagcgccggttttgacncgccacattaccattttttcacccgagggtcggctctaccaagtagaatatgcttttaaggctattaaccaggggttggcccttacatcagtaagcntgtcaggagggnaanaggacctgttgncanntanatntgttcaccaccagnaaagaaaaagttaccctngctccnggngcgggcccgcttcttangaaancttatgntgggattcnccnctcggngccttgccaagggaaattttctgattatttcnnangncttttanttcnggaattancccgntcggatccctncggagggggggggggggcntcccggggtaaccccccaaggctttttttggtattccccctttttaagattggaaggggggttttaaaatttttggcctggcnggccctnttggggccggttaaaattncaattggggttncaattaaggncttggtttttnccccttggtgggttggnnaaaaaatattgngtttaatttccccgcctttcaaccaaaattttccncacccaccaaancnaatttatcnnnaggnccccgggggnaaggcccattaaaanaagtttngttcaaaaaagnncaccttggggg

SEQ ID NO: 254 - DNA, 789 bp, Homo sapiens
  misc_feature 2, 3, 4, 6, 15, 16, 20, 21, 25, 30, 31, 44, 52, 53, 54, 58,63, 64, 65, 67, 71, 73, 74, 79, 84, 85, 87, 88, 90, 91,92, 96, 97, 105, 109, 116, 126, 132, 167, 295, 338, 357,377, 391, 398, 400, 410, 425, 434, 439, 442, 482, 489, 520: n = A,T,C or G
  misc_feature 532, 557, 565, 571, 572, 627, 640, 642, 653, 676, 683, 695,716, 729, 737, 740, 742, 744, 769, 771, 788: n = A,T,C or G
cnnnanctattaatnntagnnactntcttnntttataaaatatncttttatnnnattnttttnnnanattntnnaaaanttttnnannannnctanntgattatntaangacaatnaagtctgagngccgcnatacgatcactatagggcgaaattggagctccacncgcggtggcggcccgacatccgccgcccgagggatcgttggcagcccgggtgggagtgtggctgtgttctcgtccctggctgacaacgaaggggagctagtcacttttcctgccacagacgactcgcngtccgcctctcgcctggagtacctcggccgctctagaaactangtggatcccccgggcctgnagggaattcgatatcaaagncttatccgaatacncgtccgnancctctgaagnggggggggccccggntaccccagnctttnttngtatcccctttttaagttgaggggggtttaaattttggcngccgccntttgggctgtaatattcaattggggttccantaagccttgatntttcccctgttggtgaaaaaatttngtttaatncccggnnttcaacaaatttgcccaccaaccaaaccaataaccgtaaagccccgggggaaggnccaattaaaaagntngttaaaaaagncccttgggggggttggccccttnaaatggnaagtttggaagnccttaaatccttccaaccaanttttaaaattttnggccggtnttngncnggcccttcaaccattgcccccctgncnttttttccaagagttcng

SEQ ID NO: 255 - DNA, 852 bp, Homo sapiens
  misc_feature 1, 5, 6, 7, 11, 12, 13, 15, 16, 17, 21, 25, 26, 28, 37, 40,42, 44, 49, 51, 56, 58, 59, 61, 62, 67, 70, 74, 77, 78,84, 87, 91, 92, 93, 97, 111, 116, 118, 145, 147, 149, 169,178, 186, 188, 214, 215, 217, 218, 221, 239, 245, 345, 401: n = A,T,C or G
  misc_feature 409, 474, 498, 499, 525, 563, 591, 594, 636, 642, 646, 680,681, 682, 695, 710, 722, 724, 748, 781, 782, 801, 814, 831,837, 842, 849: n = A,T,C or G
nccannncttnnntnnnattnattnntnttaattatnttnanantattntngaaananntnnttttntangganttnntgtatntantttnnnttantatattataaatanaaagntnggggtcgctatacgatccttagggggnantngggctcccccccgggggggnggccggggncccatatnanccagagcaacatacatgaataagccnncnntangtgcaaatatccacatanaaaacntttttcagcatattgaccaatgaaaattcctgttgccattccaagaataccgccagcattggccttgacaatgccattataaaaagggacaagccctgcnttaaaccggttcattgcccaagcccttttaagttaagaaacaaggcaaaaagggtncacccctnaattttcaattggaggggccaaaccttccattggaccaaggaaaccaccaaggccaaaaccaagnaaaaggttaaccccctttgggggnnccggctttctttagaaaaaacttaangttgggggaaattccccccccccgggggggcctttgcnaaggggaaaaattttcccggaattaatntcnaaaaggcccttttaatttcgggaaataacccccgggtccggnaacccnttcnggaagggggggggggggggggcccccccggggtnnncccccaaaagccnttttttttggttttncccccttttttnangttggaaggggggtttttaaaatnttggccggcccgccttttggggccggttaaaanncaatttgggggtccaattnaggccttggtttntcccctgggtggttggnaaaaanttggntttattnccc

SEQ ID NO: 256 - DNA, 695 bp, Homo sapiens
  misc_feature 1, 2, 6, 8, 9, 11, 12, 15, 18, 19, 21, 23, 26, 36, 38, 39,41, 42, 44, 46, 50, 51, 58, 61, 63, 65, 66, 68, 70, 71,73, 75, 83, 84, 88, 92, 93, 96, 98, 107, 108, 109, 111,112, 116, 130, 410, 439, 457, 485, 533, 570, 603, 608, 636: n = A,T,C or G
  misc_feature 643, 666, 679, 687, 691: n = A,T,C or G
nntttnanncnnatnttnnantntgnttattttttntnntnntnanattnnttttttntantntnntntnntntntttttttnntatntttnntananttttttaannntnngagnatcctatacgatcntatagggcgaattggagctccaccgcggtggcggcccgaggtacgcgggaggaactgctcagttaggacccagagggaaccatggaagccccagctcagcttctcttcctcctgctgctctggctcccagatgccaccggagacattgtgttgacacagtctccagccaccctgtctttgtctccaggggaaagagccaccctctcctgcagggccagtcagagtgttagcagctacttagccctggtaccttgcccgggccggcccgctcttagaaacntagttgggatcccccggggcctgccaggnaattcgattattcaaagnctttatcggattaccgttcgaccctcgnagggggggggccccgggtaccccaagacgttttttgtttccccttttnaggtggaggggggttaaaatttgctgccgctttgggncggttaaatcaattggggtccaataagcttggnttttnccttggtggttggaaaaaattttggttntaattcnccggcttccaaccaaaatttttnccaccaaccaaanccaattanccgnaggg

SEQ ID NO: 257 - DNA, 448 bp, Homo sapiens
  misc_feature 291, 351, 380, 392, 404, 413, 425, 431, 445: n = A,T,C or G
ggagctccccgcggtggcggccgaggtacgcgggggccattactgcaggaaaaggtcccggagagctgagcagtcaagatgtgtgacttcaccgaagaccagaccgcagagttcaaggaggccttccagctgtttgaccgaacaggtgatggcaagatcctgtacgtgccaagcatcctcgtgcgaccgcgagagcccggggagcgggggcttgccggccgttgcactcatttacccggggacagggagaggctcttctgcgtgtagtggttgtgcagagcctcatgcatnacggagcatgagaagacgttcccctgctgccacctgctcttgtccacggtgagcttgctntagaggaagaaggagccgtcggagtccancacggggaggcngtggtcttgtantttgttctncggctgcccatntgcttnttcccactcccggngaa

SEQ ID NO: 258 - DNA, 445 bp, Homo sapiens
ggagctccaccgcggtggcggccgcccgggcaggtaccatcaccccttcatgctggctctaagctttttccagcagtcccacttcctgatattcgttctcttcagcagcctaaaatacagctttcttctgtccccaaagtaagctgctgtgctcattgccctaatgaaccctccacttcgccaatgcgttttggtggtggtggtggcggtagcggaggtacctcggccgctctagaactagtggatcccccgggctgcaggaattcgatatcaagcttatcgataccgtcgacctcgagggggggcccggtacccagcttttgttccctttagttgagggttaattgcgcgcttggcgtaatcatggtcatagctgtttccttgtgtgaaattgttatctcgctcacaattccacacaacatacgaagccgggagcataaaagtg

SEQ ID NO: 259 - DNA, 472 bp, Homo sapiens
  misc_feature 388, 398, 404, 408, 446, 466: n = A,T,C or G
ggagctccccgcggtggcggccgccacgctggttttgcatcttcaggagacgctcgtagccctcgcgcttctcctcggccaattcgcggaagaagtggctcacgccttccagagccacatcatcgcggtcgaaatagaagcccagagagaggtaggtgtaggaggcctgcaggtaccagctgccatctgtcagttaaacttcagaacacacataccatagggatgaagataagaaaggaatgattgtgactctggatcaaaatgctcccagttcctgaaggtgcatgatttaactgtgaatgccaactgagatcctaacaccctatacaaccaaaagatgaactaagtctctgaactggtaactcataaaagacaaattcccacagtncccttcgggncggttntagnaacttagtggatcccccccggggctgcagggaatttcngaatattcaagccttattcngaatat

SEQ ID NO: 260 - DNA, 461 bp, Homo sapiens
  misc_feature 4, 369, 392, 448, 454: n = A,T,C or G
ggcngctatcactactatagggcgaattggagctccccgcggtggcggccgcccgggcaggtacagatctctgcagttacaggaacatcgtctgcttcatggtaaatgcaatttcctgttcagaaaccacactaacattacttctttcagtatttctgcctcaaagttggtttaagattatcatcattataagaaaaatttgtctagtgctggtcaaggaaatgggtctgtgtttctttggcatgagctttggaatggctgtatttggaggaggggtaaggcaagtcagatccactactgcgtatcatgacgcagatgcacatgcacacagatgcacatgctcgaaaacaggcacctggagattttagnaaaattcatttgggggaagattngcctaactttcctttctacttcagtggaatgaattaccatttctggaaaaccaatnaccggnttaaagg

SEQ ID NO: 261 - DNA, 425 bp, Homo sapiens
ggagctccccgcggtggcggccgcccgggcaggtaccacactcagggcagtttccagctcctctcacaaacagtaaatctacacaactttcacagccaggtcagcaactggttcaagaaccgccggcagcgcgacaggaacccctccgagacccagtccaaaaggtgagcgccaactttcctcctcccccgcgtacctcggccgctctagaactagtggatcccccgggctgcaggaattcgatatcaagcttatcgataccgtcgacctcgagggggggcccggtacccagcttttgttccctttagtgagggttaattgcgcgcttggcgtaatcatggtcatagctgtttcctgtgttgaaattgttatccgctcacaattccacacaacatacgagccgggagcataaagtgtaaagcctg

SEQ ID NO: 262 - DNA, 736 bp, Homo sapiens
  misc_feature 2, 9, 10, 11, 12, 13, 16, 19, 21, 26, 27, 28, 29, 32, 33,34, 35, 36, 38, 40, 42, 44, 45, 47, 48, 50, 54, 55, 57,59, 61, 63, 68, 72, 76, 77, 83, 86, 87, 88, 89, 91, 92,93, 95, 96, 97, 103, 107, 108, 111, 347, 366, 372, 388,401: n = A,T,C or G
  misc_feature 406, 423, 443, 456, 460, 468, 472, 474, 478, 481, 492, 501,514, 516, 534, 548, 552, 553, 578, 599, 601, 634, 649, 656,672, 675, 679, 682, 724, 728: n = A,T,C or G
gncaactannnnnttntgntnaatannnnaannnnntntntntnntnnangttnngntnantntttanagantagnntatctntannnnannntnnnttttantagnntgnggccctatacgatcatatagggcgaattggagctccaccgcggtggcggccgcccgggcaggtaccagcagaaacctggccaggctcccaggctcctcatctatggtgcatccaccagggccactggtatcccagccaggttcagtggcagtgggtctgggacagagttcactctcaccatcagcagcctgcagtctgaagattctgcagttttaacctacctgttcagccagtantacataacctggcgccccngttacnctcggggcccgcatcntagaaaccttagntgggnattctccccgcgggggncttggcagggaaattttcgnattattcaaaagncttntattccgnattncncggntcngtacccttctnagggggggnggggccccccggntnacacccaggcattttttngttttccccctttntaanntgggaagggggttttaaaattttgnccggccggccttttgggggcngnttaaaaattccaaatgggggattccaattaagnccctggggattttcnccttggntgggttggaaaaaaanttnggtnttnatttccccgggcgttccaaccaaaatttttccccacccaacnaaancccaaatt

SEQ ID NO: 263 - DNA, 880 bp, Homo sapiens
  misc_feature 1, 43, 497, 591, 621, 659, 664, 667, 670, 702, 712, 718,719, 720, 727, 747, 774, 792, 795, 810, 816, 832, 837, 842,850, 853, 859, 861, 869, 870, 875, 877, 878, 879: n = A,T,C or G
ngcgcttatacgactactatagggcgaattggagctccccgcngtggcggccgcccgggcaggtacatctacatacacatcagtgccgtgccttccattcccagggagggcagggtcactagacaacatcattaaaatgaccctttatcagagaacgtttttctgtttaaggaaataaactagaggtacaattttgaaagtttctacctgtatataatggatgttaaccagtatcaataaatcacttcgtataatctcaaaaaaaaaaaaaaaaaagtacctcggccgctctagaactagtggatcccccgggctgcaggaattcgatatcaagcttatcgataccgtcgacctcgagggggggcccggtacccagcttttgttccctttagtgagggttaattgcgcgcttggcgtaatcatggtcatagctgtttcctgtgtgaaattgttatccgctcacaattccacacaacatacgagccgggagcataaangtgtaaagcctggggtgcctaatgaagtgagctaactcacattaattgcgtttgcgctcactgcccgcttttccagtcgggaaaacctgtcgtnccagctgcattaatgaatcggcccaacccncggggagagggcggatttgccgtattgggccgctcttncgttnctnggntcactgaatttcttgcgctttggtcgttcggnttggggcgancgggtnnnagctcanttcaaagggcggtaataacnggttttccacagaaatcatggggattnccgcatggaaagaacatngtnagcacaaaaggccanccaaangggccaggaaaccttnaaaanggcgngttcttgncgntttttnanaggcttcnnccccntnnng

SEQ ID NO: 264 - DNA, 837 bp, Homo sapiens
  misc_feature 2, 4, 8, 12, 15, 17, 24, 26, 32, 33, 34, 36, 45, 48, 49,50, 52, 55, 58, 60, 62, 66, 73, 76, 78, 82, 86, 87, 88,89, 91, 96, 97, 98, 101, 104, 110, 112, 119, 123, 124, 126,128, 132, 137, 140, 143, 302, 303, 324, 344, 352, 357, 361: n = A,T,C or G
  misc_feature 372, 381, 402, 405, 413, 419, 424, 428, 432, 442, 455, 464,479, 486, 488, 490, 503, 520, 526, 530, 533, 541, 551, 571,578, 586, 589, 594, 605, 607, 623, 628, 630, 638, 639, 643,660, 676, 680, 686, 697, 721, 729, 744, 748, 756, 764: n = A,T,C or G
  misc_feature 770, 795, 803, 812, 833, 837: n = A,T,C or G
cncncttntctnttnantatttancnttcatnnnanatcaactantannnancanttntnanttanatttatnaantnctantctnnnntnttatnnntgntantactcntngttcttntatnnantntttnagttntgnggngcgcgcgcgtatacgactcactatagggcgaattggagctccacacgcggtggcggccgcccgggcaggtaccagcagaaacctggccaggctcccaggctcctcatctatggtgcatccaccagggccactggtatcccagccaggttcagtggcagnngggtctgggacagagttcacntctcactcattaagtcagcnctggcagntcttnaagnattacttgcanattttaccnaccttggttcaggctagttantanattaaacntgggcnccccnctgntacncttctgggcncgctttccttagnaaaccttangttggggattactcncccctgngngncttgtcaagtggnaaatttcctgaaattanttcaanaagnccnttttaatnccgtaatganccgccggttccgtaacctcnttccgtnaagcgggnggnggggngtcccccctgngnttaaccccccaaaggnctttntnttttggtnnttcnacccttttttaaagatnggaaaggggggttttnaaanttttgnccagccggccnttttggggccggttaaaaataccnaatggggnttccaattaaggccnttgnttttttcncctttggngggttnggaaaaaaattttgggttttatttnccccggcnttttaaccnaaaattttcccctaccaaccnatan

SEQ ID NO: 265 - DNA, 488 bp, Homo sapiens
  misc_feature 3, 46, 210, 220, 238, 245, 255, 258, 275, 321, 369, 376,384, 430, 448, 462, 483, 484, 486: n = A,T,C or G
ctnctatagggcgaattggagctccccgcggtggcggccgcccggncatggtaccacgggcctgggcactgcatcttcccagagaagcagactccacaggggcctcatgaccatctttctctggagaggcaggcaaactccctcgacagccaaaatccagaacctccccccgcgtacctcggccgctctagaactaagtggattcccccngggcttgcanggaaatttcgatatcaangcttatncgttaccgtncgnaccctcgaagggggggncccggtacccagcctttttgtttccctttagtgagggttaattgcngcgcttggcgtaatcatggtcatagctgtttcctgttgtgaaattgtnataccgntcacaatnccacacaacatacgattccgggagcataaaagttgtaaagcctggngttgcctaatgaggtganctaactcacattantttgcgtgagcgctcaactgnncngt

SEQ ID NO: 266 - DNA, 436 bp, Homo sapiens
  misc_feature 186, 216, 433: n = A,T,C or G
ggcggccgaggtcgcgggggaggaactgctcagttaggacccagacggaaccatggaagccccagcgcagcttctcttcctcctgctactctggctcccagataccactggagaaatagtgatgacgcagtctccagccaccctgtctgtgtctccaggggaaaagagccaccctcttcctgcagnggccagtcagaagtgttggcaccaacttangcctggtacctgcccgggcggccgctctagaactagtggatcccccgggctgcaggaattcgatatcaagcttatcgataccgtcgacctcgagggggggcccggtacccagcttttgttccctttagtgagggttaattgcgcgcttggcgtaatcatggtcatagctgtttcctgtgtgaaattgttatccgctcacaattccacacaacatacnagc

SEQ ID NO: 267 - DNA, 528 bp, Homo sapiens
  misc_feature 9, 157, 216, 224, 249, 270, 271, 273, 277, 286, 290, 341,439, 453, 460, 462, 469, 480, 493, 501, 515, 517, 518, 523: n = A,T,C or G
tatacactnctatagggcgaattggagctccccgcggtggcggccgaggtacgcgggagcaacgtgccatgctacagcccctgcttgacaaccaggttggttttaagaacatgcagaatgtggagcatgttccgctgtccttggacagagccatgcngctggtgaaagatgtcttcatttctgcggctgagagagatgtgtcctgcccgggcgggncgctctanaactagtggatcccccgggctgcangaatttcaataacaagcttanntntacnatgggcctncatnggggggggccgttcaacctttctgtttgctgtgtgctggccagaatgcctnttgggccgtcctgttgttctcttcccgtgttgtacctgcccgggcggcacgctctagaactagtggatcccccgggctgcaggaattcgatatcaagnttatcgataccgtntacctcnanggggggncccggtcccancttttttgtttcntttagtgngggggtataaattngnncgccnttggg

SEQ ID NO: 268 - DNA, 518 bp, Homo sapiens
  misc_feature 2, 7, 248, 254, 282, 284, 297, 315, 324, 355, 495, 518: n = A,T,C or G
gnatacnactactatagggcgaattggagctccaccgcggtggcggccgcccgggcaggtacggaggccagttattatactggagacagtaataaactgcaaaatcgtcagactgcaggctgctgatggtgagagtgaactctgtcccagacccactgccactgaacctgcctgggataccagtggccctggtggatgcaccatagatgaggagcctgggagcctggccaggtttctgctggtacctnggccgntctagaactagtggatcccccgggctgnangaattctataatnaagcttatcgatactcgnccgactttnccagggggggaaacctgtcgtgccagcttgnattaattgaatcggccaacgccgcggggagaggcggttttgcgtattgggcgcttcttccgcttcctcgctcactgactcgctgcgctcggtcgttcggctgcggcgagcggtatcagctcactcaaaggcggtaatacngttatccacagaatcaggggaan

SEQ ID NO: 269 - DNA, 508 bp, Homo sapiens
  misc_feature 3, 294, 372, 434, 463, 485, 503: n = A,T,C or G
cgnatacactactatagggcgaattggagctccccgcggtggcggccgaggtacccgggaggctcgcatgtgtgggtgcatgccgtggcaggagaaggatgggtgatccctaaattaccttccgaagagccatgcatgcgtcctctggctgctccaggtgtaaaaaatgccagggaggggacaatcatgagtcctaggcaggaaaggtcctctggagagaggaaatggcacacgcgcaagcacggaggcatgaggggccagggtcctggaggacactgggccgggacagatcanactccaggcaaggagggagatggcgccagactgtgatcataagcttcacgatccccgcgtacctgcccgggcggccgntcttagaactagtggatcccccgggctgcaggaattcgatatcaagcttatcgataccgtcnacctttgagggggggcccggtacccaacntttgttccctttagtgaggggnaaaattggcgcgcttggngtaat

SEQ ID NO: 270 - DNA, 856 bp, Homo sapiens
  misc_feature 2, 4, 5, 7, 11, 12, 16, 17, 20, 23, 27, 30, 33, 38, 39, 42,43, 44, 46, 52, 55, 57, 58, 59, 64, 65, 69, 70, 74, 77,82, 83, 88, 89, 94, 97, 98, 99, 100, 101, 103, 104, 105,106, 109, 110, 111, 112, 116, 117, 118, 122, 123, 316, 331: n = A,T,C or G
  misc_feature 370, 413, 431, 436, 440, 443, 452, 461, 463, 475, 487, 497,524, 528, 531, 567, 576, 585, 613, 634, 641, 653, 664, 673,674, 678, 681, 685, 700, 705, 710, 717, 719, 733, 765, 771,817, 845: n = A,T,C or G
cnannantaanncttnnatnganaatntantcnacttnngtnnnanaaaaantantnnntttannaaannattntanaatanntcttnntatcnatnnnnntnnnnttnnnnaagnnngggnnctaataactcataaagggaataagcttgcggccgcttaattaaagatctttttttttttttttttttaacctttaatctctttggactttatccttgggcttttctgaaagcactttctgtccagcccttgctgtcacccagccaaacctagctacctcacaggcccccagcagctttcctggctctgcttcnagcccaccggccttncaacccttcccataacaattggtgctaccaacccttccnaataaccccctggtccccccaacccctccccaattacctgggntccctttcaaccctttcncaacnaacnttngtttctccncaacccccncntttttaaccttntttttggccctnccccccttcnttaaccttttttttggccttccccatngggntgncgtttttttcccaattttttggcccaacccctttcnaaaattggnaaccccccnccaattgggggaatttttattttggtanggggtttttggaaaaaaaggnttttttncttaagcctccntgggggtcttntaaaaaaannaatncancctnttttttgtaaaaaanttttnttttnttggttnangggggaaaaggggnaagcggttccttaaatggttggggggcccccncaaagngaccccaaggtttcctttcaaaaaacctttcccttgggggcccctncaaggggccaaaattaccctttaccttnttcccccaaaa

SEQ ID NO: 271 - DNA, 876 bp, Homo sapiens
  misc_feature 1, 6, 9, 11, 14, 16, 28, 32, 33, 34, 36, 39, 40, 41, 42,43, 47, 52, 56, 59, 63, 67, 68, 70, 71, 76, 77, 78, 80,81, 86, 90, 91, 97, 104, 105, 107, 111, 114, 115, 123, 124,125, 127, 130, 155, 318, 332, 343, 347, 359, 388, 421, 423: n = A,T,C or G
  misc_feature 437, 439, 444, 476, 509, 522, 531, 540, 556, 580, 596, 600,619, 624, 635, 639, 672, 673, 692, 703, 706, 713, 719, 722,727, 731, 736, 739, 748, 756, 759, 781, 788, 794, 797, 810,858: n = A,T,C or G
ntctcnacntnttntnttaaaattttcntttnnncnttnnnnntccntattnatcntantacntttnntnnaactnnntnntaacntcannttatgntttattnntntatnctnnttttttgnnngngcnctaattacctcctaaagggaataancttgcggccgcttcattaataaatagacaaacttcttatatctctgccttctgaccatcaaactgaataattttaattcaacaggtcttattttcatttcctttgaaattttcctaattgccttcctttccaagtttaccataggtgccttgattcctttctnggaataaccgcaanaaaaagaaaangaantgggaaaaaaantaaaagttaaaggggtaaggggaaattantaaaaaggaagggtttcccttcccttggatttncntaaaggttaattcngnggaanccccaaaaaaaccttgggtgggttggttaatnccttttttccaaggggaaaagggggggggaagnaaggggaattggnggccaaccncccaattcntttcttccccccttcnaaaatttggccccaaggggaaccnccttcccccccctttncttnctttgggaaggggaacccnttaanctttccaaccnccanttggccctttccccctttccccgggaacccaannaaagggggcccccaatgcnaacctttttcnaantaaaccnttgggnttnttggnaagnggggnggnggaaaaagncccccaanggnctaaaccccaaccaaaaaaagncccttgnctaaanggnggaagggaaaaantaaagggggttttgggggggaaaaaccggttggggggggttccttggnctttttataaacccaaag

SEQ ID NO: 272 - DNA, 826 bp, Homo sapiens
  misc_feature 1, 2, 8, 10, 13, 14, 15, 16, 17, 18, 19, 20, 21, 22, 23,27, 28, 37, 38, 41, 42, 43, 47, 55, 59, 62, 85, 86, 91,94, 96, 98, 101, 102, 104, 105, 106, 107, 108, 115, 120,122, 123, 196, 311, 318, 323, 331, 334, 352, 363, 377, 382,389: n = A,T,C or G
  misc_feature 405, 425, 442, 444, 452, 470, 474, 478, 482, 512, 513, 525,529, 533, 543, 549, 551, 553, 555, 559, 562, 564, 587, 593,597, 620, 634, 639, 641, 643, 649, 652, 654, 668, 669, 683,690, 692, 697, 704, 706, 711, 715, 721, 723, 744, 754: n = A,T,C or G
  misc_feature 758, 759, 778, 785, 800, 801, 806, 823, 825: n = A,T,C or G
nnatcttnanatnnnnnnnnnnntatnnttaaatatnnaannntagnttatttanttancantatattcctaatataacatttcnnatatnatntntnatnntnnnnntttagtnggggntnntaacctcctaaagggaataagcttgcggccgcttaattaaagatcttttttttttttttttttttttcctttnaaaacagcgtcatactaaagtttatttttctttacacaattatagaattcaggcagacaaggagacatatattggagttttccatttttaatatttggttaaacaaaatacattntttttgntaaancaaaccgncangcaccaaagggccaaacnaaccaataaangggaaataaaaaangccanaggaaanaaaaccaaataaaaangcccttaggggggtttggcncccgttatattgtgggngncaattcangggggttcaaggggcccnttgngttncaanctttcccctttaaaaaaaggggaaaaggtnngggggggccttntttntttnggcccccttntggggngncnanttanaangncatttgggggggttcccctcttnggtttncccnttaaaaggccaaccccaaggaanattttgggggaatntattngnanacccanggnangtaaaaaacccccnnggccccccttgggnaaaaatngnttttnaaaaagncnggttncttnttttgncntattatttccccccaattttnggggccttcnaatnngggaaaccttccccaaaanggttggncaattgggggggggnnccttntttttttacaaaaggtngnc

SEQ ID NO: 273 - DNA, 766 bp, Homo sapiens
  misc_feature 2, 3, 5, 6, 7, 8, 10, 11, 16, 17, 21, 23, 29, 30, 31, 32,33, 36, 39, 41, 48, 52, 53, 54, 58, 59, 60, 63, 65, 69,70, 75, 80, 83, 84, 86, 88, 91, 97, 98, 103, 113, 115, 381,405, 421, 437, 463, 495, 518, 541, 553, 554, 566, 567, 576: n = A,T,C or G
  misc_feature 590, 608, 618, 620, 624, 625, 633, 637, 642, 647, 656, 657,693, 694, 706, 709, 726, 732, 758, 760: n = A,T,C or G
annannnntnnataannttantnttttannnnncanttntntctgaantatnnnctannnatnanattnnatttnaaatntcnnananttntttatnngtttnttatgggttnanttaactcctaaagggaataagcttgcggccgcttaattaaagatctttttttttttttttttttttgcaggttggacgagtttgtattaaggcattctgactccttcactctccccagctccctccatgtcaatcccttggcagaaacactgtagacttataaatggatgacagatgcaggcttttgagaggggaccaaaaagggaaccaccttcttcccacttggggggtgttggggggtcaagtccattccttggggagggggngcttggaccatttagaagggggcnaaaagcttcaaggggnctttaccaggcccacnaggcccaccattattgccccattctntcttcccttggtgccagggcttcaatttattnggggcaatttttccttgccaagncttttcccttaaggggaagcccnttccccaccaannaaaattccccannggttcccgntggccttggggggnaaaaggaccttcctcaanccccggaacnangggnnaatttttntttnccacncaacncccttcaannccccaaggggttggcccccttggtttttatttaccnnggccaaccttgnggnatttggaaaccacccanttaaangggggaaaaggcccttgtaagaccancnttattt

SEQ ID NO: 274 - DNA, 875 bp, Homo sapiens
  misc_feature 15, 17, 21, 247, 250, 285, 289, 299, 302, 306, 341, 359,372, 376, 377, 415, 430, 435, 453, 465, 467, 494, 516, 530,534, 537, 539, 540, 543, 545, 559, 562, 581, 594, 618, 623,626, 630, 643, 654, 661, 666, 668, 673, 687, 692, 696: n = A,T,C or G
  misc_feature 704, 705, 710, 715, 716, 724, 731, 742, 743, 745, 756, 762,769, 772, 773, 781, 791, 796, 801, 835, 841, 842, 843, 862,864: n = A,T,C or G
ggagctccacccgcngnggcngcccgaggtactttttttcttaatttttttttttttttttgaaccaagcaggtgtattctggaagaaaatcagacaccctccctggttaagaattagttaactataatgtattggtgaattgagtttatagtcttttggtgggggtaaaagggccctcaaagtcatagcaggtttagttgtacctgcccgggcggccgctctagaactagtggatccccccggctncangaattccatatcaagcttatcgatccgtctacctntganggggggcccngtnccanctttttgtccctttaatgaagggttaaattgcgcnccttggcgtaatcatggncatagcctgtttnctgnngtgaaattggtattccctcacaaatttcacacaacatnccaagcccgggagcntaaanatgttaagccctggggtncctaaatgagtnancttacctcacatttaattggcgtttgncgctcactggccccttttccantcgggaaaacctgntggnccncnntgnanttattgaaattcgnccncccccccggggagaagggnttttggggatttngggcgcctttttcccctttcctcngcttnacntganttcacttgggctnggggcgttttnggttttnggggnancgggntttttctttcttcnaaggngggnatacgggnnttccncaaanntgggggtnaccccgnaaaaaaattgnngncaaaggccccnaaaggnccggganccnnaaaagggnccccgtggtnggggntttcntagaggccccccccctgagggtttaaaaatttcncctcannnaagggggaaaccccccggntnttaaatacccc

SEQ ID NO: 275 - DNA, 897 bp, Homo sapiens
  misc_feature 2, 4, 5, 8, 11, 19, 25, 33, 180, 182, 591, 628, 703, 728,751, 755, 760, 767, 773, 779, 785, 790, 812, 840, 849, 860,867, 871, 882, 886, 889, 890: n = A,T,C or G
cncnntancantactactnctatanggcgaatnggagctccccgcggtggcggcccgaggtacatttcctttctgtggttttcttttgcttcttagaaattctgttagtggttagtaaagaatttgaaagtacgcggggctttctttccgcgccgatagcgctcacgcaagcatggttancntgcctaaaacccgccggactttctgtaagaagtgtggcaagcaccaaccccataaagtgacacagtacctgcccgggcggccgctctagaactagtggatcccccgggctgcaggaattcgatatcaagcttatcgatacccgtcgacctcgagggggggcccggtcccaacttttgttccctttagtgagggttaattgcgcgcttggcgtaatcatggtcatagctgtttcctgtgtgaaattgttatccgctcacaattccacacaacatacgagccgggagcataaagtgtaaagcctggggtgcctaatgagtgagctaactcacattaattgcgttgcgctcactgcccgctttcagtcgggaaacctgtcgtgccagctgcattaatgaatcggccaacgcnccgggaagaggccgtttgcgtatttgggccgctcttncgctttctcgcttaactgaactcgcttgcgctcggtcgtcgggtgcggcgaaccggtattaagctcacttcaaangcgggaattaccggttattccacanaaatcaaggggataaccccaggnaaanaacantttgaancaaaanggcccncaaaangggcncggaaccctaaaaaaggccccngttgctggcgttttttccataggctccncccccctgnacgagcattanaaaaatngacncttaagttaanaggnggnnaaaccct

SEQ ID NO: 276 - DNA, 395 bp, Homo sapiens
cgtataccactcactatagggcgaattggagctccaccgcggtggcggccgaggtactcagagtgaggattttctgcaacctgcgtttgtccctccagcatctgctctggctccatggcggaccctgcaagtcacagtccccggataccagtctgggcgccgggagcaccacgagcagtagagcagcagagtgggacagtccacgactgggcgcctacatggggtctggaaactctacgacagtcccaagtacctgcccgggcggccgctctagaactagtggatcccccgggctgcaggaattcgatatcaagcttatcgataccgtcgacctcgagggggggcccggtacccagctttttgttccctttagtgagggttaaatttgcgcgcta

SEQ ID NO: 277 - DNA, 483 bp, Homo sapiens
  misc_feature 1, 6, 13, 14, 15, 17, 20, 27, 29, 32, 33, 34, 35, 36, 38,48, 306, 323, 364, 372, 408, 423, 431, 438, 439, 444, 451,452, 456, 460, 464, 469, 470, 472: n = A,T,C or G
ngtttnttttttnnntnttnttatatntnttnnnnngncgcgcgttanaacgactcactattagggcgaattggagctccaccgcggtggcggccgaggtaccttggtgttacttcctttgaaagatggacatttgaaagttaaaaatcagtcactatataggcactgctgtatggaaaacgcatttttgtgtttctacaaattgtaagcgggaaatgccttttggagtacctcggcccgctctagaaactagtggatccccccggggcttgcaggaattcgatatcaagctttatcgataccggncgacctttgaggggggnccccggtacccagcttttttgtttccctttagtgagggttnatttgccncgcttgggcgtaatcatgggtcataagctggtttcntgttgtgaaattggntattcccnttcacannttccnaaacaanntacngagncctnggganncnttaaagtgtca

SEQ ID NO: 278 - DNA, 476 bp, Homo sapiens
  misc_feature 3, 9, 12, 13, 15, 20, 23, 24, 25, 28, 29, 31, 33, 63, 82,138, 212, 245, 268, 271, 272, 275, 278, 296, 298, 302, 307,324, 329, 337, 341, 351, 363, 365, 368, 369, 393, 406, 411,414, 423, 424, 437, 438, 440, 444, 475: n = A,T,C or G
tanatttgnttnntntgttngannnagnngngnggttttgcggggaaaacactccactatagntttgaagggaacccaccgnggtggcggccgcccgggcaggtactgtttactacacacttaaaaacccgagtgtcnagtgcctttaggggaagaacacttctgcctgcatgaaaatgtcttaaaagtgaaggaaaatttgaagaacgctnttgatcagaagtccagactgtaaacataatcgntgggtcattgttacttggaaccngtnnctnggncggtgtagaattagtggntncttnggggntgcagggatttgatatnaaagnttatctgntttntgttgatctngagggggggggncnggnnccttggtttttgtttccttttttngtggaggggttanattgnggnggtttgggnngtaatatcatggnntnttangggtggtatggctggggtggaaaatttggtnt

SEQ ID NO: 279 - DNA, 483 bp, Homo sapiens
  misc_feature 9, 12, 17, 20, 21, 32, 33, 37, 38, 42, 50, 52, 233, 241,256, 263, 275, 281, 310, 318, 328, 340, 345, 346, 356, 357,364, 373, 377, 380, 389, 393, 397, 400, 402, 403, 405, 410,416, 418, 419, 420, 422, 435, 439, 442, 457, 458, 460: n = A,T,C or G
  misc_feature 462, 463, 468, 473, 474: n = A,T,C or G
ttattttcnttncgccnatnntttttttttanntttnntttnctcgcgtnantacgtactcactattagggcgaattggtagctccaccgcggtggcggccgaggtacttttttttgtttgttttttttttttcaccttaagggaggatttaatttgctcccaactgattgtcacttaaatgaaaatttaaaaatgaataaaaagacatactttctcagctgcaaatattatnggagaatnggggcacccacaggnaatgaanagaggaaagcancttccntaaccttcaaaaccatttttggtaccctnccccgggncgggccggtnctaagaacctangtggnntcccccctgnnctgccangcaattccnattntcnttgcttatncganaccngtntnncnttganaggggngnnncncggttccccaagntttnttntttcccttttacatnnangnntttantttgnngccactttg

SEQ ID NO: 280 - DNA, 502 bp, Homo sapiens
  misc_feature 4, 6, 8, 13, 14, 19, 32, 33, 36, 48, 186, 195, 206, 222,243, 265, 269, 271, 286, 289, 295, 300, 311, 312, 314, 315,322, 331, 338, 346, 354, 358, 364, 365, 370, 373, 374, 378,383, 384, 385, 396, 400, 401, 404, 409, 412, 414, 415: n = A,T,C or G
  misc_feature 416, 422, 423, 425, 429, 435, 444, 447, 448, 455, 456, 457,458, 460, 466, 467, 468, 469, 470, 472, 474, 476, 479, 485,486, 487, 489, 490, 493, 494, 499, 501: n = A,T,C or G
tttntntncccannttttnttgtttttttctnnttntttctcgcgtgntacgacttcactatagggcgaattggagctccaccgcggtggcggccgcccgggcaggtaccaaaatggtttttgaagttagggagctgctttctctcttcattcctagtgggtagccccaatctctccataatattntgcagctgnagaagttatgnctttttattcattttnaaattttcatctaagtgacantcagttgggagcaaattaaatncctncnttaaagtgaaaaaanaanaacaanctatnaatgttccctnngnnccgtgtnttagaactnagttgcntccccatngggctgtnaggnaattannattcncanncccntattnnnatcaccccgtnttannctncgaanggngnnngccccnnanttcnctatgntttattgtnttnnctttttnnnncnagcgannnnntncncnacnctttgnnntnnttnnattgntnt

SEQ ID NO: 281 - DNA, 395 bp, Homo sapiens
  misc_feature 2, 10: n = A,T,C or G
tntagggctnattggagctccccgcggtggcggccgcccgggcaggtactgggctctgaccactattggttttgagaccacgatgttgggagggtatgtttacagcactccagccaaaaaatacagcactggcatgattcaccttctcctgcaggtgaccattgatggcaggaactacattgtcgatgctgggtttggacgctcataccagatgtggcagcctctggagttaatttctgggaaggatcagcctcaaggtgccttgtgtctttccgtttgacggaagagaatgggattctggtatctagaccaaatcaagaaggggaacagtacctcggcccgttctagaactagtggatccccccgggcttgcaggaattccgatatcaagctta

SEQ ID NO: 282 - DNA, 484 bp, Homo sapiens
  misc_feature 11, 12, 15, 20, 23, 26, 27, 32, 33, 34, 35, 36, 39, 40, 41,49, 51, 55, 78, 164, 186, 278, 315, 316, 318, 328, 332,339, 344, 345, 353, 368, 381, 387, 388, 392, 394, 396, 431,457, 474: n = A,T,C or G
tatttactacnntcnttttngtntgnncgttnnnnnttnnncgcgcgtnancacncactcactatagggcgaattggnagctccaccgcggtggcggccgcccgggcaggtaccaaaatggttttgaagttagggagctgctttctctcttcattcctgtgggngccccaattctccataatattntgcagctggagaagtatgtcttttttattcatttttaaatttttcattttaagtgacaatcagttggggagcaaattaaatccttccttaangtgaaaaaaaaataatccaaacaaaaaaagtacctcnngncgctctaganctantgggatnccccnnggtcttgnaggaattcgatatcnagccttatctatnccgtcnnaccntntnagggggggggccccggaaacccatttttttgtttnccttttaggtggaggggttaaaattngcgccgcttgggccgtnaatccattgg

SEQ ID NO: 283 - DNA, 416 bp, Homo sapiens
  misc_feature 9, 38, 138, 230, 245, 259, 262, 264, 271, 272, 277, 280,293, 316, 324, 325, 339, 342, 346, 355, 376, 377, 379, 384,387, 392, 397, 399, 404, 405, 409, 414, 416: n = A,T,C or G
tgttgggcnaattggagctccaccgcggtggcggccgnccgggcaggtacttacttgatgtgactctcctctcatgcctgggccctgcttacaggtgtgattgtgacacatagcttggcctagcccctaggttatgtnactctcctcttatccttcagttattttcacaaggggcattgcgacatattgctggacttgggaacccaggtgatgtgactctcctctactgnctggaatacaaccanaaaaaaaaaaaatnaananaaaaagnnccctncgnccgctctagaaantagtgggatcccccccgggcttntaggaatnncgaaatcaagcttnatngatncccgttgtnccttctagggggggggccccnntnccccnatnttttntgttncnttttnngttnagggntn

SEQ ID NO: 284 - DNA, 923 bp, Homo sapiens
  misc_feature 228, 308, 344, 392, 396, 409, 414, 454, 502, 514, 520, 521,525, 529, 552, 556, 570, 576, 593, 599, 608, 612, 621, 630,632, 634, 640, 641, 642, 646, 650, 651, 655, 658, 661, 667,681, 694, 698, 704, 711, 712, 722, 733, 734, 751, 758: n = A,T,C or G
  misc_feature 761, 764, 775, 776, 791, 801, 809, 811, 816, 828, 838, 841,846, 856, 857, 862, 865, 878, 887, 888, 909, 913: n = A,T,C or G
aattggagctccaccgcggtggcggccgcccgggcaggtaccaaaatggttttgaagttagggagctgctttctctcttcattcctgtgggtgccccaattctccataatatttgcagctgagaagtatgtctttttattcatttttaaattttcatttaagtgacaatcagtgggagcaaattaaatcctcccttaaggtgaaaaaaaaaaaaaacaaacaaaaaangtacctcggccgctctagaactagtggatcccccgggctgcaggaattcgatatcaagcttatcgataccgtcgacctcnagggggggcccggtacccaagcttttgtccctttantgagggttaattgcgcgcttggcgtaaatcatggtcataagctgtttnctgngtgaaattgttancccgntcacaattccccacaacatacgagccgggagcataaaggngtaaaagcctggggtgcctaatgagtgagctaacctcacattaattgnggttgggctcantgcccnntttncaantcgggaaaccctgtcgggcccancttnatttaatgaaatcngcccancccccgggggggagggnggtttngcggtattngggngccttttcncttttcctngntnattgannntcgnttgnncttnggncgntccggntggggggcgaagcnggttaaagctccnctcnaagggngggtaannccggttattncacaaaaattnnggggattaaccccaggnaaaaaanctntgngccaaagggcnntcaaaaaggccaggncccgaaaaanggcccgtngntgggntttttcaaagcncccccccccngcnggctnaaaaaaaagnnccttnatntaaaggggggaancccccaggnntttaaaaacccggggttcccntganagtcccttgg

SEQ ID NO: 285 - DNA, 927 bp, Homo sapiens
  misc_feature 1, 2, 3, 400, 533, 551, 600, 640, 651, 663, 705, 719, 728,733, 735, 739, 761, 768, 787, 797, 802, 815, 821, 832, 838,846, 849, 850, 851, 868, 871, 877, 882, 886, 889, 896, 897,907: n = A,T,C or G
nnngcgactactatagggcgaattggagctccccgcggtggcggcccgaggtacctgattgcattgcacttaaatgcagattattttggagtttgaaaagggactattaatgaaatctttcttttccctcctttctctttttcccttccccgccactgattcagtgagctggagattggatcacaggtataattcaagctttcatgtagtcatgtagatcactagactccttggtgtacctgcccgggcggccgctctagaactagtggatcccccgggctgcaggaattcgatatcaagcttatcgataccgtcgacctcgagggggggcccggtacccagcttttgttccctttagtgagggttaattgcgcgcttggcgtaatcatggcatagctgnttcctgtgtgaaattggtatcccgctcacaattccacacaacatacgagccgggagcataaagtgtaaaagcctgggggtgcctaatgagtgagctaactcacattaattgcgttgcgctactgcccgctttncagtcgggaaacctgtcntgccagctgcattaatgaatcggccaacgcgcggggagaggcggtttgngtattgggcgctctttcgctttcttcgttaattgacttgnttgcgctcggncgttcggctggnggggagcggtataacttacttaaaaggcggtaataccggttnttcacaagaatcanggggataancgcangnaaanaacattgtgaacaaaaaggccnacaaaanggccaggaaccgtaaaaanggccgggtgntgggngtttttcataagnttccgncccctggccgnggttanaaaaaatngcnnntaaagccagaggggggnaanccgccnggctntaanganacccggnngtttcccctngaagctccttgggcccttcc

SEQ ID NO: 286 - DNA, 909 bp, Homo sapiens
  misc_feature 1, 2, 535, 547, 551, 553, 565, 568, 609, 614, 632, 652, 670,678, 697, 709, 721, 723, 734, 735, 747, 752, 777, 780, 781,793, 794, 823, 828, 850, 857, 868, 886, 887, 897, 905, 909: n = A,T,C or G
nncgcgactactatagggcgaattgggagctccccgcggtggcggcccgcccggcaggtactttggcctctctgggatagaagttattcagcaggcacacaacagaggcagttccagatttcaactgctcatcagatggcgggaagatgaagacagatggtgcagccacagttcgtctcatctccagcctggcccctaccaaaagtgtgcggccagttattatactgctgacagtaataaactgcaaaatcttcagactgcaggctgctgatggtgagagtgaactctgtcccagacccactgccactgaacctggctgggataccagtggccctggtggatgcaccatagatgaggagcctgggagcctgccaggtttctgctggtacctcggccgctctagaactagtggatcccccgggctgcaggaattcgatatcaaagcttatcgataccgtcgacctcgagggggggcccggtacccagcttttgttccctttagtgagggttaattgccccttggcgtaatcatggncatagctgtttnctgngngaaattggtatncgntacaattcacacaacataccagcccgggagcataaaagggnaaagnctggggtgcctaatgagnggctaacttacattaaatgnggtgcgcttacttgccgntttccaancgggaaacctgtcggccancttgattaaagnaatgggccaacncncggggggaggnnggttggggattnggggnccttttccgtttcttggttaattgnctnnttggccttggcnnttgggttgggggagggggataagttattnaaagngggaataccggttttcccaaancaggggnaacccaggaanaacattgaccaaaaggcnncaaaaggccnggacccgnaaan

SEQ ID NO: 287 - DNA, 793 bp, Homo sapiens
  misc_feature 2, 4, 6, 7, 11, 15, 21, 24, 26, 28, 33, 37, 57, 58, 62, 63,66, 72, 76, 81, 84, 85, 90, 105, 110, 116, 117, 118, 122,125, 181, 200, 273, 278, 288, 307, 327, 340, 354, 408, 416,425, 427, 435, 441, 454, 458, 499, 507, 529, 535, 537: n = A,T,C or G
  misc_feature 541, 550, 554, 563, 577, 600, 601, 608, 611, 613, 614, 616,625, 637, 649, 660, 664, 667, 673, 674, 687, 692, 732, 743,748, 755, 757, 764, 771, 772, 788, 789: n = A,T,C or G
antntnntttngaantctttnctntntntaatnttantttatcatttattttgatgnntttnnttntttttnttanttttnctnnttatnttttttttatttacntagtnggtgtnnntccntanacgactcactatagggcgaattggagctccaccgcggtggcggccgaggtacctgnaggcctcctacacctaccnctctctgggcttctatttcgaccgcagatgatgtggctctggaaggcgtgagccacttcttccgcagaattgnccgangagaagcgcngagggctacgagctgtctnctgaagatgcaaaaccagcntggtcggccgctntagaactagatganatcccccgggcatgcaggtaattcgatatcaaagccttatcgtattacccgttnttactctnttagtgggngnggctcccngttacncccaagctttttngttncccttctaagatggaggggtttcaatttgccgccggctttngggcgtanaattcattgggtccattaaggnctgttntntccnttggtggtngganaatttcggnttaattcccgcttncacaaattttctcaactactaannccattancgnanncnctgggggangccatttaaaanatggttataaanccccttgtggngttntcncctaanntggaaggtgggangcctnaaccctcaccaatttaaaattcttgccgtattggcggctncaaccttgtcncccgnctttttntncaaagtnctggggnnaaaaccttggtaccgnngccc

SEQ ID NO: 288 - DNA, 528 bp, Homo sapiens
  misc_feature 10, 69, 109, 234, 245, 289, 292, 297, 346, 361, 367, 375,415, 445, 447, 454, 461, 467, 492, 497, 507, 511, 520, 524: n = A,T,C or G
ggcgaatttnagctccaccgcggtggcggccgcccgggcaggtaccaaaatggttttgaagttaagggngctgctttctctcttcattcctgtgggggccccaattctncataatattttgcagctgagaagtatgtctttttattcatttttaaattttcatttaagtgacaatcagttgggagcaaattaaatcctcccttaaggtgaaaaaaaaaaaaacaaaagtacctnggccgctctanaactagtggatcccccgggctgcaggaatttgatatcaagcttntcnatacncgtctacctttagggggggcccggtacccagctttttgttccctttagngagggttaatttgcncccttnggcgtaantcatgggtcatagctgttttcctgtgtgaaatttgttatnccgcttaacaaattcccaccacaaacatancngaagccngggagcnttaaangtggttaaagcccttggggggtgcnctaantgaagtgggngctnacttcaacntttnattt

SEQ ID NO: 289 - DNA, 527 bp, Homo sapiens
  misc_feature 333, 346, 363, 393, 416, 470, 483, 487, 500, 505, 515: n = A,T,C or G
gttgccctatcactacttagggcgattggagctccccgcggtggcggccgcccgggcaggtacaactttaaactgtattgtattcatgttgctaaacaatattggccttctcgatgattttattcatgttgctccaaagttaaaaccctgtagaactaagtaggtgaagagatattttgtataagtgccacagaagagaaaatataataaattaaatagtgatcgagcggccgcccgggcaggtaccagcagaaacctggccaggctcccaggctcctcatctatggtgcatccaccagggccactggtatcccagccaggttcagtggcagngggtctgggacanagttcactctcaccatnagcagcctgcagtctgaagattcttgcagnttactactgtcagcagtataatnactggcccccgtaccttggccgcttctaaaactagtgggatccccccggcctgnaaggaatttgatntttnagcctttttgatncccgncgaccttcanggggggggccct

SEQ ID NO: 290 - DNA, 588 bp, Homo sapiens
  misc_feature 11, 21, 24, 83, 85, 165, 178, 246, 333, 378, 402, 407, 426,436, 438, 456, 470, 495, 496, 501, 523, 539, 544, 549, 551,552, 554, 561, 566, 571: n = A,T,C or G
cgagatttttnaatcgggcgnatnttgctccccgcggtggcggccgaggtactttttcctagtagtgacccagtaaatatctntncaacaaacttggctttgctggtgtgcaaagtgtaatataaggaaaattagtgacatttttttgccttttagtgtgtaacntgggaatgtatangtatagaaaacagagagatagttatatattttaacaacttgaaattcataggtgttaatagattcctntttttgaaattaaatatctcctaggattttgatcacttacagtgttgtatgcactaccttaattagataaatcaagtttttttgtcntttttttcttagctgaagaatcctggtaagagttgggcgaccagnagaaaatggaatggaattttcctnggcanggggttagaaaccttaaanccaaaggggngnaattttaaacccagggangttgccttttaaangggggaaacaaaggaccaattttgnnattcnattttgccaaaaaaatggtaangcttttttttatttantttangaagncnnantttgaanaaacnacttnggtttcatataaggggg

SEQ ID NO: 291 - DNA, 648 bp, Homo sapiens
  misc_feature 192, 212, 223, 226, 236, 275, 282, 300, 306, 343, 368, 371,383, 389, 391, 396, 405, 407, 410, 425, 429, 430, 431, 435,439, 441, 442, 445, 460, 463, 468, 470, 475, 476, 478, 480,486, 493, 505, 508, 512, 514, 519, 520, 528, 529, 531: n = A,T,C or G
  misc_feature 538, 545, 547, 548, 549, 554, 580, 581, 583, 585, 593, 594,595, 596, 599, 600, 606, 612, 614, 623, 626, 631, 641: n = A,T,C or G
gctacttagggcgaattggagctccccgcggtggcggccgaggtacttttttttttttttttttttccaaaagccttgtttttatttatatagagtcctaaccacttcggtggtaggaggggtgggagaggctcctttttcaatccagggacctccatgatgttggtttgttgataccaaacacacaggtangtggcatcactggatctggnaaaacttacgncantgtttagtcncttctcttgctagaagcaacatggggagcatcaatctcntgctttntgaaagaaatcctggaanctttanggatttttcaacttggtcacctacttccaaacctttnttatttttctggaaggttttggaanatncaatttgttttnaaaacngngtggnacaagggcnanggnaatttggccagtatntccnnnttgncctngnntcnaaaattggtcccaanttnaaatntntcttnntntncctttntattttntaaaagggaaanctnggtntngaacnnaaatatgnngnttaaaancttcccngnnngccangtgggctttttaaaaacccccccagnnantnacccccgnnnntannaaatcncccccntntatttttanccnttggnggggcccctntgtcttt

SEQ ID NO: 292 - DNA, 629 bp, Homo sapiens
  misc_feature 8, 12, 30, 74, 147, 223, 228, 251, 252, 258, 269, 296, 343,357, 361, 379, 390, 395, 408, 419, 429, 445, 452, 461, 463,464, 481, 483, 488, 489, 490, 495, 509, 513, 514, 529, 532,543, 549, 550, 560, 563, 587, 598, 601, 606, 611, 624: n = A,T,C or G
gagagaanactnagggcgaattggagctcnccgcggtggcggccgcccgggcaggtactgtgtatcattgcagncttgcttttttgagtaatggattcctagattctatgaggataccacaaccacttttaaagaggtttctaaggncagttgcagtgcttacgcctgggagaccaaggtgggaggatcacttgagctcaggagttcgagaccaactttgtcnttggncgctctagaactagtggatcccnngggctngtaggaatttntatatcaaagctttatcgattaccgtntgacctctagggggggcccggaacccaagcttttgttccctttagangagggttaattgcngcgnttggccgttatcatggtncattagccttnttttncctgtggtgaaanaattgttaatncgctcaccantttcccacaccaacantaatgangctttggancnntaaaatttgtatatagncnttggnnntgccntaatgaaggttgancctnncttttccattaattngcntttgcggcttnattgtnncctcttttantanaattgggaaaccctggttggtgcnccagctttgcnttnaaatngaaantggccaactgccncttgg

SEQ ID NO: 293 - DNA, 584 bp, Homo sapiens
  misc_feature 2, 3, 32, 56, 57, 60, 213, 361, 376, 391, 404, 423, 430,440, 442, 443, 447, 457, 471, 473, 475, 476, 495, 506, 517,523, 526, 529, 531, 536, 537, 540, 549, 550, 552, 569, 580: n = A,T,C or G
gnngcgaactacttagggcgaattggagctcnccgcggtggcggccgaggtacttnnttntttttttttttttttcttcttctagttgtttcttggtttctgagtccagtcccctttgcataaacttcatgcgcagcaggttcttggacaactttgtctttctctcggccgccatggtaggttccgcccagcgccgcactccggccgctctanaactagtggatcccccgggctgcaggaattcgatatcaagcttatcgataccgtcgacctcgagggggggcccggtacccagcttttgttccctttagtgagggttaattgcgcgcttggcgtaatcatggtcatagctgtttcctgngtgaaattggtattncggtcaaaatttcanacaaacatacganccgggagcataaaaatgtnaaaaccncggggggggncnnaaanaggggggggncccccccccacttntnannggggggggccccttaactnccccctttttncaaaggggganaaaacnttntcntngccannttngaatttaanngnaatcggcccaacccccngggaagagggnggtt

SEQ ID NO: 294 - DNA, 505 bp, Homo sapiens
  misc_feature 1, 4, 376, 454, 468: n = A,T,C or G
ncgncttagggcgaattggagctccccgcggtggcggccgcccgggcatggtaccagcagaaacctggccacggctcccaggctcctcatctatggtgcatccaccagggccactggtatcccagccaggttcagtggcagtgggtctgggacagaagttcactctcaccatcagcagcctgcagtctggaagattctgcagtttactactgtcaagcagtataataactggcccccgtacctcggccgctctagaactagtggatcccccgggctgcaggaattcgatatcaagcttatcgataccgtcgacctcgagggggggcccggtacccagcttttgttcccttttagtggagggttaattgcgcgcttnggcgtaatcatgggtcattaggctgtttccctgtgtgaaaattggttatccgctcacaattccacaacaaacataccnaacccggggagcantaaaaagtggtaaaagcccttgggggtgcctaaatga

SEQ ID NO: 295 - DNA, 510 bp, Homo sapiens
  misc_feature 2, 229, 244, 248, 259, 290, 293, 297, 306, 314, 321, 346,351, 446, 503, 507: n = A,T,C or G
anacactacttagggcgaattggagctccccgcggtggcggccgaggtaccaacagaaacctggccaggctcccaggctcctcatctatgatgcatccaacagggccactggcatcccagccaggctcagtggcagtgggtctgggacagacttcactctcaccatcagcagcctagagcctgaagattttgcagtttattactgtcagcagcgtaaccaactggcctnggttaacttttcggngganggaccaaaggnggagatcaaacgaactgtggcttgcaccatntgncttnatcttcccnccatttgntgagcanttgaaattttggaactgccttttgnttggnggggcctgctgaataacttctatcccaagagaggccaaagttacctgcccggggccggcccgctctaaaactagtgggatcccccgggctgcaangaattcgatatcaaagcttatcgatacccgtcgaccttcgaaggggggggggccccnggtnccc

SEQ ID NO: 296 - DNA, 511 bp, Homo sapiens
  misc_feature 2, 3, 4, 5, 16, 449, 490: n = A,T,C or G
tnnnngcgatagggcnaattggagctccccgcggtggcggccgaggtaccgcgggggacattcatgcccggcggttcggggcgacggactctccattccagaaccatggcccaatttgtccgtaaccttgtggagaagaccccggcgctggtgaacgctgctgtgacttactcgaagcctcgattggccacattttggtacctgcccgggcggccgctctagaactagtggatcccccgggctgcaggaattcgatatcaagcttatcgataccgtcgacctcgagggggggcccggtacccagcttttgttccctttagtgagggttaattgcgcgcttggcggtaatcatgggtcattagctgtttcctgtgtgaaaattgttatccgctcacaaattccacacaacataccgaagcccggggagcattaaaagtgtaaaaagcctngggggtgcctaaatggagtggagctaacttcacattaattngcgtttgcgcctcactggccc

SEQ ID NO: 297 - DNA, 505 bp, Homo sapiens
  misc_feature 1, 4, 12, 48, 483: n = A,T,C or G
ngcnatagggcnattggagctccccgcggtggcggccgaggtactttnttctgtgtgacaattactgcacagtctttccctctgacagctactgatgtaaggccaccctggttaatagccttaaaagcatattctacttggtagagccgaccctcgggtgaaaaaatggtaatgtggcggtcaaaaccggcgctggaaccaccgggacatgttggtacctgcccgggcggccgctctagaactagtggatcccccgggctgcaggaattcgatatcaagcttatcgataccgtcgacctcgaggggggggcccggtacccagcttttgttccctttagtggagggtttaaattgcggcgctttggcgtaatcatggtattaagctgtttccctgtgtgaaaattgttatccgctcacaattccacacaaacattaccgagcccggggagcataaaaagtgtaaagcctggggggtgcctaatngagtggagctaacctcacatta

SEQ ID NO: 298 - DNA, 546 bp, Homo sapiens
  misc_feature 18, 81, 135, 192, 215, 286, 328, 332, 395, 411, 417, 423,424, 433, 434, 469, 494, 495, 504, 526, 534, 546: n = A,T,C or G
gtatttttcctactactntagggcgaattggagctccccgcggtggcggccgaggtacaaagaaatgcatgaactggcaanttatttgtgactgcaacagcccgtgcgtgttcaggagtgtgtcttccaatctgncctaaggcccaagcagctgcagccttaatatgatcttccggttcttctgacaagcanactgacaactggggtacctgccngggcggccgatctagaactagtggatcccccgggctgcaggaattcgatatcaagcttatcgataccgtcnacctcgagggggggcccggtacccagcttttgttccctttantganggttaatcgcgcgcttggcgtaatcatggtcatagctgtttcctgtgtgaaattgttatccgntcacaatttcacacancatacnagccgnnagcataaanngtaaagcctggggtgcctaatgagtgatctaactnacattaattgcgttgcgctcactgnnccttttcanaaccggaaacctgtcgcgccanttgcattnatggaatcgccn

SEQ ID NO: 299 - DNA, 552 bp, Homo sapiens
  misc_feature 2, 13, 30, 62, 82, 83, 88, 145, 242, 321, 350, 393, 411,421, 424, 425, 429, 438, 441, 465, 480, 486, 489, 498, 506,523, 541: n = A,T,C or G
gngaccgtcttcnattttgctccccgcttnggcggccgcccgggcaggttctttggcctctntgggatacgaagtttttcanncaggntcacaacacgaggcagttccagatttcaactgcccatcagatggcgggaagatgaanacagatggtgcagccacagttcgtttgatatccactttggtcccagggccgaaagaaggcagaccaaaatattgctgacagtaatcccgcgtacctnggccggaccagctttagaactagtggatcccccgggctgcatgaattcgatatcaagcttatcgataccgtcgacctcnagggggggcccggtacccagcttttgttncctttagtgagggttaattgcgcgctttggcgtaatcatggcnatagctggttccttgggnaaatggtaanccnnccanaatcccccnaanaaacaaaccggggagcataaaagnggaaagccttggggngcctantgngggaagctnactcacantaatttggcttgcgccncactgccctttttccagncgggaaaacct

SEQ ID NO: 300 - DNA, 925 bp, Homo sapiens
  misc_feature 1, 2, 3, 15, 107, 423, 606, 616, 628, 630, 648, 674, 677,697, 736, 739, 743, 750, 768, 803, 814, 825, 882, 890, 900,908, 914, 923: n = A,T,C or G
nnntttcaatatacnactactatagggcgaattggagctccacccgcggtggcggcccgaggtacgcgggaggaactgctcagttaggacccagacggaaccatggnttccccagcgcagcttctcttcctcctgctactctggctcccagataccactggagaaatagtgatgacgcagtctccagccaccctgtctgtgtctcaggggaaagagccaccctctcctgcagggccaagtcagagtgttggcagcaactttgcctggtacctgcccgggcggccgctctagaactagtggatcccccgggctgcaggaattcgatatcaagcttatcgataccgtcgacctcgagggggggcccggtacccagcttttgttccctttagtgagggttaattgcgcgcttggcgtaatcatggncataagcttggttcctgtgtgaaattgttatccgctcacaattccacacaacatacgagccgggagcataaagtgtaaagcctggggtgcctaatgagtgagctaacttacattaattgcgttgcgcttcactgcccgctttccagtcgggaaacctgtcgtgccagctggattaatgaatcnggccaacgcncggggagaggcngntttgcgtattgggcgctntttcgctttcttggtcactgactcgntgngctcggtcgtcgggttgggngaggcggtatcagcttaactcaaaagcggtataccggtnttnacanaaatcanggggataacccaggaaanaaaatgttgacaaaaaggccagcaaaaaggcccgnaccctaaaaanggcccgttggntggcgttttcataaggcttcgcccccctgcaaggattaaaaaaattgacccttcaantcaagggngcaaaccccncggctttnaaaaancaggctttnct

SEQ ID NO: 301 - DNA, 903 bp, Homo sapiens
  misc_feature 2, 3, 5, 8, 53, 58, 59, 60, 61, 68, 69, 70, 76, 77, 88, 92,98, 112, 202, 215, 219, 251, 254, 292, 325, 346, 347, 350,359, 365, 392, 396, 410, 421, 425, 426, 430, 433, 438, 444,450, 457, 463, 471, 478, 480, 504, 508, 515, 530, 537: n = A,T,C or G
  misc_feature 542, 549, 552, 572, 591, 596, 611, 614, 618, 625, 636, 638,657, 686, 712, 714, 719, 730, 734, 737, 739, 748, 750, 755,756, 778, 794, 800, 809, 812, 817, 829, 835, 839, 847, 856,866, 869, 877, 880, 886, 888, 892: n = A,T,C or G
tnnantancgactactatagggcgaattggagctccccgcggtggcggccgangtccnnnnacacccnnngtgcannggtcttgcgtngccnatgccnccaccattgtccanaagactcagttaacattatttgcagtacagacggttattgatccacgatgatagaagaggatgactctggttgctgcggtacttgtggtnctaggactagaangctnatattgtcagtgtcgggacactgccattcctnatnaaagaagatcaattgaatgctgcacagaaaggaacgantgtaataatagacctacaccctacactgcctanattgaaaaacagagattttgnnganggacctatncaccanagggctttacttatatctgtgactgtntgcncttggctcttggancttatcatatnattnnggtnctnccggnataaangacaanaaaccanacctcnatacagcnttgggtnanaacaggatgaaacttacattcctnctgnagaatcnctgagagacttattngagcagnctcanagctcangangtggatcaggcctccctctngtggtccaaatgactatanctaancacattcagattggnggnacanttttggnaaaagggcccntnttggggatgtttggatggnaaaattggccgtggccaaaaggttgcttntgaaaagttgttttttaaccccaaangnaagcncggttggttcngggnagncncaaaatttncnggacnntgttggtgaaggattaaaaccnttttggggttcattgntgcaanattcaaagnganagggntcttggacccantttttncttncccggccnggcccctgngctttctatncanggaaaccngcnttgccncnttgntttattaacct

SEQ ID NO: 302 - DNA, 881 bp, Homo sapiens
  misc_feature 589, 648, 656, 659, 665, 699, 704, 707, 758, 759, 764, 796,805, 812, 816, 824, 828, 830, 833, 835, 838, 842, 849, 851,857, 863, 865: n = A,T,C or G
agtcgacgactactatagggcgaattggagctccccgcggtggcggcccgcccgggcaggtactttggcctctctgggatagaagttattcagcaggcacacaacagaggcagttccagatttcaactgctcatcagatggcgggaagatgaagacagatggtgcagccacagttcgtttgatctccagcttggtcccctgacaaaagtgtacctcggccgctctagaactagtggatcccccgggctgcaggaattcgatatcaagcttatcgataccgtcgacctcgagggggggcccggtacccagcttttgttccctttagtgagggttaattgcgcgcttggcgtaatcatggtcatagctgtttcctgtgtgaaattgttatccgctcacaattccacacaacatacgagccgggagcataaagtgtaaagcctggggtgcctaatgagtgagctaactcacattaattgcgttgcgctcactgcccgctttccagtcgggaaacctgtcgtgccagctgcattaatgaatcggccaacgcgcggggagaggcggtttgcgtattggggcgctcttccgcttnctcgctcacttgacttcgcttgcgctcggtcgttccggcttgcggcgagccggtattancttacttnaanggcggnaatccgggtattcacaaaatcaaggggataaccncaggnaanaacatgtgagccaaaaggccaccaaaaggccaggaacccgaaaaaaggccnngttgntggcgtttttccataagctccccccccttganaggcttaanaaaaatngacnctcaagtnaaangnggngnaancccnccggctntnaagatncccggngnttcccctggaactcct

SEQ ID NO: 303 - DNA, 874 bp, Homo sapiens
  misc_feature 1, 5, 8, 10, 15, 22, 420, 561, 592, 618, 632, 654, 656, 658,668, 670, 673, 682, 686, 708, 710, 714, 723, 740, 748, 764,769, 772, 777, 778, 789, 792, 794, 795, 796, 804, 816, 820,829, 832, 841, 842, 849, 851, 857, 859, 863, 867: n = A,T,C or G
  misc_feature 870, 872: n = A,T,C or G
ntatnccntntttcncgtaatncgactcactatagggcgaattggagctccccgcggtggcggccgcccgggcaggtactgtgcaatgcctcaggttgcacctgacttatatgctgaactacagaaggcacatttaattttattcaagggtgatttgaattacaggaagttgacaggtgacagaaaatgggagttttctgttccattcatcaggctctgaatggcttccatcctgcaccactctgtacctcggccgctctagaactagtggatcccccgggctgcaggaattcgatatcaagcttatcgataccgtcgacctcgagggggggcccggtacccagcttttgttccctttagtgagggttaattgcgcgcttggcgtaatcatggtcatagctgtttcctgtgtgaaattgntatccgctcacaattccacacaacatacgagccgggagcataaagtgtaaaagcctggggtgcctaatgagtgagctaactcacattaattgcgtttgcgctcactggccggtttccagtcggggaaacctgtcgtgccanctgcattaatgaatcgccaacccccgggganaggccggtttgcgtatttgggcgctnttccgctttcttgnttaactgactcgctttcgcttngncnttcggctgcngngancggtttcancttnaattaaaaggcggaaatacggntnttcnaagaatcangggataccccaggaaanaacatgtnagcaaaaggcagcaanaggcnggnaaccnnaaaaaggcccngtngnnngcgttttncataaactcccncccnctttcgagnttnaaaaaattnnccttaantnataggngngaanaccnacngnct

SEQ ID NO: 304 - DNA, 890 bp, Homo sapiens
  misc_feature 2, 3, 5, 7, 9, 25, 394, 402, 587, 681, 695, 700, 705, 707,747, 755, 758, 766, 772, 782, 787, 795, 799, 804, 816, 819,824, 828, 838, 853, 862, 870, 873, 885: n = A,T,C or G
annantngnatatccactactatanggcgaattggagctccccgcggtggcggcccgaggtaccaggctaaggaggtgctaacactctgactggccctgcaggagagggtggctctttcccctggagacaaagacagggtggctggagactgtgtcaacacaatttctccggtggtatctgggagccagagtagcaggagaagagaagctgagctggggcttccatggttccctctgggtcctaactgagcagttcctccccgcgtacctgcccgggcggccgctctagaactagtggatcccccgggctgcaggaattcgatatcaagcttatcgataccgtcgacctcgagggggggcccggtacccagcttttgttccctttagtgagggntaattgcncccttggccgtaatcatggtcatagctgtttcctgtgtgaaattgttatccgctcacaattccacacaacataccagccgggagcataaagtgtaaagcctggggtgcctaatgagtgagctaactcacattaattgcgttgcgctcactgcccgctttccaagtcgggaaacctgtcgtgccanctgcattaatgaatcggcaacgcccggggagaggcggtttgcgtattgggcgctctttcgctttctcgcttcactggactcgcttcctcggtcntttcggcttgcggngagcngtatnancttaactcaaaggccggtaattccggttatccaaaaaatnaggggatnacncaggaaanaacatntgagcaaaanggccncaaaaggnccgnaaccnttaaaaaggccncgntgctngccnttttccatangcttcggccccctancagcttaanaaaaattnacncttaaattaaanggggg

SEQ ID NO: 305 - DNA, 889 bp, Homo sapiens
  misc_feature 3, 6, 645, 654, 655, 658, 679, 690, 696, 705, 706, 720, 726,747, 748, 760, 801, 806, 807, 816, 818, 825, 826, 833, 835,841, 844, 848, 850, 855, 856, 863, 864, 865, 866, 876, 882,883, 885: n = A,T,C or G
agncgnatacgactactatagggcgaattggagctccaccgcggtggcggcccgaggtactgtcgtctcccaactcccacctacagggcccgggaatcctagggagcggataaaggcctgggagagggagcaagatgggctccgccacgagatccggctgaagtccggctcggcgccggcctcaactgcaagaggaaggcactctctctccccaagctgaaacaccagaagagccacactcggccgctctagaactagtggatcccccgggctgcaggaattcgatatcaagcttatcgataccgtcgacctcgagggggggcccggtacccagcttttgttccctttagtgagggttaattgcgcgcttggcgtaatcatggtcatagctgtttcctgtgtgaaattgttatccgctcacaattccacacaacatacgagccgggaacataaagtgtaaagcctggggtgcctaatgagtgagctaactcacattaattgcgttgcgctcactgcccgctttccagtcgggaaacctgtcgtgccagctgcattaatgaatcggccaacgcgccggggagaggcggtttgcgtattgggcgctttttcgcttcttcgcttaactgactcgcttggctcggtccnttcggctgnnggnagcggtttaactcactcaaanggggtaatacngttatnccacaaaannaggggataacccanggaaanaacatgtgaaccaaaagggcnncaaaaaggcccngaaccgtaaaaaggccgcgtttgctggcgttttttcataancttcnnccccctggncnagcattnnaaaattngncgcttnaanttananggggnnaaacccnnnngacttttaanaaccanncnttct

SEQ ID NO: 306 - DNA, 881 bp, Homo sapiens
  misc_feature 3, 5, 25, 37, 40, 91, 97, 100, 102, 105, 108, 110, 406, 424,547, 551, 612, 630, 643, 654, 659, 660, 662, 663, 664, 670,676, 679, 687, 689, 693, 707, 711, 713, 724, 726, 735, 737,740, 743, 754, 779, 784, 786, 805, 815, 816, 818: n = A,T,C or G
  misc_feature 819, 823, 824, 825, 831, 832, 838, 845, 849, 850, 858, 872,874, 879: n = A,T,C or G
agnanaattttaatttccagcgacncggagctttccnttntggccgccgacgactttgtttgttttttttttttttttcaccttaagggangacttnatntnttnccntntgaccgccacttaaatgaaaatttaaaaatgaataaaaagacatacttctcagctgcaaatattatggagaattggggcacccacaggatgaagagagaaagcagctccctaacttcaaaaccattttggtacctcggccgctctagaactagtggatcccccgggctgcaggaattcgatatcaagcttatcgataccgtcgacctcgagggggggcccggtacccagcttttgttccctttagtgagggttaattgcgcgcttggccgtaatcatggtcatagctgtttcctgngtgaaattgttatccgcncacaattccacacaacatacgagcccgggagcataaagtgtaaagcctggggtgcctaatgagtgagctaactcacattaattgcgttgcgctcactgcccgctttccagtcgggaaacctgnccgngccagctgcattaatgaatcgggccaccccccgggagaggcggttggcgtattgggcgctntttccgctttctcggctnactgactcgctgngctcggcgtcnggtgnngnnnaccggnatcaanctnactcaaangngggnataccggtattccnaaantnagggggatacncnaggaaaaanangtnacnaaaaggccccnaaaggcccaaaccctaaaaaaggcncggtngntgggggttttccaaaagcncccccccctnncnngatnnnaaaatnnccctcnattaaangggnnaacccccngggctttaaaaaanancggtnct

SEQ ID NO: 307 - DNA, 582 bp, Homo sapiens
  misc_feature 7, 25, 33, 39, 53, 78, 85, 91, 148, 237, 259, 284, 314, 322,357, 368, 391, 397, 409, 426, 429, 437, 497, 503, 508, 515,541, 563, 577, 582: n = A,T,C or G
gggatancgctggaaaccggcgaantttgctgnaacgcnccggcggccgaggnacgcgttgcttttcacaatttggcnccgaaantttaanaacgaagctcctgcccctcctaaagctgaagccaaagcgaaggctttaaaggccaanaaggcagtgttgaaaggtgtccacagccacaaaaagaagaagatccgcacgtcacccaccttccggcggccgctctagaactagtggancccccgggctgcaggaatttcnatatcaagcttatccgatacccgtncgacctcgagggggggccccgggaccccanctttttgntccctttaactgaggggttaaatttgccgcccctntgggccgtaantcattggggcaataagcctgggntccctnggggggaaaaantgggtattcccgcctcnacnaattttcnccacaaacaattaccgaagcccggggagcataaaaaaggggtaaaaacccctgggggggnggcccnaaaangaagggnggagctaaacctcaccaatttaaatntggcggttggcgcctccacctngcccccgctttttnccaan

SEQ ID NO: 308 - DNA, 922 bp, Homo sapiens
  misc_feature 4, 85, 108, 176, 179, 188, 195, 214, 410, 434, 470, 483,494, 495, 515, 549, 578, 581, 582, 609, 610, 623, 641, 651,653, 654, 694, 698, 703, 710, 722, 734, 735, 743, 746, 750,779, 794, 795, 803, 811, 813, 819, 825, 826, 830, 870: n = A,T,C or G
  misc_feature 903, 910: n = A,T,C or G
aatnctatagggcgaattggagctccccgcggtggcggccgcccgccaggtactggaggagtgagtccctatgctgaccccaatncttgcagaggtgattctggcggncccttgatagttcacaagagaagtcgtttcattcaagttggtgtaatcagctggggagtagtggtgtntgnaaaaaccanaagcganaagcaggtacctcggccgntctagaactagtggatcccccgggctgcaggaattcgatatcaagcttatcgataccgtcaacctcgagggggggcccggtcccagcttttgttccctttagtgagggttaattgcgcgcttggcgtaatcatggtcatagctgtttcctgtgtgaaattgttatccgctcacaatttcacacaacatacgagccnggagcataaaagtgtaaagcctgnggtgcctaatgagtgagctaactcacattaattgcnttgcgctcactgnccgctttccannccggaaacctgtcgtgccanctgcattaatgaaacgcccaacgcgcggggagangcggtttgcgtattgggcccttttccgcnttnntgcttactgactctctgcgcttcggcnntcggcttgcgggnaagcggtatcaacttcantcaaaaggcngnnattccggttattcccaggaattaaggggattaccccaagnaaangaacnttgttgngccaaaaggccngccaaaaggccnngaaaccgnganaaanggcccgggttgcttgccttttttccatangctccggccccctgnnaagcaatncaaaaatntnatcttnaagtgnnaggnggcgaaacccctccgggattttaaaatacccagccgtttncccttggaagttccttttgcggtttttttttcnaactttncggttaccggat

SEQ ID NO: 309 - DNA, 506 bp, Homo sapiens
  misc_feature 3, 5, 10, 35, 504: n = A,T,C or G
gtntncctantactacttagggcaattggagctcnccgcggtggcggccgaggtaccgcgggagcttctccttgccagtttctcccagcaggaccctcttcttgttttgaaagatggtcggctgcttttggtaggcacgctcagtctgaatgtccgccatcttcccggccgctctagaactagtggatcccccgggctgcaggaattcgatatcaagcttatcgataccgtcgacctcgagggggggcccggtacccagcttttgttccctttagtgagggttaattgcgcgcttggcgtaatcatggtcatagctgtttcctgtgtgaaattgttatccgctcacaattccacacaacatacgagccgggagcataaagtgtaaagcctggggtgcctaatgagtgagctaactcacattaattgcgttgcgctcactgcccgctttccagtcgggaaacctgtcgtgccactgcattaatgaatcgccaccccccgggagangc

SEQ ID NO: 310 - DNA, 916 bp, Homo sapiens
  misc_feature 4, 7, 9, 10, 16, 24, 39, 48, 76, 95, 111, 142, 583, 631,639, 676, 682, 695, 706, 749, 762, 792, 803, 811, 830, 856,859, 871, 879, 885, 889, 892, 901, 905: n = A,T,C or G
cccngtncnnttttgnaaattgcngctccccgcggtttnggccgcccngcaggtacgcgggggaggctcgcggttngagtgcggcgctgggcggntcctaccatggttttngagagaaagacaaagttgtccaagaatctgntgcgcatgaagtttatgcataggggactggctcagaaaccaagaaacaactagaaagaagaaaagaaaatcattagtgaagagcactggtacctcggccgctctagaactagtggatcccccgggctgcaggaattcgatatcaagcttatcgataccgtcgacctcgagggggggcccggtacccagcttttgttccctttagtgagggttaattgcgcgcttggcgtaatcatggtcatagctgtttcctgtgtgaaattgttatccgctcacaattccacacaacatacgagccgggagcataaagtgtaaagcctggggtgcctaatgagtgagctaactcacattaattgcgttgcgctcactgcccgctttccaagtccgggaaacctgtcgtgccagctgcattaatgaatcggccaacgccccgggagaggcngtttgcgtatttgggcgctcttccgctttcttgctcactgactcctgngctcgggncgttcggctgcggcaagcggtatcaacttacttaaangcgggnaataccgggtatncacagaatcanggggataccccaggaaaaaaacaatgtgaaccaaaaaggccanccaaaagggccangaacccgtaaaaaggcccgggtgctggcgntttttccatanggtcccgnccccctggccagcattacnaaaaatcgacccctcaagtaaaaggnggngaaaacccgccnggactttnaagaanccangcntttcccctngaancttccctctgg

SEQ ID NO: 311 - DNA, 1063 bp, Homo sapiens
  misc_feature 2, 4, 6, 7, 10, 11, 13, 20, 23, 24, 30, 32, 33, 34, 35, 39,43, 47, 49, 51, 54, 55, 56, 65, 70, 71, 74, 75, 77, 82,86, 90, 92, 100, 105, 126, 142, 148, 150, 161, 223, 277,280, 290, 359, 371, 378, 382, 383, 405, 418, 424, 426, 445: n = A,T,C or G
  misc_feature 448, 451, 455, 463, 465, 472, 475, 477, 480, 481, 486, 487,490, 491, 496, 498, 499, 503, 510, 537, 548, 556, 558, 568,580, 587, 591, 594, 606, 612, 621, 627, 629, 630, 633, 634,644, 654, 659, 665, 668, 672, 673, 686, 691, 693, 708: n = A,T,C or G
  misc_feature 713, 722, 723, 724, 726, 731, 742, 743, 745, 750, 753, 756,758, 760, 762, 768, 772, 773, 779, 780, 784, 792, 796, 797,825, 826, 835, 844, 845, 848, 853, 854, 856, 864, 872, 873,875, 877, 910, 917, 925, 938, 939, 943, 945, 962, 965: n = A,T,C or G
  misc_feature 977, 978, 983, 996, 998, 1002, 1014, 1015, 1018, 1026, 1028,1029, 1034, 1036, 1037, 1043, 1044, 1046, 1049, 1053, 1061: n = A,T,C or G
cnancnnaanncntgtttcntanngagcancnnnnagcnccancccncnantgnnnataaatatnattannatnnanacccncccncccngnggggggtnggaangcgctccccgcggtttggccnccgcaggtaccaacanaaaccngnccagctcccangctcctcatctatgatgcatccaacatttttcactggcatcccagccaggttcaggggcagngggtctgggacagacttcactctcaccatcagcagcctagagcctgaagatttnagngtattactgncagcagcgtaacaactcgtacctcgggcccgctctagaactagtggatcccccgggctgcaggaattcngatatcaagctnatcgatnccgnnagacctcgagggggggcccggnacccagctttgtncccttnantgagggttaattgccgctnggnganatcnttggacanangttgttnccngnggnnaaaanngannctccngnnccantattttncacaacaacaataccgaacccggggangcaataaaagntggtaaancnctggggggtngccataaatganggagagnctanacnttacaattaatntggcgngggcagcancaactngnncanntagcaaagangggaaaaccnatgtngaggcnaangctnnaataaaatggaanctggncnaacgccccgggggangaggncggattggnnnanatggngaacctcttanncnctttnctngantnantngacccngctnntgcctnnggcncgatatcngganntcgggagagacggggcattaacataatnntaaaagggnggaaaaacnnggnaaacnncngaaactanggggatanncngncggaaagaacaatgttgtgccaaaaagccaccnaaaaggnccaaggancggaaaaagggcnnacgngnaggcgatttttccaaanggncgcgccccatgnncaganagaacataaaacncncgcntattacaaaagnnggngaaaaccncnncggcnannaaaganntnggnaganatccctcngg

SEQ ID NO: 312 - DNA, 614 bp, Homo sapiens
  misc_feature 2, 8, 306, 320, 321, 324, 331, 332, 356, 357, 381, 384, 395,407, 410, 411, 418, 420, 426, 428, 441, 442, 455, 461, 464,476, 487, 495, 498, 499, 511, 517, 519, 531, 538, 540, 548,562, 563, 565, 579, 586, 590, 591, 592, 593, 602: n = A,T,C or G
  misc_feature 603: n = A,T,C or G
gngcgatncttagggcgaattggagctccccgcggtggcggccgaggtacttttttttttttttttttttagagatgggggtttcaccgtgttggccaggctggtctcgaactcctgacctcaagtgatccactcgcctcggcctcccaaagcgctgggatgacaggcgtgagccattgcaccaagacccgataggtctaaggggtctcatttgagtcattgtatataaatttttttttcaatgttttttgtctaaaaaactttagacagggaatgcactctccaattaccttcaactgctacctntccttattttaatnnccnaaaaacnnattttggcctttaacaattttaannaatttaaccccaaaaatttgtttnttnttaaaaaattntttttttatttnggnnggggccnancaaaancnggggggggacccnnggggggggttcanttttcnccncaattttaaccngggtttccccnggaaaacnggnngaaaaaaagtgngggggncnttttcccaattnaaaaaantnggggaaanaaacccttttaaannangggggttttttttnctttttnaccnnnncaaaaaatnnttttttttttt

SEQ ID NO: 313 - DNA, 495 bp, Homo sapiens
  misc_feature 4, 5, 30: n = A,T,C or G
gagnnactacttagggcgaattggagctcnccgcggtggcggccgaggtacgcggggaggaactgctcagttaggacccagagggaaccatggaagccccagctccacttctcttcctcctgctactctggctcccagataccaccggagaaattgtgttgacacagtctccagccaccctgtctttgtctccaggggaaagagccaccctctcctgcagggccagtcagagtattagcaactacttagcctggtacctgcccgggcggccgctctagaactagtggatcccccgggctgcaggaattcgatatcaagcttatcgataccgtcgacctcgagggggggcccggtacccagcttttgttccctttagtgagggttaattgcgcgcttggcgtaatcatggtcatagctgtttcctgtgtgaaattgttatccgctcacaattccacacaacatacgagccgggagcataaagtgtaaagcctgggg

SEQ ID NO: 314 - DNA, 426 bp, Homo sapiens
  misc_feature 2, 3, 4, 8, 9: n = A,T,C or G
gnnnaggnnccgctaatacactacttagggcgaattggagctccaccgcggtggcggccgaggtacgcgggggagctacaacaggcaggcaggggcagcaagatggtgttgcagacccaggtcttcatttctctgttgctctggatctctggtgcctacggggacatcgtgatgacccagtctccagactccctggctgtgtctctgggcgagagggccaccatcaactgcaagtccagccagagtcttttatacagctccagcaataacaactacttagcttggtacctgcccgggcggccgctctagaactagtggatcccccgggcctgcaggaattcgatatcaaagccttatcgatacccgtccgacctcgagggggggggcccccggttacccaagctttttgttccctttaagtggagg

SEQ ID NO: 315 - DNA, 425 bp, Homo sapiens
  misc_feature 2, 3, 7, 286, 341, 423: n = A,T,C or G
gnnaggngccggccgctaatcgactactatagggcgaattggagctccccgcggtggccggccgcccgggcaggtaccaaaatggttttgaagttagggagctgctttctctcttcattcctgtgggtgccccaattctccataatatttgcagctgagaagtatgtctttttattcatttttaaattttcatttaagtgacaatcagttgggagcaaattaaatcctcccttaaggtgaaaaaaaaaaaaaaacaaacaaaaaaaaagtacctcggccgctctanaactagtggatcccccgggctgcaggaattcgatatcaagcttatcgataccgtncgaccctcgaggggggggccccggtacccagcctttttgttcccttttagtggaggggtttaaattgccgccgctttggcgnta

SEQ ID NO: 316 - DNA, 429 bp, Homo sapiens
  misc_feature 2, 3, 4, 27, 37, 38: n = A,T,C or G
gnnnaggtttggaccccttatcgactnctatagggcnnattggagctccccgcggtggcggccgaaggagaaatagaacagtgcaggcaaaagaagaaaggcgcgggctgggtgggaagaggattcggactcgtcacactgcagagcagcagagcgagaaaggatgagaagaggcagagaaggcgacggcagaagaaaaaaggaaaaactgcggccgctctagaactagtggatcccccgggctgcaggaattcgatatcaagcttatcgataccgtcgacctcgagggggggcccggtacccagcttttgttccctttagtgagggttaatttgcgccgcttggccgtaatcatggtcatagcctgtttcctgtggtgaaaattgttatcccgcttcacaaattcccaccaccaacataccgaagccg

SEQ ID NO: 317 - DNA, 440 bp, Homo sapiens
  misc_feature 3, 7, 362, 421: n = A,T,C or G
agngccntatcactactatagggcgaattggagctccccgcggtggcggccgaggtacagaaacattttagaaaaagaaagggaacttcagcaactgggaatcacagaatacctaaggaaaaacattgctcagctccagcctgatatggaggcacattatcctggagcccacgaagagctgaagttaatggaaacattaatgtacctgcccgggcggccgctctagaactagtggatcccccgggctgcaggaattcgatatcaagcttatcgataccgtccgacctcgaggggggggcccggtacccagcttttgttccctttagtgagggttaattgcgccgcttggcgtaatcatggtntaagcctgtttcctgtgtgaaaattgttatcccgctcacaatttccacacaacattacnagcccggggagcattaaaa

SEQ ID NO: 318 - DNA, 412 bp, Homo sapiens
  misc_feature 4, 334, 404, 412: n = A,T,C or G
aggngccctaacactacttagggcaattggagctccccgcggtggcggccgcccgggcaggtactttggcctctctgggatagaagttattcagcaggcacacaacagaggcagttccagatttcaactgctcatcagatggcgggaagatgaagacagatggtgcagccacagttcgtttgatctccaccttggtccctccgccgaaagtgagcggggtacctcggccgctctagaactagtggatcccccgggctgcaggaattcgatatcaagcttatcgataccgtcgacctcgagggggggcccggtacccagcttttgttccctttantgaggggttaattgcgccgcttggtcgtaatcaatgggtcataagcctgttttcctgtgtgaaaattgtntattccgn

SEQ ID NO: 319 - DNA, 424 bp, Homo sapiens
  misc_feature 4, 10, 384, 395, 415: n = A,T,C or G
aggnccctancactacttagggcaattggagctccccgcggtggcggccgcccgggcaggtactttggcctctctgggatagaagttattcagcaggcacacaacagaggcagttccagatttcaactgctcatcagatggcgggaagatgaagacagatggtgcagccacagttcgtttgatatccactttggtcccagagccgaaagtgaatataggatgaggccagttgctacgctgctgacagtaataaactgcaaaatcttcaggctctaggctgctgatggtgaagagtgaagtctgtcccagacccacttgccacttgaacctggcttgggattgcccagtgggcccttgttgggatgcatcaataagattgaaggnagccctggggnagccttggcccagggtttcntggttgggt

SEQ ID NO: 320 - DNA, 423 bp, Homo sapiens
  misc_feature 2, 3, 4, 7, 8, 9, 10: n = A,T,C or G
gnnnggnnnngaccgctaatacgactactatagggcgaattggagctccccgcggtggcggccgcccgggcaggtacttccaggaagtgaagtaaaacctggtcttggttgataggccccaggttggcttggagccattccaggttgagaggcaggagccacagtataattagtaggctgagaagtttgggcagtgtaagtttgtgcaggataattgctcgcctggtacctcggccgctctagaactagtggatcccccgggctgcaggaattcgatatcaagcttatcgataccgtcgacctcgagggggggcccggtacccagcttttgttccctttagtgagggttaatttgccgccgcttggccgttaatcaatgggtcattagcctgtttcctggtgtggaaaattgtttattccgct

SEQ ID NO: 321 - DNA, 430 bp, Homo sapiens
  misc_feature 2, 3, 4, 12, 13, 16, 22, 181, 208, 381, 386, 429: n = A,T,C or G
gnnnaggggccnngcntctctncttagggcgaattggagctccaccgcggtggcggccgccacgctggttttgcatcttcaggagacgctcgtagccctcgcgcttctcctcggccagttcgcggaagaagtggctcacgccttccagagccacatcatcgcggtcgaaatagaagcccanagagaggtaggtgtaggaggcctgcangtacctcggccgctctagaactagtggatcccccgggctgcaggaattcgatatcaagcttatcgataccgtcgacctcgagggggggcccggtacccagcttttgttccctttagtgagggttaattgcgcgcttggccgtaatcatgggtcataggctgtttcctgtgtgnaaatntggttatccggctcacaaattccaccacaaacataacgaagcnc

SEQ ID NO: 322 - DNA, 427 bp, Homo sapiens
  misc_feature 2, 3, 4, 47: n = A,T,C or G
gnnnaggggcggccgctaaacgactacttagggcgaattggagctcnccgcggtggcggccgaggcctttgccttgagtccatccacgctttagcagctgctcctcagcaaacttcatcccacgactcttgacctctggggtggcattcatggtgagaaaaaagtctctatcctcagactctcaccagagaagaagaggtgatatcatccgtcattgctgggtccgctccgcggaaacatgtgccggacctgacttgtgcgccgccatcttcccccgcgtacctcggccgctctagaactagtggatcccccgggctgcaggaattcgatatcaagccttatcgatacccgtcgacctcgagggggggggccccgggtaccccagctttttgttcccttttagtggaggggttaatttggcgccgct

SEQ ID NO: 323 - DNA, 736 bp, Homo sapiens
  misc_feature 5, 41, 98, 139, 149, 151, 181, 183, 199, 202, 204, 215, 221,228, 229, 232, 233, 235, 253, 260, 262, 277, 278, 283, 288,296, 301, 318, 319, 321, 322, 337, 341, 343, 350, 359, 361,362, 427, 448, 449, 455, 456, 496, 517, 518, 524: n = A,T,C or G
  misc_feature 525, 527, 528, 529, 530, 537, 550, 560, 561, 620, 633, 635,647, 656, 659, 667, 676, 677, 680, 690, 691, 702, 725, 734: n = A,T,C or G
ggggnggcgccataatacactcactatagggcgaattgganctccaccgcggtggcggcccgaggtacttttttttttttttttttttttttttaagngatttgcagttagtttattgaaatggaaatgaatttgaggnttcaacagtngnctagcagtttccacatgaaaaaggacaacncnaagtagaagtaaaagntgngnttttcttaggncccccnaaaaaanntannanttttttttgggcccccgnaaaaaananaaaaattcccccccnnaaaanggggngggggggnaaaanattttttttttgggggnngnnaaaaaaaaaaggggngccngnttttttnttttttttngnnccccccccttttttttggggggggggggggggggggggggcccccccccccccccctaaaaaaanttttttttttttaaaaaaaannggggtnntgtttttttttgccccccccctttttttttggggggggtnttttttttttaaaaaaaaaanngggggnntnnnnccccccntttcccccccccnggcccccccnntttttttttttttttcccccccctatttttttgggggggggggggggtaaaaaaaaaangggggtttttttngncccccttttttnccccccctnaanaatttttntaaaaattnnttnaaaaaaaagnnccccccccccngggggggttgggtgttccccccncttttttcnct

SEQ ID NO: 324 - DNA, 431 bp, Homo sapiens
  misc_feature 2, 3, 4, 27, 49, 408: n = A,T,C or G
gnnnaggggccggtatctatacgactnctatagggcgaattggagctcnccgcggtggcggccgcccgggcaggtaccagcagaaacctggccaggctcccaggctcctcatctatggtgcgtccaccagggccactggtatcccagccaggttcagtggcagtgggtctgggatagagttcactctcaccatcagcagcctgcagtctgaagattctgcagtttactactgtcagcagtataataactggcccccgtacacttttggtcaggggaccaagctggagatcaaacgaactgtggctgcaccatctgtcttcatcttcccgccatctgatgagcagttgaaatctgggaactgcctctgtttgtgttgccctgcctgaaataactttctatcccaggagnaggccaaaagttacctcgggccg

SEQ ID NO: 325 - DNA, 698 bp, Homo sapiens
  misc_feature 20, 22, 91, 129, 145, 157, 172, 176, 188, 191, 192, 193,194, 198, 213, 223, 238, 256, 266, 284, 285, 290, 307, 309,310, 311, 318, 319, 332, 333, 344, 349, 359, 385, 386, 391,409, 411, 412, 413, 423, 432, 452, 464, 471, 473, 477: n = A,T,C or G
  misc_feature 479, 480, 481, 493, 500, 514, 516, 540, 552, 573, 574, 577,581, 590, 591, 622, 624, 628, 636, 645, 681, 691, 692: n = A,T,C or G
ggcgaattggagctccaccncngtggcggccgaggtacggataaagatgatgtctttttgttattgtctgtctgttttgtatgtgtctganataagggatagagaggaaacatccgttcaggctaattntaactacattttattnttaaaaaatagnaggaaaaccataacncttntttaaaaagggngtnnnnaaantttttttttggtttntgggggttgngggtttttaaaaaanaaaccccccccaaaaaanggggggtgtntccccccccccaaaaaannggggngtttaaaaaaaaagtgngnnnggggggnnttttaaaaaaaannccccccccaanaaaanggggggggtntttttttttttttttttaaaaaaaannagggnggggttttttttttaaanannngggggggganaaaaaaaangggggggggggggggggtgngggtcccccctnccccccncnaaanannncccccccccccnttctcanttttttttattatntntaaaaatttttccccccccccccntttttttttttnggggggggggggggggcactnnttnttcnttttttttnncaaaaaaaaatttttttttttttttattttntntagngggggggntatttatanttttttatacccccccccccccccttttttttttgngggggggggnnccccct

SEQ ID NO: 326 - DNA, 723 bp, Homo sapiens
  misc_feature 2, 4, 5, 6, 7, 8, 9, 11, 21, 189, 196, 216, 229, 244, 245,246, 252, 253, 259, 275, 276, 282, 284, 291, 297, 325, 326,328, 335, 338, 350, 351, 355, 361, 364, 373, 383, 384, 390,439, 469, 480, 496, 497, 506, 507, 513, 514, 515, 516: n = A,T,C or G
  misc_feature 522, 523, 524, 525, 526, 527, 528, 554, 555, 556, 561, 562,563, 564, 565, 566, 576, 577, 578, 579, 580, 584, 585, 586,587, 590, 591, 595, 603, 604, 614, 617, 618, 620, 632, 633,634, 635, 636, 637, 638, 640, 641, 644, 651, 676, 700: n = A,T,C or G
  misc_feature 701, 711: n = A,T,C or G
gngnnnnnntncacactactnctatagggcgaattggagctccaccgcggtggcggccgaggtacctgcaggcctcctacacctacctctctctgggcttctattttgaccgcgatgatgtggctctggaaggcgtgagccacttcttccgcgaactggccgagggaggaagcgccgagggggctaccnaggcgtnctcctggaaagattgggggncccccccaaaatnttaaaaggaaaaaannnaaaaanncccccncgccccccaaaaaaanngggggntnccccccngggggnatttttttttgggggggggggggggggnntnccccccnggntttggggggggnntttncccccntcnccccccccngggggggggnncccccnttttttttttcccccccctttttttttttaaaaaaaagggggggggggnaaaaaaaaaaaaaaaaaaaacccccccctntttttttttanaaaaaaaagggggggnnttttttttnngggggnnnngggggnnnnnnnaaaaaaaaaaattttttttttttttnnnccccnnnnnncccccccccnnnnncccnnnntgnncccnttataatnnccccgggggnggnngngggggggggggnnnnnnnannttntttttanccccccccccccttttttttttttnggggggggggggcccccccccccnnaaaaaaaaangggggggggggg

SEQ ID NO: 327 - DNA, 745 bp, Homo sapiens
  misc_feature 5, 7, 8, 22, 125, 139, 177, 205, 209, 218, 249, 267, 268,270, 271, 275, 279, 284, 289, 295, 302, 306, 315, 316, 321,338, 341, 342, 356, 357, 365, 367, 370, 372, 383, 398, 419,421, 422, 424, 432, 435, 439, 451, 452, 453, 456, 458: n = A,T,C or G
  misc_feature 470, 471, 473, 479, 481, 485, 492, 494, 499, 501, 502, 511,519, 520, 532, 538, 542, 550, 578, 582, 583, 585, 599, 603,604, 629, 639, 641, 642, 657, 668, 669, 670, 673, 674, 676,679, 691, 693, 702, 703, 708, 712, 715: n = A,T,C or G
tttgngnnacgccatactctantacgactcctatagggcgaattggagctccaccgcggtggcggccgaggtactttttttttgtttgttttttttttttttcaccttaagggaggatttaattngctcccaactgatngtcacttaaatgaaaatttaaaaagtgaagtaaaaagnacattacttctcagcctggcaaattatntatngggaggaanaaaaaaatttttttttttttttggggggggngggggggtataagggggnntnngggntttnccccnctaanaaaaantcccccntttnccccccttnnccccntaaaaaaaaaaaacccnccnnaaaaaaaggggggnngggggggngnttnanaaaaaaaaaanaaaattttttttttnggggggggggggaaaaaaaanannanaaaaaggnggntttntaaaaaaaaaannnggngntgaaaaaaaaanngnggtcgntntaanaaaaatnanataantnntttaaaatngggggggnnttccccccccanaaaaanaggngggggtgncccccccccctctttttttttttttttntacnnanggcccccccctttncctnntttttttttttttttttaaaaaaanagaataattntnnccccccccccttttnttttttttgtnnntanngngancccccccccccncnaaaatatcnncactnttgntgngaaaaatatttcccccccccccccccccct

SEQ ID NO: 328 - DNA, 422 bp, Homo sapiens
  misc_feature 2, 3, 7: n = A,T,C or G
gnnaggngccggccgctatacgactactatagggcgaattggagctccccgcggtggcggccgcccgggcaggtaccaaaatggttttgaagttagggagctgctttctctcttcattcctgtgggtgccccaattctccataatatttgcagctgagaagtatgtctttttattcatttttaaattttcatttaagtgacaatcagttgggagcaaattaaatcctcccttaaggtgaaaaaaaaaacaaacaaaaaaaaagtacctcggccgctctagaactagtggatcccccgggctgcaggaattcgatatcaagcttatcgatacccgtcgacctcgagggggggggcccggtacccagctttttgttccctttagtggaggggtttaaattggcgccgccttggcggtaaatcat

SEQ ID NO: 329 - DNA, 423 bp, Homo sapiens
  misc_feature 2, 3, 4, 8, 20, 256, 286, 419, 422: n = A,T,C or G
gnnnggtncccgaaacactnctatagggcgaattggagctccaccgcggtggcggccgaggtacatgggggtccgtgcgggcagaacccagggcatgaagatccaaaagggcctggttcagctttttctccagggccatggcagctttcatggcgtctggggttttaccccactcatcttcagctggcttcttgatgtcctggaagagagcgcggccgctctagaactagtggatcccccgggctgcaggaattcnatatcaagcttatcgataccgtcgacctcnagggggggcccggtacccagcttttgttccctttagtgaggggttaatttgccgcgccttggcgtaatcattggtcataagcctgttttcctgtgtgaaaaattgtttatcccgctcacaaattcccacacanacnt

SEQ ID NO: 330 - DNA, 775 bp, Homo sapiens
  misc_feature 6, 7, 39, 50, 160, 168, 182, 184, 195, 204, 206, 208, 218,225, 240, 246, 251, 262, 271, 272, 273, 283, 284, 301, 310,321, 322, 342, 348, 359, 361, 377, 384, 391, 392, 407, 411,413, 417, 430, 432, 434, 444, 446, 456, 461, 497, 499: n = A,T,C or G
  misc_feature 509, 511, 518, 519, 520, 522, 523, 525, 527, 530, 537, 551,556, 567, 569, 575, 603, 605, 606, 608, 616, 617, 631, 632,645, 650, 652, 653, 654, 655, 673, 678, 684, 691, 700, 703,710, 717, 729, 730, 770, 774, 775: n = A,T,C or G
ttttgnntgccgctaacactcctatagggcgaattgganctccccgcggnggcggccgaggtacttttttttgtttgttttttttttttcaccttaagggaggatttaatttgctcccaactgattgccacttaaatgaaaatgttaaaaatgaataaanaagtacantaccttttttcaancntggcaaataanaatttaatngngnagaaaatttntgggttnggggtttgggggttntttttnccccntaaaaaaaaantaccccctnnncccccttttnncccccctataaaaaaanccccccccntaaaaaaaaanntttatgggggggtttttttnaaaaanataaaaaaaanantttttttttggggggntgtgtcnaaaaaannctaaaaaaagggggnggtntncccnaaaaaaggggggngntnttaaaaaaangngggggggggntgtanaaaaaataaatatttattttttagggggggggggtngncccccccctntnaaaaaannnannangnggnccccctnattttttttttttnccccnctttccccccntntctacntcttttttttttttttttttgtaaaaananngnaattaatnncccccccccccccnnttttttttttttnatctntnnnncccccccccccccctaanttgtncttaanattattnataataaanatngtttttntattttncccccccccgtnngtctcccccccaaaaaaaaaaaaatttttttttttagttntttnn

SEQ ID NO: 331 - DNA, 634 bp, Homo sapiens
  misc_feature 3, 38, 182, 185, 202, 215, 237, 257, 258, 274, 305, 332,344, 346, 347, 362, 371, 381, 389, 424, 425, 443, 448, 449,457, 458, 463, 466, 472, 475, 487, 490, 496, 497, 502, 503,504, 507, 523, 525, 534, 535, 546, 567, 570, 571, 610: n = A,T,C or G
  misc_feature 624, 633: n = A,T,C or G
tgnttttaccctaacactacttagggcaattgagctcnccgcggtggcggccgagggaccaaggtggaaatcaaacgaactgtggctgcaccatctgtcttcatcttcccgccatctgatgagcagttgaaatctggaactgcctctgttgtgtgccctgctgaataaccttctatcccagnagnagggcccaaagtaaaantaaaaaggggggnttttttttaaaaaacccccccncccccctttttttttttccnngggggggggggggggnggccccccttcccccccgggggggggccccnatttttttttttccccctttttttttnaaaaaagggggngnnaaaaaaaaaaaaaanatccccccntttttttttnaaaaaaangggtttttttttttttggggggggggggggggggnnaaaaaaattttttttttnccccnncccccccnnccctnttncccttnttntccccgggggtnttngggggnntaatnnnggntttttttccccccccntnttttttttnnggggggggggnccccccccaaaaaaaaaaaanggnnggggggggggggggggtttaaaaaaaaaaaaaaaaaaantttttttttttttnttttttttng

SEQ ID NO: 332 - DNA, 710 bp, Homo sapiens
  misc_feature 3, 4, 176, 182, 206, 223, 264, 285, 293, 305, 324, 327, 339,347, 359, 360, 365, 366, 367, 375, 376, 387, 389, 394, 395,396, 398, 410, 411, 413, 421, 422, 425, 429, 436, 466, 467,468, 478, 487, 490, 502, 520, 528, 529, 530, 542: n = A,T,C or G
  misc_feature 543, 544, 552, 553, 554, 555, 556, 558, 578, 581, 594, 604,629, 643, 652, 653, 660, 680, 706: n = A,T,C or G
tgnntgacgccctaatacactactatagggcgaattggagctccaccgcggtggcggccgaggtaccttggtgttacttcctttgaaagatggacattgaaagttaaaaatcagtcactatataggcactgctgtatggaaaacgcattttgtgtttctacaaattgtaagtcggnaaatgnccttttttgtagtatccttcgggncttcccccggggggggncccccttttttttccccccttttttttaaaaaggggggggnaaaaaaaaaaaagcccccccntttttttnaaaaaagggggntttttttttttgggggggnggngggggggttttnaaaaaaantttttttttttnnccccnnngccccccnngtccccccttngnccccnnntncccccggggggnntngggggggnnttngggnttttttncccccccccttttttttttggggggggggnnncccccccccnaaaaaaaanatnttttgggggggntttttaaaaaaaaaaagngaaaaaannntttttttttttnnntttttttnnnnngncccccccccggggggggggnganaaaaaaaaaaaantttttttttnaaaaaaaaaaatttttttttttttnccccccccccccanaaaaaattnnaaaaaanggggggggggggttttttcncccccccccctttttgttggggtggntttg

SEQ ID NO: 333 - DNA, 712 bp, Homo sapiens
  misc_feature 18, 39, 139, 183, 191, 210, 216, 233, 252, 255, 270, 292,323, 324, 382, 413, 433, 468, 486, 487, 488, 489, 494, 495,497, 508, 524, 529, 530, 533, 534, 543, 544, 545, 546, 547,555, 557, 564, 567, 568, 569, 581, 582, 583, 584, 586: n = A,T,C or G
  misc_feature 587, 588, 601, 602, 603, 605, 636, 650, 662, 673, 675, 680,693, 699, 701, 702: n = A,T,C or G
tttgatttcgactcatantactactatagggcgaattgnagctccaccgcggtggcggccgaggtacctgcacaatgtctacccagagatgtttgttcctgacctgacgcccaccttctatggtgccatcaagaacctnggcaccaaccaatgcctggatgtgggtgagtaacaacccgcggngggggaangccccctcaatcaatgggntttttnaaaaaaaaacccccctnccccttttttttggggggngtncccccggcccccttnccccggggatttggggggtttngttttttttcccccccggggggggggggggnntttttttttttttcccccccgggggggggggcccccccttttttttttttcccccccnttttttttttaaaaaaagggggggggggganaaaaaaaaaaaaaaaaaaancccccccccttttttttttaaaaaaaagggggggntttttttttttggggggnnnngggtnntnaaaaaaaaaantttttttttttttttnccccnnggnnccccccccnnnnncccctgtngnccccctnttnnncccccgggggtnnnntnnnggggggggttttnnngnttttttttccccccccctttttttttttttngggggggggggggncccccccccccnaaaaaaaaaananatttntttgggggggggnttttgnannaaaaaaaaaa

SEQ ID NO: 334 - DNA, 761 bp, Homo sapiens
  misc_feature 1, 7, 9, 10, 12, 27, 201, 211, 213, 217, 232, 278, 287, 294,296, 303, 312, 334, 344, 356, 358, 363, 380, 389, 391, 395,399, 406, 413, 419, 420, 435, 439, 451, 458, 466, 467, 471,472, 479, 485, 495, 502, 503, 504, 505, 512, 513: n = A,T,C or G
  misc_feature 526, 537, 539, 547, 562, 563, 564, 566, 587, 590, 608, 619,632, 634, 641, 644, 650, 651, 652, 656, 658, 670, 672, 680,720, 728, 736, 746, 748, 751, 755, 759, 760: n = A,T,C or G
nttttgntnntnctgtccgctaatacnactactatagggcgaattggagctccaccgcggtggcggccgaggtacatatttatgccagaaagcttgacaaacactgaacagtctgtaaaaaaaatggaaaatctcttgaccatcaattcaaataaatataattttaactattttgcagccaatacctaaattttacctttntaatttaaananttanattttttttttttanaaaaaaacccccccccttttttttttttcccccccttttttttttnaaaaaaagncaaaaangncaaaaangtaaaaccnttttttttttgggggggggggncccccccccntttttttttttncnccccnttttttttttttttttnggggggggngntaantatnttcttcncctgggngggggnnttttttttttttccncccnccaaaaaaaaangtgtttngggggggnnaatnnttttttnttatanaaaaaaattnccccccnnnngcccccnnttttttttttttnccccccccccntnggggggtnttttaatacctcctnnncnccccccggggggggggggggnttncccccttttttttttttntcccccccccnttttttttttttnanaaaaaanaangggggnnnggtngngtggccaaaatngntttatttnttttccccccccccctttttttttttaaaaaaaaaaaatnggagggtntttatatntttttttttnangangaanaaannt

SEQ ID NO: 335 - DNA, 729 bp, Homo sapiens
  misc_feature 2, 3, 5, 156, 187, 214, 237, 249, 250, 255, 258, 259, 265,273, 291, 294, 295, 304, 310, 311, 315, 337, 346, 347, 348,350, 364, 366, 379, 381, 398, 416, 419, 430, 434, 436, 441,443, 452, 460, 462, 473, 478, 480, 481, 497, 501, 503: n = A,T,C or G
  misc_feature 512, 521, 522, 523, 525, 527, 548, 556, 562, 572, 586, 587,589, 590, 592, 594, 595, 596, 597, 598, 606, 609, 611, 636,643, 644, 645, 652, 653, 654, 687, 704, 707, 708, 709, 713,714, 728: n = A,T,C or G
gnntntttgacgccctaatacgactcctatagggcgaattggagctccaccgcggtggcggccgaggtactttctttttttgtttgtttttttttttcaccttaagggaggatttaatttgctcccaactgattgtcacttaaatgaaaatttaanaaatgaataaaaaggacataccttctcagcntggcaaaataatttattggggaggggnaaaaaaaaaaaaaattttttttntttttggggggnnggggnttnnaggggnttgggggntttccccccccaaaaaanaannccccccttncccccnntttnccccaaaaaaaaatcccccccnaaaaaaaannnanttttgggggggggngntttaaaaaaaaananaaaaaattttttttttngggggggggggggggggngtnttaaaaaaaangggngnttttnanaaaaaaaangggggggngntaaaaaaaaanggggngnngtttaaaaaaaataanaaananttttaaaanggggggggnnngntnccccccccccaaaaaaaaaangggggggnggggcncccccccccntttttttttttttnnanncncnnnnncccccccnacnantcccccttttttttttttttttttnaaaaaannntaaaaannnccccccccccccccctttttttttttttttttnacacccccccccccccnaannngggnnaaaaataaaaaaant

SEQ ID NO: 336 - DNA, 715 bp, Homo sapiens
  misc_feature 2, 3, 65, 71, 86, 97, 122, 149, 152, 174, 181, 189, 195,222, 227, 242, 255, 260, 272, 292, 294, 299, 300, 311, 320,330, 341, 353, 361, 388, 406, 413, 424, 431, 447, 449, 450,451, 465, 467, 471, 474, 487, 546, 547, 549, 554, 571: n = A,T,C or G
  misc_feature 572, 573, 574, 585, 586, 587, 590, 591, 599, 613, 614, 616,621, 622, 626, 636, 657, 658, 672, 692: n = A,T,C or G
gnntgacgccgtatacactcactatagggcgaattggagctccaccgcggtggcggccgcccggncaggtncacttgaaaccaaanttctaaaactngtttttcttaaaaaatagttgttgnaacattaaaccataacctaatcagtgngtncactatgcttccacacttagcncagaccnttctcacnacattntttacttggggttttttttttcccccnaaaanttttaaaaagggggnttttttttttttnccccntttttttttttncccccaaaaaaaaaaaaaananggggnnttggggggggntttcccccnaaaaaccccnttttttttttngggggggggggnaaaaaaancccccccttaaaaaaatggggggggtntaaaaaaaaaaacccccncctaaanaaaaggggggngcccccnaaaaaaaaaaaaaaancnnnttttttgggggggncngggnttnccccccccccccntttttttttttttttttgggggggggggggggggtttttttaaaaaaaaaggggggggnngntgganaaaaacccctttttttnnnnttttttttttnnnggnntggggggntttttttttttggnngntgtgnnagtntttccccccntttttttctccttttttttannagaccccccccccntttttttaaaaatttttttnccccttttttttttaaaaaaaat

SEQ ID NO: 337 - DNA, 724 bp, Homo sapiens
  misc_feature 2, 4, 6, 8, 158, 165, 178, 196, 213, 214, 224, 230, 231,232, 257, 263, 276, 279, 296, 306, 326, 327, 339, 349, 350,351, 353, 359, 361, 370, 376, 377, 389, 413, 414, 415, 476,500, 512, 518, 579, 589, 600, 634, 635, 666, 669, 672: n = A,T,C or G
  misc_feature 698, 699, 704, 708: n = A,T,C or G
gngngncnccctaatacactcactatagggcgaattggagctccaccgcggtggcggcccgcccgggcaggtacaaccatccagcaggtcccagaacagttttcttctgggctccaattatgaaatgggggttggtgtgtgctggattggctgatgtnggccagnactctgcaggaanaaacttaggcacaaggcntcaatctgtcttggganngggtttttantttttnnnttttagggggggggtgaaaaaaaantttttnggggggggggggngtnccccccctttttttttnaaaaaaaaanccccccccaaaaaaaaaaannttttgggggggnaggggggggnnnanattttnanttttttttntttttnnaaaaaaaaaaanttttttttttttttcacccccccnnngggggggggggggggggggggttttttttttttttccccccccaaaaaaaaaaaaaaaaanggggggggggggtaaaaaaaaaanattttttttaanaaaaanccccccccctttttttttttttttccccccccccaaaaaaaaaaaaaaacccccccccccnattttttttnttattttgggngggggggggggggttttttttttttttttttaannttttaaaaaaaatttttttttttttattttnttnttnaaaaaaaaaaaaaaattttttttttnntgttntgtngggcccccccccccct

SEQ ID NO: 338 - DNA, 449 bp, Homo sapiens
  misc_feature 2, 3, 4, 5, 9, 11, 37, 411: n = A,T,C or G
gnnnngccnancactacttagggcgaattggagctcnccgcggtggcggccgccacgctggttttgcatcttcaggagacgctcgtagccctcgcgcttctcctcggccagttcgcggaagaagtggctcacgccttccagagccacatcatcgcggtcgaaatagaagcccagagagaggtaggtgtaggaggcctgcaggtacctcggccgctctagaactagtggatcccccgggctgcaggaattcgatatcaagcttatcgataccgtcgacctcgagggggggcccggtacccagcttttgttccctttagtgagggttaattgcgcgcttggccgtaatcatggtcataagctgtttcctgtgtgaaattgttatcccgctcacaatttccacacaacatacgnagcccggggagcataaaggtgtaaaagcctgggggtgc

SEQ ID NO: 339 - DNA, 454 bp, Homo sapiens
  misc_feature 5, 34: n = A,T,C or G
agccnaacactactatagggcgaattggagctcnccgcggtggcggccgatacctcaccgtggctgctgtcttccgtggtcggatgtccatgaaggaggtcgatgagcagatgcttaacgtgcagaacaagaacagcagctactttgtggaatggatccccaacaatgtcaagacagcccgtctgtgacatcccacctcgtggcctcaagatggcagtcaccttcattggcaatagcacagccatccaggagctcttcaagcgcatctcgggagcagttcactgccatgttccgccggaaggccttcctccactggtacctcggccgctctagaactaggtgggatcccccgggctgcagggaattcggatatcaaaggcttatcgatacccgtccgaccttcgaggggggggggcccccgggtaccccaactttttgttccctttttagtgga

SEQ ID NO: 340 - DNA, 447 bp, Homo sapiens
  misc_feature 1, 7, 381, 443: n = A,T,C or G
ngcctancactacttagggcgaattggagctccccgcggtggcggccgggtcgagaggtggttacattcgttgaaggacaccagctgcggaatttgcggctttggcagattgaaatcatggcaggtccagaaagtgatgcgcaataccagttcactggtattaaaaaatatttcaactcttatactctcacaggtagaatgaactgtgtacctcggccgctctagaactagtggatcccccgggctgcaggaattcgatatcaagcttatcgataccgtcgacctcgagggggggcccggtacccagcttttgttccctttagtgagggttaattgcgcgcttgggcggtaatcatgggtcattagcctgtttcctgtgtnaaaattgttatccgctcacaaatttccacaccaacataccgaagccggggagcattaaaaantggt

SEQ ID NO: 341 - DNA, 450 bp, Homo sapiens
  misc_feature 2, 3, 4, 8, 10, 405: n = A,T,C or G
gnnngccnancactacttagggcgaattggagctccccgcggtggcggccgaggtacacactttcatttagtaattaaattttagtcagattttgcccaacctaatgctctcagggaaagcctctggcaagtagctttctccttcagaggtctaatttagtagaaaggtcatccaaagaacatctgcactcctgaacacgccctgaagaaatcctgggaattgaccttgtaatcgatttgtctgtcaaggtcctaaagtacctgcccgggcggccgctctagaactagtggatcccccgggctgcaggaattcgatatcaagcttatcgatacccgtcgacctcgaggggggggcccgggtacccagctttttgttcccttttagtggagggtttaaattggcgncgcttggccgtaatcatgggtcattaagctgtttccctgtggtgc

SEQ ID NO: 342 - DNA, 471 bp, Homo sapiens
  misc_feature 2, 4, 7, 13, 203, 206, 227, 284, 425: n = A,T,C or G
gngngcnccctancgactacttagggcgaattggagctccccgcggtggcggccgcccgggcaggtacatccccagtcgtggccctctggacaagtggcgggccctgcactcatgagggcttccaatgtgctgcccccctcttaatactcaccaataaattctacttcctgtccaagaaaaaaaaaaaaaaaaaaaaaaaaangtnccgtccggtgtaatggcggcncggtggagctctaggtgatgtttgcagacagaaaaagtaaactgtcaaggaattcanagcattgggtacctcggccgctctagaactagtggatcccccgggctgcaggaattcgatatcaagcttatcgataccgtcgacctcgagggggggcccggtacccagcttttgttccctttagtgagggttaattgcgcncttggccgtaatcatggtcataagctgtttcctgtgtgaaattgtt

SEQ ID NO: 343 - DNA, 472 bp, Homo sapiens
  misc_feature 2, 10, 332, 468: n = A,T,C or G
gnagatcccnaacatacttagggcgaattggagctccccgcggtggcggccgcccgggcaggtaccaaaatggttttgaagttagggagctgctttctctcttcattcctgtgggtgccccaattctccataatatttgcagctgagaagtatgtctttttattcatttttaaattttcatttaagtgacaatcaagttgggagcaaattaaaatcctcccttaaggtgaaaaaaaaaaaacaaacaaaaaaaaaagtacctcggcccgctctagaactaagtggatcccccgggctgcaggaattcgatatcaagcttatcgataccgtcnacctcgagggggggcccggtacccagcttttgttccctttagtgagggttaattgcgccgcttggcgtaatcatgggtcatagctgttttcctgtggtggaaatttgttaatccgcttcacaatttccacaccaanttac

SEQ ID NO: 344 - DNA, 469 bp, Homo sapiens
  misc_feature 2, 7, 9, 36: n = A,T,C or G
gngagcnancactactatagggcgaattggagctcnccgcggtggcggccgcccgggcaggtaccaggcgaagttggtgccaacactccgactggccctgcaggagagggtggctctttcccctggagacacagacagggtggctggagactgcgtcatcactatttctccagtggtatctgggagccagagtagcaggagggaagagaagctgcgctggggcttccatggttccgtctgggtcctaactgagcagctcctcccccgcgtacctcggccgctctagaactagtggatcccccgggctgcaggaattcgatatcaagcttatcgataccgtcgacctcgagggggggcccggtacccagcttttgttccctttagtgaagggttaattgcgcgcttggcgtaatcatggtcatagctgtttcctgtgtgaaattgttatccgctcacaattccacacaac

SEQ ID NO: 345 - DNA, 450 bp, Homo sapiens
  misc_feature 3: n = A,T,C or G
agnccctaacgactacttagggcgaattggagctccccgcggtggcggccgaggtactttttcttttttgtttgttttttttttcaccttaagggaggatttaatttgctcccaactgattgtcacttaaatgaaaatttaaaaatgaataaaaagacatacttctcagctgcaaatattatggagaattggggcacccacaggaatgaagagagaaagcagctccctaacttcaaaaccattttggtacctgcccgggcggccgctctagaactagtggatcccccgggctgcaggaattcgatatcaagcttatcgataccgtcgacctcgagggggggcccggtacccagcttttgttccctttagtgagggttaattgcgccgcttggccgtaatcatggtcataggctgtttccctgtgtgaaaattgttatcccgctcacaata

SEQ ID NO: 346 - DNA, 450 bp, Homo sapiens
  misc_feature 9, 15, 20, 25, 41, 70, 99, 100, 105, 189, 389, 413: n = A,T,C or G
ccgccttcngcactnttccnatacngcgaattgtatttccncgaggtgccggccgaggtacttttttttntttgtttttttttttttcaccttaaggtnngattnaatttgctcccaactgattgtcacttaaatgaaaatttaaaaatgaataaaaagacatacttctcagctgcaaatattatgganaattggggcacccacaggaatgaaagagagaaagcagctccctaacttcaaaaccattttggtacctgcccggggcggccgctctagaactagtggatcccccgggctgcaggaattcgatatcaagcttatcgataccgtcgacctcgagggggggcccggtacccagcttttgttccctttagtgagggttaattgcncgcttggccgtaatcatggtcatnaggctgtttcctgtgtgaaattgttatccgctcacaa

SEQ ID NO: 347 - DNA, 455 bp, Homo sapiens
  misc_feature 2, 4, 37, 208: n = A,T,C or G
gnangccctatcatactatagggcgaattggagctcnccgcggtggcggccgcccgggcaggtactccaggcgagaggcggacgcgagtcgtcgtggcaggaaaagtgactagctccccttcgttgtcagccagggacgagaacacagccacgctcccacccggctgccaacgatccctcggcggcgatgtcggccgccggtgccccnaggcctgcgggccacctaccaccggctcctcgataaagtggagctgatgctgcccgagaaattgaggccgttgtaccgtatataaaagacaattgctcacaatgatagcactgaagcactgagagatatcaaagtacctcggccgctctagaactagtggatcccccgggctgcaggaattccgatatcaagcttatccgatacccgtcgacctcgaggggggggcccggtacccagctttttgttt

SEQ ID NO: 348 - DNA, 456 bp, Homo sapiens
  misc_feature 1, 10, 13, 28, 46, 51, 100, 101, 217, 221: n = A,T,C or G
ncccgccttnacncacttttactatacngcgaattgttttccccgnggtgncggccgcccgggcaggtacacgggagatgaaggtgcgcatcctctccgnncgtaagaagcctctggacattgactacatgggggaggaacagctccgggagaaagcccaggagctgtcggactggatccaccagctggagtctgagaagttcgaccttgatgggcnaaancctgaaacagcaagaaaatatgagatcaacgtgctgtacctcggcccgctctagaactagtggatcccccgggctgcaggaattcgatatcaagcttatcgataccgtcgacctcgagggggggcccggtacccagcttttgttccctttagtgagggttaattgcgcgcttggcgtaatcatggtcattagctgtttcctgtgtgaaaattgttatccgctcacaattccacac

SEQ ID NO: 349 - DNA, 459 bp, Homo sapiens
  misc_feature 2, 5, 6, 40, 70: n = A,T,C or G
gnagnngccctaacgactacttagggcgaattggagctcnccgcggtggcggccgcccgggcaggtaccntgcagaaacctggccaggctcccaggctcctcatctatggtgcatccaccagggccactggtatcccagccaggttcagtggcagtgggtctgggacagagttcactctcaccatcagcagcctgcagtctgaagattcttgcagtttactactgtcaagcaagtataataactggcccccgtacctcggccgctctagaactagtggatcccccgggctgcaggaattcgatatcaagcttatcgataccgtcgacctcgagggggggcccggtacccagcttttgttccctttagtggagggtttaattgcgcgcttgggccgtaatcatgggtcataagcctgttttcctgtgtgaaaattgttatcccgctcacaattccacaca

SEQ ID NO: 350 - DNA, 452 bp, Homo sapiens
  misc_feature 1, 5, 18, 92: n = A,T,C or G
ngttngcccgtacgactnctatagggcatttggagctccccgcggtggcggccgaggtacctagaatatcaacagagtcttttaaatgaaantgatggaaaatcaagatggttctactcaccgtggttgttggtagaatgttacatgtatcgaagaattcatgaagcaattatccagagtccaccaatcgattactttgatgtatttaaagaaatcaaaagagccaaaatttctatgggtcacaggaatccatcattgctttatgtacctcggccgctctagaactagtggatcccccgggctgcaggaattcgatatcaagcttatcgataccgtcgacctcgagggggggcccggtacccagcttttgttccctttagtgagggttaattgcgccgcttggccgtaatcatgggtcattaggctgtttccctgtgtgaaaattgttatcc

SEQ ID NO: 351 - DNA, 439 bp, Homo sapiens
tatcactacttagggcgaattggagctccccgcggtggcggccgaggtacacaaactgttcaatcttctcaaagtgatggactcggaagatgccacgggtgtcacggccatgggagcccacctcctgacggaagcaggtagacaggccagcatacttgatgggcaggtcctccggccgctctagaactagtggatcccccgggctgcaggaattcgatatcaagcttatcgataccgtcgacctcgagggggggcccggtacccagcttttgttccctttagtgagggttaattgcgcgcttggcgtaatcatggtcatagctgtttcctgtgtgaaattgttatccgctcacaattccacacaacatacgagccgggagcataaagtgtaaagcctggggtgcctaatgagtgagctaactcacattaattgcgttgc

SEQ ID NO: 352 - DNA, 437 bp, Homo sapiens
ctatcactacttagggcgaattggagctccccgcggtggcggccgcccgggcaggtacgcggggatccagaatacatttccaacaagagcactggccaagtcagcttcttctggagagtctctagaagacatgatgctacactcagctttgggtctctgcctcttactcgtcaagtttcttccaaccttgccattgcaataaaaaaggaaaagaggcctcctcagacactctcaagaggatggggagatgacatcacttgggtacctcggccgctctagaactagtggatcccccgggctgcaggaattcgatatcaagcttatcgataccgtcgacctcgagggggggcccggtacccagcttttgttccctttagtgagggttaattgcgcgcttggcgtaatcatggtcatagctgtttcctgtgtgaaattgt

SEQ ID NO: 353 - DNA, 486 bp, Homo sapiens
  misc_feature 319, 343, 387, 390, 421, 429, 433, 447, 452, 453, 457, 458,459, 466, 470, 471, 472, 476, 480, 485: n = A,T,C or G
cctatcactacttagggcgaattggagctccccgcggtggcggccgaggtactttttgtttgtttttttttttttttcaccttaagggaggatttaatttgctcccaactgattgcacttaaatgaaaatttaaaaatgaataaaaagacatacttctcagctgcaaatattatggagaattggggcacccacaggaatgaagagagaaagcagctccctaacttcaaaaccattttggtacctgcccgggcggccgctctagaactagtggatcccccgggctgcaggaattcgatatcaagcttatcgataccgtcngacctcgaggggggggcccgggtncccaacttttttggttcccctttaagtgggggggttaattggcnccncttggccgtaaatcaatggggcaatagcttntttccctngggnggaaaatttggttnttccnnctcnnnaattttncccnnncaanattntcccnc

SEQ ID NO: 354 - DNA, 467 bp, Homo sapiens
  misc_feature 2, 3, 4, 5, 6, 7, 357, 413, 423, 425, 446, 455, 462, 467: n = A,T,C or G
gnnnnnngggccctatcactacttagggcgaattggagctccccgcggtggcggccgaggtactttttttttgtttgttttttttttttcaccttaagggaggatttaatttgctcccaactgattgcacttaaatgaaaatttaaaaatgaataaaaagacatacttctcagctgcaaatattatggagaattggggcacccacaggaatgaagagagaaagcagctccctaacttcaaaaccattttggtacctgcccgggcggccgctctagaactagtggatcccccgggctgcaggaattcgatatcaagcttatcgataccgtcgacctcgagggggggcccggtacccancttttgttccctttagtgagggttaattgcgcgcttggcgtaaacatgggcaaaanctgtttcctngnggaaattgtttttcccctcanaaatttccnaaaaaantacgn

SEQ ID NO: 355 - DNA, 435 bp, Homo sapiens
  misc_feature 4, 109: n = A,T,C or G
actnctatagggcgaattggagctccccgcggtggcggccgaggtaccagcagaaacctggccaggctcccaggctcctcatctatggtgcatccaccagggccactgnatcccagccaggttcagtggcagtgggtctgggacagagttcactctcaccatcagcagcctgtagtctgaagattctgcagtttactactgtcagcagtataataactggcccccgtaactgcccgggcggccgctctagaactagtggatcccccgggctgcaggaattcgatatcaagcttatcgataccgtcgacctcgagggggggcccggtacccagcttttgttccctttagtgagggttaattgcgcgcttggcgtaatcatggtcatagctgtttcctgtgtgaaattgttatccgctcacaattccacacaacata

SEQ ID NO: 356 - DNA, 839 bp, Homo sapiens
  misc_feature 10, 12, 17, 19, 21, 23, 25, 28, 29, 31, 32, 34, 37, 41, 43,45, 46, 51, 57, 58, 60, 61, 64, 67, 69, 71, 77, 80, 81,88, 104, 106, 108, 110, 113, 116, 120, 124, 125, 147, 241,242, 284, 301, 318, 326, 330, 336, 347, 348, 350, 377, 390: n = A,T,C or G
  misc_feature 418, 431, 433, 445, 448, 450, 453, 461, 475, 497, 501, 519,522, 523, 525, 531, 541, 547, 561, 563, 566, 573, 577, 582,584, 594, 602, 603, 608, 609, 615, 616, 622, 624, 636, 644,646, 664, 665, 667, 668, 675, 682, 686, 690, 702, 709: n = A,T,C or G
  misc_feature 717, 720, 725, 728, 729, 731, 733, 734, 737, 740, 741, 751,771, 779, 780, 781, 784, 786, 788, 794, 801, 809, 814, 830,838: n = A,T,C or G
ctctcttttntntaacnantntntntanngnntnatntttntntnnttaantgtttnntnnttntgncntnttatantcnntgtatancttttattattatttntnantnttnatntatnagcnngacttgttctggcgcgcgtatncgactcactatagggcgaattggagctccaccgcggtggcggccgcccgggcaggtacacagtaaacagcattcctcacttcgctgaacagcannaggcaactcgtttctaagttccaagctcactcttcatagagnctatccaccttgggctngacagcttaaaggatgntctccagncgcnactgtnctttcccccannanttcaatctttaaaaaattggacccggnttacctctttttnggcttattgtttagcttccttgctccanagaaaattaattnangttattccaagnaananctnggtattgnttcttattctctcnacggccaacctctttaaaaaantaanccccgccggtttggattnaanntnttggtnggaaccttgngggggnaattccttttgggncnggnccactgnaagnggccncnaggcaacctnttttttcnncttannctttcnnccttcngncctttttggccnggttactntnttctttcaaaaattggtnngnnaataccncccaaantttnccanggggaaaaccanaatttcnaccctttnccnttttncgnnanannggngannaccccctttnttttcacctttcattttgcncacaccannngtntnantccccntatccangggtaccngggcnttataaccaatttttnccccggcng

SEQ ID NO: 357 - DNA, 473 bp, Homo sapiens
  misc_feature 241, 306, 308, 344, 351, 381, 396, 410, 416, 418: n = A,T,C or G
atagggcgaattggagctccaccgcggtggcggccgaacgtccggggccagttattatactgctgacagtaataaactgcaaaatcttcagactgcaggctgctgagggtgagagtgaattctgtcccagacccactgccactgaacctggctgggataccagaggccctggtggaggcaccatagatgaggagcctgggagcctggccaggtctctgttggtacctgcccgggcggccgntcgactgttggacttgaaccagcgcgcgttcaagaagtttgccgggcaaccgcaccagcgccttngncgaacttcgaccggccagccctgcgccccctgccgncgggtgncgcatgcccattcgcgcgcttcaaacccgnacgcgttcaacattngatttaccaccgtnaagctntnacggccacttactacttcggtgcccgcttcttagaaacttagttggaaccccccc

SEQ ID NO: 358 - DNA, 457 bp, Homo sapiens
  misc_feature 3, 4, 5, 40: n = A,T,C or G
ggnnncgccgaaacactactatagggcgaattggagctcnccgcggtggcggccgaggtacctgaggcaccaaggtggccttcgctctcttgacatcttggtcgtctgcgtccggcgctttcctcttgacggactgaggcgctgaactggcggacgaaccctggctggcttccttcgcgcctttcagctcggccactttctctcggtgctgctttcccaggacgtgagtctgccacaggagctcgctcttaaccggagtgttacacagggcacaactcagctgccccaaacggttgtacctgcccgggcggccgctctagaactagtggatcccccgggctgcaggaattcgatatcaagcttatcgatacccgtcgacctcgaggggggggcccggtacccaagctttttgttccctttagtgagggtataaatttgcgccgcttggccgtaaaca

SEQ ID NO: 359 - DNA, 758 bp, Homo sapiens
  misc_feature 3, 5, 7, 8, 9, 10, 12, 17, 20, 26, 32, 35, 36, 39, 43, 44,48, 54, 56, 57, 59, 60, 65, 66, 70, 82, 86, 89, 91, 95,98, 104, 296, 327, 329, 339, 344, 347, 371, 374, 379, 388,408, 417, 418, 426, 432, 438, 447, 458, 490, 495, 497, 501: n = A,T,C or G
  misc_feature 519, 521, 523, 532, 553, 555, 561, 563, 567, 575, 576, 577,583, 587, 624, 630, 634, 637, 646, 650, 668, 688, 705, 706,709, 715, 733, 737, 743, 748, 754, 756, 758: n = A,T,C or G
ttncntnnnntnttttntantatacntttttnatnntgntacnnttantatatntnntnnatctnnttantcattaatatanaatnatntntaanatnattagnttggatgaccctatacgatcatatagggcgaattggagctccaccgcggtggcggccgcccgggcaggtacgggggccagttattatactgctgacagtagtaaactgcagaatcttcagactgcaggctgctgatggtgagagtgaactctgtcccagacccactgccactgaacctggctgggataccantggccctggtggatgcaccattagatggagngnagcccttggngagcnctnggccaaggattttcttgcttgggntanccctncgggcccgnttcttagaaaacttatgttnggtattccnncccggggncttgcnaagtgnaaatttcgnaataattccanaagccttttatacggtattaacccccggatcngaacncnttcntaaggggggggggggggncncnccggggttnaccccccaaagaccttttttntnggtttncncccnttttttannnattggnaagnggggttttaaaaatttttggccgcccgcccttttggngcccgnttanaantcccaattngggngttccaaattaaaggccnttgggtttttaccccttggnaggattggcaaaaaatnntgntttaanttccccggcctttcaacnaaantttttncccanccaacnanan

SEQ ID NO: 360 - DNA, 463 bp, Homo sapiens
  misc_feature 3, 4, 11, 22, 99, 139, 184, 200, 217, 272, 306, 311, 325,354, 372, 394, 456: n = A,T,C or G
tcnncggcctngaatacgactnctatagggcgaattggagctccccgcggtggcggccgcccgggcaggtacttttttttttttttttttttttttttnggcacagtatctcactctatcagccaggctggagtgcggnggcatgatcaccgctcactacagccttgaactccttggctcaggngatcctcccacctcancctcccaagtagctacnactacaaatgcgtgccaccacaccgggtaatttttttggattttttgtagggacnaggtttcaccatattgcccaggctgtatcccctntttanactcatgcactctntgtggagcaggaactacactactctaagngattctgattctcctctnaaatcccatcggtcaccccaanaaaagcactcactacaattctttcccataaggagaaataattatcccccaggttattcaggncatttgc

SEQ ID NO: 361 - DNA, 464 bp, Homo sapiens
  misc_feature 6, 9, 10, 11, 179, 195, 201, 224, 237, 311, 346, 356, 379,392, 398, 439: n = A,T,C or G
tttacnacnnngtaatacgactactatagggcgaattggagctccccgcggtggcgcggccgcccgggcaggtactttttttttttttttttttttttgtccatctgcccagttttattgggaacaagggcattataactgctatcaaagagaagggagcccaagggctccttctgtancaagatccttcttcanagtttnagccagggctgggagggtaaganacccttttttcangcagggtcacactaccaccctcagcatgacttccccaaaaagttatcctcctttagctcagcacttggcacttnaggaagaaaggaccaacaaaggttgcattaggaanacaagcccanatttatcagggatacccactcanccaactgctttantgcttnttcatcttcatccacttttggaagcttggccctgccggcantatgagtttaaggttcccttcggcc

SEQ ID NO: 362 - DNA, 450 bp, Homo sapiens
  misc_feature 9, 426, 432: n = A,T,C or G
atacgactnctatagggcgaattgggtaccgggccccccctcgaggtcgacggtatcgataagcttgatatcgaattcctgcagcccgggggatccactagttctagagcggccgcccgggcaggtcgagctccggcgcacgatgcagaacctggagatctcgctcttgccgctctgcaccagttcgctgttggtggccacctcgcggttcagctcctctgtcttggtgaagaaccaatcttcggcatccttgcggcggacgcgtgggtcgactcacctcggccgccaccgcggtggagctccagcttttgttccctttagtgagggttaattgcgcgcttggcgtaatcatggtcatagctgtttcctgtgtgaaattgttatccgctcacaattccacacaacattaccgaagccggaagcatnaaagtntaaaagcctgggggtgcc

SEQ ID NO: 363 - DNA, 474 bp, Homo sapiens
  misc_feature 4, 5, 7, 8, 31, 380: n = A,T,C or G
ttcnncnnccttgaaacgactactataggtngaattggagctccaccgcggtggcggccgaggtactccatcgcctgctgcttcagcttctgcagctccctagtggccccacagctgcggccgccgccttcttcctccatgatgaaaacatctgagactcagggctaagcaccttgcccaaggccacacaacaagtaggtgatggagagtgttggcgtgtacctgcccgggcggccgctctagaactagtggatcccccgggctgcaggaattcgatatcaagcttatcgataccgtcgacctcgagggggggcccggtacccagcttttgttccctttagtgagggttaattgcgcgcttggcgtaatcatggtcatanctgtttcctgtgtgaaattgttatccgctcacaattccacacaacatacgagccggggagcattaaaagtgttaagccttgggggtgccctaaa

SEQ ID NO: 364 - DNA, 456 bp, Homo sapiens
  misc_feature 1, 3, 4, 8, 61, 62, 191, 209, 290, 295, 305, 365, 408, 419,442: n = A,T,C or G
ncnncgtnactactactatagggcgaattggagctccccgcggtggcggccgaggtaccanngacctctaactccccctgacacagagcaattagactcccataacaatggtatcaattataccactccattggagggacttcctttatgtgtcacccaggatacattgctcaactgcagttgccttgcantttgatcccaagcatggntgagttaccataaaaaaattatgtacctcggccgctctagaactagtggatcccccgggctgcaggaattcgatatcaagnttatngataccgccnacctttagggggggcccggtacccagcttttgttccctttagtgagggttaatatgcgcngcttggccgtaatcatggtcatatgctgtttcctgtgtgaaantgtttatccgntcacaattttcacacaacatacnatgccggggagcat

SEQ ID NO: 365 - DNA, 850 bp, Homo sapiens
  misc_feature 2, 4, 7, 13, 14, 26, 31, 35, 39, 40, 44, 45, 51, 61, 64,72, 75, 77, 78, 84, 85, 88, 91, 101, 115, 121, 125, 130,132, 134, 199, 308, 311, 319, 327, 359, 368, 371, 376, 419,455, 456, 460, 463, 470, 473, 475, 478, 479, 483, 497, 524: n = A,T,C or G
  misc_feature 530, 534, 554, 558, 563, 591, 594, 596, 598, 600, 601, 622,639, 645, 648, 652, 655, 658, 660, 661, 668, 671, 696, 713,721, 727, 736, 737, 741, 745, 760, 770, 774, 775, 777, 793,794, 799, 806, 815, 817, 819, 822, 823, 828, 829, 845: n = A,T,C or G
  misc_feature 846, 848: n = A,T,C or G
cntnctnactttnntatattataaantatgntaanaatnntgannttcatngaatttatanatnataataanttntnnaatctnnatnatntttttcattnattttattattttnggatancgtntggcncncncctatacgactcactatagggcgaattggagctccaccgcggtggcggccgcccgggcaggtacnagacagagtcaccatcacttgccggtcaagtcagacgatatctatgcacagtctgcgagctgaaaacggaccctcacttttggccgggggaccaagctgaagatcaacncgnaacctgtngtgctgcnccaatctggttctttaatcattccccgcccantcttgatgnagncacgntatgaaaaatcctgggaaactggccctactggtttgttgttgnccatgtcttgaaaattaaacctttcttatccccaannaagnagngcctcanaangnatnncgcnttctgtgtcaccgnctttccttatggaaaaccttaatgttngtgtantacnccccccactgtgggtccttngtcnaatgnggtaaaatttttccggaatttaattacnaanangncnntttaatttccgggattttacnccggttaccggtaacanctttcngtnaagntgnggngnnggggggnccncccccgttgttttaaccccccccanggcccttgtattttggntttctccncccctnttctttaannttgnaaanggggggggtatatanaaaattatgngtcnngnccggcccttttggtgnnccggnttaatanttccaattngngnttnncaatnnaagtccctttggtttnntncg

SEQ ID NO: 366 - DNA, 565 bp, Homo sapiens
  misc_feature 9, 16, 263, 282, 298, 339, 353, 359, 369, 370, 391, 401,408, 421, 432, 436, 446, 448, 451, 456, 461, 462, 463, 473,482, 487, 492, 497, 504, 513, 514, 515, 517, 527, 540, 542,545, 547, 551, 553, 554, 555, 560, 561, 562: n = A,T,C or G
ggggcccgnaacactncttagggcgaattgggtccgggccccccctcgaggtcgacggtatcgataagcttgatatcgaattcctgcagcccgggggatccactagttctagagcggccgcccgggcaggtacttcctgtggaactccctggagatgaagccatgttcgtcctggcgctcttcgtgcttgccgtgcacctcaatcacgtttcccagaaccttgactttgagttcctctggagagaagtgcttcaccgtccagnttcacaggagaaccctgtncttttccatacgcatnttctgaatagcccagtgttcaattccaactagggtgccccncaagggaaagggangggtgngtccaaaaanngtaaaaaaagggggccttcangggaaaaatnggtcttntaaaaaataaaanaaagggtttanaaanctttcaaaananggnggccnttctnnnaaaaaaaaantgtgggttnaaaanaaaanggccnggttttnggggggggnnntnggaaaaaggnaaaaaaaaaaggngntcncncccntnnnatccnnnggg

SEQ ID NO: 367 - DNA, 449 bp, Homo sapiens
  misc_feature 192: n = A,T,C or G
gtatacactactatagggcgaattggagctccccgcggtggcggccgcccgggcaggtacagatgtcaccggcagcatagatatcaggaagggatgtgtgcatatgatcatccactttcaggccaccatcttcccctagatcaaaactgttaccatggagaaaaggttctacatttggtgtaactcctgtancactgacaatgaaagcgcagccatatatcttttcattggtcaattccacatagacaggccacatctctgtatcggctgtaactgacttatggtctcttggaaaagtgaaggactttttcttcaaaattctaaactcatcctgaaggtagattttctttacttcacacatagtttcaaggtgaatcttatgagaaaactcttttgttcctttaagattcaagccttcatgccaaatcttggtcccaatgcacttccta

SEQ ID NO: 368 - DNA, 564 bp, Homo sapiens
  misc_feature 1, 257, 274, 275, 276, 282, 289, 298, 299, 303, 308, 309,311, 313, 322, 327, 332, 335, 337, 340, 341, 342, 346, 347,351, 352, 354, 356, 358, 360, 361, 366, 371, 373, 388, 393,394, 396, 401, 406, 409, 416, 418, 421, 425, 434, 435: n = A,T,C or G
  misc_feature 436, 442, 448, 456, 457, 459, 461, 463, 468, 474, 477, 484,490, 493, 495, 500, 501, 508, 516, 519, 520, 532, 537, 544,546, 547, 551: n = A,T,C or G
ntatacgactactatagggcgaattgggtaccgggccccccctcgaggtcgacggtatcgataacgcttgatatcgaattcctgcagcccgggggatccactagttctagagcggccgctcgaggccgaggtcttgcggatctggcggacctgctggtgctgcgcataggatgtctttctaatctggttgttacgtttcttagtgaaaccaacacagaaaagtcggagcaaaatacccatcggtcgtcttcacattnaacattgagcttaaatnnntgggtncttgccnctttttttnnaccnttggnncncnatttttttnccccnggggntananaannncccnncccnntngngnannttttnttcananaaaaacatttttttnccccnntnaaaantcctnaanaaaaaanantanttgntggggcatnnntttttntttaanaaaaacanncntntntttcntttgtngtntttgttnaatatnatnanaaaannttttttnttttatanaannaccccccctctnttttnggggggncnnattntataaatgaaatt

SEQ ID NO: 369 - DNA, 432 bp, Homo sapiens
  misc_feature 182, 185, 353, 388, 397, 404: n = A,T,C or G
ggcgaattggagctccaccgcggtggcggccgcccgggcaggtacataaaatggcaagagtgcatcctttaaagcttgcacatgagagacttggaaacaatcttattagaattgtgaaaattctaagtagtcaaaaaaaataaaaaaaaataaaaaagaaagtcaagtacgtgccaagcatnctngtgcgaccgcgagagcccggggagcgggggcttgccggccgctctagaactagtggatcccccgggctgcaggaattcgatatcaagcttatcgataccgtcgacctcgagggggggcccggtacccagcttttgttccctttagtgagggttaattgcgcgcttggngtaatcatggtcatagctgttttcctgtgtgaaantgtttatcncgcttcncaatttccacacaacaatacggatgccg

SEQ ID NO: 370 - DNA, 496 bp, Homo sapiens
  misc_feature 2, 4, 5, 8, 9, 24, 28, 42: n = A,T,C or G
gntnnggnntttcgacgcaattcngaanatcctatagggcgntttggagctccccgcggtggcggccgaggtactatgaatgtaattcataatttaaaaggaaaactaaaaactattttgatttgggaaaatgagccttaatttgttaaacctatacactgagaactagcctcaggcttaatattctcattgcatttgcaagatctgagcaaataagattaagtaaaacaaatcaattgtatatataattgacctttttgtggaacatgtagtttatagaaagtatactctaaagggaatttgccgaagaccttttactgattgaacagttgtgctacaatcaacttttcatagtacctcggcccgctctagaaactagtggatccccccgggctgcaggaattccgatatcaagctttatcgataccggtcgacctcgaggggggggccccggtacccagcttttgttccctttagtgagggttaattgcgcgct

SEQ ID NO: 371 - DNA, 504 bp, Homo sapiens
  misc_feature 4, 209, 224, 229, 234, 270, 272, 293, 305, 318, 342, 351,355, 359, 360, 385, 387, 398, 403, 414, 415, 434, 439, 440,448, 451, 472, 477, 488, 489, 491, 492, 499, 504: n = A,T,C or G
actnctatagggcgaattggagctccccgcggtggcggccgcccgggcaggtactcggattttgaatttcgtgattttggtttggtataaacggtaaaagtgtgtgtgccctctttacctgttctttgtcttgtggtatgtgtggtgtgagcgtggtattttgtctggaaaaaaaaagaaaaaaaaaagtacgcggggggggagagagncaccctatcctgctnggccngtcanagtattacgacctacttagcctggtacctcggccgntntaaaacaagtggatcccccgngctgcaggaatnctgataatcaacncttattcgataaccgtctacctcntaggggggnggcnccgnnaacccagctttttgttcccttttantngaagggttaanttgcncgacttggccnntaatacaatgggtcataancttgnntaccctgntgntggaaaattggtatattcccnctttnaccaaatttcnncnntaacccntaacn

SEQ ID NO: 372 - DNA, 823 bp, Homo sapiens
  misc_feature 1, 2, 22, 24, 25, 26, 36, 37, 39, 40, 45, 47, 49, 52, 56,57, 59, 61, 62, 64, 66, 67, 68, 73, 76, 77, 80, 82, 95,98, 99, 106, 115, 119, 123, 127, 136, 137, 152, 280, 295,316, 322, 372, 383, 396, 409, 411, 417, 418, 438, 441, 442: n = A,T,C or G
  misc_feature 446, 449, 452, 456, 463, 465, 466, 468, 475, 487, 489, 494,499, 524, 526, 528, 535, 543, 550, 554, 557, 562, 563, 567,568, 569, 572, 582, 602, 617, 625, 660, 661, 666, 667, 668,673, 676, 682, 692, 697, 700, 706, 714, 716, 721, 722: n = A,T,C or G
  misc_feature 723, 730, 731, 744, 745, 746, 747, 760, 766, 767, 775, 776,778, 779, 787, 802, 803, 807, 808, 817: n = A,T,C or G
nntatctatattctaggtatancnnnattgtaatanntnnttatnantnatntttnngntnntntnnnatatnttnnctntnatcatttttatgnctnnatttttntaaatttangatntcgnatantcgcgcgtnnatatcactatagggnagggcgaattggagctccaccgcggtggcgcggccgcccgggcaggtactcagtggatgacgagtgcttggttgaaattgttgaaaggcctgtgttctgaaatacctgggccgtgtccagtgaggccnaggagaatttttatngagcatcttttgccaatgaanaagaanattaaatattgaccacttaccttgatcccaaacgctcctgactggaagantggcaccatgncgtgtttttattngaagctaaaggcnantaaaanngtaaagtagtgctcattcanaanntatnttnggnaaantttgtcncnnantccaaanaaactttaccanangcaanatttnacctttcccaattgggggaaggttncnanaggggcncaaccacnttttttnctgnaantgccnngggnnnagnggtgttcctnactttccaaaaggcccaaanggttcttttctactnttagggangaaaaactaggtccagcccaaggaaattccccatnnggggnnntttanaantcaaantgtggtatcnatttngtnaaggcnatttttgntntggcnnnggatcanntttacccccgggnnnnatggggaaaaagnaatcanntaagtacnnanntttgggtnaaaaaggaatccttnntttnnaaaaaaacnaatttg

SEQ ID NO: 373 - DNA, 457 bp, Homo sapiens
  misc_feature 174, 202, 205, 209, 215, 217, 220, 227, 255, 270, 297, 302,321, 326, 333, 335, 352, 368, 370, 377, 386, 389, 390, 398,409, 427, 428, 453: n = A,T,C or G
ggcgaattggagctccccgcggtggcggccgcccgggcaggtactatagctgtaaggagaagctgagaaatgatacccaggagcagcaggctttacgtcttcagcctaaaacctaaaaaaaaaaaaaaaaaaaaaaaaaatttaaaacagctattaaactgaaagcatctgtanttaaaaaaaaaaaaaaaaaaaaaaaaangtncctnggccgntntanaactagnggatcccccgggctgcaggaattcgatntcaagcttatcgatnccgtcgacctcgagggggggcccggtncccancttttgttccctttagtgngggtnaattgcncncttggcgtaatcatggncatagctgtttcctgngngaaattngttatccgntcnnaatttccncacaacatacnagccgggaggcataaagnngttaaaagcctgggggggcctaaanggag

SEQ ID NO: 374 - DNA, 461 bp, Homo sapiens
  misc_feature 424, 429, 455: n = A,T,C or G
ctatacactactatagggcgaattggagctccccgcggtggcggccgcccgggcaggtactgagatcacttgcacttttcctcatttcttaagaaaatccagtttgcttgccatgacttgtttagcgttaggtttacaaagcttgttgttgaatgttgaatatttgtccaaaggagtttgacaaaatagaagctgcttggtccctgttctgcctgctaggtcataaggatgaaggccatgtggctggggtacctcggccgctctagaactagtggatcccccgggctgcaggaattcgatatcaagcttatcgataccgtcgacctcgagggggggcccggtacccagcttttgttccctttagtgagggttaattgcgcgcttggcgtaatcatggtcatagcttgtttcctgtgtgaaattnttatnccgctcacaattccacacaacatacngagccg

SEQ ID NO: 375 - DNA, 451 bp, Homo sapiens
  misc_feature 446: n = A,T,C or G
cgatacactactatagggcgaattggagctccccgcggtggcggccgaggtacttttcttgaactcagcattgctgccctgaaccctcccccagctgccttccctactttgggagcctctatttctagaacaggaaaacgctaggctaaatatatgtcctaatggtctcttccatcggtgtgaaggaaagaaaatgggcccaatgttgttgcaaggattagggaaggtcctgccttgccacccagtgggtttagaaatccatctttacggcctccagagaagctggtgatcaggttcccagacatcagcaatcctgtttcctgaggagcttgtgggggctctctctggggatgaatctgggtcctagacaaagagccacaactgatgggggtcactgggattgcagggggccatgggctggctttttgtcctgggatgtcaggcangtacc

SEQ ID NO: 376 - DNA, 545 bp, Homo sapiens
  misc_feature 3, 273, 275, 277, 283, 285, 287, 289, 290, 292, 294, 296,311, 320, 325, 333, 335, 336, 339, 343, 346, 347, 349, 350,354, 357, 363, 366, 389, 398, 405, 409, 411, 417, 422, 427,429, 431, 437, 439, 441, 451, 454, 455, 464, 465, 466: n = A,T,C or G
  misc_feature 467, 470, 471, 479, 485, 489, 498, 504, 510, 511, 515, 518,521, 522, 530, 535, 538, 540, 542, 543: n = A,T,C or G
ctnctatagggcgaattggagctccccgcggtggcggccgaggtaccacggctaatgttgctgctaacactctgactggccctgcaggagagggtggccctttcccctggagacacagacagggtggctggagactgcgtcatcactatttctccagtggtatctgggagccagagtagcaggaggaagagaagcttgcgctggggcttccatggttccgtctgggtcctaactgagcagttcctccccgcgtaccttgcccggcttattttntnantatttntntnanntnantntcttattgaactatntattataanttttncttcattntnntanttanatnntnnctantcntattanctngttttcatttatttttttacttntatatatgnctttttncttntnattttnctctntatantnanaatttntntnttttattatntannttttctaannnnctnntcttgatnttaatntttntctatactnctgctnttctcnnattntgnatnnattatatnttaanttnantnntt

SEQ ID NO: 377 - DNA, 469 bp, Homo sapiens
  misc_feature 2, 4, 5, 7, 9, 20, 23, 279, 318, 319, 351, 353, 407, 410: n = A,T,C or G
gncnngntngccgcgcaacnctnctatagggcgaattggagctccccgcggtggcggccgaggtactggaggagtgagtccctatgctgaccccaatacttgcagaggtgattctggcggccccttgatagttcacaagagaagtcgtttcattcaagttggtgtaatcagctggggagtagtggatgtctgcaaaaaccagaagcggcaaaagcaggtaccctagccatgctgagctgcagaggccacaggacagctctccccgcgtacctgcccggncggccgctctagaactagtggatcccccgggctgcaggnnttcgatatcaagcttatcgataccgtcgaccntngagggggggcccggtacccagcttttgtttccctttagtgaggggttaattgcngcncttggccgtaatcatggtcatagctgtttcctgtgtgaaaattgttatcccgcttcaca

SEQ ID NO: 378 - DNA, 448 bp, Homo sapiens
  misc_feature 414: n = A,T,C or G
actactatagggcgaattggagctccccgcggtggcggccgaggtactgcgcagcaaaacaattctatcttcttaatagttcttctatgtctttcccagtgtttactgaagaagcttcacccttgaaacgtcctttctccacctccacctctacctaacaaagtcccccgcgtacctgcccgggcggccgctctagaactaagtggatcccccgggctgcaggaattcgatatcaagcttatcgataccgtcgacctcgagggggggcccggtacccagcttttgttccctttagtgagggttaattgcgcgcttggcgtaatcatggtcatagctgtttcctgtgtgaaattgttatccgctcacaattccacacaacataccgagccggggagcataaaagtgtaaagcctnggggtgcctaatgagtgagctaactcacattaat

SEQ ID NO: 379 - DNA, 440 bp, Homo sapiens
  misc_feature 399, 440: n = A,T,C or G
ggcgaattggagctccccgcggtggcggccgcccgggcaggtaccaaaatggttttgaaagttagggagctgctttctctcttcattcctgtgggtgccccaattctccataatatttgcagctgagaagtatgtctttttattcatttttaaattttcatttaagtgacaatcagttgggagcaaattaaaatcctcccttaaggtgaaaaaaaaaaaaacaaacaaagtcctcggccgctctagaactagtggatcccccgggctgcaggaattcgatatcaagcttatcgataccgtcgacctcgagggggggcccggtacccagcttttgttccctttagtgagggttaattgcgcgcttggcgtaatcatgggtcatagctgttttcctgtgtngaaattgttatccgctcacaaatttccacaccaacatacgn

SEQ ID NO: 380 - DNA, 447 bp, Homo sapiens
  misc_feature 3, 207, 399, 400, 401: n = A,T,C or G
ctncttagggcgaattggagctccaccgcggtggcggccgcccgggcaggtaccaccatggacacctataaggaactgattgagaggattcctgagttgaacaaagtggcacgagcagctgcagaggtcgctggtcagttcgtgattaaactaacccatgatgttgaattgaacctggactatgagaggtactcttttttttttttntttttttgaaaactttttattgctcttttggatagaaacgggaatttatttgccaggaaggatgatcccatcatacttctgctggaaccagcgcatggcctcctctttgctgattctgtgtttggccccaatgcagcctgtcctgcgcttcttgtctgcgatgctgaaacctggcctacccagcaccacatnnnaagtccagggccgttagataccaatgcttggggttcatatttgata

SEQ ID NO: 381 - DNA, 815 bp, Homo sapiens
  misc_feature 1, 2, 6, 19, 24, 29, 30, 33, 36, 37, 38, 42, 47, 54, 60,62, 64, 65, 67, 74, 77, 81, 85, 89, 90, 92, 93, 94, 95,96, 98, 100, 102, 104, 105, 118, 125, 246, 258, 296, 306,309, 311, 313, 320, 328, 337, 339, 346, 351, 353, 356, 357: n = A,T,C or G
  misc_feature 358, 359, 373, 382, 389, 404, 443, 445, 466, 468, 470, 474,483, 492, 514, 523, 534, 537, 540, 545, 553, 584, 609, 612,615, 620, 632, 638, 647, 649, 653, 654, 655, 657, 665, 677,685, 688, 690, 704, 716, 719, 722, 724, 727, 732, 735: n = A,T,C or G
  misc_feature 738, 743, 752, 756, 765, 773, 776, 778, 786, 804, 808, 814: n = A,T,C or G
nntttntttcgtctatctnaaatntattnnttnttnnntttntgatnaattatntttatnananntntcctttntcnttcntatntttnntnnnnnantntngnntgattgaccactntatatanggcgaattgggtaccgggccccccctcgaggtcgacggtatcgataagcttgatatcgaattcctgcagcccgggggatccactagttctagagcggccgcccgggcaggtacttacaaantgccccattctnttcatctgaaaatgtccccgagccttttggaaacaggngcagggcatncanantnttcccantttttatngaacttgangnacggttncaacnanaannnncttaatttctacanacatctttnttgggtnatttgttaccgaagntcctccttatttgagaccccacctagacaccgaccttgnanattggaacaagtaagcccctntncnttcntacaattgnaaatggtancgtgggaagaaagccttggttngaattttanaaccccctganttnatngttgncccatggnacccaggggaaccaattgggttttttttaanaaaaaagggggggaagggtcctctnggnggntgccnttcttggaaagnttcggnaaactttcnanaaannncnttaaagancaaccccctttnagtggtcngcntntcaccaacccccgncctgggagtttnggnggnanganctttntcnaanggcgntttttttanggtntttcccccntatttaangtngnaagtgggntttttaaaattttggccngccnggcctnt

SEQ ID NO: 382 - DNA, 445 bp, Homo sapiens
  misc_feature 4, 422: n = A,T,C or G
ggcnaattggagctccccgcggtggcggccgaggtacagcaacctcttggtcaaacatggcatgccaccatctttttcaaagcccaatattgaaggtgccccaggggctcctattggaaataccttccagcatgtgcagtctttgccaaaaaaaaaaaaaaaaagtacctgcccgggcggcccgctctagaactagtggatcccccgggctgcaggaattcgatatcaagcttatcgataccgtcgacctcgagggggggcccggtacccagcttttgttccctttagtgagggttaattgcgcgcttggcgtaatcatggtcatagctgtttcctgtgtgaaattgttatcccgctcacaattccacacaacatacgagccgggagcataaaagtgtaaagccttgggggtgcctaatgangtgagctaactcacatttaattt

SEQ ID NO: 383 - DNA, 458 bp, Homo sapiens
  misc_feature 8, 11, 458: n = A,T,C or G
tactatanggngaatggggaccgggccccccctcgaggtcgacggtatcgataagcttgatatcgaattcctgcagcccgggggatccactagttctagagcggccgaggtaccgcttccctgaagagctcacccagaccttcatgagttgtaacctcatcagtggaatgttccagcgaatggacaaactgagaaaagaatgcctttgctagtgttatcctgtttagaaacaacaacagcagctccatttctggggtttgggtcttccgaggccaagatcttgcctttctgctgagtccagattggcaggtggactattgagtcatatacatgtcggaaactgggatcctggtagccgaggagacctagaccctcgttcgagacctgcccgggccggcccgcccccgcgggtgggagctccagctttttgttccctttagtggagggttaattgcgcn

SEQ ID NO: 384 - DNA, 446 bp, Homo sapiens
  misc_feature 4, 80, 88, 97, 99, 100, 117, 136, 153, 173, 174, 225, 248,282, 309, 315, 336, 366, 375, 389, 390, 441: n = A,T,C or G
actnctatagggcgaattggagctccccgcggtggcggccgaggtactttttttttttttttttttttttttttgggcanctaaaatntaggatggngnnaagcttcttcattttgncaattatatataaaaaatnacaaacaacatgaatcngcatttcttggatgagatanntaataacaaactatttctcaatatttgtatactaaaaactagtaaaggtgntatgtgtttcagtatcttatctnttatttgaacatgggtttctgaaaggagcctatntaataatataaatggtatgtagtaaangaggcnctgccttggctgggactgctntaaaaaaattaccatagaccattgactaanccacaaacntatacttctcacanntctggaagttggaaagccaagatgaggatgccagtatggctagcttctagngaggg

SEQ ID NO: 385 - DNA, 439 bp, Homo sapiens
  misc_feature 163, 176, 224, 262, 281, 294, 313, 342, 370, 399, 403, 410,412, 417, 421, 433, 436: n = A,T,C or G
aattgggtaccgggccccccctcgaggtcgacggtatcgataagcttgatatcgaattcctgcagcccgggggatccactagttctagagcggccgcccgggcaggtgtacaagctagcttgagtcgactcaagcttagggatctagaccacgagcggccgcncaccgcggtgganctccagcttttgttccctttagtgagggttaattgcgcgcttgggcgnaatcatggtcataagctgtttcctgtgtgaaattgttnatccgctcacaaattccanacaacatacgaanccggaagccataaagtgtnaaagcctggggtgcctaatgagtgagctnacttacattaattgcttttgcgcttcanttgcccgcttttccagtcggggaaaactntcgnagcccancntgcantttnaattgaaattcnggncct

SEQ ID NO: 386 - DNA, 828 bp, Homo sapiens
  misc_feature 1, 2, 6, 11, 12, 13, 16, 17, 19, 20, 22, 24, 26, 28, 30,32, 33, 34, 41, 46, 52, 54, 57, 64, 65, 71, 74, 75, 77,93, 98, 100, 118, 123, 129, 132, 133, 142, 150, 302, 318,331, 333, 334, 344, 346, 347, 375, 387, 394, 400, 423, 439: n = A,T,C or G
  misc_feature 444, 464, 472, 476, 486, 492, 501, 502, 503, 507, 514, 518,523, 529, 536, 538, 540, 543, 547, 555, 565, 577, 581, 590,592, 593, 608, 617, 621, 671, 682, 693, 701, 723, 732, 737,743, 754, 761, 765, 782, 787, 790, 794, 811, 816, 828: n = A,T,C or G
nntatnacgtnnnatnnanntntnantntnannnatttaantttanaatttntnatntatattnnttgtanatnntntttataatttattttnacatnanatatattttacgtatttntatanagatanttnntgtatttgnccgcctanacgactcactatagggcgaattggagctccaccgcggtggcggccgaggtacttcagggaaataccacctccacaaacgttgagccaattcaggggctgccagtagaatcctaaagagtgatgtctccggttcatgtgaacaccatctgcantccacaccccgctttnagggacaaatttnanngccattaagngnnaagaaccattgcttcaagccagaagctngtcccccttttnatcccantccccnagtttcactcaccccctttaagncctctggaatatgggngaccnagtgccggaatgggccttcnaattaagnctcnacgggtaaanggggcntggctcctnnncccnttcaagnggcnttatnctcccnaagatanancnccnaaanttctatanggggggggcnaatttaaccggnccgnggcctttcnanntcccccaaccaaccnttttttggncaanccttttcaattaaatttttccccccggtctaattgggccttttcccccgnccttttaaaanaattggttaanccccttgncccccccgggtggcccgggggnatccggtcnttccnttaagncaaaaaccttnaggattngggngaattcccctcccccgnggggnacnttgntcaatgtggtaaaattnttccntaattttatttn

SEQ ID NO: 387 - DNA, 496 bp, Homo sapiens
  misc_feature 2, 3, 4, 132, 399, 487: n = A,T,C or G
gnnngagttaacactatttagggcgaattgggtaccgtccccccctcgaggtcgacggtatcgataagcttgatatcgaattcctgcagcccgggggatccactagttctagagcggccgaggtagttaatnttcggatggttctgaagcttggcttgagacccccctctccaacacacacacacacacacacacacacacacacacacacacacacacgcacacattatccaagcggacgcgtgggtcgactcaagcacctgcccgggcggccgccaccgcggtggagctccagcttttgttccctttagtgagggttaattgcgcgcttggcgtaatctggtcatagctgtttcctgtgtgaaattgttatccgctcacaattccacacaacatacnagccggaagcataaagtgtaaagcctggggtgcctaatgagtgagctaactcacattaattgcgttgcgctcactgcccgctttccantcgggaaac

SEQ ID NO: 388 - DNA, 494 bp, Homo sapiens
  misc_feature 2, 3, 4, 7, 9, 260, 263, 275, 290, 301, 322, 324, 358, 362,369, 377, 402, 404, 412, 419, 440, 450, 452, 470, 482, 483,492: n = A,T,C or G
gnnnatncngcgtatcgactactatagggcgaattggagctccccgcggtggcggccgaggtactgtggagctgttgggactgggcaggcggcaaagatctgcaacaacatgctgttagctattagtatgattggaactgctgaagctatgaatcttggaatcaggttagggcttgacccaaaactactggctaaaatcctaaatatgagctcaggacggtgttggtcaagtgacacttataatcctgtacctgcccggnatnttaatgaaccgntgcatgcaaatcttntttacttcatntcctgtcagggcatacttaantntgttcctcaggaaaatgatgagggggagacactntctnaacttgnggggaccnggtggatggacgaggagcaaacacncnggacaatntatccancatccaatgctttggagctgncacccgcttnanatgcttcttgggaccacnagccatggctgnnttgggcaanga

SEQ ID NO: 389 - DNA, 462 bp, Homo sapiens
  misc_feature 2, 3, 4, 5, 8, 10: n = A,T,C or G
gnnnnggngnggcgccgtatacgactactatagggcgaattggagctccccgcggtggcggccgggatcgcggaaagtgatggctgtcgtcccggcgtctctctcaggacaggacgtgggatcatttgcatatcttacaattaaagacagaataccacagatcttaactaaggttattgatacattgcatcgacataaaagtgaattttttgagaaacacggagaggaaggcgtggaagctgaaaagaaagctatctctctcctttctaaattacggaatgaattgcaaacagataaaccatttatccccttggttgagaaatttgttgatactgatatatggaatcagtacctcggcccgctctagaactagtgggatcccccgggcctgcagggaattcgatatcaagccttatcggatacccgtcgaccttcgaggggggggccccgggtacccagctt

SEQ ID NO: 390 - DNA, 466 bp, Homo sapiens
  misc_feature 2, 3, 4, 7, 8, 9: n = A,T,C or G
gnnnggnnnccgaatcgactactatagggcgaattggagctccccgcggtggcggccgaggtacgggggccagttattatactgctgacagtaataaactgcaaaatcttcagactgcaggctggtgatggtgagagtgaactctgtccctgacccactgccactgaacctggctgggataccagtggccctggtggatgcaccataaatgaggagcctgggagcctggccaggtttctgctggtactgttaacaaccggtattagaaattgagatgtttttattttgactatttgagagtaacattgtagataatgttccaaaccatcatcaaaaatgcagagcaaacttttctgtatataaactgtacctgcccgggcggccgctctagaactagtgggatcccccggggctgcaggaattcgatatcaagcttatcgatacccgtcgacctcgaggggggggg

SEQ ID NO: 391 - DNA, 467 bp, Homo sapiens
  misc_feature 2, 3, 4, 8, 10, 14, 15, 69, 92, 213, 266, 317, 383: n = A,T,C or G
gnnngggngnggcnntcgctactatagggcgaattggagctccccgcggtggcggccgaggtactcatnccttgttttctgctcatttcttncagcctgaggaacagacgtcagaaaaaaaaacaaccacccagacaacttccccttttagctgagctgtcttctgaccaatcaacagggaccagccaaaaaaaaaaaaaaaaaaaaaaagtncctgcccgggcggccgctctagaactagtggatcccccgggctgcaggaattngatatcaagcttatcgataccgtcgacctcgagggggggcccggtacccancttttgttccctttagtgagggttaattgcgcgcttggcgtaatcatggtcatagctgtttcctgngtgaaattgttatcccgctcacaattccacaccaacattacgagcccggggagccataaagtgtaaagcctggggtgcctaatg

SEQ ID NO: 392 - DNA, 462 bp, Homo sapiens
  misc_feature 2, 3, 4, 7, 8, 9, 334: n = A,T,C or G
gnnnagnnnagcgccgtatacgactactatagggcgaattgggtaccgggccccccctcgaggtcgacggtatcgataagcttgatatcgaattcctgcagcccgggggatccactagttctagagcggccgaggtacgcaggcggcagcctcactctgaatggaccaaggcgccagctccttgtccaaagccaaaacctttgggcccaaagtttttggcatagcatcctttgcaatagatctcaccatccttgtctgccagggtggtcgactcgaggcctttgccacatttggcacatcggaagcaggacttatgccaggacttcccggcacncgatcaccttctccgctgcatagactgcctggcttgcatcgcgggacagcgctcagagccgcccgatcttctgaagcaaacttggatgccattggggttgggtgggtagcgggacgcgttgggtccga

SEQ ID NO: 393 - DNA, 456 bp, Homo sapiens
  misc_feature 2, 3, 4, 9, 15, 16, 223, 284: n = A,T,C or G
gnnnggagncccgcnntcgactactatagggcgaattggagctccccgcggtggcggccgaggtacgccttcgcagtttcctgcctgatccttcctccagcaagtaggtcacatcaatggcattttttccagggattttttcaaggagattgagcaagatccggttgagtcgttcccgttggttatgccgtcgttcctcaggggtacctgcccgggcggccgntctagaactagtggatcccccgggctgcaggaattcgatatcaagcttatcgataccgtcnacctcgagggggggcccggtacccagcttttgttccctttagtgagggttaattgcgcgcttggcgtaatcatggtgcatagctgtttcctgtgtgaaattgttatccgctcacaattccacacaacatacgagcccggggagcataaagtgtaaagcctgggggtgcctaa

SEQ ID NO: 394 - DNA, 455 bp, Homo sapiens
  misc_feature 1, 4, 226, 253, 255, 297, 299, 300, 302, 304, 306, 313, 316,320, 324, 325, 359, 362, 363, 365, 367, 379, 394, 396, 402,403, 404, 406, 425, 442, 446, 449, 453: n = A,T,C or G
ngancccgtatcgactactatagggcgaattgggtaccgggccccccctcgaggtcgacggtatcgataaggcttgatatcgaattcctgcagcccgggggatccactagttctagagcggccgcccgggcaggtcgactcctatagggtctagatcacgagcggccggccgcactttttttttttttttttttttttttttttttttttttttttttttttaaanacacacacacacacacacacacacacncncacacacacacacacacacacacatttgtatgcatttttttnanngngngngtgtgtntgnctgnctgnntgtctgtctgtctgtatgtgagtctgtgtgccanatnngngnagtgtccatagnggtcaaaaaggagcntnaaattnnngngccatgttcagttttcggnaattgaaactggggganaaanttntttntg

SEQ ID NO: 395 - DNA, 445 bp, Homo sapiens
  misc_feature 301, 445: n = A,T,C or G
cctatcactactatagggcgaattggagctccccgcggtggcggccgaggtactgggaaaaggccacagggagaaggaaggctccagctgaactttatagcaatttgaactcaaccagaagcctcctgaccagaactcgatgggaggggtgaagctggcttgcagattccacaggtggggaaagaaggaaggctttatttgctttgcagctgggaggtgggtacctgcccgggcggccgctctagaactagtggatcccccgggctgcaggaattcgatatcaagcttatcgataccgtcnacctcgagggggggcccggtacccagcttttgttccctttagtgagggttaattgcgcgcttggccgtaatcatggtcataagctgtttcctgtgtgaaattgttatcccgctcacaattccacacaacattaccgagcccggn

SEQ ID NO: 396 - DNA, 444 bp, Homo sapiens
  misc_feature 10, 299, 357, 383, 399: n = A,T,C or G
actactatanggcgaattggagctccaccgcggtggcggccgaggtacagtggttaaataattgactcaatgacaaaagtgggattggagtcccaacagtgtggacatgcttgctttggattgaatgtttgtgtcttgccccatatcccaatgttacagccctaaccaccaatgtgatggtattgagattagggccttgagtacctgcccgggcggccgctctagaactagtggatcccccgggctgcaggaattcgatatcaagcttatcgataccgtcgacctcgagggggggcccngtacccagcttttgttccctttagtgagggttaattgcgcgcttggcgtaatcatggncatagctgtttcctgtgtgaaattgntatccgctcacaattncacacaacatacgagccgggagcataaaagtgtaaagcctgggga

SEQ ID NO: 397 - DNA, 527 bp, Homo sapiens
  misc_feature 2, 3, 4, 5, 354, 440, 501, 520: n = A,T,C or G
tnnnngggacgcctaatacgactactatagggcgaattggagctccaccgcggtggcggccgaggtacgggggccagttattatactgctgacagtaataaactgcaaaatctttaaaattgaaggcttgttgaatggtgaagaagtgaaactttgtcccagaacccactgcccacttgaaaccctggcttgggataccagtgggccctggtggatgcaccatagatgaggagcctgggaagcctggccaggttttctgctggtaccttgcccgggcggccgcttctagaactagtggatcccccgggctgcaggaattcgatatcaaggcttatcgatacccgtcgacctcgnaggggggggccccggttacccagcttttttgttcccttttagtggagggttaattggcgccgcttgggcgtaatcatggtcataanctgtttccttgtggtgaaaattgtttatccgcctcacaaaattttccacaccaaacatacnagccggggagcattaaagntgtaaag

SEQ ID NO: 398 - DNA, 481 bp, Homo sapiens
  misc_feature 2, 3, 4, 5: n = A,T,C or G
gnnnngggcccgaatcgatacttagggcgaattggagctccccgcggtggcggccgaggtacattttgttccaccaagttatccaaaacaccagtgaggaaatctttgcccagggattccaacaccttaaagtgggcttttttttgtgggttggccttctgccatagggaacagcctccgtccttttttacagcgttggaaaaccccgcgtacctgcccgggcggccgctcgaatcaagctcactcaaaggcggtaatacggttatccacagaatcaggggataacgcaggaaagaacatgtgagcaaaaggccagcaaaaggccaggaaccgtaaaaaggccgcgttgctggcgtttttccataggctccgcccccctgacgagcatcacaaaaatcgacgctcaagtcagaggtggcgaaacccgacaggactataaagataccaggcgtttccccctggaagctccctcgtgcgctct

SEQ ID NO: 399 - DNA, 468 bp, Homo sapiens
  misc_feature 2, 3, 4: n = A,T,C or G
gnnnggtccctatcatacttagggcgaattggagctccccgcggtggcggccgaggtaccaataagcatattgctttggcaatgcatctccagagcaggtgaccctggccgtctgtcctggggacactgacaccgagggtggctgtgccagttcataggaggcctcagagcctgtgcagagagtgaggagggggagaagtagagggatccaggccatggtgagacacccagagttctgcctcctggacccacccccgcgtacgtgccaagcatcctcgtgcgaccgcgagagcccggggagcgggggcttgccggccgctctagaactagtggatcccccgggctgcaggaattcgatatcaagcttatcgataccgtcgacctcgagggggggcccggtacccagcttttgttccctttagtgagggttaattgcgcgcttggcgtaatcatggtcataagctgttt

SEQ ID NO: 400 - DNA, 484 bp, Homo sapiens
  misc_feature 2, 3, 4, 7, 20, 21, 23, 25, 110: n = A,T,C or G
gnnnggnccgcgaatcactnntntnggcgaattggagctccccgcggtggcggccgaggtacgcgggggagctggagacggcctgggtgctggcgaagcggaggccggantaagaaagactgttagaaatgcccctcgggtaacacagaaggcttgagagatcctgacataaatccttgtttgtcggaatctgatgcttccaccagatgtctggatgaaaataactatgacagggaaaggtgttccacttacttcttgaggtacctgcccgggcggccgctctagaactagtggatcccccgggctgcaggaattcgatatcaagcttatcgataccgtcgacctcgagggggggcccggtacccagcttttgttccctttagtgagggttaattgcgcgcttggccgtaatcatggtcatagctgtttcctgtgtgaaattgttatcccgctcacaattccacacaacataccgagccgggag

SEQ ID NO: 401 - DNA, 468 bp, Homo sapiens
  misc_feature 2, 3, 4: n = A,T,C or G
gnnngggcccgatcactacttagggcgaattggagctccccgcggtggcggccgaggtaccttcttcacttgggccacccaccgtgatttctgtcctggattccctgagccaaatacccatgatgggatggttcagtgatgtggatggatggctatttgtgtaagggccgaaaactagttttctaagatgggagagctgggcagttacttatactctgaagcccttctctttctctgctggggctttcccagcagttcctaatagttccttgtatttcagataagtcatcatgattgttaggaaaaaaagaaaaaagaaagttagtttttagcctcctgacttcttaagtcaagtgagacttttaaaatttagtaaataatagctcattatttttatggtagctatttgattattttaattctttagcagcactgaagaaattcagagaagttcaatagagagtaata

SEQ ID NO: 402 - DNA, 472 bp, Homo sapiens
  misc_feature 2, 3, 4, 5, 21: n = A,T,C or G
gnnnngggcgccgaatcactnctatagggcgaattggagctccccgcggtggcggccgaggtacgcggggagtgtaagaaggccatctacaatcaagattgagagtggctctaacaagtgccatttttccttgttagctttcatttctcagccctttacaagattaaaatagtctgcagtttaatctctccaaagctttacggacagtgattctgtcctaaacaagacagtgactccaggatttctgaagactattgtggaagaagcatccattaaggccaagctataacatcagaaatggtgaatgaagctctagaactagtggatcccccgggctgcaggaattcgatatcaagcttatcgataccgtcgacctcgagggggggcccggtacccagcttttgttccctttagtgagggttaattgcgcgcttggcgtaatcatggtcatagctgtttcctgtgtgaaatt

SEQ ID NO: 403 - DNA, 458 bp, Homo sapiens
ctaacactacttagggcgaattggagctccccgcggtggcggccgaggtactggaggaagtgaagtccctatgctgaccccaatacttgcagaaggtgattctggcggccccttgatagttcacaagagaagtcgtttcattcaagttggtgtaatcagctggggagtagtggatgtctgcaaaaaccagaagcggcaaaagcaggtacctgcccgggcggccgctctagaactagtggatcccccgggctgcaggaattcgatatcaagcttatcgataccgtcgacctcgagggggggcccggtacccagcttttgttccctttagtgagggttaattgcgcgcttggcgtaatcatggtcatagctgtttcctgtgtgaaattgtttatccgctcacaattccacacaacatacgagccgggagcataaagtgtaaagcctggggtgcctaatga

SEQ ID NO: 404 - DNA, 462 bp, Homo sapiens
ctatcactacttagggcgaattggagctccccgcggtggcggccgaggtaccaactggcctcatcctatattcactttcggccctgggaccaaagtggatatcaaacgaactgtggctgcaccatctgtcttcatcttcccgccatctgatgagcagttgaaatctggaactgcctctgttgtgtgcctgctgaataacttctatcccagagaggccaaagtacctgcccgggcggccgctctagaactagtggatcccccgggctgcaggaattcgatatcaagcttatcgataccgtcgacctcgagggggggcccggtacccagcttttgttccctttagtgagggttaattgcgcgcttggcgtaatcatggtcatagctgtttcctgtgtgaaattgttatccgctcacaattccacacaacatacgagccgggagcataaagtgtaaagcctgggg

SEQ ID NO: 405 - DNA, 467 bp, Homo sapiens
  misc_feature 7, 87, 366, 464: n = A,T,C or G
cctatcnctactttgggcgaattggagctccccgcggtggcggccgaggtaccgcgggagcttctccttgccagtttctcccagcanggaccctcttcttgttttgaaagatggtcggctgcttttggtaggcacgctcagtctgaatgtccgccatcttcccggccgctctagaactagtgggatccccccgggctgcaggaatttcgatatcaagcttatcgataccgtcgacctcgagggggggcccggtacccagcttttgttccctttagtgagggttaattgcgcgcttggcgtaatcatggtcatagctgtttcctgtgtgaaattgttatccgctcacaattccacacaacatacganccgggagcataaagtgtaaagcctggggtgcctaatgagtgagctaactcacattaattgcgttgcgctcactgcccgctttccagtcgggaaacctntcg

SEQ ID NO: 406 - DNA, 468 bp, Homo sapiens
  misc_feature 3, 449: n = A,T,C or G
ccnaaacactacttagggcgaattggagctccccgcggtggcggccgaggtacctgattgcatgcacttaaatgcagattattttggagtttgaaaagggactattaatgaaatctttcttttccctcctttctctttttcccttccccgccactgattcagtgagctggagattggatcacaggtataattcaagctttttcatgtagtcatgtagatcactagactccttggtgtacctgcccgggcggccgctctagaactagtggatcccccgggctgcaggaattcgatatcaagcttatcgataccgtcgacctcgagggggggcccggtacccagcttttgttccctttagtgagggttaattgcgcgcttggcgtaatcatggtcatagctgtttcctgtgtgaaaattgttatccgctcacaaattccacacaacatacnagccgggagcataaaagtg

SEQ ID NO: 407 - DNA, 469 bp, Homo sapiens
  misc_feature 1: n = A,T,C or G
nccctatcatacttagggcgaattggagctccccgcggtggcggccgaggtacgcgggggccattactgcaggaaaaggtcccggagagctaagcagtcaagatgtgtgacttcaccgaagaccagaccgcagagttcaaggaggccttccagctgtttgaccgaacaggtgatggcaagatcctgtacgtgccaaagcatcctcgtgcgaccgcgagagcccggggagcgggggcttgccggccgctctagaactagtggatcccccgggctgcaggaattcgatatcaagcttatcgataccgtcgacctcgagggggggcccggtacccagcttttgttccctttagtgagggttaattgcgcgcttggcgtaatcatggtcatagctgtttcctgtgtgaaattgttatccgctcacaattccacacaacatacgagccgggagcataaagtgtaaagcctgggg

SEQ ID NO: 408 - DNA, 469 bp, Homo sapiens
  misc_feature 5: n = A,T,C or G
ggttnccgaatcatacttagggcgaattggagctccccgcggtggcggccgaggtactatatcaaccagagcaacatacatgaataagccagcagtaagtgcaaatatccacatagaaacattttcagcataatgaccaatgaaaattcctgttgccattccaagatacgccagcatggctgacaatgcattataaaggacagcctgcttaacggtcatgccagcctttagtagaacagcaaagtcacctaattcatgaggcaactcatgacagaacacagcaacagaagtacctgcccgggcggccgcccgggcaggtacaagggattgatttaaaccaaattcgaggacttgggtttgatgccaccgtgttctctgggttgttttggataaagcagtttcacccattaccagtcaaccaggaagggggattcccatcgaaacgtcatcatgtggctggaccatcgag

SEQ ID NO: 409 - DNA, 538 bp, Homo sapiens
  misc_feature 2, 3, 4, 5, 6, 134, 507: n = A,T,C or G
gnnnnngggcgcgcgtaatacgactactatagggcgaattggagctccaccgcggtggcccgcccgggcaggtaccaacagaaacctggccagggctcccaaggcttcttcaatcttatgatgcatcccgacangggcccacttggcatccccagcccaggttcagtgggcagtggggtctgggacagacttcactctcaccatcagcagcctaaagcctgaagattttgcagtttattactgtcagcagcgtagcaaactcgtacacttttggccaggggaccaagctgggagatcaaaacgaacctgtggctgcaccatctgtcttcatcttcccgccatctgatgaggcagttgaaatctggaattgccctctgttgtgtgcctgcttgaattaactttcttatcccagaagaggcccaaaaggtacccttcggcccgcttctaggaactaggtgggattccccccgggcttgcagggaatttcgataatcaaggcttattcgnatacccgtcgacccttcgagggggggggccc

SEQ ID NO: 410 - DNA, 468 bp, Homo sapiens
  misc_feature 8: n = A,T,C or G
tatcactnctatagggcgaattggagctccccgcggtggcggccgggggcattcgtattgcgccgctagaggtgaaattcttggaccggcgcaagacggaccggagcgaagaaaaaaaaaaaaaaaaagtacctcggccgctctagaactagtggatcccccgggctgcaggaattcgatatcaagcttatcgataccgtcgacctcgagggggggcccggtacccagcttttgttccctttagtgagggttaattgcgcgcttggcgtaatcatggtcatagctgtttcctgtgtgaaattgttatccgctcacaattccacacaacatacgagccgggagcataaagtgtaaagcctggggtgcctaatgagtgagctaactcacattaattgcgttgcgctcactgcccgctttccagtcgggaaacctgtcgtgccagctgcattaatgaatcggccaacgcgc

SEQ ID NO: 411 - DNA, 491 bp, Homo sapiens
  misc_feature 2, 7: n = A,T,C or G
antctancatactatagggcgaattggagctccccgcggtggcggccgaggtacgcgggggtcacttccggcttccttcagtccgctggtcccgagcacgagctgtgaggggattcacttgtgtgcggaactcctcggaaccatggcgtccctttcccttgcacctgttaacatctttaaggcaggagctgatgaagagagagcagagacagctcgtctgactttctttttattgggtgccatcgccattggagacttggtaaagaagcaccttgggacccaaaggcatggacaaaattcttctaagcagtggacgagatgcctctcttatggtatcgagcggccgcccgggcaggtacccttaaactggcaggacatttttgaaatcacaaatttgcacataaagaatgtcacgaacagccatgtatccatatacagcaatcaaataaggaacttatgacctaaagcaaaggtaaactttcttgaaactt

SEQ ID NO: 412 - DNA, 491 bp, Homo sapiens
  misc_feature 8, 17: n = A,T,C or G
gtagggcnatcatactnagggcgaattggagctccccgcggtggcggccgaggtaccctgtggtgatgcagtcaaagcccaggacagtcgtataaaggaaagcaagacccatgccagccagaaacacaggctggttgtagtaggagacccatccatctcggaaggtacctgcccgggcggccgctctagaactagtggatcccccgggctgcaggaattcgatatcaagcttatcgataccgtcgacctcgagggggggcccggtacccagcttttgttccctttagtgagggttaattgcgcgcttggcgtaatcatggtcatagctgtttcctgtgtgaaattgttatccgctcacaattccacacaacatacgagccgggagcataaagtgtaaagcctggggtgcctaatgagtgagctaactcacattaattgcgttgcgctcactgcccgcttttccagtcgggaaacctgtcgtgccagctgca

SEQ ID NO: 413 - DNA, 458 bp, Homo sapiens
  misc_feature 364: n = A,T,C or G
actacttagggcgaattggagctccccgcggtggcggccgaggtaccagcagaaacctggccaggctcccaggctcctcatctatggtgcatccaccagggccactggtatcccagccaggttcagtggcagtgggtctgggacagagttcactctcaccatcagcagcctgcagtctgaagattctgcagttttactactgtcagcagtataataactggcctccgtacctgcccgggcggccgctctagaactagtggatcccccgggctgcaggaattcgatatcaagcttatcgataccgtcgacctcgagggggggcccggtacccagcttttgttccctttagtgagggttaattgcngcgcttggcgtaatcatggtcatagctgtttcctgtgtgaaaattgttatccgctcacaattccacacaacatacgagccgggagcataaagtg

SEQ ID NO: 414 - DNA, 505 bp, Homo sapiens
  misc_feature 9, 34, 227: n = A,T,C or G
gttaggcgntcatcttagggcgaattggagctcnccgcggtggcggccgcccgggcaggtacattcaggacaaggatggcgctccagtggccaccaatgccttccatagtccccgctggggtggcattatggtatataatgttgactccaaaacctataatgcctcagtgctgccagtgagagtcgaggtggacatggtgcgagcgatggaggtgttcctggcacangttgcggttgctctttgggattgctcaagccccagctgcctccaaaatgcctgctttcaggggcctacgaagttgaaggggctaatgacctgggagctagacccggctgctctgggctcggtcagtgggagaacctggccacagccaccaccacccttacctccctggcgcaggcttccgggcaagatcaagcaacatttgtcattaaggacgacgtggcatctgaggtgtacctcggccgctctagaactagttggatcccccgggctgcaggaatt

SEQ ID NO: 415 - DNA, 500 bp, Homo sapiens
  misc_feature 2, 3, 15: n = A,T,C or G
gnnagcgctaacacncttagggcgaattggagctccccgcggtggcggccgaggtaccttccgagatggatgggtctcctactacaaccagcctgtgtttctggctggcatgggtcttgctttcctttatatgactgtcctgggccttgactgcatcaccacagggtacatctttcaattctggaatatctgtgtctaagcacaatatcttcacactgtgctgtattgctgctgaactaaatgcacttttccccacatatggggcactggcttcaaacaattcagttcagtatcattacttttaatctcatctttcctttcttggtagttgttaatacagttatggaaaagaggcacattgcatagaagccattggggagttcagtggaagttctgtaagaatgtgcatgtcctgcccgggcggccgctctagaactagtggatcccccgggctgcaggaattcgatatcaagcttatcgataccgtcgacctcgagggg

SEQ ID NO: 416 - DNA, 492 bp, Homo sapiens
gaaggctatcatcttagggcgaattggagctccccgcggtggcggccgaggtaccagcagaaacctggccaggctcccaggctcctcatctatggtgcatccaccagggccactggtatcccagccaggttcagtggcagtgggtctgggacagggttcactctcaccatcagcagcctgcagtctgaagattctgcagtttactactgtcagcagtataataactggcccccgtaccttgcccgggcggccgctctagaactagtggatcccccgggctgcaggaattcgatatcaagcttatcgataccgtcgacctcgagggggggcccggtacccagcttttgttccctttagtgagggttaattgcgcgcttggcgtaatcatggtcatagctgtttcctgtgtgaaattgttatccgctcacaattccacacaacatacgagccgggagcataaagtgtaaagcctggggtgcctaatgagtgagc

SEQ ID NO: 417 - DNA, 504 bp, Homo sapiens
  misc_feature 2, 5, 7, 9: n = A,T,C or G
gnagncnancatcttagggcgaattggagctccccgcggtggcggccgaggtacagatgggggtctcactacattgcccaagctgtgccagaattcctggatgcaagcaatccttctgctttggcctcccaaagtgctgggattacaagcatgagccaccatgcccagacaaagccctcaatttcttacatatcgatttaagggcctgaataaaccaacacattaaaaaggaaaaagaataattcacataccaagccgtgagtaaattcaagactgagatgatataatcggtacctgcccgggcggccgctctagaactagtggatcccccgggctgcaggaattcgatatcaagcttatcgataccgtcgacctcgagggggggcccggtacccagcttttgttccctttagtgagggttaattgcgcgcttggcgtaatcatggtcatagctgtttcctgtgtgaaattgttatccgctcacaattccacacaacatacgag

SEQ ID NO: 418 - DNA, 473 bp, Homo sapiens
  misc_feature 295, 446, 452: n = A,T,C or G
ggcgaattggagctccccgcggtggcggccgaggtacttttttgtttgtttttttttttttcaccttaagggaggatttaatttgctcccaactgatcgtcacttaaatgaaaatttaaaaatgaataaaaagacatacttctcagctgcagatattatggagaattggggcacccacaggaatgaagagagaaagcagctccctacttcaaaaccattttgggtacctgcccgggcggccgctctagaactagtggatcccccgggctgcaggaattcgatatcaagcttatcnataccgtcgacctcgagggggggcccggtacccagcttttgttccctttagtgagggttaattgcgcgcttggcgtaatcatggtcatagctgtttcctgtgtgaaattgttatccgctcacaattccacacaacatacgagccgggagcntaaagntgtaaagcctggggtgcctaa

SEQ ID NO: 419 - DNA, 467 bp, Homo sapiens
  misc_feature 133, 188, 268, 346, 378, 396, 411, 422, 423, 429, 456, 467: n = A,T,C or G
ggcgaattggagctccccgcggtggcggccgcccgggcaggtactcctctttcactatgaaagtgtgcatgagtcccaagcatcggatgtcaaacaagaagcaaatcacctgcaaggatcggatgggcagcantctgtcaaggaaagcaaaaaaaaaaaaaaaaaaaaaaaaagttcctcggccgctntagaactagtggatcccccgggctgcaggaattcgatatcaagcttatcgataccgtcgacctcgagggggggcccggtncccagcttttgttccctttagtgagggttaattgcgcgcttggcgtaatcatggtcatagctgtttcctgggtgaaantgttatccgctcacaattccacacaacatacngagccgggagcataaagngtaaaagcctggggngcctaatgagnnagcctnacttccattaattgccgtttgccgctncacttgccccn

SEQ ID NO: 420 - DNA, 487 bp, Homo sapiens
  misc_feature 7: n = A,T,C or G
tagggcnaattggagctccccgcggtggcggtcgaggtacatcatttccagagcaggcactggcagcgagatagggttggaggagaagtagcgccgggacttccggatggcaaacttctctgtgggtagagatttcccagcaatcttgagcttcaggcctggcacagctcgaaataattccacttcgtcgtccccgaacggcttgtggtcctccttcccaaacatgctgaggtaggcggccttcatgtaaatgtaggtggcctttttaagtcagatcatgtcagttccttctggaaatctggttatattccatcacactcaggagacatctcctacaatttccttgacacctgcagcactccagccacacgacggcccccgcgtacctgcccgggcggccgctctagaactagtggatcccccgggctgcaggaattcgatatcaagcttatcgataccgtcgacctcgagggggggcccggtaccc

SEQ ID NO: 421 - DNA, 545 bp, Homo sapiens
  misc_feature 5, 9, 13, 69, 161, 202, 229, 447, 455, 457, 458, 461, 502,515, 518, 535, 538, 541, 543: n = A,T,C or G
gtagnctancacncttagggcgaattggagctccccgcggtggcggcccgaggtaccgggggattcttnagaggtcagccaagtcggtaacattctgtgaagcagattaaatacagtaaaatcaaacaaacggaggtctttggaagtgatgctgggcccangcagtgaaaatcaagaaaagaggagaaagaccaagacctgnatgtcctggacgacctgacccaaaaanggggcacaaaagcagcagagcttcaccaggtgactggggtgggcttcttttgtcctcatttaaatgtaccttgcccgggcggcccgctctaagaactaagtgggatcccccgggctgcaggaattcgatatcaagcttatccgataccggtcgacctcgagggggggcccggtacccagctttttgtttcccttttagttgaggggtttaatttgccnccctttgncnnttnattcattggttcaataagctgttattccttgtggtggaaantttgttttccggnttnacaaatttccacaacanacnatnanct

SEQ ID NO: 422 - DNA, 501 bp, Homo sapiens
  misc_feature 2, 5, 8, 52, 55, 92, 101, 160, 165, 196, 201, 222, 260, 286,312, 321, 322, 323, 341, 401, 423, 450, 466, 469, 470: n = A,T,C or G
gnagngcnatcatactatagggcgaattggagctccccgcggtggcggccgncgnactcatttacccggggacagggagaggctcttctgcntgtagtggntgtgcacagcctcatgcatcacggagcatgagaagacgttcccctgctgccacctgctnttgtncacggtgagcttgctatagaggaagaagganccgtnggagtccagcacgggaggccntggttctttccgcgtacctcggccgctctaggaactantggatcccccgggctgcacggaattngaatatcaaaccttatcgataccttncgacctccnnnggggggcccggtacccancttttgttccctttagtgagggttaatttgcgcgcttggcgtaatcatggtcatagctgnttcctgtgtgaaattgttatcngctcacaattccacacaacatacgaanccgggagcattaaagngtnnaagcctggggtgcctaatgagtgagctaacg

SEQ ID NO: 423 - DNA, 615 bp, Homo sapiens
  misc_feature 2, 3, 6, 7, 9, 14, 54, 56, 75, 77, 85, 94, 97, 100, 105,110, 114, 128, 133, 135, 188, 191, 214, 232, 243, 246, 249,250, 257, 271, 274, 280, 282, 295, 299, 306, 311, 316, 328,329, 341, 342, 344, 345, 349, 356, 357, 359, 364, 365: n = A,T,C or G
  misc_feature 369, 373, 376, 380, 381, 383, 390, 394, 396, 415, 418, 419,423, 428, 436, 438, 439, 444, 448, 449, 450, 455, 460, 475,480, 483, 486, 500, 501, 519, 522, 523, 534, 539, 548, 557,566, 590, 594, 597, 599, 602, 606: n = A,T,C or G
gnnagnncncactntactatagggcgaattggagctccccgcggtggcggccgncnggccaggtacagcccacananggctgatnggcttttgntgnttnttctnggaanatantgatgagttcctcnaaacncnttaattttacctcttccgggacatcatccttcatcctatgatatgcccgtgtnttntgtctcatgctgtacgcaaggangaaagcccatgttgtacnttttggaccgnttntannaactagntggattccccccgnagnttgcangnatagcgattatanaagnctttatncaatncccgnacggaaacttcnnattggggggcgnncnntggntcccccnnanttttnngggngccnatnatcnntngaagcgntttnanttagcttcttcttttgggnggnnattncattngccccatnannagtanaatnnncctanttgcngaaaaatatagtttnattcnccnctncaacaaaaaatttnnacaccaaaccattatcanaannctctggggtantcatnaaaatttanttaaacagnctcttgggnggttggcccttaaaatgtaagtancaanctnanccntgcnacaatttaa

SEQ ID NO: 424 - DNA, 508 bp, Homo sapiens
  misc_feature 2, 3, 62, 65, 93, 99, 114, 118, 134, 136, 149, 153, 204,234, 238, 248, 265, 270, 280, 295, 297, 315, 354, 364, 376,403, 434, 438, 443, 452: n = A,T,C or G
gnnagcgctatcatactatagggcgaattggagctccccgcggtggcggccgaggtacactnttngtcaggggaccaagctggagatcaaacnaactgnggctgcaccatctgncttnatcttcccgccatctnangagcagttgaaanctgnaactgcctctgttgtgtgcctgctgaataactatctatcccaaaaaggccnaagtacctgcccgggcgggcggctctatanctantggatccccncgggctgcaagaattanatatnaagcttatcnataccgtcgaccttnanggggggcccggtacccancttttgttccctttattgaggggttaattgcgcgcttgncgtaatcatnggtcataagctngtttcctgtgtgaaaattgttatccgntcacaattccacacaaacatactagccgggngcantaaantgtaaaagnctggggtgcctaatgagtgagctaactccattaattgcgttgcgctcaacttgccc

SEQ ID NO: 425 - DNA, 504 bp, Homo sapiens
  misc_feature 2, 3, 4, 5, 9, 10, 470, 472: n = A,T,C or G
gnnnntgcnnacactactatagggcgaattggagctccccgcggtggcggccgaggtacgcggggggaggaactgctcagttaggacccagacggaaccatggaagccccagcgcagcttctcttcctcctgctactctggctcccagataccactggagaaatagtgatgacgcagtctccagccaccctgtctgtgtctccaggggaaagagccaccctctcctgcagggcccagtcagagtgttggcagcaactttgcctggtacctcggccgctctagaactagtggatcccccgggctgcaggaattcgatatcaagcttatcgataccgtcgacctcgagggggggcccggtacccagcttttgttccctttagtgagggttaattgcgcgccttggcgtaatcatggtcatagctgtttcctgtgtgaaattgttatccgctcacaattccacacaacatacnanccgggagcataaagtgtaaagcctggggtgcc

SEQ ID NO: 426 - DNA, 925 bp, Homo sapiens
  misc_feature 733, 781, 814, 826, 834, 837, 849, 852, 853, 863, 866, 879,881, 892, 895, 899, 900, 908, 911, 921: n = A,T,C or G
cgtacactcctatagggcgaattggagctccccgcggtggcggcccgcccgggcaggtacctctggagaaaataagtgtgttagataagacttgttcatgcatgagtgatagtgctgttagtgtgaattcaatgttaatgaatcaataaaatatatgaaataaagtgtctttaaacagtaacacaaggttgtatgttctcagttgacaaaaacattgtgaccagaggctcacaggagtcttaagtctgcatttccccaggagcaatggcttagcatttactaatcgagtattcctggcaactttatagaacataactactgtaaataatgagaatcaactggatattataaatccccaaatatatattttgctttacataattgagtgtttttcaaaggcatatagaaaagaaaaaataggcttttatatgtacctcggcccgctctagaactagtggatcccccgggctgcaggaattcgatatcaagcttatcgataccgtcgacctcgagggggggcccggtcccagcttttgttccctttagtgaggggttaattgcgcgcttggcgtaatcatggtcatagctgtttcctgtgtgaaattggtatccgctcacaattcccacaacataccagcccgggagcataaagtgtaaaagcctgggggtgcctaatgagtgagctacctcacattaattggcgttgcgctcactggcccctttccagtcgggnaacctggccggccagctgcattaatgaatcggccaacccccgggagangcggttggcgtattgggcgctttccgcttcttngtcattgactcnttggcttnggncgttcgggttgnggnnagcggtttanctncctaaaagggggnantccggtattcncanaatnngggatacnccngaaaaaactnggct

SEQ ID NO: 427 - DNA, 931 bp, Homo sapiens
  misc_feature 437, 574, 588, 618, 620, 642, 650, 656, 683, 704, 731, 769,790, 813, 815, 831, 835, 837, 842, 844, 854, 856, 862, 869,873, 881, 925, 929: n = A,T,C or G
cgtacactactatagggcgaattggagctcaccgcggtggcggcccgcccgggcaggtacgcggggagagccacccgggctggggaccggggagcggaggctgaaatccccagacgccggttttctgggctgggctttctgccttactcactccttctccctctttcaggattttaccgaccgctcgcgaaacagctttcacacaatggagcttcatgtcctcgtgcaggaagtacctcggccgctctagaactagtggatcccccgggctgcaggaattcgatatcaagcttatcgataccgtcgacctcgagggggggcccggtacccagcttttgttccctttagtgagggttaattgcgcgcttggcgtaatcatggtcatagctgtttcctgtgtgaaattgttatccgctcacaattccacacaacatacnagccgggagcataaagtgtaaaagcctggggtgcctaatgagtgagctaactcacattaattgcgttgcgctcactgcccgctttcaagtcgggaaaccttgtcgtgccagctgcattaatgaatcggccaacgccncggggagaggcggnttgcgtatttgggcgctcttccgctttctngnttcactgactcgctgcctcggncgttcggntgcggngagcggtttaacttactcaaaggcggnatacggtattcacagaatcangggataacccaggaaagaacatgtgancaaaaaggcaccaaaaggccaggacccgtaaaaaggcncgtttgctggcgttttttcanagggtccgcccccttgccaagcntnaaaaaattgacgcttnagtnanaaggngngaaaacccgncnggactnttaaaanaccnggcggttnccccctggaaactccttgggcgctttctttttcgacccttgccnttancg

SEQ ID NO: 428 - DNA, 487 bp, Homo sapiens
  misc_feature 4, 398: n = A,T,C or G
actnctatagggcgaattggagctccccgcggtggcggccgcccgggcaggtacacagaaattcctagactacaagatgtcatccttctagaagaagacctaaagcatacactgggaggaaagttttacaggggaatctagactacttaattttttcttcacagtaacaaatgacaaagcaccaatatctaaaggttcccaacacacaggataaacaataaggaagttctcccagtgtttcccattttaggcaaaaaaaaaaaaaaggatttcagctagcacagtgcatccaaatgaccaaaaatactacaatgccgatgttttttaaaaataaatataaaagattttaaggattttgtcttactggaataataaaattaatggtgaatgggtacctnggccgctctagaactagtggatcccccgggctgcaggaattcgatatcaagcttatcgataccgtccacctcgagggggggcccggttc

SEQ ID NO: 429 - DNA, 950 bp, Homo sapiens
  misc_feature 5, 16, 260, 429, 476, 479, 560, 582, 612, 621, 625, 630,634, 650, 651, 656, 660, 661, 665, 669, 671, 675, 676, 678,681, 690, 692, 695, 699, 703, 710, 713, 731, 734, 736, 737,742, 744, 745, 751, 758, 759, 765, 766, 769, 777, 781: n = A,T,C or G
  misc_feature 789, 791, 799, 801, 804, 805, 813, 814, 820, 834, 838, 841,842, 843, 845, 846, 852, 853, 858, 861, 865, 866, 867, 868,869, 870, 871, 873, 875, 878, 880, 881, 882, 885, 888, 889,890, 891, 894, 896, 900, 903, 908, 909, 910, 911, 914: n = A,T,C or G
  misc_feature 917, 918, 925, 926, 927, 928, 929, 930, 936, 937, 940, 942,943, 945, 946, 947, 950: n = A,T,C or G
tatgnacgcttatacnactactatagggcgaattggagctccccgcggtggcggcccgaggtacgggggccagttattatactgctgacagtagtaaactgcagaatcttcagactgcaggctgctgatggtgagagtgaactctgccccagacccactgccactgaacctggctgggataccagtggccctggtggatgcaccatagatgaggagcctgggagcctggccaggtttctgctggtacctgcccgggcggncgctctagaactagtggatcccccgggctgcaggaattcgatatcaagcttatcgataccgtcgacctcgagggggggcccggtacccagcttttgttccctttagtgagggttaattgcgcgcttggcgtaatcatggtcatagctgtttcctgtgtgaaattgtatncggtcacaatttcacacaacattacaagccgggagcataaaagtgtnaancctggggtgcctaatgagtgagctaactcacattaattgcgttgcgctcactgcccgcttttccagtcgggaaacctgtcnagccagctgcattaatgaatcngccaacgccccggggagaggccggtttgcntattgggcngctntttcncttncttgttcacttgactnncttgngctnngtcnttcngntggnngnganccggtattnanctnactnaaanggaggtnatncggtattccatagaatanagngnnttacncnntgaatnaaacatnntgagcnnaanggccaganaaanggcttaancnttaaaatngncgnnttatttgnntttttnaaataaggttcgcnctcntgnnnannatatannataantangttnnnnnnntnangangnnnaancannnntgncntatntantactnnnnagnatnntctgaannnnnnatatanncantnntnnnttn

SEQ ID NO: 430 - DNA, 949 bp, Homo sapiens
  misc_feature 412, 700, 703, 706, 717, 730, 734, 742, 748, 751, 770, 772,784, 800, 801, 803, 805, 808, 809, 812, 813, 826, 827, 833,839, 850, 855, 860, 868, 871, 875, 885, 887, 890, 902, 905,906, 912, 925, 927, 930, 931, 940, 948: n = A,T,C or G
acgtacactactatagggcgaattggagctccccgcggtgggcggcccgaggtacgcggggatccagaatacatttccaacaagaagcactggccaagtcagcttcttctgagagagtctctagaagacatgatgctacactcagctttgggtccctgcctcttactcgtcacggtttcttcaaccttgccattgcaataaaaaaggaaaagaggcctcctcagacactctcaagaggatggggagatgacatcacttgggtacctgcccgggcggccgctcgaccgcctggaccaacttgtcggaaaccacctttctgatgccgcccacggcagcgggccgctctagaactagtggatcccccgggctgcaggaattcgatatcaagcttatcgataccgtcgacctcganggggggcccggtcccagcttttgttccctttagtgagggttaattgcgcgcttggcgtaatcatggtcatagctgtttcctgtgtgaaattgttatccgctcacaattcacacaacatacgagcccgggagcataaagtgtaaagcctggggtgcctaatgagtgagctaactcacattaattgcgttgcgctcacttgccgctttccaagtcgggaaacctgtcgtgccacttgcattaatgaattcgggccaaccccccggggagaggcggtttgcgtattgggcnttnttncgctttcttgnttaattgactcgnttgngcttcggncgttcnggntgggggcgaagcgggattnancttacttaaaangcggtaattacgggtnntncncannaanngggggataacgcnnggaaanaacatnttgaccaaaanggccnccaanaggccagnaanccgnaaaaaggccngntgntggggtttttcnatnnggctcngcccccctgacangnttnnaaaattgancttaatcnt

SEQ ID NO: 431 - DNA, 939 bp, Homo sapiens
  misc_feature 203, 225, 319, 327, 347, 361, 386, 428, 501, 509, 570, 572,601, 630, 652, 668, 691, 700, 718, 728, 740, 753, 758, 763,783, 828, 834, 837, 846, 854, 857, 866, 868, 886, 892, 910,912, 928, 932, 939: n = A,T,C or G
actacttagggcgaattggagctccaccgcggtggcggccgaggtacgggggccagttattatactgctgacagtaataaactgcaaaatcttcagactgcaaggctgctgatggtgagagtgaactctgtccaaacccactgccactgaacctggctggataccagtgccctggtggatcaccataataaggagcctggaancctggccaggtttctgctggtncctgcccggccggccgttctagaactagtggatcccccggcctgcaggaattcgatatcaagctaatcgataccgcgacctcgaggggggcccngtacccancttttgttcctttaagtgangggttaattgcgcnctggcgtaatcatggcatactgttnctgtgtgaaattgtatccgttacaattcccacaacatacganccgggagattaagtgtaagcctggggtgcctaatgagtgagctaactcacattaattgcgttgcgctcactgnccgctttncagtcgggaaacctgtcgtgccagctgcattaatgaatcggccaacgcgcggggagaggcngnttgcgtattgggcgctcttccgcttcctngctcactgactcgcttgcgcttcggtcgntcggttgcggcgagcggtttanctcactcaaaggcggnaataccggtattcacaaaatcangggataccncaggaaagaacatgtganccaaaaggcnacaaaaaggcangaaccctaaaaanggccngttgntggcgttttccatagctccncccctgacaagcttaaaaaaattgaccctcaaatcaaaggtgggnaaaccnccnggctttaanatccagcnttnccctggaantnctttgcgctttctgttcnaacctncgtttaccggaaaccttncncttttcctttggaaangggnctttttn

SEQ ID NO: 432 - DNA, 976 bp, Homo sapiens
  misc_feature 2, 28, 289, 470, 483, 542, 546, 628, 636, 652, 708, 722,737, 744, 760, 770, 783, 832, 843, 852, 864, 879, 911, 912,914, 916, 917, 929, 932, 941, 943, 948, 949, 956, 967, 975: n = A,T,C or G
anactactatagggcgaattggagctcnccgcggtggcggccgccaccatgtccgcctcggctgtcttcattctggacgttaaggggcaagccattgatcagcccgcaactacaagggcgatgtggccatgagcaagattgagcactttcatgcctttgctggtacctcggccgctctagaactagtggatccccggctgcaggaattcgatatcaaagcttatcgataccgcgacctcgaaggggggcccggtacccaacttttgttccctttagtgaagggttaatngcgcgcttggcgtaatcatggtcatagctgttcctgtgtgaaattgtatccgctcacaattccacacaacatacgagccgggagcataaagtgtaaagcctgggtgcctaatgagtgagctaacttacattaaattggcgttgcgctcacttgccgctttccagtcgggaaaacctgcgtngccaactgcattnaatgaatcggccaacgcgccggggagaggcggtttgcgtattgggcgctcttccgcttnctcnttcaactgactcgctgcgctcggtcgttccggcttgcggcgagccggtatcagctcactcaaaaggcggtaatacgggtatncacagaancagggggataacgcangaaaagaacatgtgaaccaaaaaggccagcaaaaagggccaggaacccgtaaaaanggccgcgtttgctngcgttttttcattangctccgnccccctgacgagcatnacaaaaatcnacgctcaattcanaggtggcgaaacccgacaggactataaaaataccagcgtttcccctggnaactccttttncccttttcngttccgacctgncgttaccggaacctntccgctttctcccttagggaagcgtggctttnnananntaccctgaaggnttnattcgggangngttcnnaactggntgggcacaaancccgttant

SEQ ID NO: 433 - DNA, 1069 bp, Homo sapiens
  misc_feature 5, 34, 154, 211, 220, 232, 240, 247, 248, 258, 265, 266,268, 270, 275, 290, 292, 293, 294, 299, 303, 314, 317, 320,323, 329, 338, 345, 346, 348, 355, 360, 368, 369, 374, 376,379, 380, 390, 391, 396, 399, 400, 401, 402, 410, 411: n = A,T,C or G
  misc_feature 412, 413, 417, 419, 420, 422, 424, 427, 431, 434, 435, 436,442, 443, 444, 446, 448, 449, 456, 459, 461, 462, 469, 474,475, 476, 477, 479, 480, 481, 482, 486, 487, 489, 490, 492,493, 494, 496, 508, 518, 527, 528, 529, 531, 533, 536: n = A,T,C or G
  misc_feature 537, 540, 543, 550, 553, 563, 567, 568, 571, 572, 579, 584,585, 586, 587, 589, 592, 595, 599, 610, 614, 617, 621, 623,625, 627, 629, 644, 645, 648, 653, 659, 665, 666, 667, 672,675, 686, 688, 695, 703, 706, 710, 712, 716, 717, 718: n = A,T,C or G
  misc_feature 721, 722, 725, 726, 730, 731, 732, 734, 738, 739, 748, 752,753, 754, 758, 764, 768, 770, 774, 776, 778, 779, 780, 781,788, 790, 794, 798, 799, 801, 805, 806, 808, 811, 813, 814,818, 820, 821, 822, 832, 834, 837, 838, 839, 842, 843: n = A,T,C or G
  misc_feature 849, 850, 860, 862, 864, 870, 871, 874, 875, 879, 886, 893,895, 896, 899, 905, 911, 913, 915, 916, 920, 924, 929, 931,934, 945, 949, 950, 951, 960, 962, 966, 967, 977, 981, 984,987, 992, 1001, 1002, 1003, 1005, 1006, 1008, 1011: n = A,T,C or G
  misc_feature 1012, 1014, 1015, 1016, 1023, 1024, 1028, 1043, 1045, 1050,1055, 1062, 1063, 1065, 1067, 1068: n = A,T,C or G
acgancgactactataggggcgaattggagctcnccgcggtggcggcccgaggtcaatatagggcagacagtttgccttcagaaattcagaaatgcagcttttgagggaggtcagcatcattggtctcagctaccattttcctgcaggatgttnataaatagttcctggcaaaggaggttgcgtatagggtcctacaagaacctaggtggnagcattttnctcccagcgtcnggtctaangacacannttcttccttncatcttnncncncgttnctaccccggctggcngnnntatanctancgtatcctccnganctncanagaganacttagtcntgctctnntnatcactntcttnttgatagnnttacntntcnngatgtttgcnntctantcnnnntcgcgagnnnnatantnntncnttncatncgnnnacaacnnncnannaccctgncgnanncttcgcnctctnnnnannnncaanngnncnnntntcctctagacanttttcaattnatactactnnnantntanntantantatcaanacnattcgttctnccanntannaaaaccncatannnntntanctntatntccgttttttnctcngcnattnanananangataagacgacctcnnctncatgngactangatatnnntaatnttnacatttggccncnatgtctnctccattntanttantnaacnnnatnntanntcannncnactnntggacttcntacnnntctntctacncgtngnctcnancnnnnaactttncnttancgcnntnattnnantantnnatancnnngttatgtatntnatnnngtnnactaannatgtattgtntntntcttcnngtnntcgncatgcgncatcttntnnttnattacnctctgnanannctcncttntattngngcnattatgacatnctannngctctacangntctnnattaattatnattntantcntactngtatatctnnnannantanntnnnacactannaatnctatgtttagtagtntntatanattantacgaanntntnnt

SEQ ID NO: 434 - DNA, 930 bp, Homo sapiens
  misc_feature 519, 601, 606, 632, 634, 637, 644, 648, 654, 659, 661, 665,667, 668, 671, 673, 676, 677, 681, 682, 693, 695, 702, 704,708, 709, 714, 721, 723, 728, 734, 738, 742, 747, 750, 762,765, 767, 775, 777, 782, 784, 787, 792, 793, 794, 796: n = A,T,C or G
  misc_feature 799, 804, 808, 809, 815, 817, 819, 822, 832, 834, 837, 839,844, 845, 847, 850, 855, 857, 860, 861, 865, 868, 869, 870,876, 880, 881, 882, 883, 890, 891, 892, 893, 899, 901, 903,906, 907, 909, 910, 911, 913, 916, 918, 920, 925, 927: n = A,T,C or G
  misc_feature 929: n = A,T,C or G
tcgtacactactatagggcgaattggagctccccgcggtggcggcccgcccgggcaggtaccaaaatggttttgaagttagggagctgctttctctcttcattcctgtgggtgccccaattctccataatatttgcagctgagaagtatgtctttttattcatttttaaattttcatttaagtgacaatcagttgggacaaattaaatcctcccttaaggtgaaaaaaaaaaacaaacaaaaaaagtacctcggccgctctagaactagtggatcccccgggctgcaggaattcgatatcaagcttatcgataccgtcgacctcgagggggggcccggtacccagcttttgttccctttagtgagggttaattgcgcgcttggcgtaatcatggtcatagctgttcctgtggtgaaaattgttatccgctcacaatttccacacaacatacgagccgggagcataaagtgtaaagcctggggtgcctaatgagtgagctaactcacattaattgcgttncgctcactgcccgctttccagtcgggaacctgtccgtgccactgcatttaatgaatcggccaacgcgcggggagaggcggtntgccntattgggcgcttttccgcttcctcgntnaantgacttntgcnctcggncgtcngntgcngnngangnganntaannttcacttaaangngggtaantncggnnatccncaaaatnangggantaacgncagnaaanaacanttnaaacaaaagggnaancnaaaggccntngaccntnaanagggnnntntanctgcntttnntcatangntncancctctgatancnttnanaattnnanctnttaantnaannagangannnccgcanattnnnnaaaatcnnnngtttcntnanagnncnnnanctnantntgttnananc

SEQ ID NO: 435 - DNA, 946 bp, Homo sapiens
  misc_feature 1, 14, 54, 199, 303, 431, 571, 606, 615, 632, 658, 671, 696,722, 747, 757, 800, 806, 821, 829, 843, 852, 859, 860, 867,870, 883, 888, 901, 913, 929, 937, 945: n = A,T,C or G
nacgactactatanggcgaattggagctccccgcggtggcggcccgaggtcttntttttttttttttttttttgatttgcagttagtttattgaaatggaaatgaatttgagggtttcaacagtggtctagcagtttccacataaaaagacaacacaagaaagaaaagtggtttctagcaatcaacagatgagttctgncatagtctgtagccctctgagccaaacgccttggggtaaagttaattactcttcatattacaccaaatgctgtcgtacctgcccgggcggccgtctagaactangtggatcccccggctgcaggaattcgatatcaagcttatcgataccgcgacctcgagggggggcccggtcccagcttttgttccctttagtgagggttaattgcgcgcttggcgtaatcatggcatantgtttcctgtgggaaattggtatccgctcacaattcccacaacatacgagccgggagcataaagtgtaaaagcctggggtgcctaatgagtgagctaactcacattaattgcgtgcgctcactgcccgctttccaagtcnggaaacctgtcgtgccagcttgcattaatgaatcngccaacgcncggggagaggcgggttncgtattgggcgcttttccgcttcctngcttactgactcnctgagctcggtcgtccggttgcggngagcggtatcagcttactcaaaggcnggtaataccggtatcacagaatcanggggttaacncaggaaaaacatgtgagcaaaaggccccaaaaggccagaaccntaaaangccgctttgtggggnttttccanagctccccccctgncaggcttanaaaaatnnccctaantanaggggggaacccncggantttaaaaaccccntttccccggaantccttgggcttctttncaacctcnttaccgtnt

SEQ ID NO: 436 - DNA, 960 bp, Homo sapiens
  misc_feature 1, 455, 463, 513, 553, 611, 619, 624, 630, 660, 695, 698,774, 779, 789, 804, 853, 876, 885, 902, 910, 911, 912, 922,926, 928, 930, 935, 938, 959: n = A,T,C or G
nccgactactatagggcgaattggagctcaccgcggtgggcggcccgacatcgccgccgagggatcgttggcaagcccgggtgggagcgtggctgtgttctcgtccctggctgacaacgaaggggagctagtcacttttcctgccacgacgactcgcgtccgcctctcgcctggagtacctcggcgctctagaactagtgatcccccgggctgcaggaattcgatatcaagcttatcgataccgtcgacctcgagggggggcccggtacccagcttttgttccctttagtgagggttaattgcgcgcttggcgtaatcatggtcatagctgtttcctgtgtgaaattgttatccgctcacaattcacacaacatacgagccgggagcataaagtgtaaagcctggggtgcctaatgaagtgagctaactcacattaattgcgttgcgctcactgnccgctttncagtcgggaaacctgtcgtgccagctgcattaatgaatcggccaacgccncggggagaggcggtttgcgtattgggcgctcttccgcttnctcgctcactgactcgcttgcgctcggtcgttcggcttgcggcgagcggtattaactnactcaaangcggnaatacnggtattccacagaatcaagggataacgcangaaagaacatgtgaaccaaaaggccaccaaaaggncangaaccgtaaaaaggccgcgttgctggcgttttttcataaggttccgccccctgacagcattacaaaaatcgacctnaaatnagagggggcnaaacccgcaggactntaaaataccaggcgtttccctggaacttccttgtgccctttctgttccnaccttgcgttaccggatacctgnccctttttnctttggaaaggggggcnttttaaannnaccctgaggntttnantnggggnggngtcctccaaactgggtgggcnt

SEQ ID NO: 437 - DNA, 487 bp, Homo sapiens
  misc_feature 2, 12: n = A,T,C or G
gntttcctctcnctactatagggcgaattggagctccccgcggtggcggccgcccgggcaggtacataacaaacatggcgaaaaaggagatgtttgaaaccatctgcatttttttctgtgatcggtctttaagctcactgtaaattggcaggactgacgggtggcaaacaaatgcaaatgcaatggtgggtaaagcatacaccggtctttgaattgaaggtaacatattttggcgtacctcggccgctctagaactagtggatcccccgggctgcaggaattcgatatcaagcttatcgataccgtcgacctcgagggggggcccggtacccagcttttgttccctttagtgagggtttaatttgcgcgcttggcgtaatcatggtcatagctgttttcctgtgtgaaattgttatccgcttcacaattccacacaaacatacgagccgggagcataaaagtgtaaaagcctgggggtgcctaatga

SEQ ID NO: 438 - DNA, 486 bp, Homo sapiens
  misc_feature 15, 346, 400, 408, 442, 450, 464: n = A,T,C or G
cagccctatcgactnctatagggcgaattggagctccccgcggtggcggccgaggtactttttttatctttttttttttttgagatggagtcttgttttgtcgcccaggctctggagtgcagtggcgctcactgcaacctctgcctcccgggttcaggttattcctctgcctcggccaccctagtagctgggattataggcttgagccacttgcgcccggcccaatttttattttttaatggttgttatggactgaatgtatccctctaaaattcatatattgaatctctaatccccaatgtgatgacactaggaagtaaagcccttgggagataattaggtttanatgaggacatgaggatgggatcctcatggtgaaattagtacctgcccgggcggncgctctanaactagtgggatcccccgggctgcagggaattcnatatcaangctttatcgatacncgttcgaccttcaagggggggg

SEQ ID NO: 439 - DNA, 504 bp, Homo sapiens
  misc_feature 2, 3, 4, 104, 109, 126, 135, 144, 150, 161, 171, 194, 202,216, 218, 222, 232, 233, 238, 243, 253, 259, 268, 294, 327,351, 387, 411, 412, 440, 443, 484, 490, 501, 504: n = A,T,C or G
gnnnagctaacatactatagggcgaattggagctccaccgcggtggcggccgcccgggcaggtacttttttttttttttttttttttttttcttctcatactgngaatngttcttgactccttttnttgacattnagttttcanaatttncatcttttttntggaactaangtgctgttctcttgactgcctgntgggccancatccgattgccangnccanaaacgtaaanncttgnccaanatggccaagntacctnggcccgttntagaactagtggatcccccggcctgnaggaattcgatatcaagcttatcgataccgccnacctcgagggggggcccggaaccnagtttttgttccctttaatgagggttaattgcgccncttggccgtaataatggtcatagnntgtttcctgtgtgaaaatttgttatccnctnacaattccacaccaacatacgagccgggagcaataaaagtngtaaancccttgggggngcn

SEQ ID NO: 440 - DNA, 862 bp, Homo sapiens
  misc_feature 3, 4, 5, 8, 9, 11, 14, 15, 17, 19, 20, 21, 22, 23, 27, 28,30, 31, 32, 33, 34, 39, 41, 45, 48, 53, 56, 60, 61, 63,64, 66, 67, 72, 74, 75, 77, 79, 82, 83, 86, 88, 89, 94,95, 96, 100, 104, 110, 114, 117, 118, 119, 121, 122, 123,128: n = A,T,C or G
  misc_feature 129, 130, 132, 135, 139, 140, 142, 148, 151, 161, 162, 170,186, 192, 338, 341, 346, 347, 348, 352, 355, 359, 396, 410,443, 453, 469, 470, 475, 481, 499, 504, 546, 550, 552, 553,563, 565, 569, 571, 580, 583, 601, 615, 618, 632, 636: n = A,T,C or G
  misc_feature 644, 650, 654, 655, 663, 665, 673, 684, 693, 702, 729, 741,744, 745, 747, 757, 769, 781, 783, 788, 789, 790, 792, 805,812, 818, 819, 821, 822, 828, 845, 848, 849, 853: n = A,T,C or G
tcnnntanngnganntntnnnnnttgnntnnnnnttctntntttntancactnttnattnntnnannatctntnncntnttnnatntnnatatnnnattnttcnttttanttanttnnnannnaattnnnanagnttgnncnatacgntcntatcactatnnggcgaatnggagctccaccgcggnggcggntcgtggcactcatttacccggaggcagggagaggctcttctgcgtgtaagtggttgtgcagagcctcatgcatcacggagcatgagaagacgttcccctgctgccacctgctcttgtccacggtgagcttgctgtaaaggaagaanganccgtnnngganttncaancaccggggaagggcgttgggtcttgttagattgaatnctcccggcgtgccncatttggcttcttccccacctcccaccgtgcgnatggtcctcntggggaataagaaagnnccttntggacncaagagccaagggtcaanggccntgaaccccatgggcttttcttttgggttccaagtccttcaantccncnnggggggaatngngggngnggctagggnggnttggttacctccttccgngtctccggcctttnttnagggaaaaccttanggtntggggggnattccncccnnccccgggngnactttggnccagtgggaanaatttcccnaattatttncaaaaaggccttttaattccgaaatanccccggttcggnaanncnttttgtaagngggggggggggnccgcccgggttnanccccnnngnccttttttttggnttccccncttttnnannattgtnaggggggtttttaaaanttnntccncccgccctt

SEQ ID NO: 441 - DNA, 484 bp, Homo sapiens
  misc_feature 2, 457, 462: n = A,T,C or G
gnttagcctatcatacttagggcgaattggagctccccgcggtggcggccgaggtactggggttggggagaacccgttttgattacaagcagataattatctcagtgagatgggggttagttcaaggaagtaaggaggggggaggatgtgaggaagttagaacaacccaatgcttatttgatgggctgaataaactattccaggactgaactatttttgagcactgtgaggtggcacagtaattacctgcttcaaaatcaactgataccaacatttttatctttgtatcttatctctgtacctgcccgggcggccgctctagaactagtggatcccccgggctgcaggaattcgatatcaagcttatcgataccgtcgacctcgagggggggcccggtacccagcttttgttcccttttaagtgagggttaattgcgcgcttggcgttaatcatggncatanctgttttcctgtgtgaaaaatt

SEQ ID NO: 442 - DNA, 478 bp, Homo sapiens
  misc_feature 1: n = A,T,C or G
nagccctatcgactacttagggcgaattggagctccccgcggtggcggccgaggtacgcgggggaagttgatgccgagcgcagatcgcctgcagcttgctagctgtgtgggctgggaggtctggtagggctgagcttgcaagaggatcaacatgcctttggctagagatttactacatccgtccttggaagaggaaaagaaaaaacataaaaaagaaacgcctagtacctgcccgggcggccgctctagaactagtggatcccccgggctgcaggaattcgatatcaagcttatcgataccgtcgacctcgagggggggcccggtacccagcttttgttccctttagtgagggttaattgcgcgcttggcgtaatcatggtcataagctgtttcctgtgtgaaattgttatcccgctccaattccacacaacataccgagcccgggagcataaaggtgtaaaagcctggggtgcctaa

SEQ ID NO: 443 - DNA, 803 bp, Homo sapiens
  misc_feature 1, 24, 32, 35, 58, 80, 86, 182, 214, 233, 246, 253, 281,302, 313, 315, 325, 457, 533, 602, 623, 686, 688, 711, 761,770, 772, 778, 780, 788: n = A,T,C or G
ngggggcgcgcgtaatcgactcantataaggnganctgcaccgcggcggcggccgaanctttataatcttttaactaaangtaatngtcaccataatcttatagacaaagcattgaggtttattgaactaatgctgaaggtagtaagtggaggagccaggatgaggtcagaatctgagattntaaccatgcctatgctgtcacttcttacactntaaaatacctccatgctcntgtggacacctangaacaantgaatatttctattcttgtcccagaatntcaaaacattaaacatgttanactgtattttngnttaccataancctttccaggaggaacaagcactaaacacagtctctggcttaggatttggatgaacatattcaaaagccatctgcttcccagcaatcataatcataccctttgcttttggccactatcaccaagatctccantagtacctcggccgctctacaactagtggatcccccgggctgcaggaattcgatatcaagcttatcgataccgtcnacctcgagggggggcccggtacccagcttttgttccctttagtgagggttaattgcgcgcttggcgtanatcatggtcataggctggttnctgtggggaaattgttatccgatcacaattccacacaacatactaacccgggagcataaaagngnaaagcctggggtgcctaatgaanggactaacttacatttattggcgtgcgctcactggcccccttttcaatcnggaaacctngncggccnanctgcattnatgaatcggccacgg

SEQ ID NO: 444 - DNA, 815 bp, Homo sapiens
  misc_feature 13, 14, 20, 21, 28, 233, 285, 337, 349, 471, 554, 610, 631,644, 684, 695, 730, 755, 771, 789, 790, 798, 802, 807: n = A,T,C or G
atcgactactatnnctatanntgcgaantgcagctccccgcggtggcggcccgaggtacctatgataatcatgatggagatctggggaggggagaacgtggaaatgtccttccgggtgtggcagtgtgggggccagctggagatcatcccctgctctgtcgtaggccacgtgttccggaccaagagcccccacaccttccccaagggcactagtgtcattgctcgcaatcaantgcgcctggcaaaggtctggatggacagctacaagaagattttctatagganaaatctgcaggcagcaaagatggcccaagagaaatccttcggtgacatttangaacgactgcanctgagggaacaactgcactgtcacaacttttcctggtacctgcccgggcggccgctctagaactagtggatcccccgggctgcaggaattcgatatcaagcttatcgataccgtcgacctcnagggggggcccggtacccagcttttgttccctttaatgagggttaattgcgcgcttggcgtaatcatggtcataagctggttnctgtgtgaaaatggtatccgctcacaatttcacacaacattacaacccggagcatnaaagtgtaaaagctggggtgnctaatgaagtganctaactcacatttaattggcgttgcgcttaattggccgcntttccaaatcngggaaaacctgtccgtgcccacttgcatttaatgnaatccggcccacccccccggggaanaagccggttttccttnttggggcgcttttttccnntttcttgnttanctganctcgcttt

SEQ ID NO: 445 - DNA, 802 bp, Homo sapiens
  misc_feature 1, 3, 644, 647, 703, 708, 720, 726, 733, 735, 745, 754, 769,772, 777: n = A,T,C or G
ngngggcgcgcgtaatacgactactatagggcgaattggagctccaccgcggtggcggcccgaggtacgcggggcaggtgatgtttgttttcacgatggtcttcagatgcccacgtgggcactgctgagaaagccacttggtaaaactgatgccggaaatggggctttttgggatccctgctcagctgcttctgagtcccagcatgccctggttacctatggccctctttcccatgggacctgacctatgatcggcccccgctcctaggcgtggtgaccaagatgaagatgcagaggaccattgtcatccgccgagactatctgcactacatccgcaagtacctgcccgggcggccgctctagaactagtggatcccccgggctgcaggaattcgatatcaagcttatcgataccgtcgacctcgagggggggcccggtacccagcttttgttccctttagtgagggttaattgcgcgcttggccgtaatcatggtcataagctgtttcctgtgtgaaattgttatccgctcacaattccacacaacatacgagccgggagcataaagtgtaaaagcctgggggtgcctaatgaagtgagctaactcacattaattgcgtttgcgctcactgcccgcttttcantcnggaaacctgtcctgcccactgcattaatgaatcgccaacccccggggaaaagccgnttgcntattgggcgctnttccgntttcttngnttactgactngttggcttngtcgttcggttcggnaancggtntagcttacttcaaaggcggtaatat

SEQ ID NO: 446 - DNA, 870 bp, Homo sapiens
  misc_feature 11, 15, 22, 27, 30, 36, 40, 57, 72, 115, 120, 129, 132, 165,181, 210, 215, 219, 234, 248, 271, 294, 306, 345, 351, 372,384, 386, 387, 392, 395, 420, 424, 426, 450, 451, 458, 466,467, 478, 480, 483, 490, 493, 494, 505, 509, 515: n = A,T,C or G
  misc_feature 525, 548, 559, 560, 579, 582, 593, 597, 598, 602, 603, 606,607, 612, 618, 620, 625, 628, 631, 632, 636, 638, 643, 651,676, 690, 691, 701, 709, 719, 724, 725, 727, 742, 753, 760,774, 796, 806, 807, 823, 825, 846, 852, 866, 867, 869: n = A,T,C or G
ttggggctccntacncgactantatanggngagctnaccncggcggcggccgcccgngcaggtacagcatcnctggtggtttcaaagaacgtagtcattcttctcactgcaacantgtangataagcanggnagatctgttatttccaaattaaaggtgattaanatatatggagagagancatggcatgtgaggtttatagggctaganactgnacanccatgtacaacccanatttaactacagtncctcggccgctctaaaactagcnggatccccgggctgcatgaattncatatcaagctnatcaattccgtcaacctcggggggggcccggtcccatcntttgtntccctttactgagggttaatngggcgcttggcntnntaatngtnatagcctttacctggggtgaaattnctancntgtcacaatcccacacatacattnnaacctgngagcaaannggtgtaaagcncngangttgccnaannggagtggcgcntcantccacnttaaattggngtaagcgcctgggggggccctanttgacaggacnntgaaaatcctggtttaagnccnttgcatttaantganncggnnttnncacgncggggnanaagtngtnctnnccananttggntttactcntttccgctttaacccctccaaaggnaaaagggctttttnnttttatttgnggcgcttnttccgatttnttttnntnaacttgaatttaaangggggtttgtncgttctntttccgcaaaaccnggggtttaactttatttaaaangccgtttttnnccgttaattcccccananaattggggtttaaccgcaagnaaaganccatttttaatccnnant

SEQ ID NO: 447 - DNA, 408 bp, Homo sapiens
cgcgtaatacgactcactatagggcgaattggagctccaccgcggtggcggccgcccgggcaggtacgcgggggagaccaagggctaaagctgggaggtgagtctgtcaccttgagccgggcgagcgctgtgggccaagcaggggttgcagggcagtaggagtgcagactgaaaaaatgcagaccgccggggcattattcatttctccagctctgatccgctgttgtacctcggccgctctagaactagtggatcccccgggctgcaggaattcgatatcaagcttatcgataccgtcgacctcgagggggggcccggtacccagcttttgttccctttagtgagggttaattgcgcgcttggcgtaatcatggtcatagctgtttcctgtgtgaaattgttatccgc

SEQ ID NO: 448 - DNA, 495 bp, Homo sapiens
  misc_feature 490: n = A,T,C or G
actactatagggcgaattggagctccccgcggtggcggccgaggtacagaagggccatgctgttattactcttacacaaggaggcagccctcgagccacagggtccagctgttggctataatagcctaccggtctctgatgatcaccatgtttctggaattcaagccaggaagaagcagcaatctgtcttctggattaaaactgaagatcaacctactttcaacttactaagaaaggggatcatggacattgaagcatatcttgaaagaattggctataagaagtctaggaacaaattggacttggaaacattaactgacattcttcaacaccagatccgagctgttccctttgagaaccttaacatccattgtggggatgccatggacttaggcttagaggccatttttgatcaagttgtgagaagaaatcggggtggatggtgtctccaggtcaaatcatctttcggtacctgcccggggcggcccgntctaa

SEQ ID NO: 449 - DNA, 532 bp, Homo sapiens
  misc_feature 291, 392, 412, 416, 438, 457, 465, 471, 482, 488, 490, 499: n = A,T,C or G
gccctatcatacttagggcgaattggagctccccgcggtggcggccgccacgctggttttgcatcttcaggagacgctcgtagccctcgcgcttctcctcggccaattcgcggaagaagtggctcacgccttccagagccacatcatcgcggtcgaaatagaagcccagagagaggtaggtgtaggaggcctgcaggtaccagctgccatctgtcagttaaacttcagaacacacataccatagggatgaagataagaaaggaatgattgtgactctggatcaaaatgctnccagttcctgaaggtgcatgatttaactgtgaatgccaactgagatcctaacattctatacaaccaaagatgaactagtcttttgaactggtaactttatnaaaggacaaaatccacagtncctngggccggttctaaaactaagtnggatccccggggcttgcanggaaattncgatantaaagcttttnttcganancccgtccgnccctctaagggggggggccccggtaaccccaaa

SEQ ID NO: 450 - DNA, 540 bp, Homo sapiens
  misc_feature 4, 289, 371, 401, 410, 435, 497: n = A,T,C or G
actnctatagggcgaattggagctccccgcggtggcggccgaggtaccacctaacacattattatgtttattaactttgagacccagaaataaattcttttcttttcttgattcttgctcttaaaaatacaaaaaaaaaaatgttttgttttgtgttatttttggtttgtttattggggggctttttttaattgtcaggattatgatcttgctgtttttcttcaatatgtatacaaggtgatgtgaaaagatgactttgggcagaggagtaagaacaaagtaggcttgnttcttctactttgcttcagaactcagtttaatgcccaaaagccgggagaatcaaagcccatgtttgaccgttctcgttgctncacctgcatttttcccaggagagtgtgacnactcatgcnagtcccctgagaaaaaataaaattnagggaccattactttctcctttttagtcttttttaaaaaatttcaaaaaaacgttttagtcncaaagggggaacttttttttatgcctattcagggaaaagggtt

SEQ ID NO: 451 - DNA, 498 bp, Homo sapiens
  misc_feature 1, 22, 26, 28, 34: n = A,T,C or G
nccctaacactactttggggcnaatngnagctcnccgcggtggcggccgcccgggcaggtactgcttctataagaacgtggtcctgtatattattgagctttggttcgcctttgttaatggattttctgggcagattttatttgaacgttggtgcatcggcctgtacctcggccgctctagaactagtggatcccccgggctgcaggaattcgatatcaagcttatcgataccgtcgacctcgagggggggcccggtacccagcttttgttccctttagtgagggttaattgcgcgcttggcgtaatcatggtcatagctgtttcctgtgtgaaattgttatccgctcacaattccacacaacatacgagccgggagcataaagtgtaaagcctggggtgcctaatgagtgagctaactcacattaattgcgttgcgctcactgcccgctttccaatcgggaaacctgtcgtgccactgcattaatgaatcggccaat

SEQ ID NO: 452 - DNA, 527 bp, Homo sapiens
  misc_feature 236, 287, 374, 377, 389, 390, 403, 457, 478, 487, 489, 526: n = A,T,C or G
ctatcactcctatagggcgaattggagctccccgcggtggcggccgaggtacacctcattgaggatctaatggacccctatcttcagcatggggaacagggtataatgttcaccaccttgaaggcatgttactaccagattcagcgtgagaagcttaactaggctgcataacagctttgaaaactggattatctactacagagtgttataacaccatctggagtcttcctgtagtnggcaaaaaaagaacaagtgttgaaatttggaaggggactttgtgttatttnaggttgttagaatgagccttaccaataataagaagcccttgagcccagaaaaaaggactgtttagtttaaagggaggattgaaaggnagngtaaaaaaatcnnattagaccagttnttggccgctctagaaactaggtgggatcccccgggcctgcagggaatttcgatntccaagcttattcgattccgntctgacctncnaggggggggggcccggtaccccacctttttgtttccnt

SEQ ID NO: 453 - DNA, 916 bp, Homo sapiens
  misc_feature 741, 757, 773, 796, 824, 830, 853, 870: n = A,T,C or G
acgcactactatagggcgaattggagctccaccgcggtggcggccgcccgggcaggtaccacaagctgtgtgtctttaagcaacagaaatttcttccctcacagttgcggaggtcagaggtcagaaaacaaggtgtctgcaggaccaacctctcctctggatgctctaggtgagaatcttttccatgcctttctcttagcttctgatgttgccgtcagaacttcagatggtgttccttggcttctgtcaatattaatacataaatccttttcagtctcagcttctctcttcacatggtcctctccacccccgcgtacctcggccgctctagaactagtggatcccccgggctgcaggaattcgatatcaagcttatcgataccgtcgacctcgagggggggcccggtacccagcttttgttccctttagtgagggttaattgcgcgcttggcgtaatcatggtcatagctgtttcctgtgtgaaattgttatccgctcacaattccacacaacatacgagccgggagcataaagtgtaaagcctggggtgcctaatgaagtgagctaactcacattaattgcgttgcgctcactgcccgctttccagtcgggaaacctgtcgtgccagctgcattaatgaatcggccaacgcccggggagaggcgggttgcgtattgggcgctcttccgctttcttgctcactgactcgctgcgctcggtcgttcggctgcggcgagcggnatcaactcacttaaangcgggaatccggtatncacaaaatcaggggataacccanggaaaaaacatgtgagccaaaaggccancaaaanggcccggaaccgtaaaaagggcncgttgctggcgtttttncataggctcccccccctgacgaaccattacaaaaatcgaccttaat

SEQ ID NO: 454 - DNA, 880 bp, Homo sapiens
  misc_feature 58, 83, 215, 276, 536, 604, 616, 626, 639, 642, 644, 704,715, 730, 734, 741, 751, 758, 763, 806, 810, 818, 820, 828,830, 834, 852, 861, 866, 871, 872: n = A,T,C or G
acgcgactactatagggcgaattggagctccaccgcggtggcggcccgaggtactttnttttttttttttttttttttttttnaatattttaaagtattgcactgcagtggcatttgtcttgatggctgagtgtttgggcacctcttgagatttccaccctagtgccagctctgtctggacgtccatggaggacctgcccgggcggccgctctanaactagtggatcccccgggctgcaggaattcgatatcaagcttatcgataccgtcgacctngagggggggcccggtacccagcttttgttccctttagtgagggttaattgcgcgcttggcgtaatcatggtcatagctgtttcctgtgtgaaattgttatccgctcacaattccacacaacatacgagccgggagcataaagtgtaaagcctggggtgcctaatgagtgagctaactcacattaattgcgttgcgctcactgcccgctttccagtcgggaaacctgtcgtgccagctgcattaatgaatcggccaacgcncggggagaggcggtttgcgtattgggcgctcttccgctttcttgctcactgacttctgcgctcggtcnttcggttgcggngaacggtatnaactcactcaaanggngnaataccggtattcacaaaatcaggggataacccaggaaaaaacatgtgagccaaaagccnacaaaagggcnggaacccgtaaaaanggcncgttgcntggcgttttncataagnttcgnccccctgacagcattaaaaaaattgcccttaaataaaaggggngaanccgcaggntntaaaaaancngggnttcccctggaactccttngcccttctntccanccgcnntaccgaac

SEQ ID NO: 455 - DNA, 892 bp, Homo sapiens
  misc_feature 9, 441, 557, 606, 652, 660, 668, 679, 698, 716, 720, 722,728, 730, 742, 743, 767, 788, 806, 813, 836, 843, 847, 857,866, 876, 891, 892: n = A,T,C or G
cacgcactnctatagggcgaattggagctcccccgcggtggcggccgaggtaccaattcttctttgaatgtctaattgaattcagctgtgaatccttctggttttagcccttttttgttgttggcaactttctttttataaccaattccatttagctgcttgttattgggctgttcatggtttctatttcttactgatgtaagacggttgtatattttgaaggatctatcaattttctctagatttcctagtctgtatgtgtaaaggtgttcacagtagccttaaataattttttataatttttgtggtattggttgtaatatgtccagttttatttctaactgagcttatttagatttctcttttccttttctggactaatcttactaagaatcaatttggttaatctttcaaaaaaatagcttttggttaatctttccnatttttggttccaatggcattccccgcgtacctgcccgggcggccgcccgggcaggactcaaggccctaatctcaataccatcacattggtggttagggctgaacattgggaaatnggggcaagacacaaacattcaatccaaagcaagcatgtccccactggtngggactccaatccccttttggcattgagtcattaattaaccactgnacctcggnccgtctanaactagtgganccccgggctgcaggaatcnatatcagcctaatcgatnccgncnacctcnangggggggcccgnncccaccttttggtcccttaaggangggtaaatgcccccctggcgnaacatgggcaaactggtnctggggngaaaatgtatccgtcaaaatccnccaacanccancccggacctnaaaggaaanccgggggccnaagagggaccacccnn

SEQ ID NO: 456 - DNA, 515 bp, Homo sapiens
  misc_feature 3, 288, 319, 352, 367, 374, 390, 406, 411, 417, 428, 432,436, 443, 477, 481, 488, 491, 495, 500, 502, 508: n = A,T,C or G
tancgactactatagggcgaattggagctccccgcggtggcggccgcccgggcaggtacgcggggggagtcagtctcagtcaggacacagcatggacatgagggtccccgctcagctcctggggctcctgctactctggctccgaggtgccagatgtgacatccagatgacccattctccgtcctccctgtctgcatctgtaggagacaagaagtcaccatcacttgccggggcaaagtcaagagcattagcaaactatttgaattggtatcaaacagaattctaggnaaaagccccttaagctccttgatctatgctncatccaggtttgcaaggtggggtcccattcaangttcagttggcagtnggatctntggacaagaatttcanttcttcaccaattcangccanttcttncaaacccttgnaaangaantttttgncaaaagttttaccttaccttggtccaaaacaaanaacnttttacnaantttnagccncncggttnaaccctt

SEQ ID NO: 457 - DNA, 469 bp, Homo sapiens
  misc_feature 5, 413: n = A,T,C or G
cgccnatcgactactatagggcgaattggagctccccgcggtggcggccgaggtactttttttttgtttgttttttttttttcaccttaagggaggatttaatttgctcccaactgattgtcacttaaatgaaaatttaaaaatgaataaaaagacatacttctcagctgcaaatattatggagaattggggcacccacaggaatgaagagaagaaaagcagctccctaacttcaaaaccattttggtacctgcccgggcggccgctctagaactagtggatcccccgggctgcaggaattcgatatcaagcttatcgataccgtcgacctcgagggggggcccggtacccagcttttgttccctttagtgagggttaattgccgcgcttgggcgtaatcatggttcatagcntgtttcctgtgtgaaaattgttatcccgctcacaatttccacacaaccatacggag

SEQ ID NO: 458 - DNA, 464 bp, Homo sapiens
ctatcactacttagggcgaattggagctccccgcggtggcggccgcccgggcaggtacattggtgatcggagtatagttggagcgctttgtcatgatttccaggttggctttgtccacagctatgttggccaatgcaccttgagcctcaaagctggcaaatcgtccaaattcttcaagccgccagaccgtctccttctttgccatatccacatggaaaatctcatcaccccgcgtacctcggccgctctagaactagtggatcccccgggctgcaggaattcgatatcaagcttatcgataccgtcgacctcgagggggggcccggtacccagcttttgttccctttagtgagggttaattgcgccgcttggcgtaattcattggtcatagcctgtttcctgtgtgaaattgtttatccgctcacaatttccacacaaacattaccgagccgggagcattaaag

SEQ ID NO: 459 - DNA, 522 bp, Homo sapiens
  misc_feature 2, 3, 5, 393, 403, 442, 443, 453, 455, 469, 478, 486, 492,497, 500: n = A,T,C or G
gnnantgcccgatcatacttagggcgaattggagctccccgcggtggcggccgaggtacgcgggggctgaaaagtgcgccctacgaaaggacggtcgactccggcggggcccaggtgccaatgggtcatgtttggttagaaggtgacaatctacagaattctacagattccaggtgctatggacctattccatatggactaataagaggacgaatcttctttaagattttggcttctgagtgattttgggatttttacgtgccagccctaatggccacagattttctgatgattagtaagcatttattcttttgacttgattatttgtctccttttcatgtgaattttattacttcccgttttaaacccgtggtacccttgcccggggcgggnccgcttctangaacttaggtgggaattcccccccccggggcctgccaanngaaatttttngnattattccaaaggncttttattncgaattanccccgntcctnaancccttctgaaaggggggggggg

SEQ ID NO: 460 - DNA, 475 bp, Homo sapiens
cggctaacgactactatagggcgaattggagctccccgcggtggcggccgaggtactttttgtttgttttttttttttcaccttaagggaggatttaatttgctcccaactgattgtcacttaaatgaaaatttaaaaatgaataaaaagacatacttctcagctgcaaatattatggagaattggggcacccacaggaatgaagagagaaagcagctcccctaacttcaaaaaccattttgggtacctgcccgggcggcccgttctagaactagtggatcccccgggctgcaggaattcgatatcaagcttatcgataccgtcgacctcgagggggggcccggtacccagcttttgttccctttagtgaggggttaaattgccgccgccttgggcggtaaatcatgggtcataggctgttttccttgtgtgaaaattgtttatcccgctcacaatttccacaccaacaataacc

SEQ ID NO: 461 - DNA, 489 bp, Homo sapiens
  misc_feature 2, 454, 485: n = A,T,C or G
gnttgtgacggcgtatcactactatagggcgaattggagctccccgcggtggcggccgcccgggcaggtacttttttttttttttttttttcttttcaatgttcacagctacttctcctttaagagaagcagaaaggcagttttaggtgtggtctgtctttattcccccgaacttgatcaatgtatacaatgcttacacattcaaatatgtgcaagattcaacaaggaacactctccactgctgtgcttgaagtacctcggcccgctctagaactagtgggatcccccgggctgcaggaattcgatatcaagcttatcgataccgtcgacctcgagggggggcccggtacccagcttttgttccctttagtgagggttaattgccgcgcttggcgtaatcatgggtcatagcttgtttcctgtgtgaaaattgttaatcccgcttcacaatttncaccacaaacataccgagccggggagcattnaaag

SEQ ID NO: 462 - DNA, 471 bp, Homo sapiens
  misc_feature 247, 309, 468: n = A,T,C or G
ctatcactacttagggcgaattggagctccccgcggtggcggccgaggtacgcggggtcccagctcctggctgacttctagtcttctggttgaagctgcgcctttagatgacacgaccctacccacccctgtttccagcggatgcccgggcctggagcccacagaattcttccagtccctgggtggggacggagaaaggaaccgtttcagattgagatggcccatgggcaccaccacgctcgccttnaagttccagcatggagtgattgcagcagtggattctcgggcctcagctgggtcctacattantgccttacgggtgaacaaggtgattgaagattaacccttacctgcttggcaccatgtctggcctgtgcagcagactgttcaagtacctgcccgggccggcccgctctagaactagtgggatcccccgggctgcaaggaattcgatattcaagcttatcngat

SEQ ID NO: 463 - DNA, 496 bp, Homo sapiens
  misc_feature 2, 3, 4, 5, 8, 412, 473: n = A,T,C or G
gnnnnggngccgtatcgctactatagggcgaattggagctccccgcggtggcggccgaggtacccattcccttgatgtctacaatatcacctttcttatagattcgcatatatgtggccaaaggaacaactccatgttttctaaaggcctagagaacatatatcgggtgcctctcctctttccctttgtgttcgtcattttggcgaattactggaaagatggcggttcccggcccgctctagaaactaagtgggatcccccgggctgcagggaattcgatatcaagcttatcgataccgtcgacctcgaggggggggcccggtacccagcttttgttccctttaagtgagggttaattgcgccgcttggcgtaaatcatggtcattagcttgtttccctgtggtgaaaattngttatcccgcttcacaaattccacaccaaccattaccgaagcccggggagcattaaaagtngttaaaagccctgggggtgccct

SEQ ID NO: 464 - DNA, 473 bp, Homo sapiens
  misc_feature 11, 18, 404, 414, 459, 460: n = A,T,C or G
ctatcactcantacttanggcgaattggagctccccgcggtggcggccgaggtacttcaatgataaaaccattgatgaggaactagaacgggacaagagggtcacttggattgtggagttctttgccaattggtctaatgactgccaatcatttgcccctatctatgctgacctctcccttaaatacaactgtacctgcccgggcggcccgctctagaactagtgggatcccccgggctgcaggaattcgatatcaagcttatcgataccgtcgacctcgagggggggcccggtacccagcttttgttccctttagtgagggttaattgccgcgcttggcgtaatcattggtcatagctgtttcctgtgttgaaattgttatccgctcacaattcccacacaancataccgaanccgggagccataaagtgtaaagccctggggtgcctaaatgaagtnnagctaactcacat

SEQ ID NO: 465 - DNA, 462 bp, Homo sapiens
  misc_feature 417: n = A,T,C or G
tactatagggcgaattggagctccaccgcggtggcggccgaggtacaaaaaatattcatataaacgttgttcacacgtaggtcctagattaccagcttctatgcaaaaaaaggaaatgaagaaaaatagatttgttaactagtattggaaactaactttgtgcctggcttaaaacctccctcacgctcgtctgtcccacacaaatgtttaagaagtcacttgcaatgtacctgcccgggcggcccgctctagaactagtgggatcccccgggctgcaggaattcgatatcaagcttatcgataccgtcgacctcgagggggggcccggtacccagcttttgttccctttagtgagggttaattgcgcgcttggcgtaatcatggtcatagctgtttcctgtgtggaaattgttatcncgctcacaatttccacacaacataccgaagccggggagccataaa

SEQ ID NO: 466 - DNA, 483 bp, Homo sapiens
  misc_feature 4, 6, 311, 318, 345, 374, 421, 425, 440, 445, 453: n = A,T,C or G
cgcnancactactatagggcgaattggagctccccgcggtggcggccgaggtacaaaactttttaaattttatattattttgaaactttgctttgggtttgtggcaccctggccaccccatctggctgtgacagcctctgcagtccgtgggctggcagtttgttgatcttttaagtttccttccctacccagtccccattttctggtaaaggtttctaggaggtctgttaaggtgtacctgcccgggcggcccgctctagaactagtggatcccccgggcctgcaggaattcgatatcaagcttatcgatncccgtcnacctcttagggggggcccggtacccanctttttgttcccttttagtgagggttaantgccgccgccttggccgataattcatgggtcatagcctgttttcctngtgnggaaaattgtttatnccgcnttaacaantttccaccacaaaccaattaccgaagcccg

SEQ ID NO: 467 - DNA, 496 bp, Homo sapiens
  misc_feature 1, 216, 289, 431, 447, 448, 449, 461, 474, 487, 488, 489,490: n = A,T,C or G
natacactactatagggcgaattggagctccccgcggtggcggccgaggtactatttacaaagcatgaattcactacaatgctcaactgtttgtttagctttatctcacttggggaatttattcctgtctgctgcattgtaggtagctgggtaggatatatttccacttgctttttaaattaagttcttcacctccattgacacctcggttttttnggttttctccctatagtgttgggttgggtgctaagacaccagtctgacccccagaaatggggaggttatttcnatccatcttttcctccatcctttccaaaaaccacatatctacacaagggaaaaatttaatacatctaggaatttttttttttaattacaagctatttaaagagatgaatgtggccaaagttttacacaattgaaaataaggnaaaccagaacggcatnnngttaaacccggntttattaagcctngccaggaaagttnnnnggaaaa

SEQ ID NO: 468 - DNA, 475 bp, Homo sapiens
  misc_feature 2: n = A,T,C or G
cnatcactacttagggcgaattggagctccccgcggtggcggccgaggtacaactgagcacatagcaccagaatattggaacagatgcttctccaaagccaagggttgccttacatttagagtgggaaaagaggaaaatgagttagcagaggagcagcggggaggggggtaaattacaggacataatttgcttctaaaaattttgtgttcgtgttgtagttatataattaacttttctattgtacctgcccgggcggcccgctctagaactagtggatcccccgggctgcaggaattcgatatcaagcttatcgataccgtcgacctcgagggggggcccggtacccagcttttgttccctttagtgagggttaattgcgcgcttggcgtaatcatggtcatagctgtttcctgtgtgaaattgttatccgctcacaattccacacaacatacgagccgggagcataaagtgtaa

SEQ ID NO: 469 - DNA, 455 bp, Homo sapiens
  misc_feature 431: n = A,T,C or G
ggcgaattggagctccccgcggtggcggccgaggtacggagcattataatattgctgacagtaataaactgccacatcttcagcctgcaggctgctgatggtgagagtgaaatctgtcccagacccgctgccactgaatcggtcagggaccccggattcccgggtagatgcccagttaatgagcagcttaggagactgtcctggtttctgctggtacctgcccgggcggccgctctagaactagtggatcccccgggctgcaggaattcgatatcaagcttatcgataccgtcgacctcgagggggggcccggtacccagcttttgttccctttagtgagggttaattgcgcgcttggcgtaatcatggtcatagctgtttcctgtgtgaaattgttatccgctcacaattccacacaacatacgagccgnggagcataaagttgttaaagcctg

SEQ ID NO: 470 - DNA, 470 bp, Homo sapiens
  misc_feature 4, 10: n = A,T,C or G
ctancgactnctatagggcgaattggagctccccgcggtggcggccgcccgggcaggtacgcgggggttcccaggatggtgatccgtgtatatattgcatcttcctctggctctacagcgggaagagatggatcaagatggtgaaatagaagactccaccaatcatccccttcacacgaacaccaatttaacaactatctacatgcacacacacaaaagcttcatcaatttaacaactatctacatgcacacacacaaaacctttgtaagaactcaaaatcagattaagaagaaacaacaagatgtgcttggtttcctagaagccaacaaaataggatttgaagaaaaagatattgcagccaatgaagagaatcggaagtggatgagagaaaatgtacctcggccgctctagaactagtggatcccccgggctgcaggaattcgatatcaagcttatcgataccgtcgac

SEQ ID NO: 471 - DNA, 491 bp, Homo sapiens
  misc_feature 2, 3, 7, 17, 103, 104, 163, 169, 202, 308, 462: n = A,T,C or G
gnnagtntttgacgccnctttactatacggcgaattggagctccccgcggtggcggccgaggtaccgtttttgttggtttttttctccctcaaagtgaaatgnnagactattgtagggttttgagccaaggagtgatattatctgaattctgttttaaaaggntcattntggctcctgtgtggaggcagggtagctacttanaaaccaagccatctcagcctcccgatttgtaagagatgtggtctcactatgttgcccagactggtcttgaactcctggcctcatgtgatcctcccaccttggcctnccaaaatactaaaatgatagatatgagccgccacacctggccataagcttcagccttgagcagatactttctaaacactttatatagggaaaaaaaactaattctttgcgtagcccaaggtgttcatttttgccgagaataaccgtagccatangtgtttacaattacgtgggtggtaatttt

SEQ ID NO: 472 - DNA, 506 bp, Homo sapiens
  misc_feature 201, 207, 269, 291, 301, 307, 388, 452, 454, 463, 477, 489,500: n = A,T,C or G
ctaacactacttagggcgaattggagctccccgcggtggcggccgaaggagaaatagaacatgtgcaggcaaaagaagaaaggcgcgggctgggtgggaagaggattcggactcgtcacactgcagagcagcagagcgagaaaggatgagaagaggcagagaaggcgacggcagaagaaaaaaggaaaaactgcggcccgngatcanagcctgaaagtgtcccgcgtacctcggccgctctagaactagtggatcccccgggctgcatngaattcgatatcaagcttatcnatacccgtcnacctcnagggggggcccggtacccagcttttgttccctttagtgagggttaattgcgccgcttggcgtaatcatggttcattagctntttcctgtgtgaaattgtttattcccgctcaccaattttccacacaaccttacttatcccgggnancattaaagntgtaaaaagccctngggggttgcccntaaattggagntgaagc

SEQ ID NO: 473 - DNA, 592 bp, Homo sapiens
  misc_feature 4, 117, 118, 146, 156, 157, 164, 168, 178, 182, 193, 203,217, 227, 236, 237, 238, 242, 248, 258, 264, 265, 269, 273,277, 283, 292, 294, 299, 301, 310, 313, 318, 323, 331, 338,343, 347, 366, 377, 380, 381, 383, 395, 396, 402, 406: n = A,T,C or G
  misc_feature 407, 418, 422, 429, 432, 436, 440, 455, 456, 459, 466, 470,479, 481, 488, 501, 513, 525, 526, 527, 535, 539, 553, 554,568, 577, 582, 585, 589: n = A,T,C or G
ctancactacttagggcgaattggagctccccgcggtggcggccgaggtacgcggggggagcgctttaggctggccggcggcgctgggaggtggagtcgttgctgttgctgtttgtnnagcctgtggcgcggcttctgtgggccgnaaccttaaannatagccncaanggctgaaaanggtnataatgaaaanatggttgccntgaaagccaaaaanttctttcatncaaattgannntttnttttgngcaatttaantttttnnccangganaaantttttntaaaaaggnanaccantnttaaaaacntgntttanaaagngctgggtntactctngcccngggnggggggcccgtttcataanaaacataaggnggnnantcccccccgggnncgtggnaagnnaaaattttcantatnataaaanccntttnattnaatttaccccgttcnntanccctctnaagnggggggggngncccaggntacccccaaaatntttttttgttcnccctttttaaannngagggggntttnaaattttccccccnncttttggggcaganaaatattantgggnatnaatnagg

SEQ ID NO: 474 - DNA, 844 bp, Homo sapiens
  misc_feature 638, 652, 663, 683, 724, 733, 753, 754, 774, 802, 803, 811,813, 818, 830, 831: n = A,T,C or G
cgcccgtatacgactactatagggcgaattggagctccaccgcggtggcggcccgaggtaccatcatggcttgagtgctctgaagcccatccggactacttccaaacaccagcacccagtggacaatgctgggcttttttcctgtatgactttttcgtgactttcttctctggcccgtgtggccacaagaagggggagctctcaatggaagacgtgtggtctctgtccaagcacgagtcttctgacgtgaactgcagaagactagagagactgtggcaagaagagctgaatgaagttgggccagacgctgcttccctgcgaagggttgtgtggaccttctgccgcaccaggctcatcctgtccatcgtgtgcctgatgatcacgcagctggctggcttcagtggaccaccttcctttggagactgctccatcagtgccgaggtgtgtgggaacaggcttcactgcaccgccatcttactgagttgcttcacgtgaggaaaagggggctttggccctgtgactcagttccacattttggattgcatactggaaaagaaccaatcttcttgctagtaaaccagcaacccggctgtatacagtggtgacccaagcaatggatataaacctaaaaatctganggaagggagaggtngaatacagtanttcttggaatctgaagtctnctatttgatcaaggttatttcctgggacttggcaaaaaatntgattgggnggggatcttctaagacctannggacatctgggattaaattnaatctcaggaaaacaagaaattaacccnnaaagagtntnggttntggaattaacgnncttccttccaacc

SEQ ID NO: 475 - DNA, 850 bp, Homo sapiens
  misc_feature 3, 415, 440, 466, 662, 667, 697, 703, 705, 708, 740, 750,764, 770, 779, 784, 788, 796, 802, 809, 814, 815, 816, 818,822, 824, 828, 830, 837, 849: n = A,T,C or G
tgngccgcgtatacgactactatagggcgaattggagctccacccgcggtggcggccgcccgggcaggtacatgatacatgaccccaggttccagtgtagaacctgagtcccccattccccaaagccatccctgcattgatatgtcttgactctcctgtctacttttgcacacacccttaatttttaattggttttcttgtaaatacagttttgtacacttttggtcaggggaccaagctggagatcaaacgaactgtggctgcaccatctgtcttcatcttcccgccatctgatgagcagttgaaatctggaactgcctctgttgtgtgcctgctgaataacttctatcccagagagaacaaagtaccttggccgctctaagaactagtggatcccccgggctgcaggaattcnatatcaagcttatcgatacccgtcnacctcgagggggggcccggtacccancttttgttccctttagtgagggttaattgcgcgcttggcgtaatcatgggcatagctgtttcctgtgtgaaattggtattccgctcacaattccacacaaacataccaaccgggagcataaagtgtaaagcctggggtgcctaatgagtgagctaactcacaattaattggggttggcgcttactggccccttttncaggncgggaaaccttttctgccaagctggaattnatggantnggnccaacccccggggaaaaggcgggtttgcgtanttgggggctnttttcgctttcctngcttanttgaaatcncttgncctnggcggttnggttgngggggangcggnnntnaaantnattnanaggcggnaataccggtaant

SEQ ID NO: 476 - DNA, 474 bp, Homo sapiens
cctaacatacttagggcgaattggagctccccgcggtggcggccgaggtacgagttgctacgctgctgacagtaataaactgcaaaatcttcaggctctaggctgctgatggtgagagtgaagtctgtcccagacccactgccactgaacctggctgggatgccagtggccctgttggatgcatcatagatgaggagcctgggagcctggccaggtttctgttggtacctgcccgggcggccgctctagaactagtggatcccccgggctgcaggaattcgatatcaagcttatcgataccgtcgacctcgaggggggggcccggtacccagcttttgttccctttagtgagggttaattgcgccgcttggcgtaaatcatgggtcatagctgtttcctgtggtgaaaaatttgtttatcccgcttcacaattccacacaacatacgaagcccgggagcataaaagtgtaaagc

SEQ ID NO: 477 - DNA, 464 bp, Homo sapiens
  misc_feature 8: n = A,T,C or G
cctattanttagggcgaattggagctccccgcggtggcggccgaggtactcactctcctagattaggagtttaggttgccccaatacccatgcagagaacttggagctgaaaggttccacagcttcaaacctaggcatacttgtgaatgcgtggtggccacccattgattatcccttggtgctagtgcttgtacctgcccgggcggccgctctagaactagtggatcccccgggctgcaggaattcgatatcaagcttatcgataccgtcgacctcgagggggggcccggtacccagcttttgttccctttaagtgagggttaattgcgcgcttggcgtaatcatggtcataagctgtttcctgtgtgaaattgttatccgctcacaattttcacacaacatacgagccgggagcataaagtgtaaagcctggggtgcctaatgagtgagcctaactcacattt

SEQ ID NO: 478 - DNA, 465 bp, Homo sapiens
  misc_feature 10, 17, 93, 423: n = A,T,C or G
ccactcctantacttanggcgaattggagctccccgcggtggcggccgaggtacgcggggaagagagagggagagagagagaaagaagagcangaaagatcccgaaaggaggaagaggtggcgaaaaatcaactgccctgctggatttgtctttctcagcaccttggcgaagccttgggtttctttcttaaaggactgatttttagaactccacatttgagaacggccgctctagaactagtggatcccccgggctgcaggaattcgatatcaagcttatcgataccgtcgacctcgagggggggcccggtacccagcttttgttccctttagtgagggttaattgcgccgcttggcgtaatcatggtcatagctgtttcctgtgtgaaattgttatccgctcacaattccacacaacatacnagccgggagcataaagtgtaaagcctggggtgcctaatgagt

SEQ ID NO: 479 - DNA, 479 bp, Homo sapiens
  misc_feature 7, 59, 242, 359: n = A,T,C or G
gccgcantcgactactatagggcgaattggagctccccgcggtggcggccgaggtacanggagatgtggaacctggttccaggcaaaccaacgcttccaactccaaagagttgggggttgttagagagccctttcccagaaagcccgacactcatgtctttagtctggcagctgcactagtcactttcaactggctgacaggtgcccagtatttagcccccaaattctaaaggaaaaagttnggacaagaatagcaagtgaaaggggatccgatggtaccttgcccgggcggcccgctctagaactagtgggatcccccgggctgcaggaattcgatatcaaagcttatcgataccgtncgacctcgaggggggggcccggtacccagctttttggttccctttaagtgaggggttaaatttgccgcgcttggccgtaaatcatgggtcaataagctgttttcctggtgtgaaattgtt

SEQ ID NO: 480 - DNA, 474 bp, Homo sapiens
  misc_feature 7: n = A,T,C or G
cggctancgactactatagggcgaattggagctccaccgcggtggcggccgaggtactggctgtccacccctgagcccatgcccatgtcaatggcacccatcacgggggaaaacataagaccatttattagtaggtgtgctgtgtgtgaggcgcctgccatggtgatggccgtgcacagccagaccattcagatcccaccgtgccccagcgggtgggtcctcgcttgtgggatcggctactcttttgtgatgcacaccagcgctggtgcagaaggctctggccaagccctggcgtcccccggctcctgcctggaggagtttagaagtgcgccattcatcgagtgtcacggcccgctctagaaactagtgggatcccccgggcctgcaggaaatttccgatatcaagcttatcgatacccgttcgacctcgaggggggggggccccggttacccaagcttttgtttccctttagt

SEQ ID NO: 481 - DNA, 529 bp, Homo sapiens
  misc_feature 2, 3, 4, 5, 196, 264, 302, 304, 315, 335, 361, 410, 437,488, 500, 502, 507, 516, 519, 526: n = A,T,C or G
gnnnnagatcccgaatcatactatagggcgaattggagctccccgcggtggcggccgaggtactggtgcacacccccactcccacggtgtgggtagtgccgtgaattggaaaccgcagataccctggaggcctggtaggcagctgactgcccagcactgggcagactgatagtccgtaagtctgatggcaatgacnacctatagttctgaggaaaaggaaggtggaactcaaaatttccttgtgcttggacttgagaaaactgnaatcttgaaggtttggccgaagttcttgaagggtcccntnccaaggggtangggcttagcaagcacttagnaaaggggcaagcctccttcctttggnaaagatttgcttgcccagttgctgttttccagaaatgtggcttggcctncttaaaatacccctggtgttccccgtnaaaatggggccaaacgaagtcttattggacacaaggggttggggcccgggnctttggaattangnacctnggaaaaaanaangggattnaat

SEQ ID NO: 482 - DNA, 472 bp, Homo sapiens
  misc_feature 1, 2, 5, 438: n = A,T,C or G
nnggnccctatcatacttagggcgaattggagctccccgcggtggcggccgaggtactgcggccccagagctcctgccagtctgggcgacagctagctctccgcctcttcagcaaagttcggccccctgttgggggtatctctgttaaggagcattttgaggtaaatgtggtgcctctcaccatccagctgacacaccagttcttccacagaatgatgggctttttctttcctggccgaagtgtggaagatgatgaagttggtgatgaagaggataagtccaaactggtgactacttggaataccagtggtgaagcctcggcagctgattgcaacaagatgatgcagtaccttgcccgggccggccgctctagaaactagtgggatcccccggggcctgcagggaaattcgatatcaagccttatcgatacccgttcnacctcgagggggggggcccggtacccagcttttt

SEQ ID NO: 483 - DNA, 463 bp, Homo sapiens
  misc_feature 348, 462: n = A,T,C or G
cctaacgactactatagggcgaattggagctccaccgcggtggcggccgtcgcactcatttacccggagacagggaggggctcttctgcgtgtagtggttgtgcagaccctcatgcatcacggagcatgagaagacgttcccctgccgccacctgctcttgtccacggtgagcttgctgtagaggaagaaggagctgtcggagtccagcacgggaggcgtggtcttgtagttgttctccggctgcccattgctctcccactccacggcgcccgcgtacctcggccgctctagaactagtggatcccccgggctgcaggaattcgatatcaagcttatcgataccgtcngacctcgagggggggcccggttacccagctttttgttccctttagtgaagggttaaatttgccgccgcttggccgtaaatcatggtcatagctgttttcctggtggtgaaaatng

SEQ ID NO: 484 - DNA, 505 bp, Homo sapiens
  misc_feature 206, 225, 276, 354, 375, 393, 433, 437, 444, 460, 472, 478,503: n = A,T,C or G
ctatcatacttagggcgaattggagctccccgcggtggcggccgcccgggcaggtacaggaaagagagagccttctggtgaaaatcaaagtcctggagcaagacaaggcaaggctgcagaggctggaggatgagctgaatcgtgcaaaatcaactctagaggcagaaaccagggtgaaacagcgcctggagtgtgagaaacagcanatttcagaatgaccttgantcagttggaagactcaattattcccgcaagggaggaaggctactaggaagnatagaatcggaaagagaaaagagtgagagaagagaagaacagtcttaggagttgagatcgaaaagactccaagctggngatccaagaagaatttgtagnagaggtgcaggcgtttangcttggagggatttcttccccagggaggacccccagaccnccantttttgnaaaaccaggaaaccgncttccccgattntttccnagaaggggggaagaattttggattnat

SEQ ID NO: 485 - DNA, 521 bp, Homo sapiens
  misc_feature 2, 3, 4, 5, 6, 8, 31, 39, 51, 52, 68, 346, 352, 426, 432,479, 483, 495, 499, 510, 518, 520: n = A,T,C or G
gnnnnngncgccgtatcactcactactatanggcgaatnggagctccccgnngtggcggccgcccggncaggtacacgcccaatgagatctgcgtcatccagagaggaatgcggttcagcatagatgtctttgaggagaccaggggctacatcttggaggtctatggtgtccactttgagttacctgaccttggaccaattggggccaatggcttggccaatcctcgtgatttcttgatacccattgcctgggtatgagggatcgccaagttaccttggccgctctagaactagtggatcccccgggcttgcaggaattcgatatcaagcttatcgataccgtccnacctcnagggggggggcccggtaccccaagcttttttgttcccttttagttgaggggtttaaattttgccgccgccttgngccgtnaaatcatgggttcattaagccttggttttcccttgttgttggaaaantttngttttaattccnggcnttcaccaaatnttcccaanant

SEQ ID NO: 486 - DNA, 482 bp, Homo sapiens
  misc_feature 2, 3, 4, 5, 6, 9, 15, 23: n = A,T,C or G
gnnnnngtnccgcgnatcgactnctatagggcgaattggagctccccgcggtggcgagcggccgcccgggcaggtacctatgattgaaaacagtagttggtctatgacttttgaggagagggagaaccgaagattacaggaggccagcatgaggttggaacaagagaatgatgaccttgcccatgaactagtaacaagcaaaattgctctacggaatgacttggatcaggcagaagacaaggcagatgtgttgaataaagagctccttttgaccaaacagaggctggtggagactgaagaggagaagaggaagcaagaggaagagactgcccagctaaaaagaagtcttcaggaaacagctagagaaggcagaatatggaaataaagaaagactacagctatcattgcttgaagttataaacaggatcttgttccgcagtttgaagtacctcggcccgcttctagaaacctagtgggatccc

SEQ ID NO: 487 - DNA, 486 bp, Homo sapiens
  misc_feature 2, 3, 4, 7, 433: n = A,T,C or G
gnnngtngccgcgaatcactactataggggcgaattggagctccccgcggtggcggccgaggtacattttatttttctcaagaaatacgttaagtccaactgctgaacatacatcttgaatctctgtagctgtaggattttcaacagccttacttatggggattcgccttccctctgcgatggtcttcttattatttaaataagcaggatagatacaaataaacctgtcctggtcggcccgctctagaactagtgggatcccccgggctgcaaggaattcgatatcaagcttatcgataccgtcgacctcgagggggggcccggtacccagcttttgttccctttagtgagggttaattgcgccgcttggcgtaatcatgggtcatagctgttttcctgtgtggaaattgttatcccgctcaccaatttccancaccaaccattaccgaagcccgggaagccattaaaagtgtaaaagcctggggg

SEQ ID NO: 488 - DNA, 469 bp, Homo sapiens
  misc_feature 406: n = A,T,C or G
cgctatcactactatagggcgaattggagctccccgcggtggcggccgaggtactttttttgtttgttttttttttcaccttaagggaggatttaatttgctcccaactgattgtcacttaaatgaaaatttaaaaatgaataaaaagacatacttctcagctgcaagtattatggagaattggggcacccacaggaatgaagagagaaagcagctccctaacttcaaaaaccattttggtacctgcccgggcggccgctctagaactagtggatcccccgggctgcaggaattcgatatcaagcttatcgataccgtcgacctcgagggggggcccggtacccagcttttgttccctttagtgaggggttaattgcgccgctttggccgtaatcatggtcatagnctgttttcctgtgtgaaaattgtttatccgctcacaattccacacaaccataccgaagccggg

SEQ ID NO: 489 - DNA, 478 bp, Homo sapiens
  misc_feature 2, 3, 4, 5, 7, 230: n = A,T,C or G
gnnnngnccgcgtatcgactactatagggcgaattggagctccccgcggtggcggccgaggtactgatttcaaaacgtggacgttcggccaagggaccaaggtggagatcaaacgaactgtggctgcaccatctgtcttcatcttcccgccatctgatgagcagttgaaatctggaactgcctctgttgtgtgcctgctgaataacttctatcccagagaggccaaagtncctgcccgggcggccgctctagaactagtggatcccccgggctgcaggaattcgatatcaagcttatcgataccgtcgacctcgagggggggcccggtacccagcttttgttccctttagtgagggttaattgcgccgcttggccgtaatcatggtcatagcttgtttcctgtgtgaaattgttatcccgctcacaaattccacaccaacattacgagccggggagcattaaagtgtaaaagccctgg

SEQ ID NO: 490 - DNA, 349 bp, Homo sapiens
  misc_feature 1, 10, 54, 93, 96, 97, 102, 103, 104, 105, 131, 134, 138,233, 250, 260, 264, 274, 291, 295, 303, 311, 314, 317, 321,332, 333, 338, 349: n = A,T,C or G
ngcctcgtancaactactatagggcgaattggagctccccgcggtggcggccgnccgggcaggtactatctgtatcattctgcaaaccttttnggnnaattnnnncccccctcaacaatttctgggggatnctntttnctggttaaatacatgtggatttcatttgttggcatttttacagatatatagtattacataagaatttcccatattggtccgggatgggctttctnagttggttctaattttnggctcctacnaatnaagcccaagnaaaattcctagggcggntttnccggggcnttcaaccncanaangggnaaccggtaagnnttttncaaaatggtcn

SEQ ID NO: 491 - DNA, 405 bp, Homo sapiens
cgcgtaatacgactcactatagggcgaattggagctccaccgcggtggcggccgaggtacctaatgaaacccgtctttggcctgtggctgagacgccatctgtaggcggtgaaatctttccagcctatgtgacgagggtcatgccacagggtgcgcacctgaaggaaaaggaaaaggaaaggttgaaacacagctccttcaggtgacagaacagatgtcccatggtgaccaaggaccccagcctccattgactgtaagaagatgaaccacaggcaacaattaagatcaactttcaaatccctcccttgtcatagactctcctaagcccgttcaagaaacctctgcttctctgacacacggaaagaatgctggggaagagggtgagtttgtttttcattaaaagaa

SEQ ID NO: 492 - DNA, 478 bp, Homo sapiens
  misc_feature 2, 3, 4, 5, 7, 390, 440: n = A,T,C or G
gnnnngncgccgtatcgctacttagggcgaattggagctccccgcggtggcggccgcccgggcaggtacacttttggtcaggggaccaagctggagatcaaacgaactgtggctgcaccatctgtcttcatcttcccgccatctgatgagcagttgaaatctggaactgcctctgttgtgtgcctgctgaataacttctatcccagagaggccaaagtacctcggcccgctctagaactaagtggatcccccgggctgcaggaattcgatatcaagcttatcgataccgtcgacctcgagggggggcccggtacccagcttttgttccctttagtgagggttaattgcgcgcttggccgtaatcatggtcataagctgtttcctgtgtgnaaattgttatcccgctcacaattccacaccaacattaccgaagcccgggnagcattaaaagtgtaaaagcctgggggtgccctaatga

SEQ ID NO: 493 - DNA, 388 bp, Homo sapiens
  misc_feature 4, 51, 55, 123, 147, 172, 184, 187, 196, 201, 210, 212, 259,293, 304, 360: n = A,T,C or G
actnctatagggcgaattggagctccccgcggtggcggccgaggtactacntgcncatcaatgtatgatgatgactatttggcttaaatgggatacaatattcgaccacgctcaagaaccttnagaagcttgactgaaatttctaanactgatatttcttactgaaatgtgncctttgggtttnaanctgaggttnctatngtttgcttncnacagacatatgtttgacatacaaaatatggtaaagatccactacttntgcagaggtatattggccatattattcccttatnggcctggattncctcatcaatagcacaattcattcaaatgtggaaagaaaggcattgatacactgancagagtaaggaaagtgatatcatatcat

SEQ ID NO: 494 - DNA, 447 bp, Homo sapiens
  misc_feature 377, 442: n = A,T,C or G
ggcgaattggagctccaccgcggtggcggccgcccgggcaggtactacaatgagacagttggatccatttttccagggttaagcctgcaatacctgaagctccagacctgaaacccagagctcctgccagctgctatgcctgtgaacctgtggaagacctgaagtacctcggccgctctagaactagtggatcccccgggctgcaggaattcgatatcaagcttatcgataccgtcgacctcgagggggggcccggtacccagcttttgttccctttagtgagggttaattgcgcgcttggcgtaatcatggtcatagctgtttcctgtgtgaaattgttatccgctcacaattccacacaacataccgagccgggnagcataaaagtgtaaaagcctgggggtgcctaatgagtgagctaactcacattaattgcgttgcnctcac

SEQ ID NO: 495 - DNA, 785 bp, Homo sapiens
  misc_feature 2, 3, 5, 6, 13, 16, 24, 27, 28, 30, 35, 39, 40, 41, 54, 61,62, 63, 74, 83, 86, 87, 99, 112, 115, 119, 128, 129, 347,376, 399, 422, 470, 487, 497, 509, 520, 522, 523, 543, 561,571, 583, 587, 591, 592, 596, 598, 601, 602, 608, 609: n = A,T,C or G
  misc_feature 613, 616, 634, 639, 649, 652, 655, 668, 676, 703, 707, 719,721, 726, 728, 739, 748, 760, 762, 765, 769, 775, 779, 785: n = A,T,C or G
annannttttttnaanagtttcanaanntntttanacannnatttttaaaaacnttttcannngtttctacaanatattaatncanntattcataattnttacacctttttnacntttnttctccgtnnacgatcactatagggcgaattggagctccaccgcggtggccggccgctctagaactagtggatcccccgggctgcaggaattcgatatcaagcttatcgataccgtcgacctcgagggggggcccggtacccagcttttgttccctttagtgagggttaattgcgcgcttggcgtaatcatggtcatagctgttttcctgtgtgaaattgttattccngctcacaaattccacacaaacattaccgnagcccggaggaggcaataaaagntgttaaaagctctggggggtgcnctaattgaagttgaagcctaaacatcaccatttaaatttgccgttttncgacttcaccttgcccngcctttttcncaagttcccgtngtaaaaacccntnnttccgttggccccagggccnttgccaattttaaaattngtaaaattcnggggccccatancctntcannccgngntgnngtaagnnaagnggnccggggttttcttggccngtttnatttttgggnggnccngccttcctttttnaccggtcntttttctctttccggcctttacaaacnttgntaacctttcggncntttgncngacctttcggnggtttccgnttatttccgggncnttnggcngtggcntgtnaagacn

SEQ ID NO: 496 - DNA, 449 bp, Homo sapiens
  misc_feature 106, 352, 354, 431, 436: n = A,T,C or G
ggcgaattggagctccaccgcggtggcggccgaggtacctcattactgctccccatgtggcctccttacccaggaaaattatgaaagtctgaactcagtctctttngacaccatctcaacaggaggggaaggggcacctcattattgcctggcaagggaggaagtctaggttcctcactcagtctttgctggtgacacaggattctttgggaggccacttcaccaggctccacccattcagcccagcaggccgtgcttggtttgcgctactggcctggatcccatatcctgggtaaaatggtgaagggtgtgtgtgcaagtgggtgtgaggtctgaccacagtgcacagccngncacacaggctgcttgcagttggggctgggcaggcagctccagatgccagcacagatgcctccttcatgttgaaagcntgccngctggactaggca

SEQ ID NO: 497 - DNA, 808 bp, Homo sapiens
  misc_feature 4, 5, 6, 8, 9, 12, 16, 17, 21, 26, 27, 30, 33, 34, 35, 38,42, 46, 51, 57, 63, 67, 68, 70, 90, 91, 93, 102, 104, 113,114, 115, 120, 121, 125, 131, 132, 143, 145, 175, 182, 249,251, 258, 260, 262, 303, 311, 346, 353, 367, 381, 387: n = A,T,C or G
  misc_feature 388, 395, 400, 407, 409, 437, 447, 455, 472, 473, 487, 497,498, 502, 504, 509, 511, 513, 522, 523, 525, 528, 531, 533,537, 539, 540, 541, 548, 576, 583, 584, 587, 595, 600, 605,608, 609, 618, 620, 624, 630, 632, 643, 648, 660, 664: n = A,T,C or G
  misc_feature 667, 670, 677, 696, 706, 707, 715, 718, 719, 721, 722, 723,740, 741, 755, 758, 767, 771, 772, 776, 778, 780, 785, 788,791, 793, 798, 806, 807, 808: n = A,T,C or G
ttcnnntnnccnttanntctnaaacnnttnttnnntantttntttntctcncattantatatnattnnanaaagtttttaaatactttcnnanttctaaacnanaaactctcnnntagannaaanactttnnacacaactaantnctggcgaattggagctccaccgcggtggcnggccgangtacagcgggggggcggggggatagctgtccaaggtctcccccagcactgaggagctcgcctgctgncntcttgcncncnggaagcagcaccaagttcacggccaactgccttggcactanggtccaanaatggctacaacagtccctgcatggtttgccgcanatcggcnctgaaaatccaaantaaccttgcccggngctggnnctgcttnttaangaaactnanttgtgattccccccgtgggcattgccantgaaattttncacattanttcaaagcctgtaatanntaattaccttttcngaactcctcnnaaangnggggngngnggccccccnngnttntcncnccanannnttcttanctaggttttccacaccttctttaaagantagaaannggnggttcttnaaatnattgnctnncccgccttntngggnacccgntnaataataacanttggngggttacaattnaatnccnttngttttantcctctttggttggctagnaaaaattatnngttttaanttnncnnncttcaaccaaaattttnnccaactaccaaaanaantttacccgnaagnncccngngngtaanccnacntnaaaanaagatcgnnn

SEQ ID NO: 498 - DNA, 448 bp, Homo sapiens
  misc_feature 133, 224, 275, 367, 411, 412, 416, 441, 443, 446, 447: n = A,T,C or G
ggcgaattggagctccaccgcggtggcggccgcccgggcaggtactgggcgcagatgggcgaccgtcacaacactacggtccactggacatgtctgttgctgagagaaccactgggtgatgcaggcgttgcanaaagcatgttcacaatgaggtgcctggtaatcgtgagcttctcctcatacttgccccaggatgatacaactgactctggtcttggcaaggntgaacctcggccgctctagaactagtggatcccccgggctgcaggaattcnatatcaagcttatcgataccgtcgacctcgagggggggcccggtacccagcttttgttccctttagatgagggtataattgcgcgcttggcntaatcatgggtcatagctgtttccctgtgtgaaaatatgttatnncgcntcacaaattccacacaaacatactnanctnng

SEQ ID NO: 499 - DNA, 890 bp, Homo sapiens
  misc_feature 4, 6, 8, 11, 19, 21, 23, 28, 29, 30, 36, 38, 39, 41, 42,46, 47, 54, 58, 62, 65, 68, 76, 82, 85, 91, 94, 107, 109,111, 113, 114, 122, 127, 128, 130, 136, 143, 328, 331, 337,338, 351, 358, 367, 374, 377, 402, 410, 427, 447, 448, 458: n = A,T,C or G
  misc_feature 460, 463, 468, 469, 475, 484, 490, 493, 495, 505, 511, 523,529, 533, 548, 559, 568, 601, 608, 612, 619, 635, 642, 651,692, 695, 717, 729, 740, 745, 748, 750, 751, 755, 758, 776,778, 806, 818, 819, 820, 833, 834, 836, 842, 858, 861: n = A,T,C or G
  misc_feature 864, 867, 877, 883: n = A,T,C or G
taantngnccntattcttntnanattcnnnttcttntnntnnttannagctttnttantatnatnttnttattttnatactntcntaatantantattattatatantntntnnaattattnagatnnangtaatncgcatanacgactcactatagggcgaattggagctccaccgcggtggcggccgcccgggcaggtacgcgggctacaagcataaggcatcatgcctggctaatttttttacatgttttttttttgtcgagattatggtatacactatgttgctctggctgatctcaaattcctgacctcaagtggatctttcntgncacatnncttcctaaaaagntgtccangggatttancattgcnatnaatggccaacccaattgcccttaanccgataanatggtatttttatcaantttaattgttattcaaatannttctttatantnttnttaanngtaagncctcacttnttaatnttngnatcttttttntgggcnccttaaataatnatatcnttcnaaattaaattataantaatttccttnttcgtaaanaacctttttattttttttttcgaatccaaaaanaattatntttngtggggnggctaattggaatttnttatttntacgtaagntaaaaggggggtgtggttttttttggaaaataaccatattntanctttataattaaaaatggaaantttttataaacntttatttatgntaacnccncnnttanttnttatatgaaaaaaggggnanaaaatataataaccaaccaataaatatntttattttcaannnaataataaaaaanntntatttnaaaaaatatgtcttantanggnaanttccaaaaangtcttnttccaat

SEQ ID NO: 500 - DNA, 458 bp, Homo sapiens
  misc_feature 349, 436: n = A,T,C or G
ggcgaattggagctccaccgcggtggcggccgaggtacatgtgtagaaagcagtgggaactgtgattggatttggcaacatgtcagctttatagttgccgattagtgatatgggtctgatttcgatctcttcctgatgtaaaccatgctcacccatatcccactatacaaatgcaaatggttgcctggttccatttatgcaagggagccagtacctgcccgggcggccgctctagaactagtggatcccccgggctgcaggaattcgatatcaagcttatcgataccgtcgacctcgagggggggcccggtacccagcttttgttccctttagtgagggttaatatgcncgcttggcgtaatcatggtcatagctgtttcctgtgtgaaattgttatccgctcacaattccacacaacatacgagccgggagcatnaagtgtaaaagcctggggttgc

SEQ ID NO: 501 - DNA, 470 bp, Homo sapiens
  misc_feature 441: n = A,T,C or G
tatcactacttagggcgaattggagctccccgcggtggcggccgaggtacggaggccagttattatactggagacagtaataaactgcaaaatcgtcagactgcaggctgctgatggtgagagtgaactctgtcccagacccactgccactgaacctgcctgggataccagtggccctggtggatgcaccatagatgaggagcctgggagcctggccaggtttctgctggtacctgcccgggcggccgctctagaactagtggatcccccgggctgcaggaattcgatatcaagcttatcgataccgtcgacctcgagggggggcccggtacccagcttttgttccctttagtgagggttaattgcgcgcttggcgtaatcatggtcatagctgtttcctgtgtgaaattgttatccgctcacaattccacacaacatacnagccgggagcataaagtgtaaagcctggg

SEQ ID NO: 502 - DNA, 847 bp, Homo sapiens
  misc_feature 1, 6, 8, 9, 10, 12, 13, 14, 18, 20, 21, 32, 36, 43, 45, 50,70, 74, 79, 81, 83, 85, 89, 91, 107, 108, 112, 121, 127,128, 130, 131, 135, 136, 140, 141, 147, 156, 165, 168, 327,333, 347, 372, 373, 375, 384, 387, 398, 415, 416, 436: n = A,T,C or G
  misc_feature 446, 447, 448, 449, 450, 453, 455, 464, 466, 469, 472, 478,485, 490, 493, 495, 496, 502, 508, 523, 532, 540, 542, 549,558, 560, 571, 583, 586, 595, 599, 600, 610, 613, 626, 634,650, 654, 659, 663, 677, 680, 686, 696, 697, 701, 704: n = A,T,C or G
  misc_feature 724, 727, 731, 737, 746, 757, 765, 767, 786, 787, 788, 791,795, 817, 827, 833, 839: n = A,T,C or G
ncactntnnntnnnaatnanntaaatcataanaacntactatncntttcngacttacatcaccctcttanttantaatncncntntctntntcctttttcttttagnnttanctcactccnaaatcnntnntagnncggnngcctcnactataatnactatattngcngaattggagctccaccgcggtggcggccgaggtacgcgggagatgaaggtgcgcatcctctccgagcgtaagaagcctctggacattgactacatgggggaggaacagctccgggagaaagcccaggagctgtcggactggatccaccagactggaagntctganaaagttcgaccctngatgggcgaaagcttgaaaacagcnngnaaatattgnaanatcaaacggtncctggtaccctgccccnnggccgtgcccgctttttaanaaaaccttannnnnggnanttccccccncncgnggnctttgnccactgngaaanttncnnaattanattctnaaagccttttaaatnccgaaattnccccggtncntaccccncttcgctangnggggggggggngccccccggggntanccccccaanaccnntttttttggntcnccccccttttctnaagtcggncagggggttttaaaanttangggcngccnccttttggggccgnttnaaaatntacattgggnntccnttnaagcccttgtctttcccctngtncggntggaanaaattttgntttaatccccngctttctnancatattttttctccctctnnnacntatncctaaatccccgggggaagccnatataaaagntgggtntaaaancccctgcg

SEQ ID NO: 503 - DNA, 708 bp, Homo sapiens
  misc_feature 2, 3, 4, 9, 10, 12, 16, 17, 19, 20, 21, 22, 23, 26, 27, 28,29, 30, 32, 33, 34, 35, 36, 39, 40, 41, 42, 43, 44, 45,46, 50, 51, 52, 53, 54, 55, 58, 64, 67, 68, 69, 70, 72,75, 77, 78, 80, 81, 83, 86, 87, 88, 89, 90, 91, 93, 94,95: n = A,T,C or G
  misc_feature 96, 100, 101, 105, 110, 111, 112, 113, 114, 115, 116, 118,121, 122, 135, 360, 425, 480, 513, 517, 580, 583, 616, 646,673, 699, 705: n = A,T,C or G
cnnnttctnntngtgnntnnnnntannnnntnnnnnatnnnnnnnncctnnnnnnatnattaangtnnnntncanannanntntcnnnnnntnnnncttnnagantatannnnnnntnagnnggctccctttacnctcctatagggcgaattggagctccaccgcggtggcggccggacggaaagcttagatatgccaacaacagcaattacaaaaatgatgtcatgatcagaaaagaggcttatgtgcacaagagtgtaatggaagaactgaagagaattattgatgacagtgaaattacaaaagaagatgatgctttgtggcctccccctggataaggggttgggcccgacagggagncttgaaattgtaatttgggggatgaagcacatatctttttacccaccatcaaaaaaattagggtntctctttattggatggtaaaatccagtccaaagggattcctggaaggcccttcgnaggtattttttacttattttgggttaccctcgnggcncggcttcttagaaacctaggtgggattcccccccggggcctggcaaggggaatttccgaatanttnaaggctttatccgaatacccgttcgaaccctcnaagggggggggggcccccgggttacccccnagccttttttggtttccctttttagtngaggggggtttaaaatttgcccccgncctttnggg

SEQ ID NO: 504 - DNA, 505 bp, Homo sapiens
  misc_feature 4, 6, 10, 11, 44, 66, 83, 149, 255, 299, 358, 367, 417, 458,462, 480, 484, 505: n = A,T,C or G
gttnanggcnncgacgcactactatagggcgaattggagcttcnaccgcgggggcggccgcccggncagggtactccttcgtnatacccatctgggcagtccaagacaccattgcacagctgggataaatgaacacatttgttggtacncgggatgataatgtcccgatcaccttcggccaagggacacgactggagattaaacgaactgtggctgcaccatctgtcttcatcttcccgccatctgatgagcagntgaaatctggaactgcctttgttgtgtgcctgctgaataacttntatcccagagaggccaaagtacctcggccgctctagaactagtggatcccccgggctgnaggaattcnatatcaagcttatcgataccgtcgacctcgagggggggcccggtacccanattttgttccctttagtgagggttaatttgcgcgcttggcntaantatggtcataactgtttnctgngtgaaattttgttattccgtn

SEQ ID NO: 505 - DNA, 850 bp, Homo sapiens
  misc_feature 1, 7, 9, 19, 24, 27, 31, 34, 35, 41, 45, 51, 54, 56, 62,63, 70, 71, 81, 83, 86, 87, 95, 114, 116, 117, 130, 153,155, 157, 162, 174, 177, 196, 397, 419, 435, 436, 440, 449,450, 454, 465, 469, 479, 483, 497, 499, 520, 556, 574, 576: n = A,T,C or G
  misc_feature 578, 580, 583, 591, 598, 608, 612, 614, 618, 622, 623, 626,631, 634, 640, 641, 642, 644, 653, 654, 660, 668, 679, 682,691, 702, 707, 708, 712, 713, 725, 726, 728, 729, 731, 735,738, 746, 748, 752, 753, 758, 770, 772, 778, 789, 793: n = A,T,C or G
  misc_feature 799, 814, 821, 826, 839, 848: n = A,T,C or G
nctaaancnttaaatctanaattnatnaaanatnntcaatntttnttcatntcnanttatannaatatcnnatttaaaaancnttnntatttttntttataatatttataaaangnntccgatacgatcntatagggcgaattggagcttcancncnggggncggccgccgganggngggtgacgtgcggatcttnttctttttgtggctgtggacacctttcaacactgccttcttggcctttaaagccttcgctttggcttcagccttaggaggggcaggagcttccttcttcgctttcggcgccatcttgtgaaaaagccccgcgttacctcgggcccgctctaagaacttagttgggattccccccccggggccttgtcatggaaattttccnaataatcaaagcctttaattcnaattaacccggttccnnaacncttctaaanngggngggggggcccnccgngtaacctccnaagnctttttttggtttncnccctctttaaagatcgaaagnggggttttaaaattatagccagcccgccttttgggncccggttaaaattcccantngngnttncaattaanaaccttnggttttttcncctngntggntcgnnaanaaatnagntttaannncnccggccttnnatccanaatttttnccaccaatctnaancccaattancctgtaatccncctgnnttanncccaattaaaanngnntngttnaanaaaggacncntggnntgggnttgccccttaanantagaanggtttgtaagnctanaaaacntttccaacaattatnaattatncctcntttcgactgcctncaaccttgncg

SEQ ID NO: 506 - DNA, 502 bp, Homo sapiens
  misc_feature 2, 3, 4, 10, 19, 20, 25, 307, 419: n = A,T,C or G
gnnnttggcngctatcgtnngactnctatagggcgaattggagctccccgcggtggcggccgaggtacaagatggacccgctacggaacgaggaggaggttcgagtgaagatcaaagacttgaatgaacacattgtttgctgcctatgcgccggctacttcgtggatgccaccaccatcacagagtgtcttcatactttctgcaagagttgtattgtgaagtacctgcccgggcggccgctctagaactagtggatcccccgggctgcaggaattcgatatcaagcttatcgataccgtcgacctcnagggggggcccggtacccagcttttgttccctttagtgagggttaattgcgcgcttggcgtaatcatggtcatagctgtttcctgtgtgaaattgttatccgctcacaattncacacaacataccgagccgggagcataaagtgtaaaagcctggggtgcctaatgagtgaagctaactccattaattgcgtttg

SEQ ID NO: 507 - DNA, 503 bp, Homo sapiens
  misc_feature 302, 339, 340, 386, 398, 399, 408, 409, 417, 425, 430, 446,448, 453, 456, 475, 495, 501: n = A,T,C or G
cgacactactatagggcgaattggagctccccgcggtggcggccgaggtactgactatagttacgttatttctcaccagtcacatactcaagaattcttttactcagacccatgacttgaccacagtgatagcagaagctggggtgggcacaaatgcttatacacaatattacaaaagacgacattcactggcttagagaaactgatgaattttcattacttttacatttttataaggctagctaactttaacagttaactttagataaatctacttacacagtacctgcccgggcggccgntctagaactagtggatcccccgggctgcaggaattcnntatcatagcttatcgataccgtcgacctcctagggggggcccggtnccccagcttttnnttccctttnntgagggtntaattgcngcgcnttggcgtaacaatggntnatagnctngtcttcctgttgggaaaantgtttatccgtatcccccanctcccnac

SEQ ID NO: 508 - DNA, 439 bp, Homo sapiens
  misc_feature 2, 6, 26, 303, 439: n = A,T,C or G
cnccgngggggcggccgaggtaccanaacttctatgcacacctccctgagagtctgggaaccttcaccgctgacctgtgtgagatgttcccagcaggcatttatgacaccaaatatgctgctgagtttcatgcccgtttcgtggcctcctacttagaatatgccttccggaaatgtgaacgggaaaatgggaagcagcgggcagctggcagcccacgccttaccctggagttctgcaactatccttccagcatgagggaccatattgattaccgctgctgcctgcccccagcaacccaccgtnctcatcccaccagcatctgtgacaacttctcggcttatggctggtgccccctgggaccacagtgtcctcagtctcacgatatttgaccttatcattgacactgatgaggctgcggcagaggacaagcggcgacggn

SEQ ID NO: 509 - DNA, 879 bp, Homo sapiens
  misc_feature 2, 4, 5, 9, 10, 11, 15, 16, 17, 18, 21, 24, 30, 33, 34, 36,38, 41, 44, 45, 50, 53, 59, 60, 62, 65, 68, 73, 83, 86,88, 92, 93, 94, 96, 100, 103, 107, 109, 114, 118, 127, 128,138, 308, 320, 329, 341, 347, 352, 363, 377, 423, 427: n = A,T,C or G
  misc_feature 429, 442, 454, 457, 474, 476, 486, 490, 491, 492, 494, 502,509, 528, 535, 538, 552, 554, 556, 560, 562, 575, 585, 595,601, 603, 619, 623, 628, 629, 634, 655, 659, 668, 669, 672,678, 679, 689, 706, 710, 728, 730, 732, 733, 734, 756: n = A,T,C or G
  misc_feature 761, 765, 779, 788, 790, 800, 804, 805, 812, 813, 816, 820,836, 838, 840, 841, 843, 849, 852, 865, 875, 876: n = A,T,C or G
cntnntctnnnttannnnctnttnctattntgnnantntcnatnncttantcntatctnntntgntgntcctncgtttttttnttntntttnnnantttntcncatnanttatnattntatttttcnnagttagaggncgcgcgtaaacgatcactatagggcgaattggagctccaccgcggtggctggcccgaggtacgcgggggaggaaggacctggtagttttgatgaccgctgtcctgtctagcagatacttgcacggtttacagaaattcggtccctgggtcgtgttcaggaaactggaaanaaaggtcataancatggaagncgcatgcttcantttgtncaagncggtgtgatgntttggccctgactntactaccatgacagggagtttttatatgattctctcacggcattgntaananttaatacaaatgnggccctttcttnatnacctctctccaataacncnataaaggaanggannnanccaaaacnccttttntgtgtaaaaaaggatttgnaagatanttnaaaaaccaataaancncnggancnattccttgggaanaaaggcaaanaaaaggcccnttctgncnttaatatctagggccncaanaaatnnaaaanccctaatgtttggggaaaccnattngggaaattnnccncggggnnaatttaaagntttcaaaaaccttatgngggnaatttattttttttcccnangnnntccttgtgaagtaaaaaaattnattangggngagcccccctgaangaaccccancnttttaaattngtannaaaacannccnaatnttcccaatttccatgncnannantggttnatnccctgtaccaaanccctttcttnntag

SEQ ID NO: 510 - DNA, 788 bp, Homo sapiens
  misc_feature 2, 5, 7, 8, 10, 11, 12, 14, 15, 17, 19, 21, 23, 24, 25, 26,27, 28, 32, 34, 35, 36, 38, 40, 41, 45, 48, 50, 51, 52,54, 57, 59, 63, 65, 69, 70, 71, 72, 73, 74, 76, 77, 80,81, 82, 86, 91, 94, 95, 97, 99, 101, 103, 104, 105, 106,109: n = A,T,C or G
  misc_feature 111, 113, 116, 119, 120, 122, 124, 125, 127, 129, 131, 132,135, 136, 138, 148, 149, 153, 403, 453, 476, 525, 536, 537,572, 583, 604, 606, 608, 614, 663, 679, 698, 701, 703, 705,727, 729, 737, 742, 750, 755, 764, 773, 780: n = A,T,C or G
cnttnannannntnntntnantnnnnnnttcntnnntntnnatgnttnannnanttnantatnantatnnnnnntnncannnatanatttntannanantnannnnatntntnatnttnntnannananannagnntngcggccgcgnntccnatcctatagggcgaattggagctccaccgcggtggcggcccgaggtacttttttttttttttttgagttaagtgtctttttaattgaaaagctaactgtccagttacatttctcccaaaaaaccacaaactgggtagtaactgagtctctaggcaatatatttaaaactaagaggattaaaaataaagaaaaagaaaacaagtcctcagattgcaatggaaggggagccctgctacattacaggcctaantcaaatacagtgggttacctgccccggggccggcccgcttctagaaaacntaggtgggaatcccccccggggnctgcaagggaaatttcggatattcaaagcctttattgggattaccccgntccgaaccctnnggaagggggggggggcccccggggtaccccccaangcttttttttngtttcccccctttttagggtngnangggggntttaaaatttggcccgccggccttttggggccggttaaaaattcaattnggggttccaattaagncttggttttttcccctggnggntngnaaaaattttgtttttattcccngncttccaanaaaantttccccncccanccaaaccanttacccganggccccngggggaag

SEQ ID NO: 511 - DNA, 796 bp, Homo sapiens
  misc_feature 1, 3, 6, 7, 8, 10, 12, 14, 16, 17, 23, 24, 25, 31, 32, 34,36, 37, 43, 45, 46, 47, 48, 49, 53, 57, 59, 67, 68, 69,70, 71, 72, 74, 83, 84, 88, 92, 95, 99, 103, 113, 126, 136,138, 152, 369, 373, 397, 408, 454, 456, 460, 484, 485, 502: n = A,T,C or G
  misc_feature 511, 517, 522, 529, 531, 550, 551, 553, 564, 573, 575, 578,629, 630, 638, 642, 646, 652, 665, 671, 699, 711, 712, 725,726, 729, 731, 734, 743, 769, 772, 779, 787, 789: n = A,T,C or G
nanacnnntntnantnntcacannntatttnnantnnaatacntnnnnntttnattntntcaaactnnnnnntntatcttaannaatnaatntangaanattnaactatcttntttatttattagnttcgaggtcncnaaacgatcatatanggcgaattggagctccaccgcggtggcggccgcccgggcaggtactgggctctgaccactattggttttgagaccacgatgttgggagggtatgtttacagcactccagccaaaaaatacagcactggcatgattcaccttctcctgcaggtgaccattgatggcaggaactacattgtcgatgctgggtttggaccgctcataccaagatgtggcnagcnctctggaagttaattttctggggnaaagggatcangcctcaggttgcccttgtggtccctcccgttttgaccgggaaaagnangaantgggatttcctgggatattcctanngaacccaaaaattcagnaaagggggnaaccanggttnccccttngnggaccccggcctcctttannanaccttaaggtnggggaattncnccncctccgggggcccttggccaaggggaaatttttcggaattatttcaaaaanncttttaanttcngaanttatcnccagtttctgaanctcttncaaagggggggggggggccccccggggntaaacccccaannccttttttttggnnttncnccntttttatangttggagggggggatttaaaatttgnccncccgccntttggggncngttaaat

SEQ ID NO: 512 - DNA, 881 bp, Homo sapiens
  misc_feature 135, 165, 167, 168, 180, 216, 301, 319, 333, 348, 370, 378,386, 401, 402, 406, 425, 428, 429, 430, 432, 441, 497, 500,511, 527, 530, 542, 554, 556, 563, 569, 570, 571, 572, 582,598, 607, 612, 613, 614, 618, 619, 621, 633, 635, 659: n = A,T,C or G
  misc_feature 664, 666, 668, 672, 673, 686, 693, 704, 705, 707, 709, 714,717, 722, 726, 732, 734, 737, 741, 742, 743, 747, 748, 759,766, 774, 776, 778, 781, 788, 792, 793, 798, 806, 807, 809,817, 825, 828, 837, 839, 842, 845, 852, 855, 866, 869: n = A,T,C or G
  misc_feature 870, 873, 876, 880, 881: n = A,T,C or G
cgaattggagctccacccgcggtggcggcccgaggtacatccagaaatagatccaagaaatggggtggttgagtgggtccgcacgaaatgcttgattatgtcagcaacacccaacactgtctgttttccatttgntggttttaatcataaaattgtcaagtgatncnngtttttaaaaanaaaaaaaaaaaaaagtacctgcccgggcggccgctntagaactagtggatcccccgggctgcaggaattcaatatcaagcttatcgataccgtctaccttgagggggggcccggtacccancttttgttccctttaatngagggttaattgcncgcttggcgtaatcntgggcatagctgttccctgtgngaaattgntatccgcncacaattccacacanncatncgagcccgggagcataaanggnnnancctggggtncctattgagtgagctaactcacattaattgcttttgcgctcactgccccgattttnagncggggaaaccngtcgtgccagcttgcnttnattaaatcaggncaaccccccggnanaaggcgngtttgnnnnattagggccncttttccctttccttngaataactngactnnnttanncncgggataatttnanctttccacaaccggtttcaaactnccttnananggcnnttaataccgttantcatcanaattctggggnnananccccntgnaaaanaccnttgtgngnctnaaannncctnncaaatggcccngtatccnttaaaaangncnccnttgattncccnntattncaataggnntncccccccntgcaaaanctntaccaaaananccnccntaagtanaanggggtcgaaanccnnccnggnttann

SEQ ID NO: 513 - DNA, 454 bp, Homo sapiens
  misc_feature 2, 3, 4, 5, 6, 21: n = A,T,C or G
gnnnnnggcgccgtatcactnctatagggcgaattggagctccccgcggtggcggccgcccgggcaggtactatttaagaaaagaacaaggttaactaactaaaagcagaactcacttattttttgctccctagccaattaaaaataagttcattaaaagcacttgaaattatatatttaacctgaaaaaaagttgctaaaattccaatataaatgtaaatatctttaacttgcttaacccagctatccccaaaacagtgtagtggggcaaaatgttcaaaagaaaaatcatccagtgcacgtagatgggcaccaagaagctaagcttccctgagcgcgtacctcggccgctctagaactagtggatcccccgggctgcaggaattcgatatcaagcttatcgataccgtcgacctcgagggggggcccggtacccagcttttgttccctttag

SEQ ID NO: 514 - DNA, 440 bp, Homo sapiens
tatcactacttagggcgaattggagctccccgcggtggcggccgcccgggcaggtacgcggggaggttaagggagaagatggcggcgctaggggaacccgtgcggctggagagagatatttgtagagcaattgaattattggaaaaactacaaaggagtggagaagtacctcggccgctctagaactagtggatcccccgggctgcaggaattcgatatcaagcttatcgataccgtcgacctcgagggggggcccggtacccagcttttgttccctttagtgagggttaattgcgcgcttggcgtaatcatggtcatagctgtttcctgtgtgaaattgttatccgctcacaattccacacaacatacgagccgggagcataaagtgtaaagcctggggtgcctaatgagtgagctaactcacattaattgcgttgcgc

SEQ ID NO: 515 - DNA, 914 bp, Homo sapiens
  misc_feature 327, 434, 521, 535, 559, 567, 591, 596, 609, 610, 612, 627,632, 633, 639, 673, 686, 687, 691, 695, 697, 717, 723, 726,743, 745, 747, 754, 760, 766, 774, 780, 784, 788, 794, 796,797, 811, 854, 860, 863, 866, 870, 878, 882, 897, 913: n = A,T,C or G
agggtatacgactactatagggcgaattggagctccccgcggtggcggccgaggtacaggtttgtagcctaggagcaataggcaatatcatgtagcccaggtgtgtagtagactgtctcatctaggtttgcgttagtgtgtctatgatgttggcacaaggacaaaatcacctaacaatgaatttcttggcaggtgtctctgttaagaagacatgactccagtacctgcccgggcggccgctctagaactagtggatcccccgggctgcaggaattcgatatcaagcttatcgataccgtcgacctcgagggggggcccggtacccancttttgttccctttagtgagggttaattgcgcgcttggcgtaatcatggtcatagctgtttcctgtgtgaaattgttatccgctcacaattccacacaacatacganccgggagcataaagtgtaaagcctggggtgcctaatgagtgagctaactcacattaattgcgttgcgctcactgaccgcttttcaantcgggaaacctgtnctgccagctgcattaatgaaattngggcaacnccgcggggagaaggcagttttgcntattngggcgctctttcnncnttacttagtcaactnactcnnttgagnttggatcgtttctggtttctggcgaagccggtanttaatcttcactnnaaanggcngntattaccggttattctcacnagaatnaanggggattaacgcaaggnananaaacatnttgaanccaaangggccagncaaaanggcnaggnaacccntnnaaaaagggccccgnattgcctgggcgttttttacataagcttcccgcccccctttancgaagnttnaanaaanaattcacnctcnaaatttaaagggggngaaatccccccaggcng

SEQ ID NO: 516 - DNA, 477 bp, Homo sapiens
  misc_feature 2, 3, 39, 109, 130, 154, 189, 197, 206, 209, 234, 251, 280,283, 290, 308, 329, 337, 381, 396, 398, 415, 420, 433, 438,443, 444, 466, 473: n = A,T,C or G
gnngaggccctaacactacttagggcgaattggagctcnccgcggtggcggccgaggtacttttttttttttttttttttttttttttttttttttaggctttttgganaccttgcccttgctggctaanttatccaagcaggttttgatatancttttatagtaatccacctgctccccataaaaggnggccttanagttcaaancancgtatgtctgttgcagtttcactanttcggcctttctttctntgtcggtaccttgcccgggcggccgcttntanaactagnggatcccccgggctgcangaattcgatatcaagcttatngataccgncgacctcgagggggggcccggtacccaacttttgttccctttantgagggttaattgcncncttggcgtaatcatggncatanctgtttcctgggngaaantgttnntccgctcacaattccacacaanatacganccgg

SEQ ID NO: 517 - DNA, 472 bp, Homo sapiens
  misc_feature 1: n = A,T,C or G
ngtgccctatcactacttagggcaattggagctccccgcggtggcggccgaggtacgggggccagttattacactgctgacagtaataaactgcaaaatcttcagactgcaggctgctgatggtgagagtgaactctgtcccagacccactgccactgaacctggctgggataccagtggccctggtggatgcaccatagatgaggagcctgggagcctgccagggttttctgctggtacctgcccgggcggcccgctctagaactagtgggatcccccgggctgcaggaattcgatatcaagcttatcgataccgtcgacctcgagggggggcccggtacccagcttttgttccctttagtgagggttaattgcgcgcttggcgtaatcatggtcatagctgtttcctgtgtgaaattgttatccgctcacaattccacacaacatacgagccgggagcataaagttgtaa

SEQ ID NO: 518 - DNA, 480 bp, Homo sapiens
  misc_feature 3, 4, 7, 106, 159, 172, 193, 200, 204, 228, 241, 244, 247,251, 258, 267, 275, 280, 286, 288, 304, 327, 333, 338, 344,346, 348, 356, 357, 362, 363, 364, 370, 376, 378, 384, 405,420, 421, 435, 458, 473, 475, 478, 480: n = A,T,C or G
gtnnggncccgaaacgactacttagggcgaattggagctccccgcggtggcggccgaggtacttttttttttttttttttttttttttttctgggacatcattcanatgttaccaaatcagtcaccttagtttttaatcctcactatcatgctaacatntaacacttggatngcattttgtgacgtgtaaagngtttccncctntcccaggatattttaattttcatnttcataactgccncanganactnaagggcnggtttcatnatttaaanatgtnggaacngnggcttacggacatttnatgacttgcccaaagtcaaacanttttantttgncaaaanananattcaggnnggccnnntaattncaaaantngggtgnccactccctgaagctgacctnatttgtcaaaataannacccgcgtaccttnccgggggggcgctcgagctaacncacattaattgcggngngcncn

SEQ ID NO: 519 - DNA, 476 bp, Homo sapiens
  misc_feature 2, 3, 11, 62, 453: n = A,T,C or G
gnngggcccgnatcactacttagggcgaattggagctccccgcggtggcggccgaggtacangactccaagtccaaagcaaatacccatggcatgaacaaataggatgcctaagattctaacatttgcttcggcatggctttcctcctcacttccctacctcacaacaagaaaaaatttcctagatgggacaatggcaagatattgtgctaatacatttcataggatttctagatgctgggctataacatccaggttgcaatttggtgacggatttttttatttctattgcaaatggactacactccaaacacaaaaagattcttgccatagcatccaaacatccctatgtagacccacacttcctctcaatacagaaagagaatcactcagaaaggacaaagctggcagaccaagaaaggaggcaagggtaaactctgtcactggccaattntctaaaacaaaaatagcagcctc

SEQ ID NO: 520 - DNA, 805 bp, Homo sapiens
  misc_feature 2, 6, 8, 12, 15, 21, 44, 45, 47, 56, 58, 59, 68, 70, 71,77, 78, 81, 85, 91, 97, 98, 101, 114, 116, 123, 230, 244,373, 374, 387, 389, 394, 403, 413, 417, 444, 445, 449, 459,467, 506, 511, 522, 526, 570, 572, 583, 598, 604, 606, 615: n = A,T,C or G
  misc_feature 620, 628, 641, 645, 646, 654, 657, 664, 665, 675, 682, 684,688, 694, 699, 708, 717, 725, 735, 738, 744, 747, 750, 769,773, 775, 804: n = A,T,C or G
tntatntntatnttncggatnatatatattgtatattttatctnntnatatatttntnnatatatttntnnattttnnatntatntattantctatnnatntatctttatatcngnttgaggnacctatacgatcctatagggcgaattggagctccaccgcggtggcggccgaggtactgcttgtgatccagctactgaggtctgaactcgaacagacctgggaagtgnctcagagctgtctntcaggctctgagagaaagtagccaacattacagtagacagagagagacagagatcaagcacagagacagagacagcataaggcaaaaatacctttatgaaaattgccaagtcctcaaagcaaatcttanntttaaacttcttntnaggcnaaacctgtntggaacacangtcnttttaatccttcaagggtttatataannatantaaaataatnaagttacnctgctccgggagtcgggtctcgacttctaagaaacctangatgngaatcacctcncggngcttgccagtggaattttccgtattattcaaaagactttaattngnattaacccggntctgactcatccggnagtggngnggggacccncgggnttactccnagcctattttggntgtnncccttttntangttgcannggggtttaanaatttgncngccncctttnggccnttaaatttnaatagggtnccaataangccttggttntancctgtnggntgnaaaaaatttggttatattncccngngttcaccaatattttctcaaccaccaaang

SEQ ID NO: 521 - DNA, 537 bp, Homo sapiens
  misc_feature 3, 4, 11, 12, 16, 20, 46, 117, 135, 158, 173, 180, 221, 232,233, 254, 257, 263, 270, 272, 280, 289, 297, 298, 304, 390,398, 406, 420, 441, 480, 487, 488, 490, 493, 495, 496, 506,512, 515, 517, 523, 533: n = A,T,C or G
gtnngggcccnnccgntacnactactatagggcgaattggagctcnccgcggtggcggccgaggtaccaacatgtcccgtggttccagcgccggttttgaccgccacattaccattntttcacccgagggtcggntctaccaagtagaatatgctttnaaggctattaaccanggtggcnttacatcagtatgctgtcaccagggaaagactgtgcagatngttgtcacacnntaattaaagtacctgcccggnctngacganctataanangtgcaatncggagcacnttcactgnnatgttncgccggaaggccttcctccactggtacctgcccgggcggccgctcggctctagaactagtggatcccccgggctgcaggaattctnatatcaancttattanataccgtcgacctngagggggggcccggaacccancttttgttccctttagtgagggttaattgcccgcttgcntaaaatnntngancnngggggtgccnaatggnganantcttantcacattaantgcc

SEQ ID NO: 522 - DNA, 547 bp, Homo sapiens
  misc_feature 7, 33, 145, 171, 177, 179, 180, 185, 232, 247, 248, 251,257, 263, 264, 269, 279, 282, 291, 292, 293, 297, 335, 337,345, 348, 350, 358, 361, 363, 370, 375, 380, 389, 393, 397,411, 412, 424, 427, 513: n = A,T,C or G
gcatacnactactatagggcgaattggagctcnccgcggtggcggccgaggtacccattcccttgatgtctacaatatcacctttcttatagatgcgcatatatgtggccagaggaacaactatcatgttttctaaaaggcctanagaacatatatcgggtgcctctcctntttccntnngtgtncgtcattttggcgaattactggaagatggcggttccggccgctctanaactagtggatcccnnggnctgcangaattnnatatnaacccttatncgntaccggggnnntccngggggggcccggtgcccacttttaatgagggcttaatngnggcgcttnggngnaacgcttnggncntaatcanggtcntgggntgaaatttngttntccnatttacaatttccnnacaaacataccnaancccgggtgccattaaaagtgtaaaaagcctgggggtggcctaatgaagtggagcctaacttaccatttaatttgcgttggcgctcnactggccccgcttttccaagtccgggaaaaccct

SEQ ID NO: 523 - DNA, 765 bp, Homo sapiens
  misc_feature 4, 6, 7, 18, 20, 22, 33, 39, 40, 42, 49, 52, 55, 56, 60,71, 72, 77, 78, 82, 88, 89, 91, 93, 97, 99, 141, 145, 149,157, 162, 163, 165, 183, 185, 192, 196, 200, 201, 205, 208,212, 215, 219, 230, 236, 237, 239, 248, 249, 250, 271: n = A,T,C or G
  misc_feature 300, 301, 309, 350, 353, 360, 367, 418, 439, 456, 466, 472,481, 482, 484, 515, 529, 532, 576, 579, 585, 593, 600, 615,625, 626, 629, 632, 647, 669, 674, 679, 691, 696, 708, 718,724, 727, 731, 756: n = A,T,C or G
tatntnntcatctcttancntntatatattctntttatnnantattttntanatnntatncttatatgatnnattanntatnctttcnnantntatntntatagttgtgaatattccctatacgactcactatagggcgantggnaacntccaccgnggggnngngcccgaggacctggcccntntttatanggtntccnncccntgncccnctnaaanaagagttgtgntccccnnanttttgaggnnntcaaatggggtgagagccctnatcatcacggggcctgaggttttactccnnaaaagcanaggaggtggcaaccttggctttggggttttggcaggcccanganaggcagnggagganaagctcaaagccgggtttcatgtttcacaccaaaggtctaatttgtggggnagaaggaccaaatcccagatnccccttgtttagcacancaatttaggnttcacnaaaattgtnntnttttgggccaaaaaaaccatgttggaccacnctcatcccatggantanattttgtactttagattctcaaaggaaaaagaagcctttttggnagngtgccnagtagtcnaaattancggaaaaatttcttntttccttttnncgnttnaatgggggaaaaaanaaataaatagacttcccctttnttacnattantaaaaaccttgnagttngacaaatggtanaaaaaaatgntggttngcntaanggttctaggggggggtttaactttncttaaaggg

SEQ ID NO: 524 - DNA, 512 bp, Homo sapiens
  misc_feature 4, 270, 385, 402, 418, 424, 437, 446, 449, 456, 465, 466,469, 471, 479, 480, 483, 484, 486, 491, 494, 496, 506: n = A,T,C or G
actnctatagggcgaattggagctccccgcggtggcggccgaggtacacgccttgtttcaaactgttcactgtgatctgtgggtctttgagtttcagtgagtttgctgaaatgtcgaagaagtagttccaaacttcaatgttcaatgaaatttttgttcaagtttgaaatggagagagcagctttaaaaggtacctgcccgggcggccgctctagaactagtggatcccccgggctgcaggaattcgatatcaagcttatcgataccgtngacctcgagggggggcccggtacccagcttttgttccctttagtgagggttaattgcgcgcttggcgtaatcatggtcatagctgtttcctgtgtgaaattgttatccgctcacnattccactacaaacatnccaagccgggagcatnaaagtntaaaagcctgggngtgccttantgnggtgaanttaccttannttnanttgcccannttnnanaattnttngnttttccaggntggtga

SEQ ID NO: 525 - DNA, 796 bp, Homo sapiens
  misc_feature 3, 5, 6, 8, 14, 22, 24, 25, 27, 28, 30, 31, 33, 35, 36, 47,48, 66, 67, 68, 74, 76, 78, 84, 86, 89, 90, 93, 98, 100,102, 113, 322, 324, 349, 354, 362, 368, 417, 432, 435, 460,463, 467, 477, 493, 495, 526, 534, 552, 558, 570, 571: n = A,T,C or G
  misc_feature 574, 579, 582, 594, 597, 601, 602, 604, 614, 616, 623, 624,631, 641, 646, 655, 660, 673, 680, 688, 698, 699, 700, 703,705, 706, 711, 714, 716, 718, 720, 726, 727, 737, 741, 750,751, 755, 760, 763, 775, 778, 780, 788, 795, 796: n = A,T,C or G
aananntnaatatntttttatncnntnnannanannaatttattttnnttatttcattttcatttnnntatgtntntnttttananatnnttntattntncntgggactaatncctctaaaggaataagcttgcggccgcttaattaatttttaggcacatgtagggtgatccaaattggtctggggtcaggatttggcccacaagtctatcagttttgcgtcatctagttttagttttgactttaggtttcttgaaggaagggaccaagcctgctttttgtcatcattatatcctcacggcttaaggtgttaagcccctgntncaaaagaagccttggttaccagggnaaaanggccaccntttgtntttgtcaaaaaatatgaattgtggttggggaattggaaaggggggaagngggttaagggccaanaantggggaatggaagttggaaaattanaantttnctctaaccanggttccttttacaagnancccacccaaaggctttttttttataaataanaacaaggncccttactcttttaagantatatnctagacccttgnnggngggtnctncattgacctcanaancccnncntttagtaccncnaacaccnnattggcncctcccttgnaaaanttaccttanttggnccccctttttttngccaccnaaaaaaantctctccccnnnccntnnggganaantntntnttttcnnttattttttngganaaaaaaagnngccnaattncanatttccggacanccncnaatgtggngtttttnn

SEQ ID NO: 526 - DNA, 457 bp, Homo sapiens
ctactaagggaatagcttgcggccgcttaattaaagatcttttttttttctttttttaacaaaattcctatagaatataacaatattaaagagggaactttaagtgaacccccacttttggccataacttctttttgtgtcagccagcaagagccaagagaacataaccagggtggtaggatgtagctagataagcctctttaaaggcacaaagaggccacttcttcaaccagatttgccaaagcccttggttcaatgaccagataggccaacacgggtagtagtggggtcatcaagccctaaatgcagctttctgggctaccttctaggatgctctggagcttggaactgtccacctgaaagagggttgagggaggctgggatgaatacaatatttgggtccactggattttcctcataacccttagccccacacctcccagctcaagagggaggg

SEQ ID NO: 527 - DNA, 596 bp, Homo sapiens
  misc_feature 3, 24, 122, 144, 189, 192, 201, 210, 218, 220, 232, 236,246, 255, 256, 265, 271, 275, 276, 278, 296, 298, 306, 309,310, 311, 312, 314, 318, 327, 332, 339, 346, 348, 349, 350,352, 355, 358, 371, 392, 393, 398, 400, 401, 403, 404: n = A,T,C or G
  misc_feature 408, 411, 414, 417, 421, 422, 423, 437, 439, 444, 452, 472,477, 481, 488, 489, 492, 493, 498, 500, 501, 530, 531, 539,549, 551, 555, 564, 572, 576, 577, 580, 581, 588: n = A,T,C or G
ttngggagccttttaaagggaatnagcttgcggccgcttaattaaagatctttttttttttttttttttaagaagctgtaatgatagtaacaaagaagtccaacctttatattgcacaaatntttactaaccatgtagcatctntgtgcctgaccagccctgacagatgaggattcaggagcaaacaanacncgaccctgntgctttttnaaaagccncncaagggttagcnaaanccacttgtcnaaagttacnnggtggggantaccantggnngncttaaataaaaatggctntnggggggangtnnnnangggnccaatgccnaaagncaccccntggggcncnnncnccntgnggggctttttccnaaaattggaaattgtttcccnnaaaancnntnnatanccnttnaanaaannnaaacccggggggcncntttanaaaaaccnaaatgggggggggggggggngaaanaaanccggggnnttnnaaaantnnggggggggggccttatagggggggggagnnggcccccnaaaaaaaaancntttntaaaacccnagattttntgtnngannctttttntttttttt

SEQ ID NO: 528 - DNA, 818 bp, Homo sapiens
  misc_feature 1, 2, 5, 6, 7, 9, 12, 13, 15, 17, 18, 19, 24, 25, 26, 27,29, 30, 33, 34, 36, 38, 42, 44, 46, 56, 60, 65, 81, 84,87, 88, 100, 101, 102, 104, 105, 106, 107, 108, 109, 113,119, 143, 171, 294, 306, 307, 367, 377, 406, 408, 415, 418: n = A,T,C or G
  misc_feature 426, 432, 448, 449, 472, 474, 486, 491, 511, 513, 530, 548,557, 605, 606, 610, 620, 623, 641, 647, 654, 665, 666, 676,689, 704, 715, 727, 728, 729, 746, 752, 755, 756, 763, 776,787, 789, 790, 791, 794, 798, 817: n = A,T,C or G
nnaannntnttnnanannntatannnntnntanntnantttntntntttatatatntttntttantaattttttttattanacnaannttttatttttannntnnnnnntagntaggcncaattaacctcctaaagggaatangcttgcggccgcttaattaaagatcttnttttttttttttttttaaacgcacagaacaaccttttgaaggtgccaaatttaaagatggtaaagtaacagagaagtaaactgtaacctaattgctatggcttcagaataacccagtcaaaanactttcaacatnnaaaggaaaaaggaattttaaaattaagttgcccctttgaagtttcaaatatttttaaaangggttcttgnaattttttttttcccttacctttttagcnanagggggnaancaaaattnttaagntccctaagaaatttgnntaccccaggggggttgttattcntncccccctttttntttcnaaaaagataaaattttttgncnaagggttttgggaaccnttaccaaaaaagggggangaattattnaggcccaaacctcccaaatttggaaaaaaaaaccagggttttgtaaanngccnaaaaggaaancangggtttttccttttgggngccaantctttgncctttttaatnngcccttggcnccggccccttggnttaattttttccttnggccccccaanttgggtttgggnnntttaaagggggcccaanaaaacnaanntttggcnaataccaattttnccaaaatttgngnnnccngggntattggaaaaggggaaacnt

SEQ ID NO: 529 - DNA, 849 bp, Homo sapiens
  misc_feature 1, 6, 7, 9, 13, 15, 17, 19, 27, 30, 31, 34, 36, 37, 38, 42,43, 44, 46, 49, 50, 51, 55, 59, 60, 62, 68, 69, 71, 78,81, 83, 84, 93, 96, 99, 100, 101, 102, 105, 113, 283, 292,299, 307, 313, 315, 316, 319, 332, 341, 342, 347, 350, 353: n = A,T,C or G
  misc_feature 354, 355, 360, 361, 368, 379, 380, 385, 386, 390, 391, 394,396, 398, 399, 404, 405, 406, 409, 410, 413, 417, 419, 420,428, 433, 436, 442, 452, 460, 466, 484, 490, 505, 508, 515,518, 530, 532, 534, 542, 555, 557, 559, 561, 566, 573: n = A,T,C or G
  misc_feature 576, 577, 592, 593, 604, 605, 608, 616, 627, 632, 642, 648,649, 651, 653, 657, 659, 660, 661, 667, 677, 685, 687, 691,694, 696, 699, 704, 708, 710, 720, 721, 722, 735, 736, 737,740, 742, 747, 752, 753, 757, 762, 767, 769, 770, 772: n = A,T,C or G
  misc_feature 779, 781, 784, 794, 803, 806, 814, 823, 835, 838: n = A,T,C or G
nccacnngnacanancngntctattanttnntcnannnttannncntannnaccnatannantttctnntntcatctnatntnnattcctttnttnatnnnnagncggcactnttaacctcctaagggaataagcttgcggccgcttaattaaagatctttttttttttttttttggagatggagtttcaaacaaaaaaaaagaaagcagaatccaccatcttcctccctgctgcacatgctcttctgcaatgaaaatatctacatcatacaactaagctctnaatcatccncaaattnaccattancctttngnnagngcccctaaaaaantttttatanngcatnttnccnnntaatnnaaatatntacatcccacnnttggnntggnnccntnannctttnnnttnntcnaaananntttttttnaagtngtngttganttttttaatnggccacgngttttngaattctccaaattattnacctgncaaaaattttggctnaancaagagnggngggctcctttantngnaaaaaaangcccatccccaangntngngcccncctcccntgnnttaatttaatagaannccaaatttctnnccntgatatgngggaacccccntattntggattgccncttacnncntncccncnnnaaggtnccaaccccanctgaaacntngggngananaantaaanttantnttaacccacnnnctttatataattnnnggntntattntatgnnttanaaatntttcngnngntaaatgngnggnaccaacaacnccctccaanccnttttaaanaaattttanttttccagcccntcnccttggccccg

SEQ ID NO: 530 - DNA, 858 bp, Homo sapiens
  misc_feature 2, 3, 6, 9, 11, 12, 14, 15, 16, 17, 18, 20, 21, 24, 26, 27,29, 33, 34, 37, 38, 39, 43, 45, 46, 50, 51, 52, 54, 56,57, 65, 67, 72, 73, 79, 81, 82, 85, 86, 94, 95, 96, 104,109, 110, 111, 113, 117, 120, 126, 132, 139, 211, 242, 246: n = A,T,C or G
  misc_feature 271, 280, 283, 289, 291, 308, 323, 325, 355, 362, 363, 364,379, 389, 393, 400, 404, 417, 420, 434, 437, 441, 449, 450,464, 472, 484, 488, 494, 508, 513, 518, 522, 527, 538, 540,541, 545, 547, 553, 554, 557, 566, 567, 591, 599, 620: n = A,T,C or G
  misc_feature 621, 622, 627, 630, 633, 634, 635, 637, 649, 652, 655, 661,701, 702, 703, 704, 706, 710, 711, 712, 713, 715, 718, 719,722, 725, 728, 740, 757, 758, 763, 766, 768, 779, 780, 785,786, 788, 792, 793, 806, 809, 812, 813, 822, 830, 837: n = A,T,C or G
  misc_feature 842, 843, 844, 845, 848, 853: n = A,T,C or G
tnnttnatntnntnnnnncnnatntnntntttnnatnnntctntnnattnnnantnnatgatttnangaaannaatttncnnatnnatcatttnnnatacattncttgnnnanagtncgngcacanttaatntcctaanggagggaataagctggcggccgcttaattaaagatctttttttttttttttttttggtttaatatgaggttncatatttattttggtcataaacatatgagtntttnatatataaccaggtgtcatgtgctntttggcccngtntttaanancaaaaacctaaaacaanatcaacccattcgcncnaaaaaaccccaacaaattttccattggttngttccannnggaaagcctttattntttaaaaaangggnaaattanaagncttttaaaaaccnccntttgaattataagnggncttngggttatnnttccttaaacaatngccaattncttattccaaangggnaaaagnggccccctttcttnggagnggtanaagnggggnaaccaaatatngnntaangnccatcnngangaaaccccnngaaaacccttggggcccttccttncttttatnggaggggcctttttttggaannnaaccncanaannntncctcttcccttnccncancaaaanaaaaaaggcccccccaatcctaaaagaagggtcccaaaannnnancttnnnngnaannggnctnatnctaatcgccatncccctttgtgtgtgtcnnatttnccnanaaaaaaatttnnccacnngngggnnaacaaaaaggggnttnttnnggggacccnccccatantaatagngaaannnnttnggggnaaaag

SEQ ID NO: 531 - DNA, 466 bp, Homo sapiens
  misc_feature 418: n = A,T,C or G
gggcgctaaataaccctcactaaagggaataagcttgcggccgcttaattaaagatctttttttttttttttttatactacttatcactatttaaaattatatttaggtacttatttgttatctgcttcccctctaggctttctgctctgcaaggccagagacgttgtctctcttcttcatagctcgacccccactgcggagaacaagtgctcagcacttgctaacatggcagaaacaaagctgtctccctcagttctcgtggcagccctcattctagtttgacttcctatgaaattacttttcctagttgtcttgaaggtcatgttttgcttaagatgtagctccaccaagcagacagccctatgtggggtttggaggtgagcagtgagaggtggtacccataaggaggaacatcanatctgcggggggcatggtggcagaggcatctggttcttctgagggcag

SEQ ID NO: 532 - DNA, 528 bp, Homo sapiens
  misc_feature 183, 218, 227, 264, 291, 313, 314, 319, 323, 326, 327, 353,356, 372, 380, 395, 406, 448, 462, 465, 473, 474, 486, 488,505, 520: n = A,T,C or G
tactaaagggaataagcttgcggccgcttaattaaagatcttttttttttttttttttttacaactagtgtattgtacactagctcagctccaccaaactacctgttcgttctcttttatttgacattgttcacagactagtacatattacaataagagtgctggataaaaacatgaggtacngaaagtggttcaaaggattatagggtcattgcagnatcatgctngacagtaaaagaaaattgtgactgagaaaacactaantaaaaatacataaagaatgtgcattantaaaaaaaaaaaaaggacattnnagatnaagnacnncaaaaaaaaaaaccaaactccatttncancagccttgtggctttntttgggtnacctaaagtaagggnttggaaccaantttatcaccaagttttttttaatttcccccacccccggaaanaaaaaaaaaaatancgnaaaaatgnnttgaaaaaaagncnagaagggaaaattcgtngggcaaaattttttntcttttaa

SEQ ID NO: 533 - DNA, 826 bp, Homo sapiens
  misc_feature 3, 5, 7, 8, 14, 15, 16, 17, 18, 21, 26, 33, 35, 41, 42, 44,45, 46, 51, 54, 56, 57, 59, 66, 68, 79, 89, 91, 103, 104,105, 106, 107, 108, 109, 113, 114, 120, 309, 313, 319, 323,382, 398, 408, 412, 418, 421, 424, 426, 439, 459, 473: n = A,T,C or G
  misc_feature 477, 489, 495, 498, 500, 505, 514, 515, 516, 520, 522, 532,541, 549, 551, 574, 587, 589, 591, 592, 594, 607, 610, 627,629, 646, 661, 663, 683, 691, 695, 699, 731, 733, 736, 738,747, 749, 757, 767, 768, 769, 786, 795, 811, 819, 823: n = A,T,C or G
  misc_feature 825, 826: n = A,T,C or G
tcncnannacaaannnnnctntatancatttantntaactnnannnaatantananncnttctgtnantatatataatnttttatcacntnttttatttattnnnnnnnaagnntgggcnagctaaaataaccctcactaaagggaataagcttgcggccgcttaattaaagatctttttttttttttttttttcattttagtctttagttcctttttcaacttcttctttacctccacggaggaaggcagcttggttttctcctcatacaccttgtggagaggttcgggagttgggaggagacactgncggnagcaangagnttattaagggaaaagtttgggggggggcattatttttggaaggggtggtctccccaagnttttttggcttttacngtaccaaacncttnattcanatnggnangggccaattcccnattttggttcacattggaanttttaattttgggnaaanccttttggaggngttttnccnancccgngcaaaaaannnaagngnccatataagnggaagtttngggaaatncnccttggaacctttttttggttgnaaaaaaatttggntntnncntcctgggaaaatnttnggggataaagacctctntnggggggaaggtttaagntttaacctactttcncnggggggcccccttggaaaanaatttccnctcntttnaagggggggtcttcaaatttaaaaaaaaaaantnggntntttttcccntntcaaatanttttctcccnnntttcacaagggaattgnaaaacaaanttcccccaaaaaaggngaaatttntttngnn

SEQ ID NO: 534 - DNA, 867 bp, Homo sapiens
  misc_feature 5, 116, 667, 680, 701, 718, 731, 734, 740, 774, 778, 784,799, 801, 805, 813, 819, 823, 825, 838, 857, 860, 864: n = A,T,C or G
gactnctatagggcgaattggagctccccgcggtggcggccgcccgggcaggtactttttttttttttttttttttgtaacaggatcttgttttgtcatccaggctggagtgcagnggcacagtcacaactcactgcagcttcaaccacattggctcaagtgatcctcccaccatcagcctttttggtaggcgggactataagcacatgccaccatgcccagtcaagtttttaatttctttgtagagacagagatctcactatgttgcccaagctgatctcaaactcatgagctcaagtgatcctcccatcttggcccccaaagtgttgggattacaggcgtgagccactgctcctggccttgctactccttttattattcacaacctctagaaatagtataggagatccaagcactagtctcccgttgtcatggatacagaaagtggagaagagagcaggataagtggcttgtttgggactagacaaggctgtcactaaatgactcactacttcagccctttgctcctcttggcacctggaccagcaaaggcacacatattctgtaattgttttgttcctgccaaacctgttacaaggaataaacttagagccccagaagtttaacaacatattatcatcttggaatgtgacattattaaaccctnctaatcccatgtntcaaaattaaaaaatcccgancatgttttctaaatggnaatgggaagcgtntcnggcttnatcacaaagaggtaatttttagccccttaaattngagnaaatgncatggccattttaantnttanttttaccncttttngggngnaacttgtttgganaactgccctgggtaaaaanaanaccnttt

SEQ ID NO: 535 - DNA, 865 bp, Homo sapiens
  misc_feature 189, 308, 483, 498, 519, 528, 541, 560, 561, 581, 601, 607,616, 633, 634, 645, 653, 666, 668, 679, 682, 686, 688, 692,695, 700, 702, 721, 740, 757, 765, 774, 784, 786, 804, 821,827, 840, 843, 854: n = A,T,C or G
gccgtatacgactcactatagggcgaattggagctccccgcggtggcggccgcccgggcaggtacgcggggaatcattttgcttccaaccccatttagcctgccattgaaatgcaaaagtctgttccaaataaagccttggaattgaagaatgaacaaacattgagagcagatgagatactcccatcanaatccaaacaaaaggactatgaagaaagttcttgggattctgagagtctctgtgagactgtttcacagaaggatgtgtgtttacccaaggctacacatcaaaaagaaatagataaaatnaatggaaaattagaagagtctcctgataatgatagttttctgaaggctccctgcagaatgaaagtttctattccaactaaagccttagaattgatggacatgcaaactttcaaagcagagccttccgagaagccatctgccttcgagcctgccattgaaatgcaaaagtctggtnccaataaaagccttnggattggagaatgaaccaacnttgggagcngatcaaaatgttnccttccgaatcaaaaccanngaaggtggaaaaaattcttngggatcttggaagtttcctnggactngtttacaanaaggggggtgggtcctnnggccgcttttnaacttgtngatccccggctgncnggaattcgatnttnagcntnttgntanccgcnanccttaagggggggccgggncccgcttttgttccctttntggggggttaattggcncctggggnaacatgggntaaccggttncngggggaaattttattccnttcaaattccccaaaanaaaaanccggggcctaaanggnaaacccggggngcccatgaggg

SEQ ID NO: 536 - DNA, 582 bp, Homo sapiens
  misc_feature 2, 3, 7, 195, 283, 378, 477, 483, 498, 505, 506, 524, 534,539, 544, 554, 565, 566, 576, 577, 581: n = A,T,C or G
gnntggnccctaacactacttagggcgaattggagctccccgcggtggcggccgaggtacgcgggggaggaactgctcagttaggacccagacggaaccatggaagccccagcgcagcttctcttcctcctgctactctggctcccagataccacttggagaaatagtgatgacgcagtctccagccaccctgtntgtgtcttcagggggaaagaagccaccctctcctgcagggccagtcagagtcttagcaccaacttagcctggtacctgcccgggcggncgctctagaactagtggatcccccgggctgcaggaattcgatttaagctttattcgatacccgtcgacctctgagggggggcccgggtacccaancttttttgtttccctttttaagtggagggggttaatttgcgccctttggcggtaaatcaatggggccataaacctggtttccttggtgtggaaaaaatngggtantttcggttcacaaantttccannaccaaaaaattaactaanccccggggangcatnaaaantggttaaaanccttggggggnnggcccttaanngagng

SEQ ID NO: 537 - DNA, 525 bp, Homo sapiens
  misc_feature 167, 185, 189, 192, 194, 196, 223, 227, 228, 240, 241, 244,254, 257, 259, 260, 266, 268, 283, 298, 304, 311, 333, 339,341, 342, 343, 346, 424, 426, 429, 446, 455, 457, 480, 505,507: n = A,T,C or G
ggcgaattggagctccaccgcggtggcggccgaggtacgcggggggaagaggaggaaggagggcgagcgaggaggatggcggagtcggggctcctgacggaactctaatgaatcattgattgaccagcactattttaccagttggaatgaatgatcagaaatgggcntagctgcttttaaatacnaccntgngnanatggatgttactccatgctgattactncttnnagccagctcctnnctnggcggtcccnctngnngtaggnantcccccgggctgcangaattccatatcaancttatngataccnccgacctcaagggggggcccgnttcccnannnttntttcctttagtgagggttaattgcgcgcttggcgtaattcatggtcataacttgtttccttgtgtgaaaatttgcttntnccnttcacaaatttcacacnaacataccnancccgggaagccattaaaagttgntaaaagccctggggggtgccctaantngaagttggagccttaacc

SEQ ID NO: 538 - DNA, 499 bp, Homo sapiens
  misc_feature 4, 332, 384, 389, 400, 407, 413, 434, 436, 437, 449, 461,468, 474, 475, 481, 489, 496: n = A,T,C or G
actnctatagggcgaattggagctccccgcggtggcggccgaggtacgcggggtcttcatcttcccgccatctgatgagcagttgaaatctggaactgcctctgttgtgtgcctgttgaataacttctatcccagagaggccaaagtacctgcccgggcggccgctctagaactagtggatcccccgggctgcaggaattcgatatcaagcttatcgataccgtcgacctcgagggggggcccggtacccagcttttgttccctttagtgagggttaattgcgcgcttggcgtaatcatggtcatagctgtttcctgtgtgaaattgttatncgctcacaattccacacaacatacgagccggggagcataaagtgttaagccnggggngcctaattganggagccnactcanattaattgcgtttgcgcttantnncccgctttttcnatttgggaaaancttgtcntggccnngcttgnatttaaantgaaaantcc

SEQ ID NO: 539 - DNA, 559 bp, Homo sapiens
  misc_feature 1, 4, 341, 474, 497, 503, 556: n = A,T,C or G
nggnccctatcactacttagggcgaattggagctcaccgcggtggcggccgaggtacggaaaactctcctcatctggactcgtgacgtccttgcagcccgagttggccatatcccactacgcccctgcactggagcctgaagcagagtgtaaggaacggccagagagcgcaacactggggcccactaccccggcgcagtgacccgccgcgcccccgcgtaccttgcccgggcggccgctctagaactagtggatcccccgggctgcaggaattcgatatcaagcttatcgataccgtcgaaccctcgaagggggggggccccggtacccaagcttttttgnttcccttttagtgaaggggttaatttgcgcgcctttgggccgtaaatcatggtcataagcctgtttcctgtgtgaaattgttattccgcttacaattcccacacaacatacgaacccggggagcataaaagtntaaaaccttgggggtgcctaatnagtgancctaacttacaattaatttgcgtttgcggctttacttggcccgctttttcaanttc

SEQ ID NO: 540 - DNA, 405 bp, Homo sapiens
  misc_feature 13, 28, 38, 72: n = A,T,C or G
gttttccgcgtantacgactcacttttnggcgaattgnagctccaccgcggtggcggccgaggtacactttngcacctgcaaatctgtttattaattagaccatagaatctgtgtttcattggtggtcagctggccaatctgatggtcttgtcatacacaggtaagaagagacaaagagccaagagtttgtttggaggccggagtgagcttgacagaactagatgaaattggccactgggcactgggacccagaaaggcctcattgccacagagttgcaacagagtgtggggtcccattatcagaatcctttctatggtgcatccaattggctatgactctcctaagaacagcgctgcaggaaaatgcaagttcacaggataatgaatgcactgttgcttctctg

SEQ ID NO: 541 - DNA, 391 bp, Homo sapiens
gcgtaatacgactcactatagggcgaattggagctccaccgcggtggcggccgaggtacgcgggatgctctggtttaatgtttttcaatagtgtgatacaattgttcaacttattggcagctttagtggtatttgaacaactttgctatgtttgggtaattttccaccctgtgaatcagctccccaaagcagaagtcataaaatctgttttccagccagggtgtggaaacctgggcccctggtatcaggtccacccatgtgcaagctatggcatttgtgcccagtggcaacacaaagcgatcttcaccagaacattcctctcctgaggtttcagcactgctcttggctacgtagccaccgctaagcttctctctctggccttcctaggaaa

SEQ ID NO: 542 - DNA, 802 bp, Homo sapiens
  misc_feature 2, 4, 5, 18, 23, 28, 36, 41, 50, 52, 53, 55, 56, 58, 60,62, 63, 68, 69, 75, 77, 79, 86, 90, 92, 99, 113, 115, 132,135, 138, 140, 141, 144, 147, 150, 227, 246, 334, 346, 347,350, 369, 381, 382, 391, 415, 464, 477, 481, 484, 493: n = A,T,C or G
  misc_feature 523, 526, 527, 529, 555, 575, 577, 604, 605, 610, 612, 625,641, 644, 648, 664, 667, 680, 682, 684, 690, 696, 697, 707,715, 720, 725, 733, 736, 743, 747, 749, 751, 753, 758, 761,768, 781, 783, 792, 794, 802: n = A,T,C or G
tntnntattattttttantttantatantttatatnttatnatatataananntnntntnanntatanntatatntntntgtattntttntnttatatntaatatcgaataantnatttttatatttatctnttnagnanncgngantcntcgcgcgaatactactcactatagggcgaattggtagctccacctgcggtggcggccgaggtacacggggacctcanagctgagctgggcatgagnagatgctcagtaagtggtagcacagggttggtccctacggtggaggccccctaacaccgcccaaccccccttcatgttcttacagctncacgtcacttgnncancgggctatgaaggccatgnatgtcagtaatnnttcacccangggtagtctgagaatgttgcctgncaagggaccattgtgggtcgggacattggacatacttcataaagcctgnagatgggcctctngccnatncacttgggnttcacccaaaatttgatctggacccttccntgnnanccttgctcttggggaccggcaccgcntccgtaccgggtaatttcangncttacacattcaaaaagggctgtgaannattancntggtcttattctncaacaaagtatatttnatngggnggaataaaaaccgtcnatntggtaaaataggnanancaattnggtttnncaagtccaanataaatgnggtcnctaanttctaaanaanagggggncccnangngntaaanacnccgtttnaaataataaaggngncccccgttngnttttgtcn

SEQ ID NO: 543 - DNA, 446 bp, Homo sapiens
  misc_feature 5, 62, 196, 411: n = A,T,C or G
ggctnattggagctccaccgcggtggcggccgcccgggcaggtaccaaaagaatgttcatangcagcattatttgtcatagtcaagagctggaagcaacccagttgtgcatcaatggtagaatggatgactaaattgtagtgtattcttacaataaaatactatagagcaatgaaaataaataaactatggctatntgcaacaacatggataaatcttaccaacaatgttagacaaatgtagccaaaccaaaaaatacacatgttctatgaatccatatatgcaaggttcacaataggtgatagtagctactcttttgggaaggagtgaggaaaggactgagagagtattgcagagggggctccgggtgtttgtaatttctatttcccagtgcaggtgtggtttgcatgancatgttcactttgtggaaattcattgagctgtaac

SEQ ID NO: 544 - DNA, 460 bp, Homo sapiens
  misc_feature 8, 13, 402, 441, 449, 458: n = A,T,C or G
ggcggcgnatacnactactatagggcgaattggagctccccgcggtggcggccgaggtactggggccttacttccctaaagacccagggaggggagagaaagtgctctgcttgtatcctaagcacaaatgcaatacagcaacatcagtaatggtaactgagtgcttactgcatgccagacccgtgctaagctctctccatgcactatcttaatgttcacaacctcacacagtaagcattattaacaacagcactttacaaatagaaatttgttgaggctcagagttgccatagctggtgagcatccacagcctacattcaaacccaagttttcatttccaaagctttgctttcctgctgctggatgtctttttgcgtcatcttcgcatatttaacctccttnggctcaactggggaacctcttttgaaggctaggggccancaattacnttttttttngt

SEQ ID NO: 545 - DNA, 471 bp, Homo sapiens
  misc_feature 6, 466: n = A,T,C or G
ggcccnaaacactactatagggcgaattggagctccccgcggtggcggccgaggtactggggccttacttccctaaagacccagggaggggagagaaagtgctctgcttgtatcctaagcacaaatgcaatacagcaacatcagtaatggtaactgagtgcttactgcatgccagacccgtgctaagctctctccatgcactatcttaatgttcacaacctcacacagtaagcattattaacaacagcactttacaaatagaaatttgttgaggctcagagttgccatagctggtgagcatccacagcctacattcaaacccaagtttcattccaaagctttgctttcctgctgctgtatgtcttttgcgtcatcttcgcatatttaacctccttggctcaactgggaactctttgaaggctagggccatcaattacattttttgtttcttccaagaaaattggcnacgtt

SEQ ID NO: 546 - DNA, 744 bp, Homo sapiens
  misc_feature 1, 5, 6, 7, 9, 15, 16, 18, 19, 21, 27, 29, 37, 40, 43, 45,48, 50, 56, 59, 61, 62, 64, 66, 67, 69, 76, 77, 79, 86,89, 91, 93, 97, 99, 103, 107, 112, 113, 119, 129, 145, 293,303, 312, 318, 322, 347, 373, 377, 416, 419, 423, 437, 467: n = A,T,C or G
  misc_feature 487, 493, 497, 503, 512, 518, 544, 549, 572, 579, 584, 611,625, 631, 652, 657, 663, 679, 687, 692, 696, 700, 701, 705,713, 720, 731, 733, 742: n = A,T,C or G
ntaannntntattannanntnattcantnacttatanttnttntnttntntctttntantnntnanntnatattanntnttgcttnacntntnatantntaanattnagatnnggtcgntccctaaacnactcactatagggctnattggagctccactcgcggtggcggccgaggtaccgttcctccagtgcccagagatgctctccgcaccaagccacagatgtggaggaggcaggtctggacttcaggcagacaaggaacttcagaaaatcctggggagagacagcacanggtaagaggntaggtcagnagaaantctnaaggctcccttttttcaactttagncactgtaccatgccccggggcgggcncgtntctagtaacctaagtgggaatcccccgggcttgcaaggnaanttcngattattcaaagcnttatctgtattacccgttcgtacacttacnaaggggggggtgcccctggntacccncaancctttnttgttttcncccttnttagatggagggggtttaaattttgnctgcnggcctttgggtccgttaaaattncaaatgnggttncaattaagccttggtttttccacttgntggttggaaaaaantttggntatattccccggcttaccacnaaaanttttcncatccaaccaataccnattaaccntaagncccngggnngagnccattaanaaagttnggtaaaaaagncncttgggggngg

SEQ ID NO: 547 - DNA, 414 bp, Homo sapiens
gagcgcgcgtaataccgactcactatagggcgaattggagctccaccgcggtggcggccgcccgggcaggtaccagccaatcccttcattaaatgtatacagatttagttaagtagcattaaataggattcttagaagtatgtcctcatagaacttttaatacttaaggctttgtaaaaactatccatgaagggaaagctcctcagcataactgctcagggaaatagggctaaataactgaacattaaataattggttaaaggtgctgttagccgagcctcaatgcttgctacaaggatgtatgtacctcggccgctctagaactagtggatcccccgggctgcaggaattcgatatcaagcttatcgataccgtcgacctcgagggggggcccggtacccagcttttgttccc

SEQ ID NO: 548 - DNA, 407 bp, Homo sapiens
cgcgcgtaatacgactcactatagggcgaattggagctccaccgcggtggcggccgcccgggcaggtacgggggtctgcttaaaactcttcagaggttcaccatcgcttccagaaaaagatcaatactcctgacgtggcaacctgtcgagactcaggaccgctaggaaatcagctcttgtttacccctctatccattacactacgatccagctgggtttaggcatcacttcctctgagcaatcctccctgatgtcatgaggcagtgctgagtgccttctctggaccctctgtttacttgcctgttaaatcctgaacatctggaagggagtcgtgttcagcaacatatctacgccttgcagcacggtgcctggcctgcagctggtgttccgtaaacagctgctgactg

SEQ ID NO: 549 - DNA, 414 bp, Homo sapiens
gagcgcgccgtaatacgactcactatagggcagaattggagctccaccgcggtggcggccgaggtacgcgggagtaaatgcagtacaaattgttctactgttttaaaaagttttccgcagaacagtgcatttatggcaatgctatgtttaatgagttagggacatcaaatatatagtagttccttattttcagttgtgaaaatgaaatggctaaagcagaagagacgtctattttagtcttttaaaaatgtgtgtgggtggtcttttttcctcagaagcccaaagcacatgtatattttgttatttctccttgctatattcctgagactatactaaaaactttaagaaaaggaacaagaaaaaggtaaattcatgtgttccccactgctgtgtctagaaccaagatcacattat

SEQ ID NO: 550 - DNA, 400 bp, Homo sapiens
gagcgcgcgtaataccgactcactatagggcgaattggagctccaccgcggtggcggccgcccgggcaggtacctggtaatttacagaacgttcgttatcagatttgataattatatattaaggttgtaaagaatgtgtatgccagaattataggtagtagatcctagattcttaggaaaaatagtttctttataatcttttgagtagtgaaatggttacttttacaatggttatgaactgggtcaaggcaaaagggccactatatgtcttcagtcatctttctatgcctgaaatccaggaaacagtgaaaatggatgttccctggaacagccattgcgatgccatatgttggtcattggtgtccttaaagtgtatctcagataattgtgtgtctccctt

SEQ ID NO: 551 - DNA, 455 bp, Homo sapiens
  misc_feature 8, 9, 18, 24, 26, 28, 31, 42, 50, 391: n = A,T,C or G
tgggcccnntcactactnctggcnantnggngcttggagctnaccgcggnggcggccgaggtacaattgatataacagctttgttgccaccccaggcttttctgtgatgatgccatgggccacattctgatcaaactgcacacccagaaggtgaagtgttggctccaagcgagaaaaattattaagtttggcacttgaaaccctgctgtccaaaaattctgaaaaatcatcctgaagttcaaacttgtgtagaacttctccaagtagatagccactggaaaatgcctttgcaaatgacttgggactcacggtccgggacaccttcaactccttgttgagccactggcacagggatctccgacatggttcagcccggtgcctcataccgcangcgggggcttagaaacttcgcccgggaaccaagcctggcagccccggcgtccttcctgtagcca

SEQ ID NO: 552 - DNA, 446 bp, Homo sapiens
  misc_feature 3, 4, 9, 10, 418, 428: n = A,T,C or G
gtnnccgcnnatcactccttagggcgaattggagctccccgcggtggcggccgaggtacacttatagttgagagccaagtctcccttatcattggtgaatgagaatgagctactgaaaacaaaaagagggtcttctactcagcctctacccctaatatttatatcagaagcagagattaactgtccttactcattcacacgttaatggaagagaaggaagtttcctagaaaaatcctcccgctccaccctgcaaactttatgcttttctgttacataatcaggcaggggcaagacctaaactattttgaattggtggtgttgaggctaaattctctgctattgacagaattgagaatgtgatcaatttcagagtagcatgctacaaattttgtcccaatttcaatggggagaattatnacaaatcaantagtggttggcagaatct

SEQ ID NO: 553 - DNA, 446 bp, Homo sapiens
  misc_feature 6, 10, 13, 17, 65, 70, 73, 89, 91: n = A,T,C or G
ggcccnatcnctncttnggggcgattggagctccccgcggtggcggccgcccgggcaggtccctntggtngtngctcaggaagctttananatatatggctatttaatttgcaaataatacttagaactgcaaaaacacgttcacctggtcttgttgagaaagaaatcataagtcccctgacttaaactctctcaattgatgaagtgaccaggattactcagagtgcagttattggcacccccgaagcaccagagtccaggaaagatgcttatcaatcttttgccattggcttctacttgcaggtgccttctctactattcaatcatatacgatcattggaaagacaaatgaactcaagaaaagcagcgaaacagtacctcggccgctctagaactaggtgggatccccccgggctgcagggaattcgatatcaagcttatcgatc

SEQ ID NO: 554 - DNA, 442 bp, Homo sapiens
  misc_feature 18, 21, 24, 28, 54: n = A,T,C or G
ggccctatcactactttnggncantggnacctccccgcggtggcggccgaggtncccgggggatgctgccacctaggttacttgtaggaccctatacggcaacctcctttgccaggaactatttataaacatcctgcaggaaaatgcagtgaagtagaagagacagggatatcccagaaggttatgcaaaacatcaagagaagatgagaggagtctatatgtcagaatacacatttcccaccttgcccaacagtagaaaaacataagaagagaaaaacattaaaaaatgacaaggaagttaatggaagtcagcaatgtgatggtgtttgggaggtggagccttcagaaggtaattaatgcccttgtaagaagaggccagagagcttgcgcaccttcttcctgccatgtgagggagccaagaagccgggctgtctgcaacctg

SEQ ID NO: 555 - DNA, 452 bp, Homo sapiens
  misc_feature 5, 16, 27, 332: n = A,T,C or G
ggggnggggggccccntaatacgactnctatagggcgaattggagctccaccgcggtggcggccgaggtacagttacaactgacttgcataacactaaagaaaacattgtaattcctacgccagtagtgggggtaaactgagaaccaacctaattttcaccacagggccctctggaaatagaggaactaaaatgatgactgtttgaaagtgaagaggcagattcctagaacatcactcctactgcattccttacctccactccataccctttccttcttcactcaggtaggactgtctctgggaatgcatggacagcatgccacagttcagnagcttgggatgtgatcctgggaaatggggccttaagatgaccctttatggaaacacctggaatgcctgatttgcaggaccacttctcaaaccttcttccctctaagctggacttctattg

SEQ ID NO: 556 - DNA, 465 bp, Homo sapiens
  misc_feature 4, 9, 11, 379, 385, 387, 390, 391, 416, 418, 433, 437, 444,446, 447, 448, 462, 463, 465: n = A,T,C or G
tgtncccgnancactacttagggcgaattggagctcaccgcggtggcggccgccagggtcaggtccgtcatcgccaccccaagcccgcgggcggcggcatccagtgccagttcgtcgaggttgaacgggatatgccggtagtcgtccagcgaccgcgcaccattggccgccagccaggtcatccagtcttgcttgtcggccgctctagaactagtggatcccccgggctgcaggaattcgatatcaagcttatcgataccgtcgacctcgagggggggcccggtacccagcttttgttccctttagtgagggttaattgcgcgcttggcgtaatcatggtcatagctgtttcctgtgtgaaattgttatccgctcacanttccananaanntacaaacccggagagcataaagtgnanactccgggggccccntaanggggggngnnnctcacattaattgnngn

SEQ ID NO: 557 - DNA, 444 bp, Homo sapiens
  misc_feature 10, 14, 387, 442: n = A,T,C or G
tgttgccctntcanttcgactacttagggcgaattggagctccccgcggtggcggccgcccgggcaggtacctggaaagatgaacaggattgcagcagatagagacaggtagaaggagagagattccaagtggaaggataaaggagagggaagagaagcaaagagtgcaacttccaagaagattttctggtttctggcactggtcatagatagcttgggaggaaacaggcagagagggttttggagaaacagagctgcaaagccaagttagatgttaggtgagttgaaaaaataacttagggcaaaagcagagggagggaggtatttactctgaacagagatgacagggtgggggaggacagattgttttgagtaggcaaaggccangagcatgaagcaagctaggaattgggaggctggcctataagcatgggcccacctngg

SEQ ID NO: 558 - DNA, 449 bp, Homo sapiens
  misc_feature 3, 4, 7, 377: n = A,T,C or G
ggnnagngggaccactatacactactatagggcgaattggagctccaccgcggtggcggccgcccgggcaggtactattaaatttaatgagaggtaacccatgcaccggcaggaagttcaaggggacagaaggggcttgctccactctggagccctatctcctctcacctccttccttctagtttgacatgcgatcttgtctctctcttttataaagtgcttccaggcccttttgattaggatgctgtcctaaatccttcctcccgcgtacctcggccgctctagaactagtggatcccccgggctgcaggaattcgatatcaagcctttatcgatacccgtcgaccctcgagggggggggcccccggtaccccagnctttttgtttcccttttaagtgaaggggttaaaattgccgccgcttgggccgtaaatcaatgggtcataagc

SEQ ID NO: 559 - DNA, 456 bp, Homo sapiens
  misc_feature 14, 16, 387: n = A,T,C or G
gggttttgagcccnanacactactatagggcgaattggagctcccccgcggtggcggcccgcccgggcaggtacaccagaacttaaagtataataataaaaaataaagtattacagaacatgggtcaattatattaaaaagtagattaattaatgtccatatatacattttttggtggaaatcaaacataatgaaaactatttcacataattaatattttgtttattttttacttattaatttattgcagagatgggagtcttgctaggttgcccaggctagtctcaaactcctggcctcaagtaatcctcccacctcaatcccccaaaatgctgggggatttcagggaacatgcccactggcactttattaggtgttaccctggtncataaaaggtttaaattacctcattaatttttatttttcaggtatattatattataccacacacaccac

SEQ ID NO: 560 - DNA, 506 bp, Homo sapiens
  misc_feature 1, 2, 3, 7, 14, 23, 35, 308, 315, 338, 354, 368, 426, 436,441, 445, 446, 448, 450, 456, 464, 468, 485, 486, 489, 492,495, 497, 498, 504: n = A,T,C or G
nnnaaangcccccntatacactnctgtcgaattgnagctccccgcggtggcggtcgttcggctgcggcgagcggtatcatgctcactcaaaggcggtaatacggttatccacagaatcaggggataaccgcaggaaagaacatgtgagcaaaaggccagcaaaaggccaggaaccgtaaaaaggccgcgttgctggcgtttttccataggctccgcccccctgacgagcatcacaaaaatcgacgctcaagtcagaggtggcgaaacccgacaggactataaagaataccaggccgtttccccctggnaaggctncctcgtggcgcctctccctgttnccgaccccttgcccgnttttaccgggaaanacccctgttcccgccctttttttttccccttttccgggggaaaaacccgttggggccncccttttttntcaantaanncntncaaccncccttggntaangggtttttttttcaaannttnccnggngnnttaaanga

SEQ ID NO: 561 - DNA, 440 bp, Homo sapiens
  misc_feature 6, 9: n = A,T,C or G
acgacnccnaatacactactatagggcgaattggagctccaccgcggtggcggccgaggtactcttgtttaaccatcagaggtgatcccatcaccttcacagccccagcctctgctccagtccctccccagcgaaaagggccgcccatgccatcctgctgctggtgatttgctttgtggtcatggactcagtggacatcattattttattaaccgtgtggtagatttttaactcagttatcctggatatccaaaggtttgtggtccatctttaggcttccgtttgttctttggtacctgcccgggccggcccgctctagaactagtgggatccccccgggcctgcagggaatttcgatatcaagcttattcgatacccggtcgaccctcgaggggggggggccccgggtaccccaagctttttggttccctttaagtgag

SEQ ID NO: 562 - DNA, 457 bp, Homo sapiens
  misc_feature 2, 3, 4, 6, 8, 10, 19, 29, 42, 318, 333, 345, 362, 373, 385,386, 438: n = A,T,C or G
gnnntngncngccacacancactactatngggcgaattgganctccccgcggtggcggccgaggtacgcgggggtagatggaaggaagaacttgtgtgcttagacctgacgctgggaggagatgctgccacctaggttacttgtaggaccctatacggcaacctcctttgccaggaactatttataaacatcctgcaggaaaatgagtctatatgtcagaatacacatttcccaccttgcccaacagtagaaaaacataagaagagaaaaacattaaaaaatgacaaggaagttaatggaagtcagccaatgtgatgngtgttttggaggtgngagcccttcagnaagggtaatttaatgcnccttgttaagnaagaaggcccannaagagctttgcgccacctttcttccctgcccattgtggagggaagcccaagnaaagcccggctgtcttgca

SEQ ID NO: 563 - DNA, 441 bp, Homo sapiens
  misc_feature 2, 341: n = A,T,C or G
gngccctaacactacttagggcgaattggagctccccgcggtggcggccgcccgggcaggtacccgggcgtgtgaggtgtcagtctgcccctacttgggggtgcctcccagttaggctactcgagggtctgggacccacttgaggaggcagtctgtccgttctcagatctccagctgcgtgctgggtgctgggagaaccactactcccgcgtacctcggccgctctagaactagtggatcccccgggctgcaggaattcgatatcaagcttatcgatacccgtcgacctcgagggggggcccggtacccagcttttgttccctttagtgaagggttaaatntgcgccgcttggccgtaaatcatgggtcattagcctgtttccctgtgtggaaaattgtttattcccgctcaacaatttcccacaccaacattaccgaagt

SEQ ID NO: 564 - DNA, 462 bp, Homo sapiens
  misc_feature 1, 2, 4, 7, 462: n = A,T,C or G
nncnacnacacaacaactactatagggcgaattggagctccccgcggtggcggccgaggtacacactagttttgtcataccgtgaggcagtgtattaaagaggaaatgttctgtctttgggaccagacagacttgtttccataaccctgattgtctagcactttatagctctgagtccatggaccaccacttagccatccctaccatcagttttttgtaaagagctatgtcaggaatgtggaaggattcaagagagggcttttaaagtgtccatcacgacctttaacccaaggggaattaatgcaggaacagaaaacccaaataccacatggttctcactttatctgtagggagcctaaaacatttggaggccaccaccatgggaccaccgaagggggaggccaattaggaccctacctatttgtagggggcccttactttggagggatgggaagaagttgn

SEQ ID NO: 565 - DNA, 440 bp, Homo sapiens
  misc_feature 2: n = A,T,C or G
tnccctaacactacttagggcgaattggagctccccgcggtggcggccgctctagaactagtggatcccccgggctgcaggaattcgatatcaagcttatcgataccgtcgacctcgagggggggcccggtacccagcttttgttccctttagtgagggttaattgcgcgcttggcgtaatcatggtcatagctgtttcctgtgtgaaattgttatccgctcacaattccacacaacatacgagccgggagcataaagtgtaaagcctggggtgcctaatgagtgagctaactcacattaattggcgttggcgctcacctgcccgctttccagtgcggggaaacctggtcgtgcccagcctgcatttaatgaaatccgggccaaccgccgccggggggagaaggccggttttgccgttattggggccgcctcttcccgct

SEQ ID NO: 566 - DNA, 437 bp, Homo sapiens
  misc_feature 2: n = A,T,C or G
gnccctaacactacttagggcaattggagctccccgcggtggcggccgaggtaccctgctgaaagattatttctaacaggcttgtagagaaacgtcggttcatgtaaattagaaattatggggccactttgccattcttcacacctgcaatgaacaggtgtttatctgcagttctgacttatctcttgaactccatttgcatgttatagtgggatgcagctgatgccctgtccagatcttcttcaggccactacatctatatatgcattcatattccagtggctgtgaagtgttgggctgttggttgacagaagggagctgcatccttctgggagggaaactgaacttcagctggatgaaaagcccaccctgggtccttgggagggtgaaagcatctttccaaaatggacaggcctggcaggtcaatggactggata

SEQ ID NO: 567 - DNA, 568 bp, Homo sapiens
  misc_feature 3, 5, 249, 280, 295, 301, 305, 308, 314, 316, 330, 334, 337,342, 353, 355, 359, 360, 365, 367, 372, 388, 390, 408, 409,417, 433, 435, 436, 440, 441, 442, 443, 445, 446, 447, 459,463, 466, 475, 477, 478, 482, 485, 491, 492, 493: n = A,T,C or G
  misc_feature 500, 503, 505, 513, 515, 517, 524, 528, 539, 548, 549, 550,552, 553, 558, 560, 563, 565, 567, 568: n = A,T,C or G
gcngncgctatcgactactatagggcgaattggagctccccgcggtggcggccgaggtacgcggggtagatggaaggaagaacttgtgtgcttagacctgacgctgggaggagatgctgccacctaggttacttgtaggaccctatacggcaacctcctttgccaggaactatttataaacatcctgcaggaaaatgagtctatatgtcagaatacacatttcccaccttgcccaacagtaaaaaaacnttaggaagagaaaaacctttaaaaaatggcnaggggaagtttaatngggaanttcnccnattttntntggtttttttgggngggnggnccccntttcaaaaagngnaaanntaaantnccccntttttaaaaaaaaaananggcccaaaaaaaattttnngccccccntttttttttttccccntnngggnnnngnnnccaaaaaaaaancccngtntttttttcncnncccnggnagaaannnccccccnctntntaaaaaanantnccccccnctcngggggggcttnttttttttnnngnnttttnancananann

SEQ ID NO: 568 - DNA, 505 bp, Homo sapiens
  misc_feature 2, 3, 4, 5, 7, 9, 10, 25, 374, 378, 388, 404, 406, 407, 421,426, 429, 459, 462, 468, 487, 498: n = A,T,C or G
gnnnngngnngccctaatacgactnctatagggcgaattggagctccccgcggtggcggccgaggtacaaaatatttatagatatgaggcttcactttgttgaattcatcatacacacacacttctttttagcagaaattaatagaaagccaattctaaattaatgtaggtaatacataatctactcaactggatgaataccttggttgcaagtcttgtcctgagcgagctaagtgacaacactctcaatctactgagcttccagcatctaggcagagctcccaggacaagcagaagtcacagggaacaggaagcaggaaaagagcaggaaaagatcctttagtttccatgtgtagaaacaaatgctcaactgncttntgtattgaanccttctggatgcctgncnnttttatttggtcanttggnggnataggaaaatccttttttaggttgggcagnccnatttanaaaaatttgggaaaccccnccctttttttnaaaaaaa

SEQ ID NO: 569 - DNA, 507 bp, Homo sapiens
  misc_feature 38, 50, 51, 52, 279, 309, 317, 335, 350, 361, 367, 399, 409,421, 424, 427, 429, 436, 438, 440, 445, 460, 463, 469, 473,474, 490, 499: n = A,T,C or G
agccgaatccatacttagggcgaattggagctccccgnggtggcggccgnnngggcaggtaccaggctaggcagctctggagaaagcagaagtggataaataaggtgtggactcaccaaagacagttccaaagtcaatttcactctgacacactctctgtgatcttccacagtcagcacaatgcctgccccctgctaggcctgatggatgatctgatagaaaactggcttcagcaaggagcttccacaggtaaccttggttctgcagtgataacagctnctatgaaaggagacccatcagactaacagngggatttntcaccagaaatcataaanggccaaaaaacaggngggaatgggcnttttcnaaaaaggcttttttccattgggttttttccanaacccaagtnttttttcccaanaanggngnaaaaaantntnttttnacatttttttccccnccncccccnaaanntttttttttttggganaaggggggngggccccc

SEQ ID NO: 570 - DNA, 463 bp, Homo sapiens
  misc_feature 2, 3, 4, 15: n = A,T,C or G
gnnngcgccgcgaancactactatagggcgaattggagctccccgcggtggcggccgaggtactgttcgctgcttttcttgagttcatttgtctttccaatgatcgtatatgattgaatagtagagaaggcacctgcaagtagaagccaatggcaaaagattgataagcatctttcctggactctggtgcttcgggggtgccaataactgcactctgagtaatcctggtcacttcatcaattgagagagtttaagtcaggggacttatgatttctttctcaacaagaccaggtgaacgtgtttttgcagttctaagtattatttgcaaattaaatagccatatatctctaaagcttcctgagcaacaaccaagaggtacctgcccgggcggccgctctagaactaggtggatcccccgggctgcaggaattccgatatcaagcttatcgatacccgtcgaccc

SEQ ID NO: 571 - DNA, 463 bp, Homo sapiens
  misc_feature 2, 3, 4, 5, 7, 8, 12, 15, 25, 407: n = A,T,C or G
gnnnngnncggnccnaatacgactnctatagggcgaattggagctccaccgcggtggcggccgaggtacgcgggacattgatgggagagatgtggaggaagagggaagaggtcattttccgtgaatacagcttttctttttaccctttaaacatttttgctccctttgttcttttcccagattacttctgtttgcttgggttcatctggctctccatgaatgtcctgcttttctggaaaaccttcttgctgtataaccaagggccagagtatcactacctccaccagatgttggggctaggattgtgtctaagcagagcctcagcatctgttcttaacctcaactgcagccttatccttttacccatgtgcccgaacactcttggcttacctccgagggatcacagnaaggttccaagcagggagaaccagggagattgttggataaaagcagaacattccat

SEQ ID NO: 572 - DNA, 442 bp, Homo sapiens
  misc_feature 1, 2, 3, 4, 39, 427: n = A,T,C or G
nnnnagcgccctaacactacttagggcaattggagctcnccgcggtggcggccgcccgggcaggtacgtaggggccctttgctgcaagcttaggccagtgtcagctcctgagccactcctgactcagttggaggagactcagtgtcctctgccccctgcctggtggagcttggcagcaagtcccaagttttacagtgttgagaccaagtgggcagccatcaccattgaggggtgcccttttgctccccctcgagtccaagttatagtattgcttacttcctacctgaaatagtttatgggtcatgggtctggcttacatcaagccccatagccagtctggttgccccacctaaggtcttggtgctctttgataatagccacagctaaatgtattagtcctgtcctagggaaatgcattgatcttctncccaaaaatatatac

SEQ ID NO: 573 - DNA, 450 bp, Homo sapiens
  misc_feature 2, 3, 4, 5, 6, 8, 9, 11, 15, 392, 413, 421, 433, 437, 443: n = A,T,C or G
gnnnnngnngnccgnccgcgtaatacgactactatagggcgaattggagctccaccgcggtggcggccgctttctcttactgatagtaggatatttctgctttagttattgtcaccttaaatatattttcaatgttgaaatcctcacagcatgtttgatgaaatctagttttcaaattttcttaggtatatttctgtcacgttggcatgataacaaatgcaataacccaaaagaccccaaaagctagtgtaatcccttttgcaatccaagcatgaggattcatcttcatgttgacagtgcgtgaatgttcggtaggctttgtcaagcttgcatacaataaattatatatgtcccttttcttttagggtctcctgttaaagatggttcttttnaagggtctaactgcgaaaatnaaaagttntattttccactnaagnccttanaattgag

SEQ ID NO: 574 - DNA, 449 bp, Homo sapiens
  misc_feature 2, 3, 4, 5, 8, 9, 11, 12: n = A,T,C or G
gnnnnagnngnncggccgcgaatacgactactatagggcgaattggagctccccgcggtggcggccgcccgggcaggtacttacaggggaccgccaggggcctcgagaatcggtatcctgagtcctcttgaagagcagtagaggttgtttcattaagtgcaaacacattgttcttaatttgaaaactgtgggcagaaacagaagcccgagactaatttttccattgctaactctagattctcggccactggagtctgaagatactctctttgagaatgcatattattttgctcacagctaaaacatttaagtatcatagctgatcagtggagtgagattaaaaaggtttcttttttgaatcatcagctagaagatgtaccctcggccgctctagaactaggtgggatcccccggggctgcagggaaattccgatatcaaggcttatcga

SEQ ID NO: 575 - DNA, 436 bp, Homo sapiens
  misc_feature 2, 3, 4, 5, 11, 418, 430: n = A,T,C or G
gnnnnagcggnccgaatcactactatagggcgaattggagctccccgcggtggcggccgaggtacagcaatggcacactctatcctaataatgacatcctgtataatttagtatgctctgtatctcactttaaatgtagcattaaggatgaagcagtagaaaatgaacgccgggccttttaataatgaggctcaggtttgctatcttaatttcaggaattaggaatgggagggatgctaaggagactgtttaaatttttaaaaagttctctctatgcctgatacagatgcaaattgcttgctcattacattctttcagcctttttaaacaagtttgctaaaacaatcattctctggcattaagacagcttacctgccaagcttggacattttctataacccaaatcaatatttcaaanaggtctccaacntttaaa

SEQ ID NO: 576 - DNA, 444 bp, Homo sapiens
  misc_feature 2, 3, 4, 5, 6, 8, 23: n = A,T,C or G
gnnnnngnggccgcgtatcactnctatagggcgaattggagctccccgcggtggcggccgaggtacagtgattttaagagaataaatgtccagattcccaactcctatatgcactttttactaaaatgattctgcttgagaatgtgcctgcagtgtgagggaatgccgtctcttttctcttttcccattttccattcaccctttaaaaaggcaaagcacacctcttcctcatcctgagtctattctggcatatcaccttgtggtgtaaaaacctccaggcaccaaacaaagggacactttgaaaatattagtgtcataaacttgtgatagggctccaaatctttccttgctgttatatatgtatttctgttaaggaaagaagtgggatagaaatacaaagttgaggagaaaaaggaagggatgtaaagctttctggattgtctt

SEQ ID NO: 577 - DNA, 433 bp, Homo sapiens
  misc_feature 1, 3, 4, 5, 11, 380, 381, 392, 395, 399, 404, 431: n = A,T,C or G
ngnnncgccgnaacactacttagggcgaattggagctccccgcggtggcggccgaggtacagggctcttgatatatcctggccttaagtctcaggttctccaacaaagctggcagcctgtggtatgccttctggggccagagagtgtggcatgatccgaggtcctgagtctctctctcaatgagcccatcatattggcttaaccaaagccagtggtcttcaggacgctctagaactagtggatcccccgggctgcaggaattcgatatcaagcttatcgataccgtcgacctcgagggggggcccggtacccagcttttgttccctttagtggagggttaattgcgcgcttggcgtaatcatgggtcataagctgtttcnntgtggagaaantgntatnctcancacttttccacacaatcataagacggngg

SEQ ID NO: 578 - DNA, 437 bp, Homo sapiens
  misc_feature 2, 3, 4, 5, 8, 12: n = A,T,C or G
gnnnnagngccncgaaacactacttagggcgaattggagctccccgcggtggcggccgaggtacacagatgaagaggcaagaaaattatgccaaattaccctgtttccctttgtcacactgcctcctcgctgacaccttcattctcctgcaaccttacactttgatgatgacttgctctgcttccatggaactacttcacttggcctatggcacaaggcacttccttccggcaacattcgcaccttgggagggggctatttttgcatgcacctagtccattgcaatccatttgttcttgaagggcaagatagaaactttgttttattatctacactcacgaaaaacaaattttgtgcaccattcccaacactattcttttttctttttttattttagtaaaagggtgggagaaagctttttagtggaaaggtcatcc

SEQ ID NO: 579 - DNA, 852 bp, Homo sapiens
  misc_feature 50, 95, 138, 188, 262, 274, 275, 323, 335, 338, 344, 345,393, 395, 405, 408, 423, 424, 462, 488, 514, 536, 548, 554,559, 583, 591, 623, 625, 632, 664, 672, 677, 716, 720, 735,765, 768, 770, 781, 804, 838, 849: n = A,T,C or G
gtaatacgactcacttataggggccgaaattggggagcctccacccgcgngtgggccgggcccgaaggttaacgccgggggaagcctaccgggcnaaatccctggaaactttccctggaaagaatggttcctttggantggtggcaggcttggggccattttccctttccgaactttcttcttcccancccctaagcctttccccaagaaaccaattcaccattaatcaacttgccaaaaaaaattaaggccaatttgccantaaccattgggnnattccaagggcccccaggttggggaaaaaattggttaaaaaggaaaanggcccccttggnaangccttnnattggggggggttccaaaaaattgaaaaggggttggaaattttccaananggccttgganaangggaaaaaattatgnncaaaaaattttccaaccccttaccaaccaaggtttttntttggggaaagggaattggggttttngccaacccggaaaaaaccaaccaacntttgggggggggaaaaatttgngggaaggccaanaaaaanccaangtttctttttttggaaaaatttanttcccggnaaaaccaaccctcccaaaagggggcctttggntnggaaagnaacccttaacccccttaaattttgggttaagnaaattaanttttnggcccaccccccctttattgggaacccaatttttggggntttngggtttccccttggnaaatttccaaaagggaaaatttttttgggnttngnttggggggaanccggtttttggggcccccccttngtttttttggccttttttttttaatttaaaaaanccccaaaaaancct

SEQ ID NO: 580 - DNA, 656 bp, Homo sapiens
  misc_feature 80, 97, 284, 291, 295, 304, 324, 325, 408, 410, 425, 432,435, 439, 494, 536, 538, 543, 562, 584, 591, 592, 607, 613,627, 629, 634, 638: n = A,T,C or G
gtaatacgactcactataggggccgaattggagctccaccgcggtggccgtttttccataggcctccgccccccctgacnagccatcaaaaaaaatncgacgcttcaagtcagaaggtggcgaaacccgacaggactattaaagataccagggccgttttccccctggaaagctcccttcgtgccgcttctcctggttccgaccccttgcccgctttaacccggaatacctggttccgcctttttctcccctttcggggaaagccgttgggcggctttttcttnaataagncttnaacgcctgntagggtattcttcaagtttnnggtggtaagggttcggtttcggcttcccaaagccttggggcttggttgttggcaacggaaaaccccccccggtttcaagaccncngaacccggctttggncggcccnttnattncccgggttaaaccttattccggtctttttggaaggttcccaaacccccggggttnaaggaacaaccggaacctttaattccggccccaccttggggncnaggcnaaggccccaaacttggggntaaaaccaaggggaatttaagncaagtannccggaaggggttaantggttnaggggcccgggttngncttancaangaaagttttcctttggaa

SEQ ID NO: 581 - DNA, 451 bp, Homo sapiens
  misc_feature 4, 443: n = A,T,C or G
ggcnattggagctccaccgcggtggcaaagcagactttttattttaacaaggaaagtcataaagtgaattttttcatgaaagaaatagtcttcatttaagaaagtgttgccgttaaagggttatcttggcactaatgattggctttgggtgattttaattctgagatgtctgtcataaaggaaattatgagaccataaaattgagcttctaattttctgtaagaatacagaggagaaggaaggtaaaactgttaagggtgagcttaagtaatacacagatcctagataatcagtttgcattttgtgctaatgtaagatcacaatgcttgtgtttgaattaatgtttttttactgataagaaagatttgaaatggacagttggaatcaatcaacaatatttcttgggggtgcatttccactggatgccagccacaaggacaaanttttaaac

SEQ ID NO: 582 - DNA, 454 bp, Homo sapiens
gtaatacgactcctatagggcgaattggagctccaccgcggtggctgaatctgcatttcttggatgagatagttaataacaaactatttctcaatatttgtatactaaaaactagtgaaggtgttatgtgtttcagtatcttatctcttatttgaacatgggtttctgaaaggagcctatataataatataaatggtatgtagtaaatgaggcactgtcttggctgggactgctataaaaaaattaccatagaccattgactaaaccacaaacatatacttctcacagttctggaagttggaaagccaagatgaggatgccagtatggctagcttctagtgaggggtcctcttgcaggttgcagacagccggcttcttggctcctcacatggcaggaagaaggtgccgcaagcctctctggcctcttcttaccaaggggcattaattaccttct

SEQ ID NO: 583 - DNA, 454 bp, Homo sapiens
  misc_feature 2, 3: n = A,T,C or G
cnnatcgactcctatagggcgaattggagctccccgcggtggcggccgaggtacagcatggataatttagatgtgactctggacagagggatggatcagatgacttcttaagttatcttccagtttaggagttcgtaaactatactttctcctttccagactatcctagtaagaaaattctcttttaagacagagtagaactctggaattcatcagttttgatgtttcttaaagtgtaatctaagatagtgctcctgtattaagttctgatgtctgaccattgttcaaataaagagtaaaatgcaaatgacaggaaattggctgtgttctgaatcctatttttatttgggataacaataagcctgtatggtcactggtgaccttttgatttgctgtttctgcaacctcacacttgcctcaggattcttcttccacttcttgcactttatattgg

SEQ ID NO: 584 - DNA, 437 bp, Homo sapiens
  misc_feature 1: n = A,T,C or G
nctactattgggcgaattggagctccccgcggtggcggccgaggtacaatataggcagacaggtttgccttcagaaattcagaaatgcagcttttgagggaggtcagcatcattggtctcagctaccattttcctgcaggatgtttataaatagttcctggcaaaggaggttgcccgtatagggtcctacaagtaacctaggtggccccgcgtacctgcccgggcggccgctctagaactagtggatcccccgggctgcaggaattcgatatcaagcttatcgataccgtcgacctcgagggggggcccggtacccagcttttgttccctttagtggagggttaattgcgcgcttggccgtaatcatggtcataagctgtttcctgtgtgaaattgttatccgctcacaatttccacacaacatacgaagccgggga

SEQ ID NO: 585 - DNA, 717 bp, Homo sapiens
  misc_feature 2, 3, 5, 6, 7, 11, 12, 13, 14, 23, 24, 26, 28, 30, 34, 38,39, 40, 41, 44, 46, 48, 49, 53, 62, 64, 65, 73, 75, 76,79, 89, 90, 91, 92, 97, 103, 104, 105, 110, 111, 118, 311,334, 357, 380, 401, 406, 416, 426, 440, 464, 469, 472, 520: n = A,T,C or G
  misc_feature 524, 545, 546, 549, 559, 570, 581, 585, 587, 622, 627, 639,642, 650, 660, 661, 666, 670, 681, 716: n = A,T,C or G
tnntnnnattnnnnaatattttnncntntnatantatnnnnctntntnnaatnctatggttngnnatattttnannttnaaaatatttnnnnattanattatnnnaagtnngggacgnctatacgatcactatagggcgaattggagctccaccgcggtggcagcataaagtgtaaagcctggggtgcctaatgagtgagctaactcacattaattgcgttgcgctcactgcccgctttccagtcgggaaacctgtcgtgccagctgcattaatgaatcggccaacgcgccggggagaaggcgggtttgcngttatttgggccgctctttccgncttcctcgctcacttgactcgcntgcgcctcgattcaattcgggcntgatggcagaagccggctatncagcntcaccttcanaaggggcggntaaattaccgggtnttattcccaccaaggaaattcagnggggnatnaaacccccaggggaaaagtaaccattggtggagtccaataaaagggcncacnccaaaaataggggcccatgtnnaanaccccggggnaataaaaaagnggccccggccngttntnggccttgggggccggtttttttttttcccaattantgggncctttgccggcnccncccccccnttggaacccnnaaggnccanttttcaaccanacaaaaaaatttcggtaaactgcctttccaaaaang

SEQ ID NO: 586 - DNA, 447 bp, Homo sapiens
  misc_feature 1, 3, 369, 396, 401, 416, 435: n = A,T,C or G
ncnactactactatagggcgaattggagctccccgcggtggcggccgcccgggcaggtacacatgatgaagaggcaagaaaattatgccaaattaccctgtttccctttgtcacactgcctcctcgctgacaccttcattctcctgcaaccttacactttgatgatgacttgctctgcttccatggaactacttcacttggcctatggcacaaggcacttccttccggcaacattcgcaccttgggagggggctatttttgcatgcacctagtccattgcaatccatttgttcttgaagggcaagatagaaactttgttttattatctacactcacgaaaaacaaattttgtgcaccattcccaacacnattcttttttctttttttattttagtnaaggnggagaaagcttttantgaaagtcatccacatctnaactcttgtaac

SEQ ID NO: 587 - DNA, 410 bp, Homo sapiens
gagcgcgcgtaataccgactcactatagggcgaattggagctccaccgcggtggcggccgggggccattgagactgccatggaagacttgaaaggtcacgtagctgagacttctggagagaccattcaaggcttctggctcttgacaaagatagaccactggaacaatgagaaggagagaattctactggtcacagacaagactctcttgatctgcaaatacgacttcatcatgctgagttgtgtgcagctgcagcggattcctctgagcgctgtctatcgcatctgcctgggcaagttcaccttccctgggatgtccctggacaagagacaaggagagggccttaggatctactgggggagtccggaggagcagtctcttctgtcccgctggaacccatggtccactgt

SEQ ID NO: 588 - DNA, 406 bp, Homo sapiens
gagcgcgcgtaataccgactcactatagggcgaattggagctccaccgcggtggccggccgcccgggcaggtacaagggagacagcatgcagggtgtgttcagaagagcttgctgaggtgctcggctcttagcattaaaaatgtgatgttggtatatcatcctgatagaaaacactgctttccaaatcctagtcacttggatgggaggaaagtaagaacagattcttccaaccactactgatttgttataattctccccattgaaattgggacaaaatttgtaacatgctactctgaaattgatcacattctcaattctgtcaatagcagagaatttagcctcaacaccaccaattcaaaatagtttaggtcttgcccctgcctgattatgtaacagaaaagcata

SEQ ID NO: 589 - DNA, 417 bp, Homo sapiens
  misc_feature 5, 7, 351: n = A,T,C or G
gagcncnccgtaataccgactcactatagggccgaattggagctccaccgcggtggcggccgggggccattgagactgccatggaagacttgaaaggtcacgtagctgagacttctggagagaccattcaaggcttctggctcttgacaaagatagaccactggaacaatgagaaggagagaattctactggtcacagacaagactctcttgatctgcaaatacgactccatcatgctgagttgtgtgcagctgcagcggattccctctgagcgcttgtctatcgcatctgcctgggcaagttcaccttccctgggatgtccctggacaagagacaaggagaaggccttangatctactgggggagtccggaggagcagtctcttctgtcccgctggaacccatggtccacttgaac

SEQ ID NO: 590 - DNA, 413 bp, Homo sapiens
  misc_feature 5: n = A,T,C or G
gagcnccccgtaataccgactcactatagggcgaattgggagctccaccgcggtggcggccgcccgggcaggtacgcgggacagttctctttcctccactagactgagctcttcagaggaagactcacttggctgaaaccatgattttactttaaacacattgaaaacctctactggagtgcattgtgtctggtgggcttcaaccttaattcttaagtatgtgaaaacacatcacctatctggaggtttacactttctgctaatgactttatttttaagcccaccaccctaacacaacaaatacttaaaacttgtcttcatttcctttaggtctggccctcatgcatgcatataatttatagagtcactgttttgctcggttgtcctcatgcctctatattattgggaggttt

SEQ ID NO: 591 - DNA, 877 bp, Homo sapiens
  misc_feature 1, 6, 592, 643, 744, 825, 860: n = A,T,C or G
nacgcntatcgactactatagggcgaattggagctcccccgcggtggcggccgcccgggcaggtacttttttttttttttttttttttttgagatggagtcccattccgtcacccaggctggagtgcagtggtgtgattttggcctactgcaacctccgtctcctgagttcaagcaattctcctgcctcaggctcccaaatagctgggattacaggtgggcacaactacacccagctaatttttgtatccttagtagagacgaggttataccatgttggtcaggctggtctcaaactcctgatctcaggtgatccacccgcctcggcctcccaaaatgctgggattacaggtgtgagccaccatggccagccggttgtttacttttgataaaggatagccaatgtaggattaaagaggattccaatcgcagtccccaggttgggagtttatccatcaataaagcaaattacgataactcatagtgataaatattaaacccaagcaacaggaaaatattttattttccagtgtttcattgggcttctgaatcattctggacacatgtatatttccctgtctatattaagtagnatgttattttctcactttaaaattatcccgttaatttttggatttatttgntattttggaatatttctaaaaattattctgcaacatttggttattaaaataaataaagactagttgacaattactactttatctcaaattcttcttaatgnggtataaggaaacataaccggaatagtcagtccaagagtcctgcacatcaaatggatttcttgtgccaatttcctcactgnacaatgaaaaaccttccttaaacacccctttaatnttgggaagaaaaaacct

SEQ ID NO: 592 - DNA, 865 bp, Homo sapiens
  misc_feature 4, 621, 660, 673, 698, 729, 745, 747, 758, 761, 787, 799,812, 836, 847, 857, 865: n = A,T,C or G
acgntaacgactactatagggcgaattggagctccccgcggtggcggccgtagcttgcaggggtgctatgtgaagatggcggaattcccaacgtgcttctgcaaaattttatgtattcatccccctctgctctcagtagggtgttaccacctgcggatcctttgctttccccgctggatactaacagcctttttcataattgctagcacctatggaattgagtgttgaactgaacaaacaatagtctttctctgtaatgtcagagttatttataagacgaggcagtgttagacataagaaagagcactgggcaaagaatcagacaaccaggatttggttccattcttttattatcaaagaataaaaaaaaaacaatattattttaagatgcagtcccaagtcttataaggaatttgaaggcttctgggatctaatctaggtcatgcccattctgccttcccttgctgtgtgcccctgacacaagcatggaaacatgtattcacttacctttgcccttgggaacactttggtggggaaaaatgttgatataggttagcatttttataaactgtcaagttgtacctcggccgctctagaactagtggatcccccgggctgcangaattcgatatcaaagcttatcgatccgtcgacctcganggggggcccggtncccagcttttggtccctttagtganggttaattgcgcgccttggcgtaatcatggncatagctggttcctgngngaaatggtatncgnttacaatttcacacaacatccagccnggagcataaagngtaaagcctgggngcctaatgagtgactactcaattnatggcgtgccntcactggccntttcaggn

SEQ ID NO: 593 - DNA, 872 bp, Homo sapiens
  misc_feature 66, 67, 85, 88, 95, 730, 733, 743, 753, 757, 761, 767, 768,775, 814, 829, 831, 843, 866, 867, 871: n = A,T,C or G
cgcttatcactactatagggcgaattggagctccccgcggtggcggcccgcccgggcaggtacttnntttttttttttttttttnttnctttggngactaagatctcagaagtatctgagaacttgggctgcgcagggaatgctggtgtgggagaagcaagccaactgagctgagctgcggccctgtttgtccttagctctccaaaacttgctgtctatgtcacttggaaggaatctgattcttttctgcaaggcactgacaataccttacaacagagctgggagataaaatgcagagcttgtgaaagtcatcagaaagttgaacacagatggtccccggcttcccgcgtacctcggccgctctagaactagtggatcccccgggctgcaggaattcgatatcaagcttatcgataccgtcgacctcgagggggggcccggtacccagcttttgttccctttagtgagggttaattgcgcgcttggcgtaatcatggtcatagctgtttcctgtgtgaaattgttatccgctcacaattccacacaacatacgagccgggagcataaagtgtaaagcctggggtgcctaatgagtgagctaactcacattaattgcgttgcgctcactgccccgctttccaatcgggaaacctgtcgtgccactgcattaatgaatcggccaccccccgggaaaggcggttttgcgtattgggcctttttcgcttcttgnttnaatgacttgnttggctcggncttncggntggggnnaaccggnttaacttacttcaaaggcgggaataccggttttccacanaatcaggggataacncnggaaaaaacatntggccaaaaggcccccaaaggcnngaant

SEQ ID NO: 594 - DNA, 877 bp, Homo sapiens
  misc_feature 3, 5, 687, 695, 704, 765, 766, 779, 780, 816, 826, 837, 839,852, 861, 875, 876: n = A,T,C or G
agntngacgcgcgtatacgactcctatagggcgaattggagctccccgcggtggcagcggccgcccgggcaggtactgcactgtggttttgattttccctggtcattagtgatgtcgagcattttttcatatgtttgttggccatttgtgtatcttcttttgagaattgtctattcatatccttagctcacttttgatgaaattgtttttttctttctagtttgtttgagttcattgtagattttggatattagtcctgtcagatgcataggttgtgaagatttatatcaaaagtgtagagcctgagtttggtcatgaggaaatattagagagaccctggttagtgttagcctaaaaagtgaaatgcctaaatacttaggattgttaaggaaataataaaccaaaaaacattgaaaaacagagagcagctgcactagtgctgagaattgaatgaatatatcagagttcttttagtgcccgtgagatgctaaccttttgacctaggcagagtagagatattccacagagctcattggacattcagtttagacctcagaaagggcatactgtaggaagtaaggccacattctaatgtaaagaacttaaccctttgaccagtggacaaaaattgaaaccagaccttatagagcaaatggataaaatcaacccgggtgaaaaaaaattcantcctcggncggtcttanaactagtggatcccccggctgcaggaattcgaatatcaacttatcgataccgtccaccctnnaggggggcccggnncccagctttggtccctttaatgaagggtaaatggcncccttggcgnaacaagggcananctggttcttgggngaaatggtntccgtcccaattcnnt

SEQ ID NO: 595 - DNA, 892 bp, Homo sapiens
  misc_feature 4, 10, 12, 18, 77, 98, 170, 273, 301, 378, 389, 421, 471,480, 494, 507, 532, 608, 668, 669, 707, 714, 723, 732, 761,775, 783, 789, 796, 803, 817, 820, 822, 823, 844, 850, 863,869, 887: n = A,T,C or G
agtntacacncntttcgngcgaattggagctccccgcggtggcggccgccgggcaggtacctctggttgttgctcangaagctttagagatatatggntatttaatttgcaaataatacttacaactgcaaaaacacgttcacctggtcttgttgagaaagaaatcatangtcccctgacttaaactctctcaattgatgaagtgaccaggattactcatagtgcagttattggcacccccgaagcaccagagtccaggaaagatgcttatcnatcttttgccattggcttctacttgcangtgccttctctactattcaatcatatacgatcattggaaagacaaatgaactcaagaaaagcagcgaacagtacctnggccgctctanaactagtggatcccccgggctgcaggaattcnatatcaagcttatcgataccgtctacctcgagggggggcccggtacccancttttgttncctttattgagggntaatcgcgcgctnggcgtaattatggtcatagctgttncctgtgtgaaaatgttatcccgctcacaattccacacaacatacgagcccggagcataaaatgggaagcctggggngcctaatgaagtgaaccaactccatttattgcgttgcgctcactggccgcttttccggtnnggaaaacctgtcgtgcccacctgcattaatgaatcggncaacccncggggagangcggttgcntattgggcgcttttcggctttcttgcttnctgactcccttgcnctcggtcntcgggntgcggcnagccggnattcagttcattcnaangnngggaattacggtttttccaanaatcanggggataaccgcnggaaanaccatgtgagcaaaaggncccct

SEQ ID NO: 596 - DNA, 708 bp, Homo sapiens
  misc_feature 2, 8, 10, 15, 18, 20, 22, 25, 27, 33, 35, 41, 43, 46, 47,50, 56, 57, 59, 62, 65, 66, 68, 70, 78, 84, 88, 98, 109,115, 116, 118, 120, 122, 124, 125, 127, 129, 130, 171, 308,390, 395, 438, 452, 462, 468, 473, 475, 482, 488, 491, 575: n = A,T,C or G
  misc_feature 578, 583, 595, 614, 669, 700: n = A,T,C or G
tncccatntntttantananantananaatatnanttatantntannaantatctnntnttntanncnantttatatntatttntatncatgatgttnataatatattnttttanngnanangnntnanntgaacgactcactatagggcgaattggagctccaccgcggnggcaaaaggccagcaaaaggccaggaaccgtaaaaaggccgcgttgctggcgtttttccataggctccgcccccctgacgagcatcacaaaaatcgacgctcaagtcagaggtggcgaaacccgacaggactataanaggataccaggcgttttcccccttggaagctccctcgtggcgcatctcctgttccgaccctgcacgcttacccgggattacnctgtnccgcactttcttcccattacggggtaaagccgatgggccgctnttctcaataagtcntcaccgcctngtaagnggtantncttcaangtttcnggntggtaaagggttccggttacggccttcccaaagacctgggggccttgttggttggccaccgaaacccccccccccgttttcaanacncccgnaacccggcttgnccggcccctttaattcccngggtttaaaccttaattttcgggtccttttggaaggttccccaaaccccccgggntaaaaggaaccaaccgaaaccttttatttcngggcccaa

SEQ ID NO: 597 - DNA, 898 bp, Homo sapiens
  misc_feature 2, 581, 741, 747, 757, 792, 793, 841, 865, 885, 893, 897: n = A,T,C or G
gngccgtatacgactcctatagggcgaattggagctccccgcggtggcggcccgaggtactcactgcgtatttagaagttcttggggcactgtgtaagtgtaggagaagatagatggagtatctaattaatctaaagataaaaatgaatgaggtagaatccattcagtagactaataaatagttcttaagatctataggatttctcttttggagtgtggagacatagtgtggagacatttgctaatgtagccataaagatagacctattgtccattgcaatgaaagcaacaaatactataacataaaatatttccaaattggtttgggtgaaaataagcttgtttcccaataaatgtcagatggcacttgttgtaagaggtaactttgaagaaatttaaattaatatattatttccagccaaaaacgtcatgcatttttagaagttcacaaaagtctgtaaaatatgcacacaaatgtccatcaattgtaatttatttcaataaagaaaggtagcttataccacttgtggccatcagatttcctatagactatgcctcaagaaattatctaaatctaaggngttagcaaaatagtgcttacatgtattttatagtatgaaatcacccttcaatatacatattcatataagttgtttaagctggggcactgctttactgaaaaaaaaaatctttcacattctctatttagaaaaagtaaatatcttaaagggaatggctcanctggtnaatttctacngagggttaaaaggaaggaaagaaaaaaaaaagccnncctgggatcccccggccaggaaccggcttggaaaactcccttttgtgnaaggttttgaaccccaaacgctgncttttttggcctggtttttnttaaacanatcnt

SEQ ID NO: 598 - DNA, 420 bp, Homo sapiens
  misc_feature 336, 341, 360, 363, 370, 373, 374, 376, 385, 387, 389, 390,394, 395, 404, 406, 407, 420: n = A,T,C or G
ggagctccccgcggtggcggccgggggccattgagactgccatggaagacttgaaaggtcacgtagctgagacttctggagagaccattcaaggcttctggctcttgacaaagatagaccactggaacaatgagaaggagagaattctactggtcacagacaagactctcttgatctgcaaatacgacttcatcatgctgagttgtgtgcagctgcagcggattcctctgagcgctgtctatcgcatctgcctgggcaagttcaccttccctgggatgtccctggacaagattttactcccataacccaggcagaagtacctcggccgctctaaanctagngggaatcccccggccctgnggnaatttcnatnnangctttttantnanncccnncaaaccttntnngggggggggcccn

SEQ ID NO: 599 - DNA, 888 bp, Homo sapiens
  misc_feature 549, 649, 656, 746, 755, 766, 775, 778, 785, 804, 821, 843,863, 875: n = A,T,C or G
gccgtatacgactactatagggcgaattggagctccaccgcggtggcggccgcccgggcaggtacaagctatcaaaggcggcaattttctcctgcaagactacgacaaggatccgtttattgcaatggagatcataaataggtgtcttaaattgaatggacttgaccatctccccagtactctgcgttgttaccactgcttcccgcgaactctgcgttgttaccactgcttcccgcgaactctgcgttgttaccactgcttcccgcgaactctgcgttgttaccactgcttcccgcgaactctgcgttgttaccactgcttcccgcgaactctgcgttgttaccactgcttcccgcgtacctcggccgctctagaactagtggatcccccgggctgcaggaattcgatatcaagcttatcgataccgtcgacctcgagggggggcccggtacccagcttttgttccctttagtgagggttaattgcgcgcttggcgtaatcatggtcataagctgtttcctgtgtgaaattgttatccgctcacaattncacacaacatacgagccgggagcataaaagtgtaaaagcctggggtgcctaatgagtgagctaactcacattaattgcgttgcgcttactgcccgctttncaagtcnggaaacctgtcgtgccagctgcattaaagaatcggccaacccccgggaaaagccggttgcgtattgggcgctttttccgtttcttgttanttaattcgntggcctcggcnttcggttgnggnaacggtntaacttaattaaagggggnaataccggtatcccaanaataaggggatacccaggaaanaacatttgaacaaaaggccnccaaaaggcccngaaccctaaaaag

SEQ ID NO: 600 - DNA, 866 bp, Homo sapiens
  misc_feature 22, 516, 588, 594, 599, 611, 613, 622, 639, 659, 679, 682,693, 721, 727, 733, 736, 761, 770, 782, 808, 812, 819, 838,839, 841, 848, 851, 856, 859: n = A,T,C or G
ggagctccccgcggtggcggcncgcccgggcaggtacaatggaacaaggagataagcagtgaaaggccaagggaatgtctggagttaggacttcaggtgattcacaacttggctgccactcacccgagactgcccaagcccagatttcttccttctataagaatattgattcttgcaaataagatgaacctaaatgtggtccaggagtcagcatcttctacatggtacctcggccgctctagaactagtggatcccccgggctgcaggaattcgatatcaagcttatcgataccgtcgacctcgagggggggcccggtacccagcttttgtccctttagtgagggttaattgcgcgcttggcgtaatcatggtcatagctgtttcctgtgtgaaattgttatccgctcacaattccacacaacatacgaaccgggagcataaaagtgtaaagcctggggtgcctaatgaagtgagctactcacattaattgcgttgcgctcactggcccttttcantcgggaaacctttccgtgccactgcatttaaatgaatcggccaccccccgggaaaagccggtttgcgtattnggcgcnctttncgcttcttgctnanttgactcgntgggcctcggtccgttncggcttgcggcgaagcgggnttaacttacttcaaaagggnggnaataccggttnttcacaaaaaatcagggggataaccccnggaaanaaacantgngaccaaaaaggcccccaaaagggcncggaaaccntaaaaaagggcncggttgctgggggtttttcataaggntccnccccctngccaggcattaaaaaaatnncncttcaantcnaaggnggngaaacct

SEQ ID NO: 601 - DNA, 492 bp, Homo sapiens
  misc_feature 2, 3, 4, 5, 6, 14, 16, 17, 25, 490: n = A,T,C or G
gnnnnngggccgcncnnacactcantttactatagggcgaattggagctccccgcggtggcggccgaggtactgttcgctgcttttcttgagttcatttgtctttccaatgatcgtatatgattgaatagtagagaaggcacctgcaagtagaagccaatggcaaaagattgataagcatctttcctggactctggtgcttcgggggtgccaataactgcactctgagtaatcctggtcacttcatcaattgagagagtttaagtcaggggacttatgatttctttctcaacaagaccaggtgaacgtgtttttgcagttctaagtattatttgcaaattaaatagccatatatctctaaagcttcctgagcaacaaccagaggtacctgcccgggcggccgctctagaactagtggatcccccgggctgcaggaattcgatatcaagcttatcgataccgtcgacctcgagggggggcccggtacccanct

SEQ ID NO: 602 - DNA, 500 bp, Homo sapiens
  misc_feature 2, 3, 4, 5, 6, 7, 9, 10, 11, 12: n = A,T,C or G
gnnnnnngnnnnggcgccgtatacgactactatagggcgaattggagctccccgcggtggcggccgcccgggcaggtacgcgggaggcatgagccactgtgctcggccaagattctcttaaattcatcttttgctttttatttccgcttaccctgcttcagactaacttctcaccgtcaatcacagaattggttggatagtttgctttcttgctaattttgccttctttcacttgttctctataaattgtccagactatcagataaaatccaaatgtttcatcctttgcaactgctcatatactgtctaacttagtgaaacaaactgctttcattgttatttgttcttcagaatactacctcctaagtaaatggtacctcggccgctctagaactagtggatcccccgggctgcaggaattcgatatcaagcttatcgataccgtcgacctcgagggggggcccggtacccagcttttgttccctttagtgagggttaat

SEQ ID NO: 603 - DNA, 500 bp, Homo sapiens
  misc_feature 2, 3, 4, 5, 8, 22, 254: n = A,T,C or G
gnnnnggnggcccgtatcactnctatagggcgaattggagctccccgcggtggcggccgaggtaccgttcctccagtgcccagagatgctctccgcaccaagccacagatgtggaggaggcagatggcctgtgaaaactgaaggcaatttggaaggcatttttaaattccgtggagccactggagaaatgtttacaggaatgatgccttaaaattcctcagtggtaagatctgagtacctgcccgggcggccgntctagaactagtggatcccccgggctgcaggaattcgatatcaagcttatcgataccgtcgacctcgagggggggcccggtacccagcttttgttccctttagtgagggttaattgcgcgcttggcgtaatcatggtcatagctgtttcctgtgtgaaattgttatccgctcacaattccacacaacatacgagccgggagcataaagtgtaaaagcctgggggtgcctaatgagtgagctaactc

SEQ ID NO: 604 - DNA, 505 bp, Homo sapiens
  misc_feature 2, 3, 4, 5, 8, 9, 10, 11, 26: n = A,T,C or G
gnnnnggnnnnggcgccgatcgactnctatagggcgaattggagctccccgcggtggcggccgaggtacaccagaacttaaagtataataataaaaaataaagtattacagaacatggtcaattatattaaaaagtagattaattaatgtccatatatacattttttggtggaaatcaaacataatgaaaactatttcacataattaatattttgtttattttttacttattaatttattgcagagatgggagtcttgctatgttgcccaggctagtctcaaactcctggcctcaagtaatcctcccacctcaatcccccaaaatgctgggatttcaggaacatgccactgcactttattagtgttacctgtcataaagttaattactcataattttatttcagtatatatatatacacacacacaccatacacaccatagtagaataaattaattatattttctacaaaaattattttcaatcttttttgttacaatgagtatc

SEQ ID NO: 605 - DNA, 479 bp, Homo sapiens
  misc_feature 31, 442, 452: n = A,T,C or G
cctaacactacttagggcgaattggagctcnccgcggtggcggtgctggcggtcattctcggctcattgctgcaggtgctgatcccccgagactggctgttgcgcctgtttggtcgcgccggcctgggttccaccctgcgtggcgggctattcgccttgccggggatgatgtgcagttgctgcgccgctccggtggcggccggtatgcgtcggcagaaggtctcggtgggcgcggcgttggcgttctggattgccaacccggtactgaacccggcgacactggtgttcatgggctttgtgctgggctggggctttaccgcgctgcggttggtggccgggatcgtgctggtagtgggtgtttcgctagtggcgcaacgcatcgcgcggccgctctagaactagtggatcccccgggctgcaggaattcgatatcaagcttatngataccgtcnacctcgagggggggcccggtcccagct

SEQ ID NO: 606 - DNA, 469 bp, Homo sapiens
  misc_feature 2, 3, 7, 9, 205, 210, 223, 224: n = A,T,C or G
gnnacgnancactacttagggcgaattggagctccccgcggtggcggccgcccgggcaggtacgcgggagatatttgctgaactcataagtttatttgggtaacaagagtcaaaatgatattggttagcaaataaaaattcaggatacatattccaaaaatgctgtttatgtaattaatttggtgaagtctgtcaaaaaaaccanctagntgcttgtgggccnngttgactgctgtggtaaattaagtgatgccctagcaaactaaagacagtgtcatgccttccaaaaggcccagagagagcttcaggagagaataggtccatcctcatgtagccgggagaattgcagaatgaaattgctcccagtattactagtaaaccttcaaatttcatttactggggcagagatagttccggttttaaggaaataatagaaaatcatggtctgaaaattctcaaacctgaaagg

SEQ ID NO: 607 - DNA, 470 bp, Homo sapiens
  misc_feature 2, 3, 5, 14, 18, 257, 389: n = A,T,C or G
gnngngccctatcnactnctatagggcgaattggagctccccgcggtggccggccgcccgggcaggtaccaaaagaatgttcatagcagcattatttgtcatagtcaagagctggaagcaacccagttgtacatcaatggtagaatggatgactaaattgtagtgtattcttacaataaaatactatagagcaatgaaaataaataaactatggcttatatgcaaacaacatggataaatcttaccaacaatgttangacaaatgtagccaaaccaaaaaatacacatgttctatgaatccatatatgcaaggttcacaataggtgatagtagctactcttttgggaaggagtgaggaaaggactgagagagtattgcagagggggctncgggtgtttgtaatttctatttcccagtgcaggtgtggtttgcatgagcatgttcacctttgtggaaattcattgagctgt

SEQ ID NO: 608 - DNA, 468 bp, Homo sapiens
  misc_feature 2, 3, 38, 221, 318, 387: n = A,T,C or G
gnnagccctatcgactacttagggcgaattggagctcnccgcggtggcggccggcgtcacgccacccgagccggactggctgctgatggattatgccgacctggtcagttcggaagccttccgcggcaccgcctttgccgccgccgtgcgccagcagctcgacacgctcgagcgcgagcacccggggcgcggcgtggagcaagcgatcgacatgctgctgnccgtgtttggcgcggcgctgcaaaaccagggcggcacggccctgttcctcgatggacgcctgctgacggaattcctggaaacaccgaccaccacggncggtctagaactagtggatcccccgggctgcaggaattcgatatcaagcttatcgataccgtcgacctngagggggggcccggtacccagcttttgttccctttagtgaagggttaattgcgcgcttggccgtaatcatggtcataagcc

SEQ ID NO: 609 - DNA, 466 bp, Homo sapiens
  misc_feature 2, 3, 6, 201, 210, 216, 230, 357, 360, 395, 460: n = A,T,C or G
gnnagnccgatactctactatagggcgaattggagctccccgcggtggcggccgcccgggcacggtacaccctagctccagcttcccctgggagactgtgcatctcctggctccactaacaccaccttcttctgaccttccagcctagagatgatgactctgccagcctagatgggctctgggttgtctccctattcctgnttgctttgnagaatntcccattatgctgncaccaactccccagcctaagccctctctattttaaattctcaagtggattatgttcctgattagtccctgactgatataccactctcctcatgatctctgattagttttcctgttaggttgttgcantcnaaaaaaaaaaaaaaaaaaaagtgccttggccgctntagaactagtggatcccccgggctgcaggaattcgatatcaagcttatcgataccgtcgacctcnaggggg

SEQ ID NO: 610 - DNA, 471 bp, Homo sapiens
  misc_feature 2, 3, 4, 7: n = A,T,C or G
gnnncgnatcatacttagggcgaattggagctccccgcggtggccgagcggccgcccgggcaggtacctctcccctgacctcctttggctaaagtgcctttcagattttattactattgttaacatttccaacagccattttaacattatttttacaaatttgatgtgaatattccatattagaaatatgatttcagaagacaaagaatttgtttgtgaaaatgctaaggactgaagctgacagaaataacattcctgcttacaatgaacttttgcacgtatagtagaaaaccaggagcgtcctcaatgtgctccttcaccctattggctgcatctccatgagcccctgagaagggaaattaacactacctgcagaggagacaagaggcacctgaggacccaggaggacccacaataagttgctaaaatgaaacatctgttacatttgtgtttaattagtaatatgtcttt

SEQ ID NO: 611 - DNA, 510 bp, Homo sapiens
  misc_feature 2, 3, 4, 5, 9, 21, 25, 33, 36, 37, 42, 50, 54, 75, 89, 91,326, 329, 334, 346, 385, 386, 413, 448, 458, 500: n = A,T,C or G
gnnnnattngacactacttangtcnaattgganctnncctcnccgcggtngccngcgcccgggcacggtaccgtncctccagtgcccananatgctctccgcaccaagccacagatgtggaggaggcaggtagggggtcaaagaggggtggtatcggttattcaggacttttttttttttttcttaaatatcctgtgcttctttcaatcatttgaaggtaaaaccaggtcctgtgagtggtaaactgatttttggttcttatgagggtattattttctgtgtagatatttgttaacttggtgtccttgcagggtaaacgatcatcnaanctttntgttccaccatnttgctcctctcattttagacctaatatattgactataanngtttccctctggaagtattgactattnttttgcatcaatactaaagaaaataaaatataatnatagagactnaaacatattaatatatatataatgggtgttaaactaaatggntaatttgaaa

SEQ ID NO: 612 - DNA, 492 bp, Homo sapiens
  misc_feature 3: n = A,T,C or G
gcnatcactacttagggcgaattggagctccccgcggtggcggccgcccgggcaggtacttacaggggacccgccaggggcctcgagaatcggtatcctgagtcctcctgaagagcagtagaggttgtttcattaagtgcaaacacattgttcttaatttgaaaactgtgggcagaaacagaagcccgagactaatttttccattgctaactctagattctcggccactggagtctgaagatactctctttgagaatgcatattattttgctcacagctaaaacatttaagtatcatagctgatcagtggagtgagattaaaaggtttcttttttgaatcatcagctagagatgtacctcggccgctctagaactagtggatcccccgggctgcaggaattcgatatcaagcttatcgataccgtcgacctcgagggggggcccggtacccagcttttgttccctttagtgagggttaattgcgcgcttggc

SEQ ID NO: 613 - DNA, 493 bp, Homo sapiens
  misc_feature 3: n = A,T,C or G
gcnatcactactatagggcgaattggagctccccgcggtggcggccgcccgggcaggtacacactctggataattaacggcagaaagataaactgtatttctgcacatcttcactgcactgcgagccccaaccacagcacacacctgcaccctccctgccttctcacataaagcccagagggaacaccgggcaccttggtgtcttctcagatgcccctggagcgtttcacaccaatgcaataacagaagttttgattttccagataaacaaatggattgtttacagctacagaagcccccttcagagactgccaaatttctgtcctcatccaccaacctgcctagaagagagaagctagtgccctctgcaaaacctcccacactagggggctggtataagggatgaaaactagggggagtctctttaagggtgatctttctgccaaaatgactttacttttccctgaaccataatctactctagaaaaagggc

SEQ ID NO: 614 - DNA, 515 bp, Homo sapiens
  misc_feature 2, 3, 4, 5, 16, 20, 21, 23, 27, 44, 223: n = A,T,C or G
gnnnnacgggacactncttnngnctanttggagctccccgcggnggcggcccgaggtacactttcaagaccaaaatgtaaatttacaaatgtgtctcagtaagaaaagttacagaagctgggccgggcgcagtggctcatgcctgtaatcccagcactttgggaggctgaggtgggtggatcacttgaggtcaggagttcgaaaccagcctggccaacgtggngaaaaccctgtctctactaaaaaatacaaaaactagcccgggagtggtggcgcacacctctaatcccagctactcaagaggctgaggtaggagaatcgctggaacccgggaggcggaggctgcagtgagccaagatcgtgccactgcactccagcctgggtgacagagcaagactctggtaatacagtcaagctgctcctgtcagatgtatacttcctgaatgagcactataatggatgctgctcaggttcatctattcagtaaggttggagcctactatatgccaggcact

SEQ ID NO: 615 - DNA, 500 bp, Homo sapiens
  misc_feature 2, 3, 4, 6, 229, 398: n = A,T,C or G
gnnngncccgatcgactcctatagggcgaattggagctccccgcggtggcggccgaggtacaccagaacttaaagtataataataaaaaataaagtattacagaacatggtcaattatattaaaaagtagattaattaatgtccatatatacattttttggtggaaatcaaacataatgaaaactatttcacataattaatattttgtttattttttacttattaattnattgcagagatgggaggtcttgctatgttgcccaggctagtctcaaactcctggcctcaagtaatcctcccacctcaatcccccaaaatgctgggatttcaggaacatgccactgcactttattagtgttacctgtcataaagttaattactcataattttatttcagnatatatatatacacacacacaccatacacaccatagtagaataaattaattatattttctacaaaaattattttcaatcttttttgttacaatgagtatcag

SEQ ID NO: 616 - DNA, 511 bp, Homo sapiens
  misc_feature 2, 3, 7, 14, 68, 131, 133, 141, 166, 219, 236, 251, 265,275, 277, 317, 346, 349, 369, 375, 387, 388, 402, 423, 502,503: n = A,T,C or G
gnngcgnatcactncttagggcgaattggagctccccgcggtggcggccgaggtaccctgattagttnaatataaagactccgtaatttttacaattttaacaataattttatttcttcaagcttgttagntngggattgnattaaaactacagtgtgtgacttanaaaatgataatgctgctttatggaaaatggattataggtgggtaagactttcntttgcaaaaatttgggnaattacccatcagtngttaggaacccagntgaagtctanangacagatgatagtatcttatactaggttgggctttgaatngatattggtaatttcagtagaatttaatnatncattaaaaagaaagaaatcngagcanattcttttattnncacttgatacttgngttgttactttcaatgagatnagaaagaccggccaaggagaaccttcaggggcaggggatgagaacgaaaacaagaattttatgttggacatgctaagtnnaacagcct

SEQ ID NO: 617 - DNA, 469 bp, Homo sapiens
  misc_feature 2, 36: n = A,T,C or G
gngtccctatcactacttagggcgaattggagctcnccgcggtggcggccgtcagccattcggcgaactgcgcttcggtctcttgcgaaatggcatcgtagcgcacgcactggaaatacgtgccgtcggccggcagcaggctgaagcggctgcccgccaggccgtcgcggaacaggtcgcgcttgcgctggtaaaacgcgggcaaagtccaaggtagggcttgcggcttggccatgtagcccggcaatgccgtgctgcatcggcgtgttgacggtaaacacgttgtactggtgcaccttgcgaaattccgccgtcagggctgcgggcgccgctacatagccaaccttccagcccgtctttgcgcaatggtgagtagttgacccatggacgtatgctagaagccgcatggatgcaggctttcagatgtttgatcaatgtccatgggaaagttcccgatttgacgctcttg

SEQ ID NO: 618 - DNA, 472 bp, Homo sapiens
  misc_feature 2, 3, 10: n = A,T,C or G
gnngcgcgancactacttagggcgaattggagctccccgcggtggcggccgaggtaccacattttcttgattcctacaatctattcttcctacaacagcaacagtaattgtttgaaattatacataagacttcatcactattttgttcaaaattcttaggattcttcccaatacttttaggatagggctcaattgctttatcattgactgcaagggccctgtgtcctctgaacctgcatacctatccaagtttatctccaacactatcccactgtattaccctactctgtctacaaagtcttttctgttctttgaacaaacaaaatttattcttacctgagggtcttgcatccacactcagaccttacttggttttagttttcagaaaggccaccaagggaccatcctatttaaaacagtccccatggttagatcccacctccgtcaccttttcctagtgagttttcaccac

SEQ ID NO: 619 - DNA, 476 bp, Homo sapiens
  misc_feature 2, 8, 15, 30, 37, 41, 91, 92, 210, 211, 216, 217, 218, 219,223, 227, 233, 235, 238, 241, 242, 245, 250, 255, 259, 264,267, 268, 280, 282, 291, 292, 307, 316, 320, 325, 326, 327,333, 334, 337, 339, 340, 344, 345, 346, 348, 349, 353: n = A,T,C or G
  misc_feature 365, 370, 371, 382, 391, 392, 397, 398, 413, 426, 429, 430,433, 446, 450, 453, 457, 462, 466, 467, 473, 476: n = A,T,C or G
gngttgcnctttttncttcggcaattgttntccccgnggtnggagcggccgcccgggcaggttctgagtcaaggacttctttaacgtcatnnacggctcctaggacagccacagaaaaaaatggggtaaaggggtaggaagaaaaaaggaagggaaagagagccagggaattggggaaggagaggtaggggaaggggaagggggaagggnngcctnnnnggtncttncacatnangtnagnnggntggangttanattncacanganncccaatgaccancntttctttcnnaccttgttcggtgcntggggcacnatcnttatnnnaaaacnnttncnnaccnnngnntgtnatcaatatcaanacctnnattgtcacatnttaaatccnnatganngaaatctggaggacntttgaaatcacanagnnggnggggtcttcaatngccnggnctgnggcantttnntatctnatn

SEQ ID NO: 620 - DNA, 474 bp, Homo sapiens
  misc_feature 2, 3, 7: n = A,T,C or G
gnngcgnatcactactatagggcgaattggagctccccgcggtggcggccgcccgggcaggtacatgccaggcacaagctggagtcacagatgccacactgactatcacattgtcatcatactcagagagagaaaggtgtatacacccagtattttcttatgttttctctatacttccatatccccacccccattatcccccgagacatttcccagttgggaagtcagttgcttatgggaaactggctgcagggggatcagcccacctgtaacacacggaaaggcagagaaacaatgagtcatggatttgagtgcaaacaagcccagtcctgctacagagagttacggaaaaatctcactgttgaagagagacatctataagagaggtgaggaaaatgactgatagatccttttacaatattctaggggtagtctgtctgtgggagggggcaggagtctatggggaactctctg

SEQ ID NO: 621 - DNA, 473 bp, Homo sapiens
  misc_feature 2, 3, 5, 8, 10: n = A,T,C or G
gnngnggncnatcgactactatagggcgaattggagctccccgcggtggcggccgaggtacgcgggggatttttagtaaagttttgccatgttggccaggctgatcttgaactcctgccctcaagtgatctgcccaccttgacctcccaaagtgctgggattacaggtgtgagctactgtgctcagctcagccatggaacaatcttgatggataaatttaatctgcaggtatctccatctctatttgccactcttagtaaatgttttagtttgacagtaaacgagttgagacattaatgattgagagagcacctaagcagctcgaagtgctgggagtctctcctaaagaattagatgcacacagcatttttcccttacagacacttcactgaagcagtcatgttggacttgggtggcgtctgctattagacacactattcaccaataaaaccctgaaaattgcattgcacagg

SEQ ID NO: 622 - DNA, 477 bp, Homo sapiens
  misc_feature 2, 7: n = A,T,C or G
gngcccnaacgactactatagggcgaattggagctccccgcggtggcggccgaggtactattaaatttaatgagaggtaacccatgcaccggcaggaagttcaaggggacagaaggggcttgctccactctggagccctatctcctctcacctccttccttctagtttgacatgcgatcttgtctctctcttttataaagtgcttccaggcccctttggattaggatgctgtcctaaatccttcctaaagagaggttttggagccaccaacactgcttcactgtggaataaactttccttattaagattcttcattcactcataatcatctcctttttcctcactgctcattcatttatggagatagcacccatatcatagctacttggtcaaatcatggtgatactccccacttaggagaggaagatgactaggttataagctcttgcctttaggaaattaaaaaccctgtgggtg

SEQ ID NO: 623 - DNA, 482 bp, Homo sapiens
  misc_feature 2, 3, 7, 9, 211, 427, 456, 473: n = A,T,C or G
gnngcgnancatactatagggcgaattggagctccccgcggtggcggctggattcttgacattcattaatatcttgacaactcagcccatcagaggttcttcgaaagccacttccacaacggaccacacagcgataagatccaatcgtattgtcacagtcctgaccagcgtggcaggtatgcctacccaaagcacactcatcaatatcttngacaagttcttccatctgcagctatggtgaggcctttagggcaggagcagtagtaagtccccatggcattgtggcagctatgggagcagggattccctgctgcacattcatcctcatcagcacaaaaaggtccaactgagtctaaggtaaacccggaggggcactgattctggcgatctcctttggatattgaagcattgaattttaaaacccagngtcttcttctatctggttaatagtccaanattccacaaaagggatnccttgaaag

SEQ ID NO: 624 - DNA, 542 bp, Homo sapiens
  misc_feature 2, 255, 356, 388, 394, 407, 434, 462, 464, 469, 497, 504,528, 537: n = A,T,C or G
gncgcgttcactcttagggcgaattggagctccccgcggtggcggccgaggtaccaggttcaaatagtcagcagctcatcataatcaatgagcgaggacataaagtaggaaaaatgcatcaccatggtgagcaaggaaagcaagttattggaggcacatgttaacacataaaatataaaattaatatgatcacactggaaaggcttgcctgagcccacagtttgaatgcctacaataagatgagatgcacaacanaaagcaagagaacctgatcaagtgggtgacctggccatgggtgctctcatcagtggggggacccaaatgcttatgtgggactcaccaggtatcgaatttanccattgattagggagtggttttggttggtggntgggcnaggaaaacttttnttaattccaaattggaaataccaattngaaaaccttttaaaaaaaattaatttgntnagganttctttttaccacccaaggcccaaattngtcaatnttttggccgttacccttgcccccngggccggcnccgct

SEQ ID NO: 625 - DNA, 482 bp, Homo sapiens
  misc_feature 2, 3, 5, 7, 9: n = A,T,C or G
gnngngnancactacttagggcgaattggagctccccgcggtggcggccgcccgggcaggtactgtttctttaaaaagatttgtatcttgctaggtaattaaacaatgtttacaattaatatatttatatttaaatagagacagggtcttgctgtatagcccaggcattcttgaactcctggcctcaagcaatcttcttgccttggcctttccaaagtgctaggattacagggtgtgagccagtgtgcccggcccaattaataccatctaagtcattgtctaaggaacttttcgtttctgtttgttgtggggccagactttgggaagaaagtatgtttgataagaatttatcagataacccttttttttttttgtaatatctctttgggatagcattgtcttcctctgctttggggaagtctttttggttactcattactcaaaatttgccaaatttaggggtgggtggtgaatttttggcc

SEQ ID NO: 626 - DNA, 479 bp, Homo sapiens
  misc_feature 2, 3, 5, 10, 211: n = A,T,C or G
gnngngcccnatcgactacttagggcgaattggagctccccgcggtggcggccgaggtacgcgggggatttttagtaaagttttgccatgttggccaggctgatcttgaactcctgccctcaagtgatctgcccaccttgacctcccaaagtgctgggattacaggtgtgagctactgtgctcagctcagccatggaacaatcttgatggnttaattaatctgcaggtatctccatctctatttgccactcttagtaaatgttttagtttgacagtaaacgagttgagacattaatgattgagagagcacctaagcagctcgaagtgctgggagtctctcctaaagaattaagatgcacacagcatttttcccttacagacacttcactgagcagtcatgttggacttgggtggccgtctgctattagacacactattcaccaataaaaacccctgaaaattgcattgcacaggactga

SEQ ID NO: 627 - DNA, 850 bp, Homo sapiens
  misc_feature 1, 4, 5, 6, 7, 8, 12, 15, 19, 21, 23, 26, 28, 31, 33, 35,36, 39, 40, 43, 49, 51, 53, 65, 67, 70, 78, 81, 82, 83,85, 86, 93, 95, 99, 101, 112, 124, 125, 129, 133, 135, 206,217, 304, 313, 317, 327, 331, 355, 366, 381, 390, 392, 397: n = A,T,C or G
  misc_feature 399, 402, 406, 407, 413, 414, 423, 432, 438, 447, 448, 456,467, 469, 472, 475, 477, 479, 489, 497, 501, 514, 518, 520,526, 527, 534, 557, 561, 576, 588, 590, 606, 608, 616, 626,662, 671, 677, 678, 681, 687, 689, 697, 704, 706, 708: n = A,T,C or G
  misc_feature 710, 713, 736, 739, 741, 754, 758, 760, 761, 769, 771, 773,778, 780, 791, 800, 802, 809, 810, 813, 815, 823, 825, 831,842, 847, 849: n = A,T,C or G
nctnnnnnaaantanattnananatntnttncntnnaannatntactantnantacattgttctntnatnttatttantannntnnttttaantnattnanttttttatttnttttaggagagnngctntacnantcactatagggcgaattggagctccaccgcggtggcggccgcccgggcaggtacatgaaggagggcactanggggagctaancaatttgtgagttaggtagccaagattcgttgaggttggaagaatgaggaaagaaaggggatctgtggcaaaaatatgctatttggnatccacagntctnatattaaggnaccntgttttaataccttttattccatncccccaaattnaaaatttaccaaaancccccctgncntggcncncanaaanngggaannaaagggggnaagtgtttnggtctncacccccannttttgtangggggtagtcncnacnggngngnccttgtgggnttgtttcnttanaaaattatgtcanaaancntttganntccatgnggtttccccccaagctaaaaggngggnggcacccttttttangtaattttttanangttctttcttcttccnantattccgncaatagtggnctaatggaagtcccaaaaaaagtttcggtttcctcnctttttaancaaaannccnaaattngnggtcttanaaaaaantngntnatntggcccctatctttggcttatgnttnanaaattcccacccncctntnngttttcangntnttatntncttttttttgnaatcacctnanaaaaatnnatntntttctttntntttcanaatacgttttncctcntnc

SEQ ID NO: 628 - DNA, 490 bp, Homo sapiens
  misc_feature 2, 3, 467: n = A,T,C or G
gnncgttcatacttagggcgaattggagctccccgcggtggcggccgaggtacttcatactactttaagttacctcctattgggggcattataaatgggtaagcagagaacatcatggaaagacatggagcttagtatatgcaaatgttgagttactcagtgtaatgtgtgaaaaaggagtttcataagtttcggtcagggaaagaaaggcagggtcaaaaatttctgcttgagaagttttggggagcttggggagactttaaacagggagcaacacagcgcctctgtacctgcccgggcggccgctctagaactagtggatcccccgggctgcaggaattcgatatcaagcttatcgatacccgtccgacctcgagggggggcccggtacccagcttttgttccctttagtgaggggttaattgcgcgcttgggcgtaaatcatggtcatagctggtttccctgtngttgaaaatttgttaatccgctt

SEQ ID NO: 629 - DNA, 482 bp, Homo sapiens
  misc_feature 2, 4, 6, 8, 245: n = A,T,C or G
gngngnancactacttagggcgaattggagctccccgcggtggcggccgaggtacttcatactactttaagttacctcctattgggggcattataaatgggtaagcagagaacatcatggaaagacatggagcttagtatatgcaaatgttgagttactcagtgtaatgtgtgaaaaaggagtttcataagtttcggtcagggaagaaggcaggggtcaaaaattttcttgcttgagaagttttngggagcttggggaagactttaaacagggagcaacacagccgcctctgtacctgcccgggcggccgctctagaactagtggatcccccgggctgcaggaattcgatatcaagcttatcgataccgtcgacctcgagggggggcccggtacccagcttttgttccctttagtgagggttaattgcgcgcttggcgtaatcatggtcatagctgtttcctgtgtgaaattgttatccgct

SEQ ID NO: 630 - DNA, 481 bp, Homo sapiens
  misc_feature 2, 3, 7, 9: n = A,T,C or G
gnngcgnancactacttagggcgaattggagctccccgcggtggcggccgaggacagttttgagcacctgccttgtgcctcaatgaatacttgttgggtgatgaatgatataaaattcatcttgacattcagcttaggtttggaagacagtgtatgatttctttaccatggccttgactcatcttctgaatggtcaggctaagtgctgcctccttctctgtgtagcctattcaggcacctgctcacctaccacaacctgccaggcccctccagctctggaagcatgctatgtgagaaataatcctaatatccaagtcacagacagtgggtgggcttggaagtgcagggcctgtgatccctttgtggagtagctgaatttaagaagttgacagcaattgtgttctataatgagaatggtcctgatcatcatggaggaataatagctgccttttattgagaaactgtcaggtacctgcccggg

SEQ ID NO: 631 - DNA, 564 bp, Homo sapiens
  misc_feature 2, 5, 7, 202, 210, 215, 229, 237, 245, 248, 259, 274, 290,295, 319, 337, 342, 345, 346, 347, 348, 350, 354, 355, 356,357, 358, 363, 365, 384, 386, 389, 394, 396, 398, 399, 424,434, 444, 463, 466, 470, 471, 473, 483, 486, 488, 490: n = A,T,C or G
  misc_feature 491, 492, 497, 506, 514, 516, 517, 521, 531, 532, 533, 537,543, 547, 553, 559, 560, 562, 563, 564: n = A,T,C or G
gncgngnatcatacttagggcgaattggagctccccgcggtggcggccgaggtacgcgggatcaaacatcttgttatactttgtaaacattttctttttttaaaccccagttccagccggacgcccccagacctctgaggttcgaggaggtggtggttttcatttggggctttgcatatttggttgttaggttttgcgagancctttttnatttngcccagacgtcttnatgccggnggtgaaanttncacttcgggcncccctcccctggagntcttttgtgtgccgcnggaanttcagtggaagatccggtttactnagcgatataggagggatntatanctnnnnanttcnnnnnttaantntatttgttccttgcccggngncgngcacncntnnactgcccgctttttccaagttcatntgaaaacctnttctgttgcncagccttgtcatttaaatnganattnngnttcacatccnccncngnnntgaanaagggctgngttattgncnnaaantattggatannncttntttttnccgntttacntttcgnntnnn

SEQ ID NO: 632 - DNA, 477 bp, Homo sapiens
  misc_feature 4, 311, 350, 378, 395, 399, 411, 421, 450, 469: n = A,T,C or G
ggcnaattggagctccccgcggtggcggccgaggtacgcgggatcaaacatcttgttatactttgtaaacattttctttttttaaaccccagttccagccggacgcccccagacctctgaggttcgaggaggtggtggttttcatttggggctttgcatatttggttgttaggttttgcgagagccttctttatttttgccagacgtctcaatgcggggtgaagtccactcggccccctcccctgagtcttccgtgtgcgcggaatttcgaggagatccggttactaaggatatagaggaaaaaaaaaaanttaaaaattaaaaattaaaggtacctgcccggggcggcncgctcgactgcccgttttccagttcggnaaacctgtcgtgcccangctncattaaatgaantcggccaacntccccgggggaagaggccgggtttgccgntatttggggccgcttcttncgcttcct

SEQ ID NO: 633 - DNA, 547 bp, Homo sapiens
  misc_feature 4, 305, 308, 316, 335, 348, 350, 355, 360, 376, 380, 383,392, 394, 395, 403, 405, 410, 412, 414, 421, 426, 432, 433,440, 445, 446, 447, 449, 459, 460, 462, 464, 465, 467, 474,475, 478, 481, 486, 490, 491, 499, 500, 501, 505, 521: n = A,T,C or G
  misc_feature 522, 524, 527, 529, 534, 540, 547: n = A,T,C or G
gtgngctatcatcttagggcgaattggagctccccgcggtggcggccgaggtacgcgggggtatgatggaaggaagaacttgtgtgcttagacctgacgctgggaggagatgctgccacctaggttacttgtaggaccctatacggcaacctcctttgccaggaactatttataaacatcctgcaggaaaatgcagtgaagtagaagaagacaggggatatcccagaaggttatgcaaaacatcaagagaagatgagaggagtctatatgtcagaatacacatttcccaccttgcccaacagttnaanaaaaaaanaaaaaaaaaaaaaaaagtncgtccccggggtnanttttnaaatntgtttttttttttatnttgntcntttttgttntnntaatcttntnaaagntnangaaattntattntttganngtttaantttannntntgattttatnntncnntntatgtannttntangtttnttgnnttattatnnntttntatctattgctttatnntntgntntaatngttttnttattcn

SEQ ID NO: 634 - DNA, 477 bp, Homo sapiens
  misc_feature 428: n = A,T,C or G
cttagggcgaattggagctccccgcggtggcggccgaggtaccaacatacagttaagctacttaagttgtagtgacttaggacttaattatcttataggataaaataaaaactttaatcctaaacattagccattgcattaaatgctttaaaggaacaactggctttgagctctgttcatccatgcaaggattatacaatctcagtgctctagctaaattgctaatgttttattactaatgcactggtaagcctctcatagaagatgggtctcttggatttacactgaaatataacttttctcttccatattattggaagaccttattcttcaggcaggagcttagaaagtctaaattatgcaccagagccttaattatctgatggcaaaaaccacgatactctggtcactactaccaattgacaatnagaggaccccaattaaaaactctagaaatattgagtcctgaataccagg

SEQ ID NO: 635 - DNA, 458 bp, Homo sapiens
  misc_feature 294: n = A,T,C or G
ggagctccccgcggtggcggccgcccgggcaggtacgaaagatgatatacatgaaaatgacttgaaaattcgtttctctactttttttttaatgtaacacaaagtaaatgagaatctgagtattttatcaagttgtttcaatgaagacagagttgattcagaaggtaattcccagattggatggtatgagtttccggcaagattagagaaagagtttttctatgtaataactgatatttgttcacatgcttcctcttgatggctcatcaggattttagagatagaaaggacatnttatccaaccgctttcattttcttaaagaaattggggaccgggcgcagtgactcatgcctgtatttccagcacttcgggaggccgaggcaggtggatcctaggtcaggagttcaagaccagcctgggtcaagaatgatgaaacccccgtctctaccaaaaaaaa

SEQ ID NO: 636 - DNA, 475 bp, Homo sapiens
  misc_feature 12, 25, 34, 192: n = A,T,C or G
gagtttgaaccnttttgggagaacnggagctccntgcggtggcggccgcccgggcaggtacagttacaactgacttgcataacactaaagaaaacattgtaattcctacgccagtagtgggggtaaactgagaaccaacctaattttcaccacagggccctctggaaatagaggaactaaaatgatgactgnttgaaagtgaaagagggcagattcctaagaacatcactcctactgcattccttacctccactccataccctttccttcttcactcaggtaggactgtctctggaatgcatgacagcatgcacagttcagagcttggatgtgatcctggaaatgggcttagatgaccttatgaacactgaatgctgattgcagacactctcaaccttcttcctctagttgacttctatggctgtgccagccagtcctagacccttctagaagaacactaggatgatacatttct

SEQ ID NO: 637 - DNA, 840 bp, Homo sapiens
  misc_feature 3, 4, 10, 13, 14, 15, 16, 20, 21, 26, 28, 30, 34, 38, 51,56, 57, 58, 61, 62, 67, 69, 72, 73, 77, 86, 87, 91, 106,111, 113, 116, 117, 118, 123, 125, 128, 134, 253, 341, 345,395, 439, 448, 454, 490, 501, 521, 542, 551, 558, 569, 574: n = A,T,C or G
  misc_feature 586, 595, 624, 668, 673, 698, 705, 712, 715, 717, 719, 739,741, 747, 749, 762, 763, 767, 769, 793, 799, 801, 805, 812,825: n = A,T,C or G
tcnnctatcntannnnattnntccantntnatcnatantctcctatttatnttttnnnttnnttatntntanntatntaatctatnntatntatatatctatttanatatnanttnnntagtngnccnccgtancgactcactatagggcgaattggagctccaccgcggtggcggccgaggtacttacagtttgactttgagtcagctcagcattctaaatcaaacgcaaacagcagaatcatatggcatanacacttagcaaatccaatgccttccaggcatcttgtttcctgttgatgaaatcctccctatggagagcaaactggttcatatcttcanatantgtcattcaaccccttgggcagccttttcttggggctaactaaaatattncggcaccccggtttcttgggttggggaccatttttcaacccccnaaggtttgntttcantttttattttaagatttttttcttggggcctttccngttggggaagnaaaaatttaattcctggccncttttcctttcttggaaggtnattttggantcttctncaattttgggnggccngcccaattgggnttggaaaanaaaataatttccggcccccttgggttatncattaacccccccccggccggtttaacccccttggcccccccgnggggnccggggtccccgggctttcttaagnaaaaacnttaatgnttngngnaattccccccccccgggggncnttggcnangggaaaattttcnngaantnattccaaaaaggccttttatttcngaatanancccngttccgnaccccctttcggnagggggggggggggg

SEQ ID NO: 638 - DNA, 490 bp, Homo sapiens
  misc_feature 88, 368, 405: n = A,T,C or G
cgggcccgtaacactacttagggcgaattggagctccccgcggtggcggcccgcccggccgggaccttttttttttttttttttttgnaaagacaaggtctcactatgttgctcaggctgatcttgaactcctgggctcaagggatcctcctcgctcggcccccccagagtgctgggattacaggtgtaagccaccacacccagccaacattcttatttttatgcttcctttgtaaatatagtggagaaaaaaaatcactgtattaggatttctcaccaagggcaagatagtcatatgaaatagtccttagcttctttagttgcttgaatattacctccctggtctgtgaggtatctttttgcttcanatcatttcctcaaagaaacacattattggttaatatnattggtcaccttttgaagttgggtcctatatgctgattccgggtagccccagactttcaaaaaagaacccactgtgacttttatt

SEQ ID NO: 639 - DNA, 501 bp, Homo sapiens
  misc_feature 2, 14, 93, 482, 497: n = A,T,C or G
gngtgttccattgnactcctatagggcgtttggagctccaccgcggtggcggccgaggtacagtggcgccatctctgctcactgcaagctccnttctcccaggttcatgccattctcctgcctcagcctcccaagtaactgggactacagccgccagccaccatgcctggctaattttttgtatctttggtagggacggggtttctccatgttagccaggatggtctagagctcccaacttcaggtgagccaccatgcctggcaggactttttttgatgtaagcagagccccttttgccagcttccttgggcttattcccccatagatggcagctgggatcccagcctcttgccggttgatattgtcattcttggagggggcccaggttggggctaatgctcgtgtgactagagcttgctggtgttgagggtggttcatctgaagttcatgaccactaggctttgatctaaaaaaaaaaggngaacggagctttaancccc

SEQ ID NO: 640 - DNA, 532 bp, Homo sapiens
  misc_feature 347, 446, 497, 520, 522: n = A,T,C or G
ttgggccctaacatacttagggcaattggagctccccgcggtggcggccggctttgctccaggcctcaggagtgtaagtttaaggggcgcgaacctgggtgggacggggcagtttttccagcgggccatacgggaaaatttttggttcgaggaagacaaccaccctttttaaggagaaaactgcatcttgccctgcgttattcctacgcggtgcccaggtggggtgtgtgtggaccaagtcaatgaccgcccaagctctccgagtagaaaacccaaacatggttttgtggggtgtgtgcctttgaccccggacttaagcaaaaagcgtggtcttgggcgtagctacnaggtgggttggtggggcttccaaggccctgcgtgcccctcgacgttgaaccgatgatttgggcgggtgccaaggataaacaagattcgccccttctttngcccacttcaattgggcaaggggggacctttgcttacttttcccgggttcnggcgggccgtcttggccgttggnanaagttttggg

SEQ ID NO: 641 - DNA, 486 bp, Homo sapiens
cgctatcactactatagggcgaattggagctccccgcggtggcggccgcccgggcaggtacagctggacagggatataaatcagtgaactctgagaacacttttaatccaagcaccaaataaggcagcatttcctgtgactgctggacgccacggtttaagtgagatgccaaacattcctcatttgggaaaatgcgcaatagtccacagagagaacaaaatcaaaatgtgaaaagttgaataaaaaacactcctttggaaataaaatattactcagcataagttagctgacctcatctttgggactagaaaaataacagtaaatagtaataatagctcccgcgtacctcggccgctctagaactagtggatcccccgggctgcaggaattcgatatcaagcttatcgataccgtcgacctcgagggggggcccggtacccagcttttgttccctttagtgagggttaattgcgcgcttggcgtaat

SEQ ID NO: 642 - DNA, 494 bp, Homo sapiens
  misc_feature 2, 3, 4: n = A,T,C or G
gnnngggggccgcgtatcactactatagggcgaattggagctccaccgcggtggcggccgaggtacatctctagctgatgattcaaaaaagaaaccttttaatctcactccactgatcagctatgatacttaaatgttttagctgtgagcaaaataatatgcattctcaaagagagtatcttcagactccagtggccgagaatctagagttagcaatggaaaaattagtctcgggcttctgtttctgcccacagttttcaaattaagaacaatgtgtttgcacttaatgaaacaacctctactgctcttcaagaggactcaggataccgattctcgaggcccctgggcggtcccctgtaagtacctgcccgggcggccgctctagaactagtggatcccccgggctgcaggaattcgatatcaagcttatcgataccgtcgacctcgagggggggcccggtacccagcttttgttccctttagtgagggttaat

SEQ ID NO: 643 - DNA, 508 bp, Homo sapiens
  misc_feature 2, 3, 4, 69, 89, 95, 101, 106, 110, 111, 113, 114, 115, 117,119, 126, 169: n = A,T,C or G
gnnngttcgccgtatcactactatagggcgaattggagctccaccgcggtggcggccgaggtacatctntagctgatgattcaaaaaanaaaccntttaantttanttcnntnnncnanttttaancctaaaatggtttaacctgtgaaccaaaataatatgcattctnaaagaagagtatcttcagactccagtgggcccgagaatctagagttaagcaatgggaaaaattaagtctcgggcttctgtttctgcccacagttttcaaattaagaacaatgtgtttgcacttaatgaaacaacctctactgctcttcaagaggactcaggataccgattctcgaggcccctgggcggtcccctgtaagtacctgcccggggcggccgctctagaactagtgggatcccccgggctgcaggaattcgatatcaagcttatcgataccgtcgacctcgagggggggcccggtacccagcttttgttccctttagtgagggttaattgcgc

SEQ ID NO: 644 - DNA, 496 bp, Homo sapiens
  misc_feature 2, 3, 4, 5, 20: n = A,T,C or G
gnnnnttcggccatttactnctatagggcgaattggagctccccgcggtggcggccgaggtacagcagataacttatccaaggacaaatagaaaggggactgtgtctagagggtaatgctaatgcctggcatgctataaaaataaatgaaatctgattaacactattggagggaagaataagtcatcgtttctatggaatattattttcctgattggaaccatttccattttcgtcagcttaaaacattgcattaaagatgagatgactttaaaacggtgacagctatctcaagccctgtgattataaatggtgttataggcttgtaatcctatgggtttagactaaagtattttcttcataaattgaaagagaaacacactaggaattcagaagattttaattaagttgttcaaaaaatttaatgggaattttaaaggctggctcactaagtagttttgataatgaatttaatttatagaagaaagttcttggca

SEQ ID NO: 645 - DNA, 497 bp, Homo sapiens
  misc_feature 2, 15: n = A,T,C or G
gnagtgctatcactncttagggcgaattggagctccccgcggtggcggccgcccgggcaggtaccaaaagaatgttcatagcagcattatttgtcatagtcaagagctggaagcaacccagttgtgcatcaatggtagaatggatgactaaattgtagtgtattcttacaataaaatactatagagcaatgaaaataaataaactatggctatattccaccaacatggataaatcttaccaacaatgttagacaaatgtagccaaaccaaaaaatacacatgttctatgaatccatatatgcaaggttcacaataggtgatagtagctactcttttgggaaggagtgaggaaaggactgagagagtattgcagagggggctccgggtgtttgtaatttctatttcccagtgcaggtgtggtttgcatgagcatgttcactttgtggaaattcattgagctgtaactaaatatacagaattatttatgaatgaaatga

SEQ ID NO: 646 - DNA, 478 bp, Homo sapiens
  misc_feature 62, 347, 464: n = A,T,C or G
actactatagggcgaattggagctccaccgcggtggcggccgcccgggcagggtactctgcnttgtaccactgctttcccggactctgcgttgttaccactgcttcccgggactctgcgttgttaccactgcttcccgggactctgcgttgttaccactgcttcccgcgtcctcggccgctctagaactagtggatcccccgggctgcaggaattcgatatcaagcttatcgataccgtcgacctcgagggggggcccggtacccagcttttgttccctttagtgagggttaattgcgcgcttggcgtaatcatggtcatagctgtttcctgtgtgaaattgttatnccgctcacaattccacacaacatacgagccgggagcataaagtgtaaagcctggggtgcctaatgagtgagctaactcacattaattgcgttgcgctcactgcccgctttccagtcnggaaacctgtcgtg

SEQ ID NO: 647 - DNA, 500 bp, Homo sapiens
  misc_feature 2, 9, 11: n = A,T,C or G
gnagatttngncgtatacgactactatagggcgaattggagctccaccgcggtggcggccgccaatctgttctgctcaccagcgagttgttcgagttcatcgaagacggacacggcggccacctgctgagagtggggacctctaaatttccggtcggcacgctgcggttcaccgcccatcggccgctctagaactagtggatcccccgggctgcaggaattccaatattcaagcttatcgataccgtcgacctcgagggggggcccggtacccagcttttgttccctttagtgagggttaattgcgcgcttggcgtaatcatggtcatagctgtttcctgtgtgaaattgttatccgctcacaattccacacaacatacgagccgggagcataaagtgtaaagcctggggtgcctaatgagtgagctaactcacattaattgcgttgcgctcactgcccgctttccagtcgggaaacctgtcgtgccagctgcattaatg

SEQ ID NO: 648 - DNA, 485 bp, Homo sapiens
  misc_feature 12: n = A,T,C or G
cgcctatcactnctatagggcgaattggagctccccgcggtggcggccgaggtactcaccactgttccccagcctgccagataaaaataaactgtccactccaggaggggagaggcacaagctgctctgatagaaaccgttcctgagcattatcttgactgtttgcagaggagacatgtgttcccagccagcacagagctgcaggattgccttttgcgatttgtgagaattatgtcatagtgaaatatagttgagaatgctgggcagtacctgcccgggcggccgctctagaactagtggatcccccgggctgcaggaattcgatatcaagcttatcgataccgtcgacctcgagggggggcccggtacccagcttttgttccctttagtgagggttaattgcgcgcttggcgtaatcatggtcatagctgtttcctgtgtgaaattgttatccgctcacaattccacacaacatacgagccggg

SEQ ID NO: 649 - DNA, 479 bp, Homo sapiens
actacttagggcgaattggagctccccgcggtggcggccgaggtactgttcgctgcttttcttgagttcatttgtctttccaatgatcgtatatgattgaatagtagagaaggcacctgcaagtagaagccaatggcaaaagattgataagcatctttcctggactctggtgcttcgggggtgccaataactgcactctgagtaatcctgggtcactttcatcaattgagagagtttaagtcaggggacttatgatttctttctcaacaagaccaggtgaacgtgtttttgcagttctaagtattatttgcaaattaaatagccatatatctctaaagcttcctgagcaacaaccagaggtacctgcccgggcggccgctctagaactagtggatcccccgggctgcaggaattcgatatcaagcttatcgataccgtcgacctcgagggggggcccggtacccagcttttgttccctt

SEQ ID NO: 650 - DNA, 488 bp, Homo sapiens
  misc_feature 2, 6, 11: n = A,T,C or G
gnagtngcccnatcgctccttagggcgaattggagctccccgcggtggcggccgaggtacagttatggctgagtgtttcaattaaaaaatacattgcatgacaattttctgtttcacaaagagaaacagcatttttgaaaaattgaattctcctgtgtaacctggtagagttttctattcctgaatatacatcctttcatagatattactagcaggctaaacatctggcatttaaatgtcattactataaataaaccacaaaattggctgcctgatttgaagggtcaatcttatggagtaactgaagaagaatcatttttaaaggagatgagcagttttggatttatgataccaataatttctctctttaaggaactccaactcacttaatttaatgttaagaataaaatcagactaattagttctcaggacaggtcaatggcacaccattttccttttcactttggcagaaacctaggagtcacttt

SEQ ID NO: 651 - DNA, 551 bp, Homo sapiens
  misc_feature 2, 5, 386, 397, 413, 467, 551: n = A,T,C or G
gnagngctatcactacttagggcgaattggagctccccgcggtggcggccgcccgggcaggtacgcgggtgagattctgctgggtgaagcctaagggcatagatgaaaagttaggatttggaagggagccagaagccaaaagcagttcccagaggccaggcaaaaacagaagctgagtgtgggactgaagccaaaaagcggaagatgatgaattccacagcgaaccgtgggagccgtcctggaacaatgcctgagatgcgcgctggctttctgggagcagttagggcccctttaggtatgtgaacccgcctcactaaatggccatgagcagaactgaactgcctacctgtttctccacctgtgcaagaccaagttttcttaagaancccagacgaangcttcctttgaaaatnataccgttgccatttggcttggcccctttggccttaaagccttaacaggtttanggacttttgggcccctgggttaaatttggaaagtttcaatgaaaaataaattggaagaacccttttttaattaaaaaagaacan

SEQ ID NO: 652 - DNA, 499 bp, Homo sapiens
  misc_feature 2, 6, 7, 8, 32, 33, 96: n = A,T,C or G
gnagtnnncccttatacgactcctatagggcnnattggagctccccgcggtggcggccgaggtacacttatagttgagagccaagtctcccttatnattggtgaatgagaatgagctactgaaaacaaaaagagggtcttctactcagcctctacccctaatatttatatcagaagcagagattaactgtccttactcattcacacgttaatggaagaagaagggaagtttcctagaaaaatcctcccgctccaccctgcaaactttatgcttttctgttacataatcaggcagggacaagacctaaactattttgaattggtggtgttgaggctaaattctctgctattgacagaattgagaatgtgatcaatttcagagtagcatgttacaaattttgtcccaatttcaatggggagaattataacaaatcagtagtggttgggaagaatctgttcttactttcctcccatccagttgactagggatttgggaaagc

SEQ ID NO: 653 - DNA, 493 bp, Homo sapiens
  misc_feature 251, 259, 319, 377, 438, 466: n = A,T,C or G
ctactatagggcgaattggagctccccgcggtggcgccgggagcataaagtgtaaatgcctggggtgcctaatgagtgagctaactcacattaattgcgttgcgctcactgcccgctttccagtcgggaaacctgtcgtgccagctgcattaatgaatcggccaacgcgcggggagaggcggtttgcgtatttgggccgctttttccgctttctcgcttaactgacttcgctggcggcttcgggtcgttcnggcttgcnggcgagcgggtatcagcttcactcaaaagggcgggtaataccggttatccacagaatcanggggataacgcaggaaagaacatgtgagcaaaaggccagcaaaaggccaggaaccgtnaaaaggccgcgttgctggcgtttttccataggctccgcccccctgacgagcatcacaaaantcgacgctcaagtcagaaggtggcgaancccgacaggacttattaaagaatacca

SEQ ID NO: 654 - DNA, 456 bp, Homo sapiens
  misc_feature 1, 4, 16, 456: n = A,T,C or G
nggngccctatcactncttagggcgaattggagctccccgcggtggcggccgaggtacaaggatgaaatgagtgattctgtccttaacaaactcctagtctcgtggggtggacagctgggaactcatttagagagattacaaggatgaatacccttgggctcgatagaggtagaagcaaagtgcttagtgttagagagcgtttcttgaggagggaaaatcagaatcagtctgggttttaggaagataattctggaggttgagtgaaagatgaatggagaggtgatagactagcttgggcattatggagatggaaggagaacggaaggggcagataggacaactaattggaggccggagtgagaggaaggggccatagatgacttcatgatttctgtcctggttgcaataaagggatcatgatcgtaaagatcattcccatttgacaaagggaagan

SEQ ID NO: 655 - DNA, 488 bp, Homo sapiens
  misc_feature 1, 5, 477, 483: n = A,T,C or G
naggntccctatcgactacttagggcgaattggagctcaccgcggtggcggccggggcggtatcgagagtgtgcagcgtcagacgggacatggggtaccttgctaagttggtaagtcacccggccattatatcggccatatcgcgcacgcaacagacgtcagcgtcgtccttttgtgctcgttcgtctgtgattgtgcgatccttgattccggcaggctcttagctggccagctggcgcaatttctggtcgcgccggtaggcccctggttgctcgcccgtgacccgcttgaaggcgcgtgtaaaggccggcgtgcgagcggtaacccaccagttcggccgctctagaactagtggatcccccgggctgcaggaattcgatatcaagcttatcgataccgtcgacctcgagggggggcccggtacccagcttttgttccctttagtgagggttaattgcgcgcttggcgtaatcatgntcatanctgtt

SEQ ID NO: 656 - DNA, 554 bp, Homo sapiens
  misc_feature 2, 5, 8, 9, 10, 224, 246, 249, 257, 258, 261, 262, 283, 291,317, 330, 340, 348, 362, 363, 373, 376, 384, 394, 397, 399,407, 409, 415, 416, 417, 423, 426, 427, 456, 459, 467, 471,474, 478, 488, 492, 495, 498, 503, 507, 508, 512: n = A,T,C or G
  misc_feature 515, 535, 543, 547, 550, 551, 553: n = A,T,C or G
gnagngcnnnccgtatacgactactatagggcgaattggagctccccgcggtggcggccgggggccattgagactgccatggaagacttgaaaggtcacgtagctgagacttctggagagaccattcaaggcttctggctcttgacaaagatagaccactggaacaattgagaaggagagaattctactggtcacagacaagactttttttgatctgcaaaatnccaacttcatcaatgcctgagnttngtgtgcannttnnaagcgggattcctcttgaccnctgtcttntcggcatttgcctggggcaaagtttnaccttccctgggntgtccttggncaagaaancaagggagaaaggnnttaggatctnacnggggggantccggaggancantntttttttntnttcccnnntggaanccnnttggtcccacttgaaattttcttttatgnctncatttttnactnganccanttcctttttnaaanttnccnccccntttnnaganaanttccctttggaaaatttttnggccaaanttgntanntng

SEQ ID NO: 657 - DNA, 532 bp, Homo sapiens
  misc_feature 2, 3, 7, 8, 11, 12, 14, 15, 16, 20, 27, 41, 88, 426: n = A,T,C or G
gnnagtnnttnnannncgtngaatacnactactataggttnaattggagctccccgcggtggcggccgcccgggcaggtacccgggcntgtgaggtgtcagtctgcccctacttgggggtgcctcccagttaggctactcgagggtctgggacccacttgaggaggcagtttgtccgttctcagatctccagctgcgtgctgggtgctgggagaaccactactctccccgcgtacctcggccgctctagaactagtggatcccccgggctgcaggaattcgatatcaagcttatcgatacccgtcgaaccctcgaaggggggggccccgggtacccaacttttttgttcccttttaagtggaggggttaattggcgccgctttgggcgtaaatcatgggtcaataagccttgttttccttgtgtgnaaaatttgtttattcccgcttcaacaaatttcccacaacaaaaccattaacgaagccccggggaagcattaaaaagttggtaaaaagccctgggggggtgccctaa

SEQ ID NO: 658 - DNA, 463 bp, Homo sapiens
  misc_feature 2, 3, 7, 14, 25: n = A,T,C or G
gnnagtnttccgcntatcactactntagggcgaattggagctccttcgcggtggccagaggggtctgtcacatagatgcctttcacagctggaagtggcagagcagttgggtgaccctacccaaaggaaagatagatgtgttcctggccagtgcaggggtgagatgtgagcacagctgcatggccatgctgctgtcttgggtctttgtcggaggggattcagaagtttagacagaggtcattgcccagatcagttccagtgctacatgatgctggtggtcatgacttgcaagggtggttcctgggccatcagtgagaataacacagggagttccctctctaggtctcagtgagagaacagtctctgaggccctggcttctgagccggatattcctgatgggtacctcggccgctctagaactagtggatcccccgggctgcaggaattcgatatcaagcttat

SEQ ID NO: 659 - DNA, 937 bp, Homo sapiens
  misc_feature 1, 6, 590, 690, 709, 710, 739, 780, 782, 800, 819, 820, 822,833, 845, 851, 879, 888, 890, 900, 901, 902, 909, 911, 919,931: n = A,T,C or G
ncgcgncgtaatacgactcactatagggcgaattggagctccccgcggtggcggcccgcccgggcaggtacgagtaaactacttgaaggcaattcctgtgcttaaaatggccacgtgaaaggtgtccctgacatggaaaggacaaaccatgaaatgacccttgaagctcttaaggtgtctgtcaaaaaaacaaagccaactgtcaaactgaaaagccaaaatcatcacaaaaacacctattcttcagaggcctcaaatctcaaactatctcccaccatcctttgtaagtatgtataaggaggccaggaaactagcatttgctgagactttattctcagctttgtatgctttgcataaatgatgtcatagaacacattgacagtgagaaaactaacgtattaacattttaattaccttgccctatcacaagattagaaagattcaagatatgagacatccaaagtctgtgatctgaacaccagagtcagaggctggcaacctatggcccacgggctgaatctggcccactgcctgttcctataaaataaagttttattggaacacatcccgtccatttatatattatctgnggctgctttcctgctgtaacaggagagttgagaagttgcaacagagaccataaagccccaaagcttaaaatattgctattcagccctttaaaagaaaaanggcatgcccaggcttctgnnggtccttgggccgttttaaactagtggtncccggctgcaggaatttgatatcaaccttttcgatcccgcnanctcgagggggggccgganccacttttggttcctttannanggttaattgcnccctggcgtaanagggcnaagctggttcctgtgtgaaatggtttcngtccaattncnacaacaatcnnncccgggncnttaaagtnaaagcctggggngcctaa

SEQ ID NO: 660 - DNA, 501 bp, Homo sapiens
  misc_feature 2, 3, 4, 5, 17: n = A,T,C or G
gnnnnagtggccgcgtnacgactactatagggcgaattggagctccccgcggtggcggccgaggtactaggattgcaggcatgagccaccatgcccagactaattcctgttttcaattttaggtagtcatttgattattgagttgtagaaatcttacttttggattaatatattaaaaactatcaccagttagccatgtgttaactgcttagtttttcaaccaaacttcaatcatcagccagccctcactttcagcccagatcgacggactcaacgcttggtgatcggttaactccttgttttttagctaatgctttaattagcaattaccatctttgtcttcagctaaacatcatacttctcaatgctttggttatcagctaatgtcttctttttcagctaacaccttagtggacattaatacccttgttaacgtatgttacttcaaccagattagacctggctgcattgggaaaggaaagtgggggggcttgacaagga

SEQ ID NO: 661 - DNA, 481 bp, Homo sapiens
  misc_feature 4: n = A,T,C or G
actnctatagggcgaattggagctccaccgcggtggcggccgaggtacttacagtttgactttgagtcagctcagcattctaaatcaaacgcaaacagcagaatcatatggcatagacacttagcaaatagtttgactttgagtcagctcagcattctaaatcaaacgcaaacagcagaatcatatggcatagacacttagcaaataggcaagcgtctctgcatcccagagcaaatcctctgagatcctcagtctctcctgctgaaacttcatcttccactcctgcctttgggtcatttccaaacggcagggcaccagacacgctctaccttatgtggagccatactgttcatttattagttttctggcttcgtggagaattatctgccttctctgagtattgatttcattgtgcccccgcgtacctgcccgggcggccgctctagaactagtggatcccccgggctgcaggaattcgatt

SEQ ID NO: 662 - DNA, 476 bp, Homo sapiens
  misc_feature 50: n = A,T,C or G
actactatagggcgaattggagctccaccgcggtggcggccgaggtacangcttgaacaaatccaccttctgtggaccaagcaccaccctgggcatttctagcatgagcaaaatccaaggtcctggctggactccagagatgctatttacctcagaagcatgacaataggaggcagaaggagcaggcaaatccaagtcctttcttgtagtttccttgtttggggaggaaaagttgagttttactattatggaaaagaaacaggaaatagagacagacaaagagatatgacaatacagtcctgccacccagatactcatttccacccaccattccatgcatttgttttgaatatataagtatgtacctgccgggcggccgctctagaactagtggatcccccgggctgcaggaattcgatatcaagcttatcgataccgtcgacctcgagggggggcccggtacccagcttttgttc

SEQ ID NO: 663 - DNA, 474 bp, Homo sapiens
actactatagggcgaattggagctccaccgcggtggcggccgcccgggcaggtacgtgctaagttgaaaaaggagcctcagatttctctgacctacctcttaccctgtgctgtctctccccaggattttctgaagttccttgtctgcctgaagtccagacctgcctcctccacatctgtggcttggtgcggagagcatctctgggcactggaggaacggtacctcggccgctctagaactagtggatcccccgggctgcaggaattcgatatcaagcttatcgataccgtcgacctcgagggggggcccggtacccagcttttgttccctttagtgagggttaattgcgcgcttggcgtaatcatggtcatagctgtttcctgtgtgaaattgttatccgctcacaattccacacaacatacgagccgggagcataaagtgtaaagcctggggtgcctaatgagtgagctaact

SEQ ID NO: 664 - DNA, 474 bp, Homo sapiens
tatcactactatagggcgaattggagctccccgcggtggcggccgaggtacatgtgaatgggaaacattcataagttcctatttgccaagggcatgtaaatgtgataaagcggatccgaagacacatgggagtgagactaggaaagtattaagaacatgggccttgaccgggcgcagtggcttacgcctgtaatcctaccactttgggaggccgaggctggtggatcacaaggtcaagagttcgagactagcctagctaagatggtaaaaccccgtttctaaaaattagctgggcacagtggcgggcacctgtaatcccagctacttgggaggctggggtcacttgaaccctggaggcggaggttgcagtaagctgagatcacgccactgcactctagcctaggtgacagagcaagactctgtcaaaaaaaaaataataataaaaaagaatgtgggccttttgactaggagcta

SEQ ID NO: 665 - DNA, 452 bp, Homo sapiens
  misc_feature 12, 199, 212, 219, 222, 227, 421, 450: n = A,T,C or G
gatgcgatcacncttagggcgaattggagctccccgcggtggcggccgaggtaccgcggtttttaaatctgtcactgttcttcccccacttcaaagctgacttgacaactgcatttatttcacattgcaattgctgcaggttaataatattgttttatcaggaaacatttatcttgaggaagaaagttatcctaatacngcaagattacctnatcccanggncaaantagaaaggggactgtgtctagagggtaatgctaatgcctggcatgctataaaaataaatgaaatctgattaacactattggagggaagaataagtcatcgtttctatgaaatattatgtttcctgattggaaccattttccattttccgtcagcttaaaaacattgcatttaaaggattgagatgactttaaanaccggtggacagctattctcaagccctgntg

SEQ ID NO: 666 - DNA, 488 bp, Homo sapiens
  misc_feature 3, 192, 209, 210, 211, 214, 217, 226, 234, 246, 258, 370,414, 440, 451, 452, 453, 464, 477: n = A,T,C or G
gtnacgatcactcttagggcgaattggagctccccgcggtggcggtgcctaatgagtgagctaactcacattaattgcgttgcgctcactgcccgctttccagtcgggaaacctgtcgtgccagctgcattaatgaatcggccaacgcgcggggagaggcggtttgcgtattgggcgctcttccgcttcctngctcactgacttgcttnnnccntcngtccttttnggtttgcngccgaggcggtnttcaagctcacntcaaagggccgggttaataccggtttattccacaagaaatcagggggataaccgcaggaaagaacattgttgagcaaaaggccagcaaaaggccaggaaccgtaaaaaggcncgcgttgcttggcgttttttccatagggccttccgcccccctgncgagcatcacaaaaaaattcgacgcntcaaaggtccnnnaggttgggcgnaaaaccccggacnaggggacttac

SEQ ID NO: 667 - DNA, 462 bp, Homo sapiens
  misc_feature 5, 7, 10, 11, 17, 203, 207, 208, 210, 211, 214, 215, 228,279, 341, 345, 353, 385, 390, 395, 418, 419, 435, 446, 448,454, 455: n = A,T,C or G
gttgngnccnntcactnctatagggcgaattggagctccccgcggtggcggccgaggtacaacttgacagtttataaaaatgctaacctatatcaacatttttccccaccaaagtgttcccaagggcaaaggtaagtgaatacatgtttccatgcttgtgtcaggggcacacagcaagggaaggcagaatgggcatgacctanattnnannccnnaaagccttcaaanttcctttattaagaacttggggactgcatctttaaaataatatgggttttnttttattctttgataataaaaagaatggaaccaaatcctgggttgtctgattctttgcccantgcntctttctnatgtctaacactgcctcgtcttatgaataacntctgnacatntacagaggaaaggacttatttgnnttgtttccagtttcancaactcaattncnttaggnngctatgc

SEQ ID NO: 668 - DNA, 452 bp, Homo sapiens
  misc_feature 3, 205, 207, 218: n = A,T,C or G
gtncgttcactacttagggcgaattggagctccccgcggtggccggccgcccgggcaggtacacttatagttgagagccaagtctcccttatcattggtgaatgagaatgagctactgaaaacaaaaagagggtcttctactcagcctctacccctaatatttatatcagaagcagagattaactgtccttactcattcacaccntnattggaaaaanaagggaaggtttcctagaaaaaatcctcccgctccaccctgcaaactttatgcttttctgttacataatcaggcaggggcaagacctaaactattttgaattggtggtgttgaggctaaattctctgctattgacagaattgagaatggtgatcaatttccagagtagccatgttacaaattttgtccccaattttcaatggggggagggaattattaacaaaatcaggtgggg

SEQ ID NO: 669 - DNA, 462 bp, Homo sapiens
  misc_feature 1, 398, 407, 408, 409, 410, 413, 414, 415, 416, 417, 418,419, 420, 421, 422, 423, 424, 425, 426, 427, 428, 429, 430,431, 432, 433, 436, 437, 438, 439, 440, 442, 443, 444, 446,448, 449, 450, 451, 452, 453, 454, 455, 456, 457, 458: n = A,T,C or G
  misc_feature 459, 460, 461: n = A,T,C or G
nggcccgtatcgactactatagggcgaattggagctccccgcggtggcggccgaggtacttacagtttgactttgagtcagctcagcattctaaatcaaacgcaaacagcagaatcatatggcatcgacacttagcaaatccaatgccttccaggcatctgtttcctgttgatgaaatcctccctatggagagcaaactggttcatatcttcagatagtgtcattcaaccccttggcagctttctgggctactaaatatcacaccgtctggtgggacatttcacccaagttgttcatttattagttttctggcttcgtggagaattatctgccttctctgagtattgatttcattgtgcgcatggtgaagatatcgcctgttctacccccgcttacgncccccgggnnnnttnnnnnnnnnnnnnnnnnnnnnggnnnnngnnncntnnnnnnnnnnnnnnt

SEQ ID NO: 670 - DNA, 467 bp, Homo sapiens
  misc_feature 2, 3, 4, 9, 11, 13, 17, 20, 26, 34, 46, 75, 194, 199, 219,229, 339, 373, 394, 420: n = A,T,C or G
gnnnggtcncncnccgnatnttctantgtccggnaactcctttgtngaggcggccgaggtacgcacttgtgtgcntttctgttgggtatataacaagtatgatattgctgggtcttaaaatatttatatattaacttcattaaatgctgcctaagaatttttcaagtggttgcgctattttaccttcaccagcnctagntgttccatatccttgctgtnacttggcatnatctgtattttttattttgaccagactggtctgtgtgtcatagtatcccattgtcattttaagttgcatgcctttgatgaagacattttctgatgcttaattggctcttngaatatattctgtaactgatttgtaggagtcccnttatatattctggatataagnttttttattggacataaatattgcanatatccctctcccactttaacttgccttttctttctcttaatcatga

SEQ ID NO: 671 - DNA, 468 bp, Homo sapiens
  misc_feature 2, 3, 5, 7, 14: n = A,T,C or G
gnnancnatcactncttagggcgaattggagctccccgcggtggcggccgcccgggcaggtacgcgggtattctgaaaaatctatctctagaatgaagtcatgacagttcaccctactctactagttttgtccaagctaattttcatgtatgattttgtaatctgattgaacaatacttgaaaaaaaaaaagttagatatataaatgaatttgttgggggataaaacataaattaagcctatccctataaaatctactctttcctgacttccaggagtggtcctttatttgagaggcaaaacatatacatttcacattaccatttttgagacttgatgaagcccagtcctaaactgtggctgaggctaaggctgaatggttgggatttactgtgagaatggacattctcccgggtcctcacctgaggtcattaaattgatttagtctaggtccactggttgtatttta

SEQ ID NO: 672 - DNA, 466 bp, Homo sapiens
  misc_feature 2, 3: n = A,T,C or G
gnncgtatcactacttagggcgaattggagctccccgcggtggcggccgcccgggcaggtacaagggagacagcatgcagggtgtgttcagaagagcttgctgaggtgctcggctcttagcattaaaaatgtgatgttggtatatcatcctgatagaaaacactgctttccaaatcctagtcactggatgggaggaaagtaagaacagattctttccaaccctactgatttgttataattctccccattgaaattgggacaaaatttgtaacatgctactctgaaattgatcacattctcagttctgtcaatagcagagaatttagcctcaacaccaccaattcaaaatagtttaggtcttgcccctgcctgattatgtaacagaaaagcattaaagtttgcagggtggagcgggaggatttttctaggaaacttccttctcttccattaacgtgtgaatgagtaa

SEQ ID NO: 673 - DNA, 469 bp, Homo sapiens
  misc_feature 2, 3, 8, 214, 223, 238, 248, 269, 270, 314, 332, 451, 464: n = A,T,C or G
gnncgtancactacttagggcgaattggagctcaccgcggtggcggccgggtccggcgcatccatggcgaacaggcagacgaacgcgccttgctgcgcgctgctggcggtggcgccctgcggcgccagcaccgtgaattgtggcgccgtcaccagttgcagcagcggcttggcatcggtgcgcagcacgcggcgcggctggcggcgcgggcccngcgccgcancaatggcgggcctgnagttccaatnggcaagggtgcgcgcgcggcnngctctagaactagtggatcccccgggctgcaggaattcgatatnaagcttatcgataccgtngacctcgagggggggcccggtacccagtttttgttccctttagtgagggttaattgcgcgcttggcgtaatcatggtcatagctgtttcctgtgtgaaattgttatccgctcacaattncacacaacatacnagccg

SEQ ID NO: 674 - DNA, 476 bp, Homo sapiens
  misc_feature 2, 3, 4, 7, 23, 432, 455, 458, 471: n = A,T,C or G
gnnnagngacgccgtatcgactnctatagggcgaattggagctccaccgcggtggcggccgcccgggcaggtacagcaccttgtgtcctgccaccagccggctgtgaaactggtacgcggggtagatggaaggaagaacttgtgtgcttagacctgacgctgggaggagatgctgccacctaggttacttgtaggaccctatacggcaacctcctttgccaggaactatttataaacatcctgcaggaaaatgcagtgaagtagaagagacagggatatcccagaaggttatgcaaaacatcaagagaagatgagaggtcagagatgggaagaaacaagaactttgacatgcttggtgttcttgcccaagctttgaagaagtttacaaagtctatatgtcagaatacacatttcccaccttgcccaacagtngaaaaaaaaaaaaaaaaaaaaanaangtacctcggccgntctag

SEQ ID NO: 675 - DNA, 471 bp, Homo sapiens
  misc_feature 2, 3, 4, 12, 20: n = A,T,C or G
gnnncgtccctnatcgactnctatagggcgaattggagctccccgcggtggcggccgaggtaccgcggtttttaaatctgtcactgttcttcccccacttcaaagctgacttgacaactgcatttatttcacattgcaattgctgcaggttaataatattgttttatcaggaaacatttatcttgaggaagaaagttatcctaatacagcagataacttatccaagggccaaatagaaaggggactgtgtctagagggtaatgctaatgcctggcatgctataaaaataaatgaaatctgattaacactattggagggaagaataagtcatcgtttctatgaaatattattttcctgattggaaccatttccattttcgtcagcttaaaacattgcattaaagatgagatgactttaaaacggtgacagctatctcaagccctgtgattataaatggtgttataggcttgt

SEQ ID NO: 676 - DNA, 500 bp, Homo sapiens
  misc_feature 2, 3, 4, 13, 39: n = A,T,C or G
gnnnatttgaacnctattatagggcgaattggagctccncgcggtggcggccgaggtaccaaaggtcttcaagggtaacgatgctgctccatttaaataaaagatgaaggatgtcgaaacacaagcagcctttaaccagtaggcccataaataagacagtagctagtgctatgcaattctaacactggcacttgtgctgggattggcctcttctaggctaggaattcttaacctggaggtcaaggacttggggggagggtcctatggaccccttgcaatgtaggcaaattttgcataaacatttttctgcacacgtttcaaaggaacttggaatatccgtaagttgagacctccaaattactagagctaattgccccattttattcctttgtatcatctcaaatgccaatataatatctagtgtataataaatgtttgctggctgcttaggagagaactagatgtgttaatgacgccatctcacagtgaaaaggggcagt

SEQ ID NO: 677 - DNA, 500 bp, Homo sapiens
  misc_feature 2, 3, 4, 13, 489: n = A,T,C or G
gnnncgtcccatncttagggcgaattggagctccccgcggtggcggccgcccgggcaggtacttacaggggaccgccaggggcctcgagaatcggtatcctgagtcctcttgaagagcagtagaggttgtttcattaagtgcaaacacattgttcttaatttgaaaactgtgggcagaaacagaagcccgagactaatttttccattgctaactctagatctcggccactggagtctgaagatactctctttgagaatgcatattattttgctcacagctaaaacatttaagtatcatagctgatcagtggagtgagattaaaaggtttcttttttgaatcatcagctagaagatgtacctcggcccgctctagaactagtgggatcccccgggctgcaggaattcgatatcaagcttatcgataccgtcgacctcgagggggggccccggtacccagcttttgttcctttagtgaggggttaattgcncgcttggccgt

SEQ ID NO: 678 - DNA, 510 bp, Homo sapiens
  misc_feature 2, 3, 23, 47, 84, 136, 510: n = A,T,C or G
gnngcgtaacctcttttggaatncggcgaattgttttccccgcggtngcggccgaggtacacttatagttgagagccaagtctnccttatcattggttaatgagaatgagctactgaaaacaaaaagagggtcttntactcagcctctacccctaatatttatatcagaagcagagattaactgtccttactcattcacacgttaatggaagagaaggaagtttcctagaaaaatcctcccgctccacccgctctagaactagtggatcccccgggctgcaggaattcgatatcaagcttatccgataccgtcgacctcgagggggggcccggtacccagcttttgttccctttagtgagggttaattgcgcgcttggccgtaatcatggtcatagctgtttcctgtgtgaaattgttatccgctcacaattccacacaacatacgagccgggagcataaagtgtaaaagcctggggtgcctaatgaagtgagctaactcacattaattn

SEQ ID NO: 679 - DNA, 495 bp, Homo sapiens
  misc_feature 2, 3, 4, 10, 456: n = A,T,C or G
gnnntggccngtatcactactatagggcgaattggagctccccgcggtggcggccgcccgggcaggtaccattgactacttcatactgctacaaaatgcatttgaaatttttttttctggccaaggaacctattcatccactctctccaaattaaatacttactagagaaatgttggcacttattaaccttgtaatatgaattagaaacaaacttgaccttcatatattcttttacacttatgaatctatttaactgcatgatttatctgcatgattcagaattttcttgataccatgtaactgaagtaagatttagaaatatattttcttgataccctgtaactgaagtaagatttaaaaagctgaggtgacagttgtcacccataatgctgataaatataggaatgagtcgattataaatttaaaccttttgggggcattatgctaccaaaatntctcttttttaaaaaaatttgtgggtgctgcatagagct

SEQ ID NO: 680 - DNA, 495 bp, Homo sapiens
  misc_feature 2, 3, 221, 394, 397, 418: n = A,T,C or G
gnnatggcccgtatcactactatagggcgaattggagctccccgcggtggcggccgcccgggcaggtacttatttctttgcaagatagttttgtaaagcgtccataagcagagactgtgtcaaggcgtcctacgcaaattacaggaccttgcacagacagttgcatagagctgcataggggaaaggcgggcaaaaggtctgacctaagtcttcaaacacangccttcatacaccgtgccacctcggccgctctagaactagtggatcccccgggctgcaggaattcgatatcaagcttatcgataccgtcgacctcgagggggggcccggtacccagcttttgttccctttagtgagggttaattgcgcgcttggcgtaatcatggtcatagcntgnttcctgtgtgaaattgttatncgctcacaattccacacaacatacgagccgggagcataaagtgtaaagcctggggtgcctaatgaagtgagctaact

SEQ ID NO: 681 - DNA, 511 bp, Homo sapiens
  misc_feature 2, 3, 5, 7, 8, 13, 20, 69, 103, 170, 188, 212, 216, 277,313, 387, 454, 475: n = A,T,C or G
gnngntnnagctntttaggncgacttggagctcctcgcggtggcggccgcccgggcaggtacagattgngtccactggaaaggtaaatgattgcttttttatnttgcatcaaacttggaacatcaaggcatccaaaacactaagaattctatcatcacaaaaataattcntctttctaggttatgaanagataattatttgtctggtaagcntttntataaacccactcattttatatttagaaaaatcctaaatgtgtgggtgactgctttgtagngaactttcatatactataaaactagttgtgagatanccattctggtagctcacttaataaaaacaatttcagaattaaaggaaattttctatgcaaggtttacttctcanatgaacagtaggactttgtacttttatttccactaagtgaaaaaagaactgtgtttttaaactgtangagaatttaataaatcagcangggtattttagctaatagaataaaagtgcaacagaa

SEQ ID NO: 682 - DNA, 520 bp, Homo sapiens
  misc_feature 2, 6, 12, 17, 36, 38, 55, 60, 62, 69, 90, 96, 100, 106, 113,120, 121, 122, 198, 200, 323, 344, 346, 348, 353, 355, 361,376, 398, 411, 415, 419, 425, 429, 433, 434, 465, 468, 471,482, 485, 496, 501, 502, 504, 507, 508, 510, 511: n = A,T,C or G
gnagcntcattngattncggaaaacctttagggttntncccaaagtcccggccgnccggntngggactngggggttgaacacttcgaaantttcancttncgcacnacgaaancaacacnnngagaaggcagataattctccacgaagccagaaaactaataaatgaacaacttgggtgaaatgtcccaccagacggngngatatttagtagcccagaaagctgccaaggggttgaaagacacctatctgaagatatgaaccagttttgctctccataggggaggatttcatcaacaggaaacaagatgccctggaaggcatnggatttgctaagagcctatgncngnggacncngcccgnacgcgtgggacctanaatgcgggagctgactcaaagncaaactgaaaagnaccncggncccggnctanaacnnagtggaatcccccccgggctgcaaggaaatntcnaanaatcaaagccntanccgagaacccnggacnnanccnncnnagggggggg

SEQ ID NO: 683 - DNA, 499 bp, Homo sapiens
  misc_feature 2, 3, 6, 7, 8, 9: n = A,T,C or G
gnncgnnnnatcttagggagtcaccgactactatagggcgaattggagctccaccgcggtggcggccgaggtacgcgggagtaaatacagtacaaattgttctactgttttaaaaagttttccgcagaacagtgcatttatggcaatgctatgtttaatgagttagggacatcaaatatatagtagttccttattttcagttgtgaaaatgaaatggctaaagcagaagagacgtctattttagtcttttaaaaatgtgtgtgggtggtcttttttcctcagaagcccaaagcacatgtatattttgttatttctccttgctatattcctgagactatactaaaaactttaagaaaaggaacaagaaaaaggtaaattcatgtgttccccactgctgtgtctagaaccaagatcacattatatcattgttaaaattgtgttatctagaaaaggtgcaatataggggaaaacactctaagaatcttttaaaagcctagtg

SEQ ID NO: 684 - DNA, 526 bp, Homo sapiens
  misc_feature 2, 3, 4, 8, 9, 47, 289, 340, 352, 360, 361, 367, 390, 398,405, 407, 408, 417, 425, 428, 430, 442, 452, 454, 455, 462,463, 464, 465, 466, 468, 473, 508, 516, 525, 526: n = A,T,C or G
gnnngagnngacgctttaactctatttctactatagggcgaattgtngctccaccgcggtggcggccgaggtacgcgggggactccttgagaagaaacggcggagacctgagaccgggaggctgaggctgtaggtgggctccgctgggtaaaagttgccgcagcagctgtcccttggccccatcgcgatttatttttcccccttgctttccgggtcccgggatcccaagtttgtaactaacgggaagcgaaatcccacccgaagcaaaatgtttgcgaagtttcaggcncccttaattgaaaggctgtaattaacaagtccgttgtttgccagccaggcnccgttgcaggcnctttctgnngattgncatttatttctcacaagcaaccntagggggnttgttantnnttgaaaatntggaaaanacntnttaaaaatttgngggaaaaccncnntttttgnnnnnanccccntttttttttttcggggggggaaaaaaaaaaaaaanggggggtnttttttccnn

SEQ ID NO: 685 - DNA, 504 bp, Homo sapiens
  misc_feature 2, 4, 6, 238: n = A,T,C or G
gngngnccctatcactactatagggcgaattggagctccccgcggtggcggccgaggtacaacttgacagtttataaaaatgctaacctatatcaacatttttccccaccaaagtgttcccaagggcaaaagtaagtgaatacatgtttccatgcttgtgtcaggggcacacagcaagggaaggcagaatgggcatgacttagattagattccagaagccctcaaatttccttataanacttggggactgcatcttaaaataatattgtttttttttattctttgataataaaagaatggaaccaaatcctggttgtctgattctttgcccagtgctctttcttatgtctaacactgcctcgtcttatgaataactctgacattacagagaaagactattgtttgttcagttcaacactcaattccataggtgctagcaattatgaaaaaggctgttagtatccagcggggaaagcaaaggatccgcaggtggtaacaccctac

SEQ ID NO: 686 - DNA, 486 bp, Homo sapiens
  misc_feature 2, 3, 7: n = A,T,C or G
gnncggnttcgcgacgcgctaatacgactactatagggcgaattggagctccccgcggtggcggccgaggtacatgccaggcacaagctggagtcacagatgccacactgactatcacattgtcatcatactcagagagagaaaggtgtatacacccagtattttcttatgttttctctatacttccatatccccacccccattatcccccgagacattcccagttggaagtcagttgcttatgggaaactggctgcagggggatcagtccacctgtaacacacggaaaggcagagaaacaatgagtcatggatttgagtgcaaacaagcccagtcctgctacagagagttacggaaaaaatctcactgttgaagagagacatctataagagaggtgaggaaaatgactgatagatccttttacaatattctagggtagtctgtctgtgggagggggcaggagtctatgggaactctctgtacctg

SEQ ID NO: 687 - DNA, 487 bp, Homo sapiens
  misc_feature 2, 3, 4, 5, 7, 8, 9, 13, 14, 31: n = A,T,C or G
gnnnngnnntttnnggcgcgctatacgactnctatagggcgaattggagctccaccgcggtggcggccgaggtacaacttgacagtttataaaaatgctaacctatatcaacatttttccccaccaaagtgttcccaagggcaaaggtaagtgaatacatgtttccatgcttgtgtcaggggcacacagcaagggaaggcagaatgggcatgacctagattagatcccagaagccttcaaattccttataagacttgggactgcatcttaaaataatattgtttttttttattctttgataataaaagaatggaaccaaatcctggttgtctgattctttgcccagtgctctttcttatgtctaacactgcctcgtcttatgaataactctgacattacagagaaagactattgtttgttcagttcaacactcaattccataggtgctagcaattatgaaaaaggctgttagtatccagcgggggaa

SEQ ID NO: 688 - DNA, 495 bp, Homo sapiens
  misc_feature 2, 3, 7, 8, 47, 463, 489, 491: n = A,T,C or G
gnngcgnngacgccgtaatacactactatagggcgaattggagctcnccgcggtggcggccgaggtactctgcgttgttaccactgcctcccgggactctgcgttgttaccactgcttcccgggactctgcgttgttaccactgcttcccgggactctgcgttgttaccactgcttcccgggactctgcgttgttaccactgcttcccgggactctgcgttgttaccactgcttcccgggactctgcgttgttaccactgcttcccgggactctgcgttgttaccactgcttcccgggactctgcgttgttaccactgcttcccgggactctgcgttgtacctgcccgggcggccgctctagaactagtggatccccccgggctgcaggaaattcgaatatcaaagctttatcgataccgtcgaccttcgaaggggggggccccggtaccccagcttttgttncccttttagtgaagggttaaattgcncncttg

SEQ ID NO: 689 - DNA, 626 bp, Homo sapiens
  misc_feature 61, 117, 144, 146, 173, 175, 202, 204, 211, 231, 233, 260,262, 277, 289, 291, 294, 298, 306, 307, 315, 317, 318, 319,320, 321, 322, 323, 327, 328, 329, 330, 331, 332, 333, 334,335, 336, 337, 338, 339, 340, 341, 342, 343, 344, 346: n = A,T,C or G
  misc_feature 347, 348, 349, 350, 351, 352, 353, 354, 355, 356, 357, 358,359, 360, 361, 362, 363, 364, 365, 366, 367, 368, 369, 370,371, 372, 373, 374, 375, 376, 377, 378, 379, 380, 381, 382,383, 384, 385, 386, 387, 388, 389, 390, 391, 392, 393: n = A,T,C or G
  misc_feature 394, 395, 396, 397, 398, 399, 400, 401, 402, 403, 404, 405,406, 407, 408, 409, 410, 411, 412, 413, 414, 415, 416, 417,418, 419, 420, 421, 422, 423, 424, 425, 426, 427, 428, 429,430, 431, 432, 433, 434, 435, 436, 437, 438, 439, 440: n = A,T,C or G
  misc_feature 441, 442, 443, 444, 445, 446, 447, 448, 449, 450, 451, 452,453, 454, 455, 456, 457, 458, 459, 460, 461, 462, 463, 464,465, 466, 467, 468, 469, 470, 471, 472, 473, 474, 475, 476,477, 478, 479, 480, 481, 482, 483, 484, 485, 486, 487: n = A,T,C or G
  misc_feature 488, 489, 490, 491, 492, 493, 494, 495, 496, 497, 498, 499,500, 501, 502, 503, 504, 505, 506, 507, 508, 509, 510, 511,512, 513, 514, 515, 516, 517, 518, 519, 520, 521, 522, 523,524, 525, 526, 527, 528, 529, 530, 531, 532, 533, 534: n = A,T,C or G
  misc_feature 535, 536, 537, 538, 539, 540, 541, 542, 543, 544, 545, 546,547, 548, 549, 550, 551, 552, 553, 554, 555, 556, 557, 558,559, 560, 561, 562, 563, 564, 565, 566, 567, 568, 569, 570,571-609,611-624,626: n = A,T,C or G
gacatctgcgttgttaccactgcttcccgggaatctgcgttgttaccactgcttcccgggnactctgcgttgttaccactgcttcccgggcactctgcgttgttaccactgcttccngggactctgcgttgttaccactgcttncngggactctgcgttgttaccactgcttncngggactctgcgttgttaccactgcttncngggactntgcgttgttaccactgcttncngggactctgcgttgttaccactgcttncngggactctgcgttgntaccactgcttncnggnactntgcgttgnnaccactgntnnnnnnnactnnnnnnnnnnnnnnnnnntnnnnnnnnnnnnnnnnnnnnnnnnnnnnnnnnnnnnnnnnnnnnnnnnnnnnnnnnnnnnnnnnnnnnnnnnnnnnnnnnnnnnnnnnnnnnnnnnnnnnnnnnnnnnnnnnnnnnnnnnnnnnnnnnnnnnnnnnnnnnnnnnnnnnnnnnnnnnnnnnnnnnnnnnnnnnnnnnnnnnnnnnnnnnnnnnnnnnnnnnnnnnnnnnnnnnnnnnnnnnnnnnnnnnnnnnnnnnnnnnnnnnnnnnnnnnnnnnnnnnnnnngnnnnnnnnnnnnnnan

SEQ ID NO: 690 - DNA, 504 bp, Homo sapiens
  misc_feature 2, 3, 4, 13, 169, 421, 448, 456, 503: n = A,T,C or G
gnnnatgagcacncgactactatagggcgaattggagctcaccgcggtggcggccgaacatttcgacatacgccagcatgtgatggccgaaggtgatcggctgggccacctgcatgtgggtaaagcccggcatgatggtgtcggcatgctgttcggccaggtccgtcancgcgctgcggaacgtcgccagcagggcggtgatgtcgtcgatggcggaacgcacgttacaggcgggatgtccggtgggccacctggtccttgcgcgaacggccggtgtgcaatcgcttgcccgcatcgcctaccagttcggtcaggcgtttttcgatattaaggtggacatcttccaagatccagcagccattctaactggccggcggcgatttcctgcgagatttgcgccatgccgggcacgatttccgcnttagtcggccgctctagaactagttgngatccccngggcctgcaggaattcgatatcaagcttatcgataccgtcgaccttna

SEQ ID NO: 691 - DNA, 801 bp, Homo sapiens
  misc_feature 58, 59, 337, 620, 637, 646, 650, 665, 676, 716, 736, 740,745, 760, 762, 772, 781, 782, 800, 801: n = A,T,C or G
cgtatcgactcactatagggcgaattggagctccccgcggtggcggccgaggtacttnntttttttttttttttttttttgggcaataccagctttcaccctgtcttctgcactgcttagccttggctctgctgagttgtgcaacacattctgagagatgccatacaatgctccaggcaaacttatagaaaaacaggaatgagtgattttatacgggatgtgtttcagctgtccaattcaaaataaatcacgtccaggtgcattctttcctaatttgtgacccaaactgcttgcactttatacattaatgaattatttttttaaaagaaattagctntatcatgaagacagtgctatctaaccctttgtggtctttctcccttaaaaagcaattgttaccattttataggtgttaggtttaatctacatatttgaatgaagctgaaatgaactaacgtatgtcaaccagtaaaagcaggacacttaataataatgcttccatgaaaatatacattgtgcatatgtaggctctttttggcattaccaaatttgccaagaactttcttctataaattaaattcattatcaaaacttcttagtgagccagcctttaaaaattnccattaaaattttttgnacaactttnattnaaaactttctggaantcctaaggggnttcttttttcaatttatgaaaaaaaaatcctttaggtctnaacccctaaggattccaagncctnttacncccttttataatcanangggcttgganatactttcnnccgttttaaagtattttnn

SEQ ID NO: 692 - DNA, 502 bp, Homo sapiens
  misc_feature 2, 3, 4, 7, 13, 16, 21, 223, 270, 375, 454, 465: n = A,T,C or G
gnnnagnctaacntanggcgnattggagctccccgcggtggcggccgaggtactcagatcttaccactgaggaattttaagttatcattcctgtaaacatttctccagtggctccacggaatttaaaaatgccttccaaattgccttcagttttcacaggccatctcttaccctgtgctgtctctccccaggattttctgaagttccttgtctgcctgaagtncagacctgcctcctccacatctgtggtttggtgcggagagcatcttntgggcactggaggaacggtacctgcccgggcggccgctctagaactagtggatcccccgggctgcaggaattcgatatcaagcttatccgataccgtcgacctcnagggggggcccggtacccagcttttgttccctttagtgagggttaattgcgccgcttggcgtaatcatggtcatagctntttcctgtgtngaaaattgttattcccgcttcacaatttcccacacaa

SEQ ID NO: 693 - DNA, 501 bp, Homo sapiens
  misc_feature 8, 67, 212, 220, 229, 230, 232, 236, 487, 496: n = A,T,C or G
gttgcgancatacttagggcgaattggagctccccgcggtggcggccgcccgggcaggtactcacangatctgtttccagaaaccactacaagtgtcatgaaccttgggttgctctctgattgaattctgggatccaagctgggtaaggagagagatgagtccaggctgctacagaagattattttccataatttcaatatgagcagttttnaaacacanaaggatttnntngtcnatgttagctaggccagccttaacacttcctctacctcatttcttagaaaccaacaagggcctttccagagagggccaaggacggtggcatccagaagggatgaaaacacttgagtacctcggccgctctagaactagttggatcccccgggctgcaggaattcgatatcaagcttatcgataccgtcgacctcgagggggggcccggtacccagcttttgttccctttagtgagggttaattgcgccgctnggcgtaatnatggt

SEQ ID NO: 694 - DNA, 507 bp, Homo sapiens
  misc_feature 3, 10, 11, 205, 217, 233, 272, 471, 495: n = A,T,C or G
gtntcgaccnntacgactcctatagggcgaattggagctccccgcggtggcggccgaggtacaacttgacagtttataaaaatgctaacctatatcaacatttttccccaccaaagtgttcccaagggcaaaggtaagtgaatacatgtttccatgcttgtgtcaggggcacacagcaagggaaggcagaatgggcatgacctanattagatcccanaagcctttcaaattcncttataagacttgggactgcatcttaaaataatattgtnttttttttttattctttgataataaaagaatggaaccaaatcctggttgtctgattctttgcccagtgctctttcttatgtctaacactgcctcgtcttatgaataactctgacattacagagaaagactattgtttgttcagttcaacactcaattccattaggtgctagcaaatttattgaaaaaggctgtttagtntccatgcgggggtaaagcaaaagngatccgcaggtg

SEQ ID NO: 695 - DNA, 493 bp, Homo sapiens
  misc_feature 186, 206, 249, 315, 343, 354, 363, 369, 382, 403, 410, 416,420, 444, 445, 466, 473, 478, 480: n = A,T,C or G
ggcgaattggagctccaccgcggtggcggccgcccgggcaggtactcacagatctgtttccagaaaccactacaagtgtcatgaaccttgggttgctctctgattgaattctgggatccaagctgggtaaggagagagatgagtccaggctgctacagaagattattttccataatttcaatatgngcagttttaaaacacataanggatttataggtcatgtttagctaggctcagccttaacacttnctctacctcatttattagaaaccaacaaagggccttttccagatgagggccaaggacggtggcatncagaagggatgaaaacactgagtacctnggccgctctanaactagtgngatccnccgggctgcaggnaattcgatatcaagcttatcngataccngtacgncctntgagggggggggcccggtacccannctttttgttccctttagtggnggggttnaattngngccgctttggccg

SEQ ID NO: 696 - DNA, 509 bp, Homo sapiens
  misc_feature 8, 224, 232, 246, 252, 348, 371, 444: n = A,T,C or G
gtagcgancactacttagggcgaattggagctccccgcggtggcggccgaatcactgggtgtcccagtgcccgctgtgagctacgctacccgcctaggagagtctgagaggccagtctctcttggcagtgaggccgtctgtccggaaatagaggcgcacattgggagggaaatgctctctgtgtacctgcccgggcggccgctctagaactagtggatcccccngggcctgnaaggaatttctaanatcaangcttatcgataccgtctgaccctcgagggggggcccggtacccagcttttgttccctttagtgagggttaattgcgcgcttggcgtaatcatggancatagctgattcctgtgtgaaantgttattccgctcacaattccacacaacattacgagccgggagcataaagtgttaagcctggggtgcctaaangagttgagctaactcacattaaattgcgattgcgcttcacttgccccgctttccagttcgggaaa

SEQ ID NO: 697 - DNA, 428 bp, Homo sapiens
gagcgcgcgtaatacgactcactatagggcgaattggagctccaccgcggtggctggccgcccgggcaggtacgcggggataataaaaaatgtatttactgagccagttgtggtggctcgcgcctgtggtcccagcgccttggaaggccaatgagagtggatcggttgaggccaggagtttgagaccagcctggccaacatggtgggatgccgtctctactgagaatacagagatgggccgggcgcggtggcgcgtgcctgtagtcctcagcctcccaaagtgctgggattacaggcgtgagccactgcacttggcctggactcatcttcattgtccacctcctaggctaaatttatgtcttttatgtgcttgtaatctctgcataccactttagtgacacttgccctggagtgtgattggtaatccc

SEQ ID NO: 698 - DNA, 423 bp, Homo sapiens
gagcgcgcgtaatacgactcactatagggcgaattggagctccaccgcggtggcggccgaggtacttctgcctgggttatgggagtaaaatcttgtccagggacatcccagggaaggtgaacttgcccaggcagatgcgatagacagcgctcagaggaatccgctgcagctacacacaactcagcatgatgaagtcgtatttgcagatcaagagagtcttgtctgtgaccagtagaattctctccttctcattgttccagtggtctatctttgtcaagagccagaagccttgaatggtctctccagaagtctcagctacgtgacctttcaagtcttccatggcagtctcaatggcccccggccgctctagaactagtggatcccccgggctgcaggaattcgatatcaagcttatcgataccg

SEQ ID NO: 699 - DNA, 530 bp, Homo sapiens
  misc_feature 4, 9, 10, 15, 223, 234: n = A,T,C or G
gcgnccacnnatacnactactatagggcgaattggagctccccgcggtggcggccgaggtacttccgtgagatataaggctgatgataaggattggggtaaagagttgattcggtcacacttgactgccttgaaatctgtcttggcatcgggtcctcttcctccatcgataggtggtcagtctcagagggttggtcatctccctcttgcttcaaagacacagncctggaaatcnttcaaaactcccaattgttgacatttcttcagcctgactaggctggtcctcaaggctcttctttctctttctgcacaaagggggctagaccacagatagtggccaggagaggtgtgactggctcagataaagccaggcaagacagtgccctgtgctgtgaccccactcagtctcccgcgtacctgcccgggcggccgctctagaactagtggatcccccgggctgcaggaattcgatatcaaagcttatcgatacccgtcgacctcgagggggggccccgtacccaacttttgttc

SEQ ID NO: 700 - DNA, 538 bp, Homo sapiens
  misc_feature 2, 8, 103, 215, 258, 271, 393, 485, 501, 502, 508, 531: n = A,T,C or G
gnttcgcnatcactactatagggcgaattggagctccccgcggtggcggccgaggtacatacatacttgttattcttgttacatcttccttattgaataaatngtcatcacttaaaatgtccctcttcatctctaataagtttttgtcttacagactattttatctagtattaagtatagctgccccaactctgtatgattgctgttttcatggnatatctttttctatccttttacttttcttttaaaaataatttnaaaaaattaattnacatacccctaaaatgcagaagatttttaagtgctcagttcaatgactggtgacaattatacacagctatatatcccacccccaaacaagatattaaaccatatataatatttcatacaggntttctcatgcccctttccaggccaatccccatctccttcctgtaacaggcaagtgctttctgatcataatggatctttttaaaatcataggnatattcatttgtctgnnctaggntttatgggaatgaaaccaaacangagggat

SEQ ID NO: 701 - DNA, 530 bp, Homo sapiens
  misc_feature 3, 14, 272: n = A,T,C or G
gtntcgtatcactnctatagggcgaattggagctccaccgcggtggcggccgcccgggcaggtactacaaatacatttttataaatggatgattggaagtgccctaaatgtcttataagaaaatacattatggtacgatatatatactaaaatttatatttcagaagaatattaaaagaggaaaatgctagtggtaaaatgttaagtaacaaaaacatatattatcctcaacaaaatattatcaaaccaaattcagcaacatctaaaaaganttatacaccatgactaagtgagatttatccctggaataagcttagtttaacatctgaaaattcatcagtgaaatacaccatagtaagaataaaggacaaaaaccacaggatcatctcaacagaaacagagaaggcatttgacaaactccaacaccctttcatgataaaaatactcaacaaactaggaatagatgagaatttcctcaacctaataaagggcttctgtgaaaatctcaaggctaatttcgtattaatggt

SEQ ID NO: 702 - DNA, 524 bp, Homo sapiens
  misc_feature 263, 493, 502: n = A,T,C or G
cctatcactactatagggcgaattggagctccccgcggtggcggccgaggtacttctgcctgggttatgggagtaaaatcttgtccagggacatcccagggaaggtgaacttgcccaggcagatgcgatagacagcgctcagaggaatccgctgcagctgcacacaactcagcatgatgaagtcgtatttgcagatcaagagagtcttgtctgtgaccagtagaattctctccttctcattgttccaagtggtctatctttgncaagagccagaagccttgaatggtctctccagaagtctcaagctacgtgacctttcaagtcttccatggcagtctcaatggcccccggccgctctagaactagtggatcccccgggctgcaggaattcgatatcaagcttatcgataccgtcgacctcgagggggggcccggtacccagcttttgttccctttagtgagggttaattgcgcgcttggcgtaatcatggtnatagctgtntcctgtgtgaaattgttatccc

SEQ ID NO: 703 - DNA, 533 bp, Homo sapiens
  misc_feature 2, 8: n = A,T,C or G
gntacgcnatacactactatagggcgaattggagctccccgcggtggcggccgtagcttgcaggggtgctatgtgaagatggcggaattcccaacgtgcttctgcaaaattttatgtattcatccccctctgctctcagtagggtgttaccacctgcggatcctttgctttccccgctggatactaacagcctttttcataattgctagcacctatggaattgaagtggtggaactgaacaaacaatagtctttctctgtaatgtcagagttattcataagacgaggcagtgttagacataagaaagagcactgggcaaagaatcagacaaccaggatttggttccattcttttattatcaaagaataaaaaaaaacaatattattttaagatgcagtcccaagtcttataaggaatttgaaggcttctgggatctaatctaggtcatgcccattctgccttcccttgctgtgtgcccctgacacaagcatggaaacatgtattcacttacctttgcccttgggaacactttg

SEQ ID NO: 704 - DNA, 530 bp, Homo sapiens
  misc_feature 7, 29, 31, 368, 382, 389: n = A,T,C or G
tagcgcnatcactactatagggcagaatngnagctccccgcggtggcggccgaggtactttttttttttttttttttttgcaagatggaatttcatcattccatcggttttgcccagactggtggcaaactcctgggctcaggatatccgccagcctcagcctcccaaagtgctgggaatacaggtatgagccactgcactcgaccatttatgcatttcttcataatccttttactgacaaccgtaaattaacctctgggtttctgtcaatcactggattttaagtcactaagtagcagaactatatctaatttattaacattcatcatccccctttgccagcattgaacatgatgttttgcatatantaggcattaaattngctaaanggaactaaataatgtttgataaataacatcatggcacatgaccatattaggcctaactaattatttattcttccatttagtgagtgcaaaactttagtcaaaaacattaaacatactattttctaattaccttattttgcc

SEQ ID NO: 705 - DNA, 526 bp, Homo sapiens
  misc_feature 1, 2, 3, 6, 15, 226, 243, 269, 341, 413, 443: n = A,T,C or G
nnnaangccctaacnactactatagggcgaattggagctccaccgcggtggcggccgcccgggcaggtactattaaatttaatgagaggtaacccatgcaccggcaggaagttcaaggggacagaaggggcttgctccactctggagccctatctcctctcacctccttccttctagtttgacatgcgatcttgtctctctcttttataaagtgcttccaggcccntttgaataagatgctgncctaaatccttcctcccgcgtacctnggccgctctagaactagtggatcccccgggctgcaggaattcgatatcaagcttatcgataccgtcgacctngagggggggcccggtacccagcttttgttccctttagtgagggttaattgcgcgcttggcgtaatcatgggncatagctgtttcctgtgtgaaattgttatncgctcacaattccacacaacatacgagccgggagcataaagtgtaaagcctggggtgcctaatgagtgagctaactcacatta

SEQ ID NO: 706 - DNA, 522 bp, Homo sapiens
  misc_feature 226, 248, 264, 450, 486, 512: n = A,T,C or G
gccgctatacactactatagggcgaattggagctccccgcggtggcggccgaggtacgcgggggggacaggccatctcgctataggaaaggaaagtggaacagcattcatcctcaacatttttacgaagacaaaatgaagactggagtagaagactgatcagtgcaggtgtagcataaaagtgtaatcctggaagatgtggtgtgagaaggtagcacaagtgaaancaagatacaggagatagggaanggaaagctggaagcanaggtcactggagggagaagggagatggacacattcagggctacaaagcaagttctatgtgatttgctcacctctcaattgtgggacccctcaaaatgtgtacctgcccgggcggccgctctagaactagtggatcccccgggctgcaggaattcgatatcaagcttatcgatacccgtcgacctcnagggggggcccggtacccagcttttgttccctttantgagggttaattgcgcccttggcgtnatcatggtca

SEQ ID NO: 707 - DNA, 531 bp, Homo sapiens
  misc_feature 240, 245, 496: n = A,T,C or G
tattgcccctatcgctactatagggcgaattggagctccccgcggtggcggccgaggtacgcgggggggacaggccatctcgctataggaaaggaaagtggaacagcattcatcctcaacatttttacgaagacaaaatgaagactggagtagaagactgatcagtgcaggtgtagcataaaagtgtaatcctggaagatgtggtgtgagaaggtagcacaagtgaagcaaaagatacanggaanatagggaaaggaaagctggaagcagaggtcactggaagggagagggagatggacacattcagggctacaaagcaagttctatgtgatttgctcacctctcaattgtgggacccctcaaaatgtgtacctgcccgggcggccgctctagaactagtggatcccccgggctgcaggaattcgatatcaagcttatcgatacccgtcgacctcgagggggggccccggtacccaacttttgttccctttatganggttaatttgccccctttggccgtaatcatggtca

SEQ ID NO: 708 - DNA, 522 bp, Homo sapiens
  misc_feature 2, 8, 14, 478, 498: n = A,T,C or G
anggaccntatacnactactatagggcgaattggagctccaccgcggtggcggccgaggtactctgcgttgttaccactgcttcccgggactctgcgttgttaccactgcttcccgggactctgcgttgttaccactgcttcccgggactctgcgttgttaccactgcttcccgggactctgcgttgttaccactgcttcccgggactctgcgttgttaccactgcttccgggactctgcgttgttaccactgcttcccgggactctgcgttgttaccactgcttcccgggactctgcgttgttaccactacttcccgggactctgcgttgtacctgcccgggcggccgctctagaactagtggatcccccgggctgcaggaattcgatatcaagcttatcgataccgtcgacctcgagggggggcccggtacccagcttttgttccctttagtgagggttaattgcgcgcttggcgnaatcatggtcatagctgttncctgtgtgaaattgttatcccctc

SEQ ID NO: 709 - DNA, 894 bp, Homo sapiens
  misc_feature 30, 574, 590, 629, 643, 678, 696, 710, 717, 719, 722, 731,732, 742, 746, 754, 778, 782, 783, 800, 805, 807, 813, 819,820, 822, 823, 824, 827, 830, 831, 832, 834, 835, 839, 844,851, 854, 856, 860, 862, 879, 880, 886, 891: n = A,T,C or G
ccgcactactatagggcgaattggagctcnccgcggtggcggccgcgtccttgcagggttttatcggcgcgcaggtgaaggcggaccgcaaccgcctggcgctggccatgatcttgtgctggctgctggccgacgactggttcatcggccagcgcttgccgcagcaggatctgctgcaggtgctgggcgaggcggcgcgcgaactggccgccagtacgccggcccaccagttcacgcaagacccggagcggcgcgaggaactggcgcgcatcgtgctggcgcgcctgggctttcggcccagcgacgaaagcgtagcgcaggccacggacagattgtctgccatcagcggcacggagcgccgccgcctgctcgaacgaagccgctggccgaacagcgcgcgcgggaaatccgcgaggcgctggcgaaaaaggcggccgctctagaactagtggatcccccgggctgcaggaattcgatatcaagcttatcgataccgtcgacctcgagggggggcccggtacccaacttttgttccctttagtgagggttaattgccgcttggcgtaatcatggncatagctggttcctgngtgaaattggtattccgcttacaattcacacaacatacnagcccgggagcatnaagtgtaaaacctggggtgcctaagaagtgaactnacttaaattaattgcgtnggcctacttggccntttcaancnggnaaacctgcnngccaacttgnattnatgaattnggccaccccccggggagaggcggnttgnnaattgggcccttttccntttcntngttaantaattnntnnnctnggnnntnnggtnggggnagggggnttnanttantnaaaggggggaatacggnnatccanaaaanagg

SEQ ID NO: 710 - DNA, 933 bp, Homo sapiens
  misc_feature 486, 601, 624, 658, 695, 697, 703, 714, 764, 773, 778, 816,836, 839, 851, 853, 866, 873, 877, 880, 896, 902, 907, 921,927, 930: n = A,T,C or G
acgcgcgtaatacgactactatagggcgaattggagctccaccgcggtggcccgcccgggcaggtacagtagaatccagtcgttggtttggaggcgagggctctctgcggtcctctcctactgtcaggagcttcccgtgctcatttttcatttactgatgcactaaaggagagtttgactttgagtcagctcagcattctaaatcaaacgcaaacagcagaatcatatggcatagacacttagcaaatccaatgccttccaggcatctgtttcctgttgatgaaatcctccctatggagagcaaactggttcatatcttcagatagtgtcattcaaccccttggcagctttctgggctactaaatatcacaccgtctggtgggacatttcacccaagttgttcatttattaagttttctggcttcgtggagaattatctgccttctctgagtattgatttcattgtgcgcatggtgaagatatcgnctgttctacaagggagtaagaatgagtccccgcgtacctcggccgctctagaactaagtggatccccccgggctgcaggaattcgatatcaagcttatcgataccgtccacctcnaaggggggggcccggtcccagcnttttgttccctttaagtgagggttaaatgccccncttggcgtaaataatgggcaaaacctgtttcctgtgngnaaatgntaatccgttancaatttccacacaaacaataccgaaccccgggagccttaaaagtgtaaancctgggggngcctnaatgaggtgaacctaacttcacattaaatggcgttgcnctcactggccccttttcagntcngggaaaacctgncntgcccacttgcantaaatgnaatnggnccaacccccgggaaanggcggnttgcntattgggcgccttntccctntcntcg

SEQ ID NO: 711 - DNA, 907 bp, Homo sapiens
  misc_feature 272, 296, 386, 529, 545, 599, 619, 626, 646, 663, 721, 725,760, 765, 788, 797, 802, 806, 814, 849, 865, 884, 885, 886,893, 898, 900: n = A,T,C or G
acgcccgtaatacgactcactatagggcgaattggagctccccgcggtggcggcccgcccgggcaggtacctggtaatttacagaacgttcgttatcagatttgataattatatattaaggttgtaaagaatgtgtatgccagaattataggtagtagatcctagattcttaggaaaaatagtttctttataatcttttgagtagtgaaatggttacttttacaatggttatgaactgggtcaaggcaaaagggccactatatgtcttcagncatctttctatgcctgaaatccangaaacagtgaaaatggatgttccctggaacagccattgcgatgccatatgttggtcattggtgtccttaaagtgtatctcaaataattgngtgtctcccttacttgtgaactgaggggtcacaatattgatgtgcctgatgtgtgcccctctgcatttcgtgggtagtgtctcaaatttggctatcatattgatgagaagtcctaatttggtttagctgccagaggtttaggnggttttcacttccagngacttacctgattgcacaatagttccaaccgtcacttggttgcactccttcaangctagcatcttttttctagnaaaattnccaataccattcttttgggnttatccttttaaaatanttgcttgagaaagcatttaaaaggttaatgctggaatttatatttggtgggatgcctnaatncaatggggcctctttcctttccatgaattgaaaanaaatngggagaaaaagaatcaccttttncggccagtnttttnttcngttaaaanatttttggatttgggaaaaccaaatttttggagtnaacatgggaatacaanggcctttccagcaaaacannntgggttnaaatncntccttct

SEQ ID NO: 712 - DNA, 851 bp, Homo sapiens
  misc_feature 1, 3, 709, 777, 782, 841, 847, 849: n = A,T,C or G
nanacgcgcgtaatacgactcctatagggcgaattggagctccccgcggtggcggcccgaggtacgcggggggattcagagtgagaaggcataaaggagaatccccagctgacttgtgcagtggttaattgaaattattcaggcaagagatgatggtgtcttggaccaggggatgaggaaggctacaaaatgtgtctacctgtattctgtgaggagaacgtgttccctggttttagatactgtgaagatggatcaggagagagtttatctagactgttggggaaaggtgttgcgattccttcagctacacaggattgaaaggagacatttctgaaggggaaaaaggaaatgaaagaaaagatgtttcagattgaggatatgctgtgtggtgaacttgttcttcactctgtagggttcacaaatgactcttcactgccctcttggatgaaataaactggttcccatagaaatggaccgtctctgatttcacagtctagagcacacaaataacccaactttctggaagcaagggtgatggctcgtgagagctcaaggacaaggaggagtctgtaaaaagcacacctggactcggggaaatcattgcctctcatcctgaattaagtagcgcttgaaaagactctctttgaatcagaaaaataatgcgagcctcctatcaaactccttacacagcccacctgagtgatcaaangcttgggtggaaaaaaatgtaattcgtagaaccttttaagagctaaaattccttaatcacctggattnccgtnttgttgaatgacacccaacctgtgctgcccaaggatccggttgcatggtggcttggacntgcctntntt

SEQ ID NO: 713 - DNA, 898 bp, Homo sapiens
  misc_feature 485, 615, 616, 617, 618, 619, 620, 621, 622, 623, 624, 625,626, 627, 628, 629, 630, 631, 632, 633, 634, 635, 636, 637,638, 639, 640, 641, 642, 644, 645, 646, 647, 648, 649, 650,652, 653, 654, 655, 656, 657, 658, 659, 660, 661, 662: n = A,T,C or G
  misc_feature 663, 664, 665, 666, 667, 668, 669, 670, 671, 672, 673, 674,675, 676, 677, 678, 679, 680, 681, 682, 683, 684, 685, 686,687, 688, 689, 690, 691, 692, 693, 694, 695, 696, 698, 699,700, 701, 702, 703, 704, 705, 706, 707, 708, 709, 710: n = A,T,C or G
  misc_feature 711, 712, 713, 714, 715, 716, 717, 718, 719, 720, 721, 722,723, 724, 725, 726, 727, 728, 729, 730, 731, 732, 733, 734,735, 736, 737, 738, 739, 740, 741, 742, 743, 744, 745, 746,747, 748, 749, 750, 751, 752, 753, 754, 755, 756, 757: n = A,T,C or G
  misc_feature 758, 759, 760, 761, 762, 763, 764, 765, 766, 767, 768, 769,770, 771, 772, 773, 774, 775, 776, 777, 778, 779, 780, 781,782, 783, 784, 785, 786, 787, 788, 789, 790, 791, 792, 793,794, 795, 796, 797, 798, 799, 800, 801, 802, 803, 804: n = A,T,C or G
  misc_feature 805, 806, 808, 809, 810, 811, 812, 813, 814, 815, 816, 817,818, 819, 820, 821, 822, 823, 824, 825, 826, 827, 828, 829,830, 831, 832, 833, 834, 835, 836, 837, 838, 839, 840, 841,842, 843, 844, 845, 846, 847, 848, 849, 850, 851, 852: n = A,T,C or G
  misc_feature 853, 854, 855, 856, 857, 858, 859, 860, 861, 862, 863, 864,865, 866, 867, 868, 869, 870, 871, 872, 873, 874, 875, 876,877, 878, 879, 880, 881, 882, 883, 884, 885, 886, 888, 889,890, 891, 892, 893, 894, 895, 896, 897: n = A,T,C or G
acgcgcgtatacgactcactatagggcgaattggagctccccgcggtggcggcccgaggtacttacagtttgactttgagtcagctcagcattctaaatcaaacgcaaacagcagaatcatatggcatagacacttagcaaatccaatgccttccaggcatctgtttcctgttgatgaaatcctccctatggagagcaaactggttcatatcttcagatagtgtcattcaaccccttggcagctttctgggctactaaatatcacaccgtctggtgggacatttcacccaagtaggcaaatgcatgacagaactcactggatcaatatctcaaaatgctgggaagaaaaaaacggtaaccagaaattctacacagagtgaaactacaaaacaaaaatcaaagcaaagcaacaatttctggatatgcataaaagatgaaattatatgttgctagaagatccatagcacaagaaatgctgatatccntcaggctgagggctattaaacaagatggaaatccagaaattatagaaaggacaaaaagaacaaaaatgagaagcatacaggtcaatacaaagactgcatattctccttctctttcccgcggtcctggccnnnnnnnnnnnnnnnnnnnnnnnnnnnntnnnnnnntnnnnnnnnnnnnnnnnnnnnnnnnnnnnnnnnnnnnnnnnnnnnntnnnnnnnnnnnnnnnnnnnnnnnnnnnnnnnnnnnnnnnnnnnnnnnnnnnnnnnnnnnnnnnnnnnnnnnnnnnnnnnnnnnnnnnnnnnnnnnnnnnnnnnnnnnnntnnnnnnnnnnnnnnnnnnnnnnnnnnnnnnnnnnnnnnnnnnnnnnnnnnnnnnnnnnnnnnnnnnnnnnnnnnnnnnntnnnnnnnnnnc

SEQ ID NO: 714 - DNA, 860 bp, Homo sapiens
  misc_feature 66, 74, 111, 126, 232, 325, 356, 410, 418, 426, 444, 458,489, 586, 590, 614, 625, 635, 637, 640, 646, 658, 667, 678,683, 687, 697, 702, 715, 731, 735, 739, 758, 759, 785, 796,798, 802, 805, 809, 827, 837, 840, 853, 856, 859: n = A,T,C or G
agcgcgtaatcgactactatagggcgaattggagctccccgcggtggcggccgaggtacattctgntttattgncctccctggctataactactctaatcttccacctttntttctccttaccctnactgctttatctcaagaagatcttgtgtggtatatagatgcgagaaagttacctgcatgattccgacaggtgccctgccatcactctaatgctgttctcattgctnggccttatggcacattctcactcactcactacccctgccccgcgtacctgcccgggcggccgctctagaactagtggatcccccgggctgcangaattcgatatcaagcttatcgataccgtcnacctcgagggggggcccggtacccagcttttgttccctttagtgagggttaatngcgcgctnggcgtaancatggtcatagctgtttnctgtgtgaaattgntatccgctcacaattccacacaacatacganccgggagcataaagtgtaaagcctggggtgcctaatgagtgagctaactcacattaattgcgttgcgctcactgcccgctttccagtcgggaaaccngtcntgccagctgcattaatgaatcggncaacgcgcggngaaaggcggntngcntattgngcgctcttccgnttacttggncactgacttcnctgcncttnggtcgttcgnctgcngggagccggtatnaagtttaacttcaaanggcnggtnattcccggttattcaacannaatcagggggataaccgcaaggaaanaacatgtgaancnaaanggncagnaaaagggccaaggaaccntaaaaaaggnccnttgctgggcggtnttncana

SEQ ID NO: 715 - DNA, 868 bp, Homo sapiens
  misc_feature 4, 7, 8, 536, 537, 542, 547, 548, 549, 555, 556, 557, 569,604, 609, 621, 661, 700, 724, 725, 743, 748, 753, 765, 769,775, 780, 786, 795, 802, 804, 808, 815, 835, 844, 850, 852,856: n = A,T,C or G
gggncgnncgtaatacgactcctatagggcgaattggagctcccccgcggtggcggcccgaggtacatgtagatccaaacacatgtaaacatttagtggaatttccaatcagtatataatgattcattaatttaaaaaaaaatggttcctggacaagtgattgataacatggagaatgaaaaaggttagatttatactttacaaaccatacacataaataaatttcagaaaggttgaaaatctaaatatttagaatgaaatgatcaaagaactagaagataatttagatgaatattactgtaatcttaggtttagagcttttaaaacatgataaggaagaaaccataaaggaaaatagaggatttgaatatatgaaaattttacacttctataaatgaaaaataagccatgaaaaaacataagaagttcaataactattgccacataaatcactctcttaagattgattttcatatataaaaagcagtaaaagcaaaatcccaataggaaatagcctaagtgcataattaccaagnnaaaanatgtnnntaaaannnaaaaaaaaagtncctgcccgggcggccggccggggcaggtacaggtnaacanacctcctaccangggaactcctgcccaagtgtttccagtcccatctgaaagntccagagccttggctttcaaggggcctgcctgaaaggcnttgagtcccaacaagttttgcttnnttcaggatacaagttggntcccntctcntgggccatgggntgcntttgtnggganaatttnttgggaaangccttanancttngaacccntctggttggcagtcttgaanttctaaggnactccnangccntgggaagggccg

SEQ ID NO: 716 - DNA, 864 bp, Homo sapiens
  misc_feature 2, 8, 675, 698, 740, 743, 777, 783, 831, 845: n = A,T,C or G
gnagatangcgcgtttacgactcctatagggcgaattggagctccccgcggtggcggcccgcccgggcaggtacaataggaataatgtaaatatttttatatttaattttttttaattacagaggttattgagtttgtgtttttcagctgcagagagagaaatttgtggggataaagtcacaagaataccagttggcagaaattgaattaccttcctttgtataagtaatatccagtctagtcttaaatgctataggatgagataagagaaggatagctcacattccaaaataaaagcaaaaatataaaatattgagaattgaatttgacaacatgcgaacaaaactgaaaatagaaaaatataaacctttattagaggacataaaagaagcctggaataagtggagagacaggtcagttttctagaaagacatgatattgttaagctgctgattatgttcaaattcatacatttaatttcagtcaaaattctatttttcctttgtttgaatctgaaaggctgatactgtaggccatttaaaagaataatatatgggctgggcactatggctcacacctgtaatcccagcactttgggaggccagggagggccagatcatggggtcaaggagattgagacccatccctggcccaacatagtggaaaccccgtctntcttaagaaatccaaaaaattanctgggtgcagtggcaaggtgcctaaaggtcccacttgctcangangcttgaggcaaggagaataccttgaacctgggangcgganggtgcagtgatccgagatccaccctttgcactcttgcctggccgaccngaacgagactccgnttcaaaaaaaaaaaaaaat

SEQ ID NO: 717 - DNA, 514 bp, Homo sapiens
  misc_feature 154, 175, 184, 198, 200, 204, 218, 230, 242, 246, 255, 264,277, 278, 297, 309, 310, 312, 318, 330, 337, 362, 365, 394,411, 417, 428, 432, 439, 490, 509, 510, 512: n = A,T,C or G
gcggtggcggccgaggtacgcgggcatgacaactaatgggaaagacatggctcagatgtgcagcctcagagagcttctgaacatttcttctcagactaagctcttacacacagttgcagttgaaagaaagaattgcttgacatggccacaggancaggcagcttttctgcatacntgaacagtncaacccaaacttcntntttntgtgggcggacacnatgtttgcaaanagagacttcaanagcncaaaccaangcacacctnaatgtgcttttgnncaaatttacccattaggtnaatcttttcctnntnccaaanaagaaaagtggngagagcntgagtccttacatggaaacttgaanttnagggaaaagaaggctcaccaatttatttngtgcatggggtttaagntttttncccttgaaaanttanaagtttnaaagtttttgtctttttgtggtgtaccttgccccggggccgggcctgcttnttaggaacctaagatgggnntncc

SEQ ID NO: 718 - DNA, 497 bp, Homo sapiens
  misc_feature 2, 282, 288, 331, 346, 359, 368, 373, 418, 438, 441, 443,446, 448, 450, 456, 479, 483, 487, 490, 493, 494: n = A,T,C or G
cnatcactcctatagggcgaattggagctccccgcggtggcggccgaggtacgcgggagatgtgttatttatcattttatgatgccagagatttacacgaatttgtgaaaggttttttcttaccatagattcagaggcgtgtttgaggcaaggttttcattgtgcagtgaggaaattggcacatagaaatcaattgatgtgcaggactcttggactgactattctggttatgtttccttataacacattaagaagaaatttgagataaagttagtaattgtnaactantctttatttattttaataacaaatgttgcagtataatttttanaaatattccaaaatnaccaattaatccncaaattttncgggnataatttttaaagtgaggaaaataacatacctacctttatattangacagggggaaaatatttcnctntnttncnantaaatngaatttccctaaaaaccccccanttgnaaancanctnngga

SEQ ID NO: 719 - DNA, 469 bp, Homo sapiens
ctatcactccttagggcgaattggagctccccgcggtggcggccgcccgggcaggtacattcgatttattatatgttaactacttctcaataaatctgttaaaaaattaaacacattaaaccacccctcaagagaatccctaaaataaaaatttaaagagggggaaaaaaggaagggaagctactgaaagttgtaagaagagacaaaaagttaccaataatgaagccagtgtttcaaggagtgtgcagttaaaataacatgacacacagatatcaaaactggcaactgagagaagtccaaggtccttggcaaagagaaagccactgaccatccgtggaagtgtagtagggtgacagccagaatgtcagaggctgaagggaagctatgtgaaacagagaggatggcagtgagcttagaccacttgtttaagaagctcagtaaatgaaaatgagagaagtaagacagtagc

SEQ ID NO: 720 - DNA, 488 bp, Homo sapiens
  misc_feature 2, 3, 4, 7, 8, 23, 37, 66, 80, 117, 175, 221, 301, 355, 362,379, 384, 424, 452, 473, 483: n = A,T,C or G
gnnnagnncgccgtaatcgactnctatagggcgaatnggagctccaccgcggtggcggccgaggtncacttatagttganagccaagtctcccttatcattggtgaatgagaatganctactgaaaacaaaaagagggtcttctactcagcctctacccctaatatttatatcanaagcagagattaactgtccttactcattcacacgttaatggaaganaaggaagtttcctagaaaaatcctcccgctccaccctgcaaactttatgcttttctgttacataatcaggcaggggcaanacctaaactattttgaattggtggtgttgaggctaaattctctgctattgacanaattganaatgtgatcaatttcanagtancatgttacaaattttgtcccaatttcaatggggagaattntaacaaatcattagttggttggcaaaanctggttcttactttcctcccntccagttganctagg

SEQ ID NO: 721 - DNA, 474 bp, Homo sapiens
  misc_feature 30, 71, 177, 187, 223, 241, 255, 277, 307, 330, 333, 340,342, 350, 357, 380, 383, 392, 414, 424, 445, 447: n = A,T,C or G
gccccgtaatcaactactatagggcgaatnggagctccccgcggtggcggccgaggtcgcggggggcttanacctgacgctgggaggagatgctgccacctaggttacttgtaggaccctatacggcaacctcctttgccaggaactatttataaacatcctgcaggaaaatgagtntatatgtcanaatacacatttcccaccttgcccaacagtggaaaancataagaagagaaaaacnttaaaaaatgacanggaagttaatggaagtcagcantgtgatggtgtttggaggtggagccttcanaaggtaattaatgcccttgtaanaanaggccananagcttgcncaccttnttcctgccatgtgaggagccaanaanccggctgtntgcaacctgcaagaggaccctnactagaagcnagccatactggcatcctcatntnggctttccaacttccaaaactgtgaaa

SEQ ID NO: 722 - DNA, 827 bp, Homo sapiens
  misc_feature 4, 5, 6, 12, 15, 16, 24, 27, 31, 32, 35, 36, 37, 40, 43,47, 48, 51, 52, 56, 57, 61, 70, 71, 74, 80, 90, 96, 98,105, 106, 115, 118, 124, 129, 142, 304, 312, 316, 322, 325,328, 351, 359, 375, 376, 378, 379, 389, 404, 437, 444, 447: n = A,T,C or G
  misc_feature 453, 455, 458, 460, 462, 465, 477, 479, 481, 483, 484, 501,502, 506, 507, 511, 514, 526, 527, 570, 572, 587, 592, 611,619, 625, 641, 654, 661, 664, 667, 673, 674, 679, 684, 685,692, 694, 700, 702, 711, 713, 716, 725, 732, 733, 750: n = A,T,C or G
  misc_feature 754, 755, 768, 770, 773, 776, 787, 791, 792, 800: n = A,T,C or G
tccnnncataancgnntttctctntanaatnntannnctnctnttannatnnattnncttnttaattatnnttncttatnttattttatntaatantnttattannttttgtttnatntagtanggagnccctatacgctcntatagggcgaattggagctccaccgcggtggcggccgcccgggcaggtacgcggggagacctgacgcggggggagatgctgccacctaggttacttgtaggaccctatacggcaacctcctttgccaggaactatttataaacatcctgcaggaaaatgcanttgaagtngaanagacanggnatntttccaagaaaggtttatgccanaaacattnatagtagaaagtattnnannaagggaggtnctatattggtcaagnaataaccaacattttttccccacccttttggcncccaaancanttttgnanaananancanttatagtaaagnangnannaaaaaaccaattttttnnaaannaatnggnatccatatgggnnataagtttttaaattggtggaaaaggtccatgcccaaacttgntngtaatttgtgtttgnttatnttgggtaagagggtagtgntaaggtcncctttncaagtaaaagggtttnatttttaaaattnggtctcnttntgnttaatnnaaaanctagnngggcccntntaaggnangccttttgncngancaacccatnttctttnntcctggccccaattggnttgnngggtggaaggccncnaanggnaaaagccccgnggcnnttgtttcnttgatcataaaccccttggctaaaaag

SEQ ID NO: 723 - DNA, 822 bp, Homo sapiens
  misc_feature 3, 44, 116, 206, 219, 279, 287, 304, 310, 311, 317, 338,356, 360, 387, 396, 410, 442, 459, 487, 511, 524, 571, 578,582, 625, 657, 667, 701, 710, 712, 728, 745, 754, 759, 763,769, 772, 776, 784, 809, 814: n = A,T,C or G
gcngcgtatcgactactatagggcgaattggagctccccgcggnggcggcccgaggtacttacaacttttcatatagtattggtagtgttttgaataatttaaaaaatcatcttangtttgttatttaactttatttatatagtgcttgtattaatgattttgtgaatgttttttaaagatggataccttgatttggcttggcctnccaaagtgctganattacaggcgtgaaccaccgcgcccggccgctctagaactagtggatcccccgggctgcnggaattcnatatcaagcttatcganaccgtnnacctcnagggggggcccggtacccagnttttgttccctttagtgngggntaattgcgcgcttggcgtaatcatggncatagctgnttcctgtgtgaaantgttatccgctcacaattccacacaacatacnagccgggagcataaagngtaaagcctggggtgcctaatgagtganctaactcacattaaatgcgtttgngctcactgcccgntttccagtcgggaaaacctgaccgtgccaggctgcattaatgaatcngccaacncgcngggagaggcggtttgcttattgggcgctctttccgcttcctanctcactgactcgattgcgctcggtcattcggntgcggcgaancggtatcagctcaattaaaggcggttataccggntatccacanantcaaggggatgacccntggaaaataacaatgtnagccaaaangcccngcanaagggnccngganccttaaanaaggcaagcgttggctggccttttnccatnggcccccg

SEQ ID NO: 724 - DNA, 802 bp, Homo sapiens
  misc_feature 517, 686, 689, 717, 740, 751, 762, 764, 773: n = A,T,C or G
gccgcgtatcgactactatagggcgaattggagctccccgcggtggcggccgcccgggcaggtacgcggggcgtttgtagatggaaggaagaacttgtgtgcttagacctgacgctgggaggagatgctgccacctaggttacttgtaggaccctatacggcaacctcctttgccaggaactatttataaacatcctgcaggaaaatggtaagcccttggttaaatttattggcttcatttatgtatctcacaacacttcttttctgttttagttctaggaatagaaacttacttttggaaatacagtacctcggccgctctagaactagtggatcccccgggctgcaggaattcgatatcaagcttatcgataccgtcgacctcgagggggggcccggtacccagcttttgttccctttagtgagggttaattgcgcgcttggcgtaatcatggtcatagctgtttcctgtgtgaaattgttatccgctcacaattcacacaacatacgagccggnagcataaagtgtaaagcctggggtgcctaatgagtgagctaactcacattaattgcgttgcgctcactgcccgctttccagtcgggaaacctgtcgtgccagctgcattaatgaatcggccaaccccccgggagaggccggtttgcgtatttgggcgctcttccgcttnctngctcactgactcgcttggctcggtcgtncggctgcggcgagcggtattaanctcactcaaangcggtaatacngntattcacanaaacagggggataccccaggaaagaacat

SEQ ID NO: 725 - DNA, 809 bp, Homo sapiens
  misc_feature 2, 4, 11, 15, 26, 33, 376, 493, 504, 605, 638, 650, 690,702, 719, 734, 739, 746, 759, 773, 796: n = A,T,C or G
angngctatcnctanttctcactatngggcgantcggagctccccgcggtggcggccgcccgggcaggtacgcgggagtgactaaatttgtaggaatgatattttcatgggattactcaatctcacccaccattagttgcaggtgacaagaaagctaagttggcagatgtttgtgctagaagctgtgggtttacgtctcctttgtgcatgtgttccagacataccagtggcttggtatttaaacatcatgctcaggtgtgcagggtagtttttgagttataataggtatgcaggcgctgtgggattacttggttgtttatgtaaaaattattttgcactcacttctgaaatgagtgttagtaagaatcatctttanaggaggttccaaggcattgaactgagatacctgcactgtttgctgtaaatttaagcttaaaattgaaaccaggttatcagcatttcatgccaggagagagtgggcatgaatgatttnaggaaatgaanagctagatttcaccttgaatttgcttccacccttctgtggcaaattagtgtgggctcactgagcactttatctgcccgtggtaatttattttaccagacanggtgtcactttgtcatccaggctggaatacctnggcccgctctanaactaagtggatccccccgggcttgcaggaattccatatnaagctttttgantaccgtcgaccctttangggggggcccccgtncccancttttgntccctttaatgangggtaaatgccccncttggcgtaatcatggacatagntggttcctgtggg

SEQ ID NO: 726 - DNA, 879 bp, Homo sapiens
  misc_feature 5, 513, 599, 620, 625, 635, 677, 681, 707, 712, 744, 752,755, 756, 772, 783, 791, 802, 811, 859, 863: n = A,T,C or G
agctngacgccgtatcgactactatagggcgaattggagctccccgcggtggcggcccgcccgggcaggcacctcctccctatgcatctgctgtgggaagtgtgggtaactcacagatgatgccacagggcatgtattcaggcaccacaggcagcagtgaatgaatgaagtgaaatggtatttatccatttcctggaaaggtccagggtttggctctgcagggccaagagaacagctttagctgtgccttaacccagtcctggagaagccagcaggccgtaatcacggggaggaaacccatcttttaagggctcctcgctcaggtggtgacaaggtgaggtggtcatctatgctgtctttatcagtatctgtcctaaatactgtgctctgacattgatgctaatattccatattatcagggcttctgtggtgtctaggcctctaatttttctcttcagtaaggggaataactttgctgtgtcagcgcagtgcctcaggagggttgcaatctanaaacagtgattgttaaaattgcctataaacacacaatataaacaatatgccacagacacagaggcccccagcatagtttctggaangtgaagtctcacctctgccanagtanaatcacaagngggaattgaggcttggcatctgggtgcctcttgaaactcttnctgnggctcctggtagacaattggcccccnaaacncagaaagattgagattgcccattgcgttcaanaaattggnggnnaattaatgtaattccngaaaaaaaaanacacacangcttgcttatntttaaaccncaaaaaaaaaaaaaaaaaaaaaagtcccttggccctttttaaactaangaanccccggcttgaggaat

SEQ ID NO: 727 - DNA, 797 bp, Homo sapiens
  misc_feature 2, 6, 8, 553, 584, 592, 603, 605, 607, 609, 640, 658, 689,797: n = A,T,C or G
gnccgncncgcgtaatacgactcactatagggcgaattggagctccccgcggtggcggccgcccgggcaggtactgggattacaggaatgagccactgtgcctggcctgattgcggattttattggaataacctataaatattgaacaatgcacctgcgaaagagtatgtcttaatcttctcttggaatactgtcaacaaagatctctgagtttgaagggtagaagtaactcactacttggctgctgactgtgaaatttagtcatgtttttattgtgggagtggactgattaaacagacaagtgttataaggttcaaattacaacatttctcctaatatgcagtgcttttaactatgataaacactgcaccccccttcacaaaaaaaaagaacccacccaccaatttttaactttcttctacaaacacctcttatctcttctctatcaaagcatgactggcctttttgaaatattcaggacaaaaagttaggaagagggcaggctcgctagttcaatgtcactacatataggggaaatggaacacttccatanaaagctcttgatttctctcagcgtgagtctntgtctgangcattcccctntntntntgctaccagacaccatcacagcatgtctttncaatctgagtcctcaaanggcattctgaaagtgttcaggttattaatgncatacccaaaagccttattaaaactgcacagttattctgcttaaggtttactggccattaaaaattcattttttttggtttaacttgaagtttatgaacccactggan

SEQ ID NO: 728 - DNA, 499 bp, Homo sapiens
  misc_feature 5, 30, 307, 311, 324, 338, 346, 352, 393, 471: n = A,T,C or G
gctancatacttagggcgaattggagctcnccgcggtggcggccgcccgggcaggtacgcgggggtagatggaaggaagaacttgtgtgcttagacctgacgctgggaggagatgctgccacctaggttacttgtaggaccctatacggcaacctcctttgccaggaactatttataaacatcctgcaggaaaatgcagtgaagtagaagagacagggatatcccagaaggttatgcaaaacatcaagagaagatgagaggagtctatattgtcaagaatacacatttcccaccttgcccaacagtngaanaaaaaaaaactanattaaaaaaaaaanggtacctnggccgntctaaaactagtgggatcccccgggctgcaggaattcgatntcaagcttatcgataccgtcgaccttaagggggggcccggtacccagcttttgttccctttagtgagggttaattgcncgcttggcgtaatcatggtcatagctgt

SEQ ID NO: 729 - DNA, 495 bp, Homo sapiens
  misc_feature 2: n = A,T,C or G
gngcgctatcatactatagggcgaattggagctccccgcggtggcggccgaggtaccaggctaggcagctctggagaaagcagaagtggataaataaggtgtggactcaccaaagacagttccaaagtcaatttcactctgacacactctctgtgatcttccacagtcagcacaatgcctgccccctgtgggtgttgtataaatatttgttgaatgaatgaatcaatcattcaacagaccaaggccaaatcagaaccccaaaccctaaggtctttatactctcactgtccatccatcgatcttcctgtcagaaatcagaatatacctttgcaataccctttgctagcctttcagttatcttttgaatagaggctctgagccttgaaaatattgcctgggaaatattaacacccatttgagtatctcccaaacacctcaattaactatatggtgctgtctagccaggaccttatttcagtataatgtgaacctgag

SEQ ID NO: 730 - DNA, 494 bp, Homo sapiens
  misc_feature 2: n = A,T,C or G
gngcgctatcatacttagggcgaattggagctccccgcggtggcggccgaggtacgcggggactcaatcttactcccttgtagaacaggcgatatcttcaccatgcgcacaatgaaatcaatactcagagaaggcagataattctccacgaagccagaaaactaataaatgaacaacttgggtgaaatgtcccaccagacggtgtgatatttagtagcccagaaagctgccaaggggttgaatgacactatctgaagatatgaaaccagttttgctctccatagggaggatttcatcaacaggaaacagatgcctggaaggcattggatttgctaagtgtctatgccatatgattctgctgtttgcgtttgatttcgaatgctgagctgactcaaagtcaaactgtaagtacctgcccgggcggccgctctagaactagtggatcccccgggctgcaggaattcgatatcaagcttatcgataccgtcgacctc

SEQ ID NO: 731 - DNA, 501 bp, Homo sapiens
  misc_feature 2, 3, 248, 412: n = A,T,C or G
gnngcgctatcatactatagggcgaattggagctccccgcggtggcggccgaggtacaagctaactgtgctaggcagggcagccctgtgagttctactgctgtcttggttttacagagggggaagtgaggcacagagaagttaattaacctctgaagtgttgcagtctaaggcacagaggcacagttccaggcaaggttcatctgaatcttaagtcctcactctttgccaccatcctccactgctganaccatccctgtgaagtcctgccgctctcctcccctggtccatattcactgctactcaatgaggccaaggaagccaatggtcgtgtccccaagaggatatctctcccctcctgagaatctttcttcatacatctcaattctgagatacagattgagaagcacctnagcaaatccactgcatggaaggcaaaacaaccttgatccacagcaattgaccacaagcaagggaagcctggctatgagcacagtcataa

SEQ ID NO: 732 - DNA, 494 bp, Homo sapiens
  misc_feature 2, 3, 5, 102: n = A,T,C or G
gnngngctatcatacttagggcgaattggagctccccgcggtggcggccgcccgggcaggtacacaattgtgctgatttttctctcatttaaaacggttccncaagtagttagtccagggctggtgtcatggctccatggtcactggggcattgtgttcctccacgatttctgcttcaccaggcttagcctttgcttccatcctctagtttgcctcatggctcaagatggctgctagagctccagctgtctcttatgcattcctggctgtagaatggaggaaggaggaaagggtaacgggacgctttactggctattcttgtttaaaggagcatccttgatcatacttaatgagaatctggagtaattttcaggagatctcagagagggtacctcggccgctctagaactagtggatcccccgggctgcaggaattcgatatcaagcttatcgataccgtcgacctcgagggggggcccggtacccagcttttg

SEQ ID NO: 733 - DNA, 502 bp, Homo sapiens
  misc_feature 3, 15, 362: n = A,T,C or G
cgnccctatcgactnctatagggcgaattggagctccccgcggtggcggccgcccgggcaggtacgcgggtgtccttcttcaactggacacctctagataagaaggcaagaaattcttaaaacttttgctaacctaattgtgtatgtaattagaataaccaagttcagttaattgaaacaatgagtattggagtaagagtttgggatttgattccttagggataaactactaaatccaggacagtcatttaactgctgcagatttgagttcccaggggaaccaaacagaagtcacacaatttctaggatgaaaacatctcaaaaaaaatcagtcctcccagcacttcgggaggctgaggcanggagagcacttgaagtcaggagttgaagaccagaccagccaacatggtgaaatccccgtctctataaaaaataccgaaatttagttgggccgtggtgaccccgtgactgtggtcctagctacctcaaggaggctgaggct

SEQ ID NO: 734 - DNA, 492 bp, Homo sapiens
  misc_feature 2, 3: n = A,T,C or G
gnnacgctatcatacttagggcgaattggagctccccgcggtggcggccgaggtacgcgggttatcagtatctgtcctaaatactgtgctctgacattgatgctaatattccatattatcagggcttctgtggtgtttaggcctctaatttttctcttcagtaaggggaataactttgctgtgtcagcgcagtgcctcaggagggttgcaatctagaaacagtgattgttaaaattgcctataaacacacaatataaaccaatatgccacagacacagaggcccccagcatagtttctggaaggtgaagtctcacctctgccagagtagagtcacagtgggaattgaggcttggcatctgggtgcctctgaagctcttcctgtggctcctgttagacaattgaccccgaaacacagaagatagagattgcacattgcgttcagtaattgttgtttatttatgttatttctgaaaataaaagacagcacaggc

SEQ ID NO: 735 - DNA, 804 bp, Homo sapiens
  misc_feature 4, 5, 6, 10, 15, 680, 745, 756, 769, 773, 801: n = A,T,C or G
gctnnncgcntatcnactcctatagggcgaattggagctccccgcggtggcggccgaggtaccgcggtttttaaatctgtcactgttcttcccccacttcaaagctgacttgacaactgcatttatttcatattgcaattgctgcaggttaataatattgttttatcaggaaacatttatcttgaggaagaaagttatcctaatacagcagataacttatccaaggacaaatagaaaggggactgtgtctagagggtaatgctaatgcctggcatgctataaaaataaatgaaatctgattaacactattggagggaagaataagtcatcgtttctatgaaatattattttcctgattggaaccatttccattttcgtcagcttaaaacattgcattaaagatgagatgactttaaaacggtgacaactatctcaagccctgtgattataaatggtgttataggcttgtaatcctatgggtttagactaaagtattttcttcataaattgaaagagaaacacactaggaattcagaagattttaattaaagttgttcaaaaaatttaatgggaattttaaaggctggctcactaagtagttttgataatgaatttaatttatagaaagaaagttctttgggcaaaattttggtaatgccaaaaagaacctccttatgccncaatgtatattttcatggaagcattattattaagtgtcccgcttttacctggttgacatacttanttcattttaancttcattcaaatntgtngattaaacccaaccccctttaaatgggnact

SEQ ID NO: 736 - DNA, 496 bp, Homo sapiens
  misc_feature 3, 8, 16, 66: n = A,T,C or G
gtnccgcnatcgactnctatagggcgaattggagctccccgcggtggcggccgaggtacaccagancttaaagtataataataaaaaataaagtattacagaacatggtcaattatattaaaaagtagattaattaatgtccatatatacattttttggtggaaatcaaacataatgaaaactatttcacataattaatattttgtttattttttacttattaatttattgcagagatgggagtcttgctatgttgcccaggctagtctcaaactcctggcctcaagtaatcctcccacctcaatcccccaaaatgctgggatttcaggaacatgccactgcactttattagtgttacctgtcataaagttaattactcataattttatttcagtatatatatatacacacacacaccacacacaccatagtagaataaattaattatattttctacaaaaattattttcaatcttttttgttacaatgagtatca

SEQ ID NO: 737 - DNA, 447 bp, Homo sapiens
  misc_feature 200, 289, 320, 373, 374, 416, 431, 445, 447: n = A,T,C or G
cctatcgactacttagggcgaattggagctccaccgcggtggcggccgatggagtcagctgcgatagcggcctgacgtccgccgtggtcgatatcgcgcgcgcgcaggagcaatttacggttgccctgaatggccgcttcaagggcggccatatcacgcgccattacggcctgccggacaagcgcgtgcatgcgatccanctggagatgtgccagtgcgtgtacatggatgaagcggcgccgttcggctaccggcctgacctggccgcgcaagtgcagccgctgctgcnccagatgatggacggcggccgctctagaacnagtggatcccccgggctgcaggaattcgatatcaagcttatcgatacccgttnnacctcgagggggggcccggtacccagcttttgttccctttantgagggttaattgcncgcttggcgtaatnan

SEQ ID NO: 738 - DNA, 451 bp, Homo sapiens
  misc_feature 121, 168, 179, 221, 225, 271, 277, 296, 316, 331, 334, 339,354, 410, 436, 446: n = A,T,C or G
tatcactactaagggcgaattggagctccccgcggtggcggccgaggtactttttttttttttttttttttttttttcttttttttttttttgggcaactttctggtattacttgtaaacnctggttccttcaactttctgatattacttgtaaacactggttccttntcaaccaccgnattctgattgggtctataagtagcacccagtccacaccacancacncttctggaggaggaatgccaatggggaccctgtctgcaatgcctgngggctntactacaagcttcacaatnttaacagacccctgactttnaaaaaggaaggcatncanaccanaaaccgaaaaatgtntagcaaatccaaaaagtgcaaaaaagtgcatgactcacttggaggacttccccaanaaacagcttgtttaacccggccgttntaaaactagngggat

SEQ ID NO: 739 - DNA, 499 bp, Homo sapiens
  misc_feature 10, 11: n = A,T,C or G
tatcgacccnnatacactactatagggcgaattggagctccccgcggtggcggccgaggtacgcgggggtagatggaaggaagaacttgtgtgcttagacctgacgctgggaggagatgctgccacctaggttacttgtaggaccctatacggcaacctcctttgccaggaactatttataaacatcctgcaggaaaatggtaagcccttggttaaatttattggcttcatttatgtatctcacaacacttcttttctgttttagttctaggaatagaaacttacttttggaaatacagtacctgcccgggcggccgctctagaactagtggatcccccgggctgcaggaattcgatatcaagcttatcgataccgtcgacctcgagggggggcccggtacccagcttttgttccctttaatgagggttaattgcgcgcttgggcgtaatcatggtcatagctgtttcctgtgtgaaattgttatccgctcacaattcc

SEQ ID NO: 740 - DNA, 501 bp, Homo sapiens
  misc_feature 464, 467, 501: n = A,T,C or G
cggccgcgaatcgactcctatagggcgaattggagctccaccgcggtggcggccgcccgggcaggtacttgccaagatctcactcctcagcagctttttatttctaaatttaagcttttggttactgaaagtttacagcagttctagactcctattctttagcattccgttacgtccagaccatgtgacaacctccattctacaaatatgtaaccacaaagaaggtgagtggggaggcaataagaacccagactaacagaacatcagaaaagctggcatacgcacacataaagaagggggagaatataggactatatgggagggaggaaggtcacagaaaatgattacggttttgatgttgtatttgtgaaggtgaggaatactaactatatttctttagtctttgaagatcaccatatttagccattattctatcaactgttaagccttgggtaaacttcatngtncttgcaccacttcaagttacccattggctctgtn

SEQ ID NO: 741 - DNA, 448 bp, Homo sapiens
  misc_feature 88, 100, 103, 104, 113, 164, 185, 191, 221, 243, 273, 286,287, 289, 341, 360: n = A,T,C or G
cctatcgactcctatagggcgaattggagctccccgcggtggcggccgcccgggcaggtaccatggttggaatgataaatgatattgncatttttgttancanngaagtgagnggcatctatgtattttttaaggtatataatgaaattgtgcctaggggagtnataatttactctatgtatttntatatntacttaaatcaatacattcttacagactancttctttagtggtaacatacangccgattttctcactccatgaatgattacngacatgtatccannancggaggtccctcatccaccatttcacccaggtgtcttgctcttatctttcanaagggaaaattggctagcnggtttctctccaccatgtgctgttctccagggactttgggtgaatccaggtgtgggaaagaaggtagcatcagctgtaagattcaatg

SEQ ID NO: 742 - DNA, 498 bp, Homo sapiens
  misc_feature 7, 497: n = A,T,C or G
gcccgcncacttcgactccttagggcgaattggagctccccgcggtggcggccgaggtacgcgggatctgtaattttgacatatataatattttagcagtgggtatttatttctagataaattaaaataataataatgatacagcgcaaaacgataaaagctgaaaggaaaatatggtgaggtataaatgtagaaaggacagagatttctcctccaaatactgtttctcttggcccataatttaatcattaaaatatcaaagataaaattgtagggcaaataaaatatcccacttggacaaaaatcagtagtatttctatacaccaaaaacgttcaagatcagcatcaaatcaagaacatgatgtcattccaaatagccacaaaaagttgaaatacctaggaatatggataaccatggaggtgtgaaagatccgctacaaagagtgctacaaaatactgctgaaaggaaattcaaggacaaccacaaataaagtgtna

SEQ ID NO: 743 - DNA, 488 bp, Homo sapiens
  misc_feature 15, 27, 31, 33, 406, 453, 475: n = A,T,C or G
cctatcactacttanggcgaatggcgnttgnanctccccgcggtggcggccgcccgggcaggtacatgccaggcacaaactggagtcacagatgccacactgactatcacattgtcatcatactcagagagagaaaggtgtatacacccagtattttcttatgttttctctatacttccatatccccacccccattatcccccgagacattcccagttggaagtcagttgcttatgggaaactggctgcagggggatcagcccacctgtaacacacggaaaggcagagaaacaatgagtcatggatttgagtgcaaacaagcccagtcctgctacagagagttacggaaaaaatctcactgttgaagagagacatctataagagaggtgaggaaaatgactgatanatccttttacaatattctaggggtagtctgtctgtgggagggggcanggaattctatggggaactcttntgtacctcggccg

SEQ ID NO: 744 - DNA, 470 bp, Homo sapiens
  misc_feature 3, 6, 421: n = A,T,C or G
ttnaancccttaacgactcctatagggcgaattggagctccccgcggtggcggccgaggtacgcgggggtttcctgcgtttgtagatggaaggaagaacttgtgtgcttagacctgacgctgggaggagatgctgccacctaggttacttgtaggaccctatacggcaacctcctttgccaggaactatttataaacatcctgcaggaaaatgtcagagatgggaagaaacaagaactttgacatgcttggtgttcttgcccaagctttgaagaagtttacaaagtctatatgtcagaatacacatttcccaccttgcccaacagtagaaaaacataagaagagaaaaacattaaaaaatgacaaggaagttaatggaagtcagcaatgtgatggtgtttgggagggtgggagccttcagnaaggtaattaaatgcccttgtaaggaagaggcccagagtagccttgcgc

SEQ ID NO: 745 - DNA, 486 bp, Homo sapiens
  misc_feature 7, 354, 389, 406, 439, 449, 453, 465: n = A,T,C or G
ggccgcnaatacgactactatagggcgaattggagctccccgcggtggcggccgaggtacagagagttcccatagactcctgccccctcccacagacagactaccctagaatattgtaaaaggatctatcagtcattttcctcacctctcttatagatgtctctcttcaacagtgagattttttccgtaactctctgtagcaggactgggcttgtttgcactcaaatccatgactcattgtttctctgcctttccgtgtgttacaggtgggctgatccccctgcagccagtttcccataagcaactgacttccaactgggaatgtctcgggggataatgggggtggggatatgngaagtatagagaaaacataagaaaatactgggtgnatacacctttctctctntgagtatgatgacaatgtgatagtcagtgtggnatctgtgacnccancttgtgcctggnatgtacctgcccggggcggcc

SEQ ID NO: 746 - DNA, 488 bp, Homo sapiens
ggccgctaatacgactactatagggcgaattggagctccaccgcggtggcggccgttcctagtcacatctgttgttgcagcatgttatcagtagagcctccttttactcttaaaaatgccctggtttggatgatcgatcatacctgcccccatccccacccccccgcgtacctcggccgctctagaactagtggatcccccgggctgcaggaattcgatatcaagcttatcgataccgtcgacctcgagggggggcccggtacccagcttttgttccctttagtgagggttaattgcgcgcttggcgtaatcatggtcatagctgtttcctgtgtgaaattgttatccgctcacaattccacacaacatacgagccgggagcataaagtgtaaagcctggggtgcctaatgagtgagctaactcacattaattgcgttgcgctcactgcccgctttccagtcgggaaacctgtcgtgccagcttgcat

SEQ ID NO: 747 - DNA, 457 bp, Homo sapiens
  misc_feature 5, 12, 413: n = A,T,C or G
gcccnatcactncttagggcgaattggagctccccgcggtggcggccgcccgggcaggtacgcgggcattggtgaatgagaatgagctactgaaaacaaaaagagggtcttctactcagcctctacccctaatatttatatcagaagcagagattaactgtccttactcattcacacgttaatggaagagaaggaagtttcctaaaaaaaatcctcccgctccaccctgcaaactttatgtttttctgttacataatcaggtaggggcaagacctaaactattttgaattggtggtgttgaggctaaattctctgctattgacagaattgagaatgtgatcaatttcagagtagcatgttacaaattttgtcccaatttcaatggggagaattataacaaatcagtaggtggntggcagaatctgttcttactttcctcccatccagtgactaggga

SEQ ID NO: 748 - DNA, 483 bp, Homo sapiens
taatacgactactatagggcgaattggagctccccgcggtggccggccgcccgggcaggtacctcctccctatgcatctgctgtgggaagtgtgggtaactcacagatgatgccacagggcatgtattcaggcaccacaggcagcagtgaatgaatgaagtgaaatggtatttatccatttcctggaaaggtccagggtttggctctgcagggccaagagaacagctttagttgtgccttaacccagtcctggagaagccagcaggccgtaatcacggggaggaaacccatcttttaagggctcctcgctcaggtggtgacaaggtgaggtggtcatctatgctgtctttatcagtatctgtcctaaatactgtgctctgacattgatgctaatattccatattatcagggcttctgtggtgtttaggcctctaatttttctcttcagtaaggggaataacttttgcttgtgtcagccgcaag

SEQ ID NO: 749 - DNA, 502 bp, Homo sapiens
  misc_feature 53, 185, 255, 339, 352, 359, 364, 397, 443, 475, 483: n = A,T,C or G
gcctatcactacttagggcgaattggagctccccgcggtggcggccgcccggncaggtacatgtcaaaggaaaaacacgtgaaagatgaattcagccaaacccaccagtgttcaacctcagcctaatcaatctcatactcctagaggcttaagtatcagcaggtaagatcgtgatgacctgtctntgaggctccagacaataatttctaactgccaactggaaatccttatatggttaggctgccaacatcccanggaacaggaccaaaataaaaagcatcactcattatcctactgcaattttcctcttccctttgtcaaatgggaatgatctttacnatcatgatccttnattgcanccagnacagaaatcatgaatgtcatctatggccccttnctatcactccgggctccaattagttgtcctatctgccccttcccgntcttccttccatcttccataatgcccaagctngtctattnacctgtttcattgattttt

SEQ ID NO: 750 - DNA, 486 bp, Homo sapiens
  misc_feature 7, 17: n = A,T,C or G
ggccgcnaatacgactnctatagggcgaattggagctccccgcggtggcggccgcccgggcaggtacaagagctcccatttccccacatcctggatgatacatgttatttagacattctaatttcttttccaatccagtaagaacgacatggcaactcattatattcatttgcatccactctattgctattgagattaagggcttttactgtttttcttatatttcttggccacatggcttcattttctgtgaattgcctttcttatggtcctttcatggttaaaacagccctttagaagactcggattttaaggttggattaggggttgggatttgagagttttacaccatggccatgcctcgtttccctaagttatcattaaaatgctcagcctccacagcccatatccatgcatatcacccaggttgtcccagaacattcaagaacttactgctcttgctttgaatgtcctggtaggttccca

SEQ ID NO: 751 - DNA, 494 bp, Homo sapiens
  misc_feature 3, 273: n = A,T,C or G
ccnaacactacttagggcgaattggagctccccgcggtggcggccgcccgggcaggtacgcgggagtgactaaatttgtaggaatgatattttcatgggattactcaatctcacccaccattagttgcaggtgacaagaaagctaagttggcagatgtttgtgctagaagctgtgggtttacgtctcctttgtgcatgtgttccagacataccagtggcttggtatttaaacatcatgctcaggtgtgcagggtagtttttgagttataatangtatgcaggcgctgtgggattacttggttgtttatgtaaaaattattttgcactcacttctgaaatgagtgttagtagaatcatctttagaggaggttccaaggcattgaactgagatacctgcactgtttgctgtaaatttaagcttaaaattgaaaccaggttatcagcatttcatgccaggagagagtgggcatgaatgatttcaggaaatgaagagc

SEQ ID NO: 752 - DNA, 491 bp, Homo sapiens
  misc_feature 30, 31, 92, 112, 302, 447: n = A,T,C or G
cccgcaacttctactatagggcgaattggnnctccccgcggtggcggccgcccgggcaggtacgcgggtaagtttaaaatcaaaagcaaganatatgatacttgcagctcanaaagcagcaggacttcggtgggttggaacgcaactcttcttgctgttgtcccaggtgatttttcatcaaccaagtcttagatcaatcaattacacaaatatgacactattacatctttcttctggagttatctttctgttggtctaatactcagatgcttctgagccacgcaaagtaaaagccccaggtngaatatccatgagatgggactgattgtgcttccatggtttacctatctcagtggcctgccctcctggccctgtgaaatcagtttggaaacttgcccttcttcttcctcctggtggtcttattaaacttttccaaggttttggatnggttctacaaaacccaagaatttttcattgacattttttcacct

SEQ ID NO: 753 - DNA, 453 bp, Homo sapiens
  misc_feature 1, 2, 11: n = A,T,C or G
nnatacgactnctatagggcgaattggagctccccgcggtggcggccgaggacgcgggagtttttcagaatcaggcctgctttgtccctaaatgctttcttatttccccagagcccttattggatttaagccccatatcatatctcacatacctgagacagacataccacagtgaaccctgcatgtccttgtaagttctttttccgtgcctagaagttgcagaagaccaaggaaccttggaagtgacttactcttttgcttcataaagttgctttaaaacagcctttattttaattattaacaaggtatgtcacacatttttaaattttaaggttaatttagtcattaattctgtcaaacaagtgttctttggaagctagttgtcttcaatgtcttttacttggagttacttgaagtttgcttaaactttattcacttggagtagaacttccc

SEQ ID NO: 754 - DNA, 462 bp, Homo sapiens
  misc_feature 3: n = A,T,C or G
ggnccgctatcactactatagggcgaattggagctccccgcggtggcggccgcccgggcaggtaccaggttcaaatagtcagcagctcatcataatcaatgagcgaggacataaagtaggaaaaatgcatcaccatggtgggcaaggaaagcaagttattggaggcacatgttaacacataaaatataaaattaatatgatcaccactggaaaggcttgcctgagcccacagtttgaatgcctacaataagatgagatgcacaacaaaaagcaagagaacctgatcaagtgggtgacctggccatggtgctctcatcagtggggacccaaatgcttatgtggactcaccaggtatcgaattagacatgaatagggagtgtttgttgtgatggcaagaaactatataatcaaatgaatacaatgaaactttaaaaataattgtaaggaatctttacaccagcc

SEQ ID NO: 755 - DNA, 457 bp, Homo sapiens
  misc_feature 2, 10: n = A,T,C or G
cnaatcactncttagggcgaattggagctccccgcggtggcggccgaggtacttttaaaacattttttccttgagaaatcattgcctaaatctcatacatatgtgcttctctgcagaaaaaaaaaatgaaataaaataaaaatctttatttccaatgagctaatgaggaaaaaggggatgatgaaaaaacagggaggtgggaagcaatttggaaatggaaagaatgctgaatacctacatgatgcctaatttagaagaacattctggtatgtaggacattattttcaactctatcacttaccggcagatttttttttatatgcagatgtatctctactctctaaagatgtacatgtgtacacttatagttgagagccaagtctcccttatcattggtgaatgagaatgagctactgaaaacaaaaaggaggggtcttctactcagcctctacccctt

SEQ ID NO: 756 - DNA, 457 bp, Homo sapiens
  misc_feature 136, 193, 195, 196, 217, 218, 224, 244, 251, 301, 317, 376,378, 398, 408, 424, 436: n = A,T,C or G
tatcactacttagggcgaattggagctccccgcggtggcggccgcccgggcaggtacactgcacaccacagggtggctgcactttttgggtggtggggtggggatgggggcaggtatgatcaatcatccaaaccanggcatttttaagagtaaaaggaggctctactgataacatgctgcaacaacagatttnanntaggaaactggcccgctctannaactanttggatcccccgggctgcangaattcnatatcaagcttatcgataccgtcgacctcgagggggggcccggtacccancttttgttccctttantgagggttaattgcgcgcttggccgtaatcatggtcatagctgtttcctgtgtgaaatngntatcccgttcacaatttcanacaacatacnagccgggagcataaantgtaaagcctgnggttgcctaatgagttcagct

SEQ ID NO: 757 - DNA, 473 bp, Homo sapiens
  misc_feature 2, 4, 146, 214, 221, 338, 339, 340, 341, 346, 375, 382, 411,423, 425, 458: n = A,T,C or G
gngnctatacactactatagggcgaattggagctccccgcggtggcggccgaggtacgcggggtgaagggctctctgtatactgctgaagattctatagtttctcctgaaatccatgagggagccccctgaaggattttggccagnaaagtgtcatgaatcaaatttctattttaagaatagtatcgaggcagcaatgtcaaagtttggtttanaaaatanggatggttcctgtaatcccagaacttttggagaccaaggcgggaggattgcttgagtccaggaatttgagtccagcctgggcaacatggtgagacctcatctctgccaaaaaaaaannnnaaaanaaaggtccctgcccgggcggccgctctanaactagnggatcccccgggcttgcaggaattcgatntcaagcttatcnanaccgtcgacctcgagggggggcccggtacccancttttgttccctttt

SEQ ID NO: 758 - DNA, 490 bp, Homo sapiens
tccctatcactacttagggcgaattggagctccccgcggtggcggccgggggccattgagactgccatggaagacttgaaaggtcacgtagctgagacttctggagagaccattcaaggcttctggctcttgacaaagatagaccactggaacaatgagaaggagagaattctactggtcacagacaagactctcttgatctgcaaatacgacttcatcatgctgagttgtgtgcagctgcagcggattcctctgagcgctgtctatcgcatctgcctgggcaagttcaccttccctgggatgtccctggacaagattttactcccataacccaggcagaagtacctcggccgctctagaactagtggatcccccgggctgcaggaattcgatatcaagcttatcgataccgtcgacctcgagggggggcccggtacccagcttttgttccctttagtgagggttaattgcgcgcttggcgtaatcatgg

SEQ ID NO: 759 - DNA, 485 bp, Homo sapiens
  misc_feature 387, 388, 391, 425, 428, 483: n = A,T,C or G
gccctatcactacttagggcgaattggagctccccgcggtggcggccgaggtacgcgggggtagatggaaggaagaacttgtgtgcttagacctgacgctgggaggagatgctgccacctaggttacttgtaggaccctatacggcaacctcctttgccaggaactatttataaacatcctgcaggaaaatgcagtgaagtagaagagacaggggatatcccagaaggttatgcaaaacatcaagagaagatgagaggtcagagatgggaagaaacaagaactttgacatgcttggtgttcttgcccaagctttgaagaagtttacaaagtctatatgtcagaatacacatttcccaccttgcccaacagtagaaaaaaaaaaaaannaanaaaaaaaaaaggttcctgccccgggcggccgctntanaactagtggatcccccgggctgcaggaattcgatatcaagcttatcgataccgcnac

SEQ ID NO: 760 - DNA, 469 bp, Homo sapiens
  misc_feature 8: n = A,T,C or G
ggcgaatnggagctccccgcggtggcggccgaggtacgcgggggtatttaaaggaggaaagagcgatgaatctacatggaaaattaggtgaaggagtggaaaattgcatcggccatataagtccaactacatatggatctattcctccatgaaaaactggaaatttcactttaacatggtatttgcacagtcagcagcaattcttaacaatgtctttcttgctgctgacatcatattttttcaccccaataatagaggataatttggaccctttctgcttttcatttaattctgtctatttctgattgcacttctcctacttctcttcccacatgagagatgattgtattacttgtggaatatgatgaatcacttcaacaagaaatatgtggcatctggttaagtttctttctagcatataaattaagcttgaatcacagctgggtcaaacattttctttgaaacgggg

SEQ ID NO: 761 - DNA, 499 bp, Homo sapiens
  misc_feature 3: n = A,T,C or G
ttnggcgccgtatcgactcctatagggcgaattggagctccccgcggtggcggccgaggtacacttatagttgagagccaagtctcccttatcattggtgaatgagaatgagctactgaaaacaaaaagagggtcttctactcagcctctacccctaatatttatatcagaagcagagattaactgtccttactcattcacacgttaatggaagagaaggaagtttcctagaaaaatcctcccgctccaccctgcaaactttatgcttttctgttacataatcaggcaggggcaagacctaaactattttgaattggtggtgttgaggctaaattctctgctattgacagaattgagaatgtgatcaatttcagagtagcatgttacaaattttgtcccaatttcaatggggagaattataacaaatcagtagtggttggcagaatctgttcttactttcctcccatccagtgactaggatttggaaagcagtgttttc

SEQ ID NO: 762 - DNA, 492 bp, Homo sapiens
  misc_feature 2, 13, 423, 488: n = A,T,C or G
tnccctatcactncttagggcgaattggagctccccgcggtggcggccgaggtacacttatagttgagagccaagtctcccttatcattggtgaatgagaatgagctactgaaaacaaaaagagggtcttctactcagcctctacccctaatatttatatcagaagcagagattaactgtccttactcattcacacgttaatggaagagaaggaagtttcctagaaaaatcctcccgctccaccctgcaaactttatgcttttctgttacataatcaggcaggggcaagacctaaactattttgaattggtggtgttgaggctaaattctctgctattgacagaattgagaatgtgatcaatttcagagtagcatgttacaaattttgtcccaatttcaatggggagaattataacaaatcantagtggttggcagaatctgttcttactttcctccctccagtgactagggatttggaaagcagtgntttt

SEQ ID NO: 763 - DNA, 504 bp, Homo sapiens
  misc_feature 2, 3, 4, 26, 255, 383: n = A,T,C or G
gnnnaggcgagcgccgtatacgactnctatagggcgaattggagctccccgcggtggcggccgcccgggcaggtactttttttttttttttttttttgcagagatgaggtctcaccatgttgcccaggctggactcaaattcctggactcaagcaatcctcccgccttggtctccaaaagttctgggattacaggaaccatcctattttctaaacaaactttgacattgctgcctcgatactattcttaaaatanaaatttgattcatgacactttcctggccaaaatccttcagggggctccctcatggatttcaggagaaactatagaatcttcagcagtatacagagagcccttcaccccgcgtacctcggccgctctanaactagtggatcccccgggctgcaggaattcgatatcaagcttatcgataccgtcgacctcgagggggggcccggtacccagcttttgttccctttagtgagggttaattgcgccgcttgg

SEQ ID NO: 764 - DNA, 392 bp, Homo sapiens
gtaataccgactcactatagggcgaattggagctccaccgcggtggcggccgcccgggcaggtacacaaaaaaatgccccattatccctttgctgtgggagcagtgctgatgctagtggctcgctctttggtcctggctctgactccaccagcagtaacaaccagcagtggtggaggctgtgggtgcaatagacttttatcatggccactcttctggaagatgtcactgccagcaactcctgactcagctttggcagcagctgccgcatcgaagactgttgtgagtggggaaaggtaatggggctgcaggaatgtgaggatgtagggactttgggacctccaaggcaggatgcagtctagacctccaaggcttggctttcaaaatggcacct

SEQ ID NO: 765 - DNA, 413 bp, Homo sapiens
  misc_feature 5: n = A,T,C or G
gagcnctccgtaataccgactcactatagggcgaattggagctccaccgcggtggcggccgcccgggcaggtacttgccaagatctcactcctcagcagctttttatttctaaatttaagcttttggttactgaaagtttacagcagttctagactcctattctttagcattccgttacgtccagaccatgtgacaacctccattctacaaatatgtaaccacaaagaaggtgagtggggaggcaataagaacccagactaacagaacatcagaaaagctggcatacgcacacataaagaagggggagaatataggactatatgggagggaggaaggtcacagaaaatgattacggttttgatgttgtatttgtgaaggtgaggaatactaactatatttctttagtctttga

SEQ ID NO: 766 - DNA, 408 bp, Homo sapiens
gagcgcgccgtaataccgacctcactatagggcgaattggagctccaccgcggtggcggccgaggtacgcgggggtatttaaaggaggaaagagcgatgaatctacatggaaaattaggtgaaggagtggaaaattgcatcggccatataagtccaactacatatggatctattcctccatgaaaaactggaaatttcactttaacatggtatttgcacagtcagcagcaattcttaacaatgtctttcttgctgctgacatcatattttttcaccccaataatagaggataatttggaccctttctgcttttcatttaattctgtctatttctgattgcacttctcctacttctcttcccacatgagagatgattgtattacttgtggaatatgatgaatcacttca

SEQ ID NO: 767 - DNA, 405 bp, Homo sapiens
  misc_feature 30: n = A,T,C or G
gagctttcgtaataccgactcactataggngcgaattggagctccaccgcggtggcggccgaggtacgcggggtccagtggacgccagggatctgaagggcaaaggcaagggctgctggagcctgcatcatgtcgagtccgcagaggaggaaggctatgccctgggcactgtcactgcttctcatgggcttccagctcctggtgacttatgccgctctagaactagtggatcccccgggctgcaggaattcgatatcaagcttatcgataccgtcgacctcgagggggggcccggtacccagcttttgttccctttagtgagggttaattgcgcgcttggcgtaatcatggtcatagctgtttcctgtgtgaaattgttatccgctcacaattccacacaacatt

SEQ ID NO: 768 - DNA, 400 bp, Homo sapiens
gagcgcgcgtaataccgactcactatagggcgaattggagctccccgcggtggcggccgcccgggcaggtacagaaaaactcatttcagttaaggggaaaaaaagagtaagtgagccaggattacagtccaactccagtcaaagttagtataagaaataagagaataaatagatcaacatcctcacagacaatgaaagcacaccggaaggacatgaccacaaggcagataaaaacctaatatttgccaaaaaataaaatgcaaatatgacaggaaatttatattaattagtacctcggccgctctagaactagtggatcccccgggctgcaggaattcgatatcaagcttatcgataccgtcgacctcgagggggggcccggtacccagcttttgttcca

SEQ ID NO: 769 - DNA, 405 bp, Homo sapiens
  misc_feature 5: n = A,T,C or G
gagcnccccgtaataccgactcactatagggcgaattggagctccaccgcggtggcggccgcccgggcaggtaccaaaagaatgttcatagcagcattatttgtcatagtcaagagctggaagcaacccagttgtgcatcaatggtagaatggatgactaaattgtagtgtattcttacaataaaatactatagagcaatgaaaataaataaactatggctatatgcaacaacatggataaatcttaccaacaatgttagacaaatgtagccaaaccaaaaaatacacatgttctatgaatccatatatgcaaggttcacaataggtgatagtagctactcttttgggaaggagtgaggaaaggactgagagagtattgcagagggggctccgggtgtttgtaat

SEQ ID NO: 770 - DNA, 425 bp, Homo sapiens
  misc_feature 5, 6, 7: n = A,T,C or G
gagcnnnccgtaataccgacctcactatagggcgaattggagctccaccgcggtggcggccgcccgggcaggtactttcttggccagacatcatacatctgcctctatagaatccctcattcagggggtcactgatgaagtgtaaggccctagggttgagcttcagctccactgtggggtaggtttttaccttctccaaagcttcattttctcatttgtaaaatgcagataatgtgtgtcttgccaaactctaagggctgttgtaagaggtttaaatggcataacagatagaaatgattcaagctattaagtcctttataaatgtgtggaatgttgtttctctgtataaatcttagcttttctattatctcaacaaaggtgattttcttgttaagaaggtttagtagccaggcattggacaactc

SEQ ID NO: 771 - DNA, 400 bp, Homo sapiens
gagcgcgcgtaataccgacctcactatagggcgaattggagctccaccgcggtggcggccgcccgggcaggtacttaggactatggagaaacaatggaagacattaattctgcttgtcttgatggtaagggtggggatgaaaatacagatcgaatttgggggagcatgttaaggttaggggaatagagatagcttatatttagaacaagttagtagagactgtatgattttccaaatagagaagggtaaaaagacattccatagaggaagaaaattacatgcaaaaccacagagaccttagtttataaagagtaactgggtatggccgggtgcggtggctcacgcctgtaatcccggcactttgagaggctgaggagggttgatcatgaggtcaggagat

SEQ ID NO: 772 - DNA, 395 bp, Homo sapiens
gagcgcgcgtaataccgactcactatagggcgaattggagctccaccgcggtggcggccgaggtacttctgcctgggttatgggagtaaaatcttgtccagggacatcccagggaaggtgaacttgcccaggcagatgcgatagacagcgctcagaggaatccgctgcagctgcacacaactcagcatgatgaagtcgtatttgcagatcaagagagtcttgtctgtgaccagtagaattctctccttctcattgttccagtggtctatctttgtcaagagccagaagccttgaatggtctctccagaagtctcagctacgtgacctttcaagtcttccatggcagtctcaatggcccccggccgctctagaactagtggatcccccgggctgct

SEQ ID NO: 773 - DNA, 398 bp, Homo sapiens
gagcgcgcgtaatacgactcactatagggcgaattggagctccaccgcggtggcggccgaggtacccaagccagaaagtgagcccactctgactctcatgaactgggtcctgattcctttaaggttattttgcctaagtatatttccactctggcctctcctttccatgcccactgcaaccaccaaatgtgccacatcccacccagataagtacctgcccgggcggccgctctagaactagtggatcccccgggctgcaggaattcgatatcaagcttatcgataccgtcgacctcgagggggggcccggtacccagcttttgttccctttagtgagggttaattgcgcgcttggcgtaatcatggtcatagctgtttcctgtgtgaaattgttatcc

SEQ ID NO: 774 - DNA, 421 bp, Homo sapiens
  misc_feature 16, 214, 421: n = A,T,C or G
gagctttcgtaatacngactcactatagggcgaattggagctccaccgcggtggcggccgcccgggcaggtacgcggggagacctgacgctgggaggagatgctgccacctaggttacttgtaggaccctatacggcaacctcctttgccaggaactatttataaacatcctgcaggaaaatgcagtgaagtagaagagacagggatatcccanaaggttatgcaaaacatcaagagaagatgagaggtcagagatgggaagaaacaagaactttgacatgcttggtgttcttgcccaagctttgaagaagtttacaaagtctatatgtcagaatacacatttcccaccttgcccaacagtagaaaaacataagaagagaaaaacattaaaaaatgacaaggaagttaatggaagtcagcn

SEQ ID NO: 775 - DNA, 486 bp, Homo sapiens
  misc_feature 7, 11, 229, 374, 402, 409, 417, 419, 423, 430, 433, 436,438, 442, 445, 463, 464, 467, 476, 480, 481, 482, 484, 486: n = A,T,C or G
gccctcncatncttagggcgaattggagctccccgcggtggcggccgaggtaccagcacgtgcagaaaagaaagagtctccgcttgtctttgtctgattctcctgtcctctccatggaagttacattttctgtaaaggatgagctgaaaattctcctggtcgttgccagttgaacttctgctgtgctctgggaaggcattctcactctgtttatgttgtctaagtgcanacatggatgtgcaggtttgctagaacctcctgaggatgtgcaatggttctgttcatgcctgaatcagttcttttgggagtggacattctttctctccctcatgcacagcctcaggcacatggcttgagctatggcggcacgcagnatggccatcacccaggtacctgcccggnaaattanataatttnantcanttttaanaanatntnctantcnaatctcatttctgatttnnctntatatatantatnnncntn

SEQ ID NO: 776 - DNA, 484 bp, Homo sapiens
  misc_feature 7: n = A,T,C or G
ggccgcnatacgactcctatagggcgaattggagctccaccgcggtggcggccgaggtacacttatagttgagagccaagtctcccttatcattggtgaatgagaatgagctactgaaaacaaaaagagggtcttctactcagcctctacccctaatatttatatcagaagcagagattaactgtccttactcattcacacgttaatgggaagagaaggaagtttcctagaaaaatcctcccgctccaccctgcaaactttatgcttttctgttacataatcaggcaggggcaagacctaaactattttgaattggtggtgttgaggctaaattctctgctattgacagaattgagaatgtgatcaatttcagagtagcatgttacaaattttgtcccaatttcaatggggagaattataacaaatcagtagtggttggcagaatctgttcttactttcctcccatccagtgactaggatttgg

SEQ ID NO: 777 - DNA, 494 bp, Homo sapiens
  misc_feature 2, 3, 4, 5, 7, 11, 19, 29, 34, 108, 109, 110: n = A,T,C or G
gnnnngntttntttccctnaatttctcantatcnggcgatttgtttctccccgcggcggcggccgaggtacagtggtttacgcctgttaatactatgcaccttgggannncgaggattacaggcgtgacccaccgcgccagaccacttgcaaatatttcacagagccaatgtgtaacttgagtggtgcaaggacatgaagtttacccaaggcttaacagttgatagataatggctaaatatggtgatcttcaaagactaaagaaatatagttagtattcctcaccttcacaaatacaacatcaaaaccgtaatcattttctgtgaccttcctccctcccatatagtcctatattctcccccttctttatgtgtgcgtatgccagcttttctgatgttctgttagtctgggttcttattgcctccccactcaccttctttgtggttacatatttgtagaatggaggttgtcacatggtctgggacgtaacggaat

SEQ ID NO: 778 - DNA, 479 bp, Homo sapiens
gccctatcactacttagggcgaattggagctccccgcggtggcggccgcccgggcaggtacgcgggggtagaacaggcgatatcttcaccatgcgcacaatgaaatcaatactcagagaaggcagataattctccacgaagccagaaaactaataaatgaacaacttgggtgaaatgtcccaccagacggtgtgatatttagtagcccagaaagctgccaaggggttgaatgacactatctgaagatatgaaccagtttgctctccatagggaggatttcatcaacaggaaacagatgcctggaaggcattggatttgctaagtgtctatgccatatgattctgctgtttgcgtttgatttagaatgctgagctgactcaaagtcaaactgtaagtacctcggccgctctagaactagtggatcccccgggctgcaggaattcgatatcaagcttatcgataccgtcgacctcgagggg

SEQ ID NO: 779 - DNA, 486 bp, Homo sapiens
  misc_feature 1, 13, 14, 23: n = A,T,C or G
ncgcgcccgatcnnctactatanggcgaattggagctccccgcggtggccgagcggccgcccgggcaggtactgttactatccttaagatgagggaactgaggaaccaagaggttaagcaatttgcctttggttcacatagctaatgatgtggagatttgaacttaggctgtttgtctcccaagcctatgttcttaaatttggggaaatagtaaagataatttccacaatgtgaagacagttagcagccttaaggatgaaaggatggtgcaaataccatgcccagtgagtgacagagtatcaaggctggtagagcctgatgaaagcacaagttttcagaaaagagggaaacaaacaattcctataaagttaagaaaatcacattgacaccagacttctcattggtagagaccacaaagcccttttcaaaagtgggtcaaactggcaggctgagcacatatccttccctccctttctgtcaaaagat

SEQ ID NO: 780 - DNA, 490 bp, Homo sapiens
  misc_feature 489: n = A,T,C or G
cggacgcgcttatcgactcctatagggcgttttggagctccccgcggtggcggccgcccgggcaggtaccaaaagaatgttcatagcagcattatttgtcatagtcaagagctggaagcaacccagttgtgcatcaatggtagaatggatgactaaattgtagtgtattcttacaataaaatactatagagcaatgaaaataaataaactatggctatatgcaacaacatggataaatcttaccaacaatgttagacaaatgtagccaaaccaaaaaatacacatgttctatgaatccatatatgcaaggttcacaataggtgatagtagctactcttttgggaaggagtgaggaaaggactgagagagtattgcagagggggctccgggtgtttgtaatttctatttcccagtgcaggtgtggtttgcatgagcatgttcactttgtggaaattcattgagctgtaactaaatatacagaattatttnt

SEQ ID NO: 781 - DNA, 921 bp, Homo sapiens
  misc_feature 395, 544, 572, 619, 659, 666, 709, 730, 731, 739, 740, 742,745, 746, 756, 768, 772, 774, 790, 818, 834, 836, 845, 848,856, 870, 880, 906, 911, 912, 918: n = A,T,C or G
cgcgcgtaatacgactcactatagggcgaattggagctccccgcggtggcggcccgaggtactttttttttttttttttttttgtttgtttgttttttttttgagacagagtctcgttctgtcacccagactggagtgcagtggtgcgatctcggctcactgcaacctctgggctgggcaacggtgtgagacttggactcaaaacacacacacacacacacacacgaagcgggaaaaattctggtgcttcgcaaagtcatcacaatacaaatcaaaataaatttgtcttaagccacttagacaatactaaccaactttcaccaggtgtaatccatgcacaaccaaaaccttttactgtgagagcgaagctcttatggagttctaccctcatcagngatctccattataaggatataaaagactagtagattctattcatgaaaccatttttcttggcttggtattaattttggtaagagatgagttaccaagttagaaattagtgtggtcccaaattaaaacattaaaaagaaccacctaaggnaaatataaaatatgtgatataaaattgncaaaaatgaatcctttcagaccttacatcattttcaatgggaagganttattcagtcattggttaacagctgggttaatattatgtngaaaaancccaaaatacctggcccgggccgggccggtttaaaaactaagngggattcccccggggcttgcnnggaatttnnanttnnaaaccttatncgataccggccnaccncnaaggggggggccccgnaccccacttttgttcccctttaatgggngggttaaatgggcccntngggggaaanaangggcaaanctggtttccctggnggaaaattgnattccctcccaaatttccaccaaaanacgannccgggnggg

SEQ ID NO: 782 - DNA, 892 bp, Homo sapiens
  misc_feature 6, 12, 73, 105, 147, 197, 326, 378, 387, 390, 396, 460, 481,563, 602, 635, 641, 655, 667, 673, 677, 701, 710, 718, 772,777, 783, 789, 799, 808, 838, 864, 872, 878, 882, 891: n = A,T,C or G
cgcgcntaatcngactcactatagggcgaattggagctccccgcggtggcggcccgcccgggcaggtactttntttttttttttttttttttttttttatttttngagacagctttctattctgtcacccaggctggaggccattanaaaataatttgtgctgttcttataaatatgaagaactttggaaatatctntgtgacatcggatgcagtttgtgtttgggaagtatcactgataagaaataatactaaaaattagcaaccccattgaaaagtgggcaaaggacatgaacagacacttttcaaaagaaaaaattcatgcanccaacaaatatatgacaaacagctcaacatcactgatcattaaagaaatgcnaatcaaaanccncattgngatccatctcactccagtcagaaccaccattactaaaaagttaagaaacagggtccggcacggnggctcacgcctgtaatcctancactttgggaggccaaggcaggtggatcacctgaggtcaggagttcgagaccagccctgccaacatggcgaaaccccatctntagtaaaaatacaaaaattagctgggcatggtatattgnggggaaggcggatatggcaagcccccccagttntaattnccagtttgccattnaaatagccccangggganggtnggatcaacaatgttctgaattgtnaaatgaatngggaaatncttggccctaagtgaagttttctcattagggtataggatgtttataaattcaanacttngatttntaaganccttgaaaanttttccganaaatggaatttttttaaataagctttaacntcaataacctggaattttgaattttntgggaggntttttnagcnttttttttnt

SEQ ID NO: 783 - DNA, 895 bp, Homo sapiens
  misc_feature 3, 9, 766, 797, 798, 799, 805, 851, 869, 876, 885, 889: n = A,T,C or G
cgncgactnctatagggcgaattggagctccccgcggtggcggcccgaggtactgtatttccaaaagtaagtttctattcctagaactaaaacagaaaagaagtgttgtgagatacataaatgaagccaataaatttaaccaagggcttaccattttcctgcaggatgtttataaatagttcctggcaaaggaggttgccgtatagggtcctacaagtaacctaggtggcagcatctcctcccagcgtcaggtctaagcacacaagttctcccgcgtacctgcccgggcggccgctctagaactagtggatcccccgggctgcaggaattcgatatcaagcttatcgataccgtcgacctcgagggggggcccggtacccagcttttgttccctttagtgagggttaattgcgcgcttggcgtaatcatggtcatagctgtttcctgtgtgaaattgttatccgctcacaattccacacaacatacgagccgggagcataaagtgtaaagcctggggtgcctaatgagtgagctaactcacattaattgcgttgcgctcactgcccgctttccagtcgggaaacctgtcgtgccagctgcattaatgaatcggccaacgccccggggagaggcggtttgcgtattgggcgctcttccgctttcttgctcacttgactcgctgcgctcggtcgtcggcttgcggcgagcggttcaactcacttcaaaggcgggaataccggtattccccagaaatcaggggataacnccaggaaaaaacattgtgaaccaaaaggccnnncaaaanggcccggaacccgtaaaaaaggcccgttgctggcgtttttccatangctccgccccccttgacnagccttnacaaaaatngacncttaat

SEQ ID NO: 784 - DNA, 473 bp, Homo sapiens
  misc_feature 1, 4, 325, 331, 377, 385, 451, 462: n = A,T,C or G
nctncttagggcgaattggagctccccgcggtggcggccgcccgggcaggtacaagctttaaatgggaataaatcttttataagcctttccatttactttcctgcttattaaaggtgaattgtaatggaaaaccctaaatgtcacagagtctggaaaattgaaataataaggggcagcattctccttaagtggtataacctagtaaaaagtgggcctaatggaaagtccaccgtggaatcatctgtgtttctatgcaacaaaattattttccttctttctctaacaagggaagtagttctgaccaacaaggttggctgtcttaancattgnggtggagagcaatggaaagatgagtgtgtagtgggagcaagcttancagagttnctgaagccattgctttaaatgtcccaccacatctgtaggcctaggggatgccatgcagtcctccanagatagccaangaagctgcaaa

SEQ ID NO: 785 - DNA, 922 bp, Homo sapiens
  misc_feature 464, 496, 534, 565, 588, 600, 628, 654, 664, 698, 708, 727,740, 741, 743, 755, 758, 768, 787, 799, 800, 810, 820, 828,837, 840, 841, 844, 845, 846, 848, 850, 853, 854, 855, 856,858, 859, 862, 864, 869, 871, 876, 882, 885, 886, 896: n = A,T,C or G
  misc_feature 899, 902, 905, 913, 921, 922: n = A,T,C or G
acgcgcgtaatacgactactatagggcgaattggagctccaccgcggtggcggcccgaggtacgtaggggccctttgctgcaagcttaggccagtgtcagctcctgagccactcctgactcagttggaggagactcagtgtccactgccccctgcctggtggagcttggcagcaagtcccaagttttacagtgttgagaccaagtgggcagccatcaccattgaggggtgcccttttgctccccctcgagtccaagttatagtattgcttacttcctacctgaaatagtttatgggtcatgggtccggcttacatcaagccccatagccagtctggttgccccacctaaggtcttggtgctctttgataatagccacaagcttaaatgtattaagtcctgtcctaggaaatgcatgatcttctgctctagaactaagtgggatcccccgggctgcaggaattcnatatcaagcttatcgataccgtcgacctcganggggggcccggtacccagcttttgttccctttaatganggttaaattgcgccccttggccgtaatcatngtcatagctgtttcctggggtgnaaattggtaatnccgcttacaaattccacaacaacatacnaacccggaagcataaaagtgtaaaancctggggtgnctaatgagtgaacctaacttacaatttaattggnttgcgcctanctggccccttttcaaattngggaaaacctgtnntngccaacttgcanttnaatgaaattnggcccaacccccggggaanaagccggtttgnntatttgggcncctttttccntttcttgnttaaatganttnnttnnncntnggnnnntnnggntnggggnanccggntttaanttnntttaaagggnggnaanacnggttttcncaaaaatnn

SEQ ID NO: 786 - DNA, 509 bp, Homo sapiens
  misc_feature 1, 9, 48, 86, 119, 159, 175, 200, 202, 203, 230, 240, 271,276, 283, 301, 320, 326, 329, 331, 338, 362, 375, 386, 396,401, 406, 413, 421, 440, 445, 450, 460, 476, 477, 480, 481,482, 496, 508: n = A,T,C or G
naatcactnctatagggcgaattggagctccccgcggtggcggcccgnccgggcaggtacaaggggagacagcatgcatggtgtgntcagaagagcttgctgaggtgctcggctcttancgttaaaaatgtgatgttggtatatcatcctgatagaaancactgcttcccaaatnctagtcactggatgggaggaaagtnannaacagattcttccgactcactactganttgtttatantacttccccatttgaaatttgggacaattantttgngggcatngctactctgaaattgatnacattcttcaatatcttgncaatancananaatttancctcaacaccactcaatttcaaanatagtttaggtcnttgcccctgcntgattatgtnacacnaaaancttaatngttttgcngggtagaagccgggagganttttnctagngattactttnttttctctatccattnnacnnngatgaatttaaatnagggaccagttnt

SEQ ID NO: 787 - DNA, 471 bp, Homo sapiens
  misc_feature 5, 18, 19, 20, 31, 32, 34, 36, 37, 40, 41, 44, 47, 195, 215,218, 221, 250, 274, 445, 460: n = A,T,C or G
cgtancactacttagggnnnatggcaactcnncntnntgnnggncgnccggccaggtactgccacaggactttcaaaaaggagggggaaaattaatgaaagtgacatgcatcaaacaaatcaaggggcagtgttgaggtcatctccacggagctgtaaactcagaagtgtttcctggtcatatatggtcaattanggtcaagtctgaaataaatntanaanaatgacctaattttccagcttaactcagnagctaaaatccataacactatcanactttccttttaatttatgagatggagtcttgctcttgtcgcccaggttggagtacctcggccgctctagaactagtgggatcccccgggctgcaggaattcgatatcaagccttatcgataccgtcgacctccgagggggggcccggtacccagcttttgttccctttantgagggttaattgcngcgcttggcgt

SEQ ID NO: 788 - DNA, 475 bp, Homo sapiens
  misc_feature 3: n = A,T,C or G
agnccctaacactacttagggcgaattggagctccccgcggtggcggccgcccgggcaggtaccaaccaccagggcccttgcttctgagcaggaagcagctggggaataggctctttctcttaatgacttccaacatagttctctcaaaccttactcctccagaaggccaccctcacctggctatggctacttcagaaaaaacttggcctctggtataatagagcagaatcatcacctcacattctatttcaagccaaagtcaatatctcaaaggctggttctgtgatttatttggcccttgggagctcctactgaaagtgctgaaatgtcgtacctcggccgctctagaactagtggatcccccgggctgcaggaattcgatatcaagcttatcgataccgtcgacctcgagggggggcccggtacccagcttttgttccctttagtgagggttaattgcgcgcttggcgtaat

SEQ ID NO: 789 - DNA, 476 bp, Homo sapiens
  misc_feature 3, 57, 73, 81: n = A,T,C or G
agnccctatcatacttagggcgaattggagctccccgcggtggccgcccgcccggcngggtcctttaaaactngggggccntaggattcattttaaccatttcttgcctcactctcactctgtcactatgtggagtgctctaatccattagggaatatagctcctatatcactggctacccaaatggacctcaaaaaggcagacagagcccatccccagaatatccttggttcttgctggtcacaaggaccaataacatcattaacattgatgtttcagagtcaatacaggtataagaaccttaggtttaggactgtgaataggggagcggtgaaatgaaaatacggccttgaattagtttcactgtcaacatatctcatatttatctagctagggtattttaattctagggtatgttatgtccagaagagaggaatgattttcacccttgccaacatctcagataattttagaca

SEQ ID NO: 790 - DNA, 483 bp, Homo sapiens
  misc_feature 2, 3, 6, 387, 390, 392, 394, 403, 404, 409, 412, 414, 419,420, 422, 423, 434, 438, 441, 442, 446, 447, 448, 449, 451,452, 453, 456, 457, 458, 460, 461, 462, 464, 466, 467, 472,473, 475, 477, 480: n = A,T,C or G
gnnagnccctatcactacttagggcgaattggagctccccgcggtggctcgagcggccgcccgggcaggtactctttatgcacatcagtgtggggccttagtaaccactgtgcaagttgaaactgggcaaagttatcttaataattaatgggaaaacataaacttcttcctgcaatctttaaagacacttgtcagtcaggtgcggtggctcacgccggtaattccagcactttgagaggccaaggtgggcggatcacttgagcccaggggtttgagaacagtttgggcagcatgacggaaccctgtctctacaaagactacgaagggttggccgggagtggtgacatgtgcctatagtcccggctatcgggaggcttgaggtgggangancncnttagcctgnntggantangntacanntnncctttttgatnccantgnncttnnnncnnnacnnnannnangnntttgnntntnaanaaa

SEQ ID NO: 791 - DNA, 467 bp, Homo sapiens
  misc_feature 2, 3, 6, 234: n = A,T,C or G
gnncgntcactacttagggcgaattggagctccccgcggtggcggccgcccgggcaggtacatctctagctgatgattcaaaaaagaagccttttaatctcactccactgatcagctatgatacttaaatgttttagctgtgagcaaaataatatgcattctcaaagagagtatcttcagactccagtggccgagaatctagagttagcaatggaaaaaattagtctcggggcnttcttgtttctgcccacaagttttcaaattaagaacaatgtgtttgcacttaatgaaacaacctctactgctcttcaagaggactcaggataccgattctcgaggcccctggcggtcccctgtaagtacctcggccgctctagaactagtggatcccccgggctgcagggaattcgatatcaagcttatcgataccgtcgacctcgagggggggccccggtacccagcttttg

SEQ ID NO: 792 - DNA, 542 bp, Homo sapiens
  misc_feature 3, 208, 218, 221, 223, 228, 261, 264, 289, 311, 332, 358,376, 378, 379, 383, 414, 415, 462, 477, 480, 509, 518, 542: n = A,T,C or G
cgnaacactactatagggcgaattggagctccccgcggtggcggccgaggtacagatagagtctcactatattgcctaggctgacagagtatttttttccttaattattctttattctcaaatgcagtgaacagtcacagtagcccaccatagggggttcattttcagacattacagtaactaggggaattttattaaggaaccagcngcttaacccntantnggtantaattcttcttttttaaacccaacctccagaanttnattcagaattcatcagtccttcccnatcaggtggcttgtcttttctnggtcccatggatccaatgtanggaattccacaatcacaagttaagtntttttaatcacttcttangnncctnctccccacttctggggatgggtttccctcanntaatcctcttttggtctttcccaggggaaccctggaccacctttttngaaaaggaaggttanttngggaaccaggccttttttttttggaaaanaaattggtnccctggcaaattttcttggccctn

SEQ ID NO: 793 - DNA, 471 bp, Homo sapiens
  misc_feature 2, 3, 4, 10, 220: n = A,T,C or G
gnnnacgtancactacttagggcgaattggagctccccgcggtggcggccgcccgggcaggtactattaaatttaatgagaggtaacccatgcaccggcagaaagttcaaggggacagaaggggcttgctccactctggagccctatctcctctcacctccttccttctagtttgacatgcgatcttgtctctctcttttataaagtgcttccaggcccnttttgattaaggatgctgtcctaaaatccttcctcccgcgtacctcgggcccgctctagaactagtggatcccccgggctgcaggaattcgatatcaagcttatcgataccgtcgacctcgagggggggcccggtacccagcttttgttccctttagtgagggttaattgcgcgcttggcgtaatcatggtcatagctgtttcctgtgtgaaattgttatccgctcacaattccacacaacatacgagccg

SEQ ID NO: 794 - DNA, 479 bp, Homo sapiens
  misc_feature 5, 18, 19, 22, 208, 219, 437: n = A,T,C or G
gcccnctactattcggcnnatngcagctccccgtggtggcggccgcccgggcaggtactacaggggcaggctaccgtccccggctaattattttaattttaatttttagtagagatgaggtcatgctgtgttgcccaggctggtctcgaacttcttgggctcaagagatcctcctgccttggcctctcagattgctgggattataggngtgagccaccnacacctggcctatgatcttaactttatttaccacctttttgacatttgccaaaaactaagttttacaagatctctcaccatatctctggggatgggaggaggaagggaaggataatggtctcatattcataatagtatttgcagtgcctattctcacagttgataaatgactataaccttttcaagaggatgagtgaaagaaagagggaggcaagaanaatgaaaaaggaggtaaggtcctggtaacacatcattcttgt

SEQ ID NO: 795 - DNA, 475 bp, Homo sapiens
  misc_feature 2, 3, 4: n = A,T,C or G
gnnncgaacatacttagggcgaattggagctccccgcggtggcggccgaggtactttttgttgttgttgttttagagagacagggccttgctcttttgcccatgctggtctcaaactcctgagctcaagcagtcctctgcctcagcatcccaagtagctgggactacaggcctaatactttttgtgcctgctcctctcttcctgtttctaccccatcattatctgctcagatcttcttaatcaactactgcagcaacctgctaaaatgtctctcaatcttctgggataagtcaatcaactgctaaatgaatcttccctaaattttacttttattgagttcttctgctcagaaacctatttttacttctttctaagtcctcagcatggtatttctttcttctatgttaattgacagtctgtccttaaatatgaactgtctattcctgctcttccttccctcaaacccaaactcacc

SEQ ID NO: 796 - DNA, 475 bp, Homo sapiens
  misc_feature 1, 8, 10: n = A,T,C or G
nccctccnancgactactatagggcgaattggagctccccgcggtggcggccgaggtacacacattatctaagatgatacctataaggcagatagtattatccccattttacagatgcagaaattgagtatcaaagtggttaacttgaataatgtcaagcagctagtcagtggtggcagtggaatgtgaatccaggaagtctgacacaaaaacaagtggtcttaatgctataacatgcttaatgctaagaaaaagtggacagtataatgctatactgttcctgaataaatatccagtaaataaggaaggctagaagaacacaaagtttgtaacaacatgtttttctagtagaagtcttctttgctgactttctgattctcaggtatagcatcaatcggtgagggttgctatatggtaaacattatactgacaggccaaagcgatcaactgtgaaaactaggcaaagccaaagtac

SEQ ID NO: 797 - DNA, 458 bp, Homo sapiens
cgctatcgactactatagggcgaattggagctccccgcggtggcggccgaggtacagcttgaacaaatccaccttctgtggaccaagcaccaccctgggcatttctagcatgagcaaaatccaaggtcctggctggactccagagatgctatttacctcagaagcatgacaataggaggcagaaggagcaggcaaatccaagtcctttcttgtagtttccttgtttggggaggaaaagttgagttttactattatggaaaagaaacaggaaatagagacagacaaagagatatgacaatacagtcctgccacccagatactcatttccacctaccattccatgcatttgttttgaatatataagtatgtacctgcccgggcggccgctctagaactagtggatcccccgggctgcaggaattcgatatcaagcttatcgataccgtcgacctcgaggg

SEQ ID NO: 798 - DNA, 471 bp, Homo sapiens
  misc_feature 3, 4, 5, 414, 422, 423, 424, 425, 426, 427, 428, 429, 430,431, 432, 433, 434, 436, 438, 439, 440, 441, 442, 444, 445,447, 448, 449, 450, 451, 452, 454, 455, 457, 458, 459, 460,461, 462, 463, 464, 465, 466, 467, 468, 469, 470: n = A,T,C or G
ccnnncactccttagggcgaattggagctccccgcggtggcggccgaggtacattgctttattttttcatgagacataatcatgtcttattataaatttgcctaagcaggggataatatctgacatacatgctacctgttattgtgtaaattgaaaatattctatcttaccagttgttacaattaaatatattatactgataatttattttttcagacattgacataataaagttttatttgaaatatatcttaatcaataaatataaaacagaaaccactctaatagaggacaattgttctagtcaatactcatatttgttctgactattgagaaaaattatgtctgcattttaaaagtttcaaattttgaagcttcagattttagaatagggattttcaacccacgggcccnggcccggnnnnnnnnnnnnnantnnnnngnngnnnnnntnngnnnnnnnnnnnnnng

SEQ ID NO: 799 - DNA, 463 bp, Homo sapiens
cgctatcgactactatagggcgaattggagctccccgcggtggcggccgaggtacgcggggagacggcatctgaaccttgccgagtaggaatgttccagaagtaagagagatgactagggtttcaagaacaaggaccagcacctatgaaggctctgaggcacagaccactgtgacctgtggagaagtgacagcaaagtgaaaggcacgttttgattactaccgacattcacagtctggacacgggtgacaaatctaaaagatattgcccattcgtccaactgccgctgtcctgccagtatatcgtctgagattaccatcagctaaatattgcattgtctttggacaattttcctacattgtgactcctcactacattttcaatgcttttctagtcccagacaagctacagactgttaatttacacttgcttttgccttgcctgaggaaattgaaaataaattt

SEQ ID NO: 800 - DNA, 464 bp, Homo sapiens
  misc_feature 420, 434: n = A,T,C or G
gtatacgactcctatagggcgaattggagctccaccgcggtggcggccgaggtacttacaacttttcatatagtattggtagtgttttgaataatttaaaaaatcatcttaggtttgttatttaactttatttatatagtgcttgtattaatgattttgtgaatgttttttaaagatggataccttgatttggcttggcctcccaaagtgctgagattacaggcgtgaaccaccgcgcccggccgacttcaggagatctttaggcatcattggtttgtgttcttcagttaaaaataaaaagccaaactcaagacaaagaatacagttcagttccaggttaggaagagggagaagctcagcttctgaagtagtgctatatttactgtttaccttgactgttatctttagaagttgatgatnattttaaaaattgngttaactgctgtttgaactgttaaagttcc

SEQ ID NO: 801 - DNA, 411 bp, Homo sapiens
  misc_feature 5: n = A,T,C or G
gagcnctccgtaataccgactcactatagggcgaattggagctccaccgcggtggcggccgcccgggcaggtactggttttactgatctttgtgcaatttgctgctcagcagatattttcaatgctgattggtaatatgtcagtggataaccagtggaaatgcatgtctattaattactattgcacataatatttatcttgtttttatattttgcacaggattttcaaggtgctggtatatttctgagcactgtaaagttttctttgagaaataagtgtttatttttaaattgcgttgtctcatgggagggtaacatttgtaaatatacttcaaattagtgttgttccctctgctttctttttcctgactcagaaacagagtgctttgactgctctatgttggggccatgt

SEQ ID NO: 802 - DNA, 419 bp, Homo sapiens
gagcgctccgtaataccgactcactatagggcgaattggagctccaccgcggtggcggccgaggtacaatataggcagacagtttgccttcagaaattcagaaatgcagcttttgagggaggtcagcatcattggtctcagctaccattttcctgcaggatgtttataaatagttcctggcaaaggaggttgccgcatagggtcctacaagtaacctaggtggcagcatctcctcccagcgtcccccgcgtacctgcccgggcggccgctctagaactagtggatcccccgggctgcaggaattcgatatcaagcttatcgataccgtcgacctcgagggggggcccggtacccagcttttgttccctttagtgagggttaattgcgcgcttggcgtaatcatggtcatagctgtttcc

SEQ ID NO: 803 - DNA, 399 bp, Homo sapiens
cgcgtaataccgactcactatagggcgaattggagctccaccgcggtggcggccgcccgggcaggtacgcgggatgggtttagactaaagtattttcttcataaattgaaagagaaacacactaggaattcagaagattttaattaaagttgttcaaaaaatttaatgggaattttaaaggctggctcactaagtagttttgataatgaatttaatttatagaagaaagttcttggcaaatttggtaatgccaaaaagagcctacatatgcacaatgtatattttcatggaagcattattattaagtgtcctgcttttactggttgacatacgttagttcatttcagcttcattcaaatatgtagattaaacctaacacctataaaatggtaacaattg

SEQ ID NO: 804 - DNA, 415 bp, Homo sapiens
  misc_feature 262: n = A,T,C or G
gagcgcgcgtaataccgactcactatagggcgaattggagctccaccgcggtggcggccgcccgggcaggtaccatacaccatggaagttagccttccacctcaggagaaagcaagctgctctcataagcctctcaccaactacccagtagtctttgcctccaaactgaacaacaggaaaaagtgccatagtttttaattaagctgttttaaaagtccatgttccgggagaaaacaaaaaaaaaaaaaaaaaaaaaaaaaangtacctcggccgctctagaactagtggatcccccgggctgcaggaattcgatatcaagcttatcgataccgtcgacctcgagggggggcccggtacccagcttttgttccctttagtgagggttaattgcgcgcttggcgtaatcatggtcat

SEQ ID NO: 805 - DNA, 923 bp, Homo sapiens
  misc_feature 2, 3, 611, 679, 701, 704, 708, 740, 752, 767, 784, 786, 796,809, 814, 823, 824, 831, 832, 833, 838, 841, 859, 881, 887,891, 900, 901, 902, 903, 904, 905, 908: n = A,T,C or G
annatacgactcctatagggcgaattggagctccaccgcggtggcggccgaggtaccatactttgtttttattcttgagaggaaacttcgatcatttaaagcagatatttgccttcatcccctacccccacccaataaaacaaacctggaaatgcccatttacatattttagcttaatcacggtcaactgtcttctatcgccacttcactgctcacaaaatacacatatttaaaagtgaaaatactgaaatatgtcttcacaatacagctaataccaccagtagaaaattcacgtcaccatgttcagtagacaaacgtgagaagcaatgtggtgtcagattggaaacttgggagagattctcagaaataaagtaacttcaataggttgctttttgcatagtgcaaaattaaacttcactttatttagtggaagtgacccaattcaatcttatctggggtcaacacagctgatttcatttgtgtttgaccactgcacattttggcatccaaaaagttaaggagaggaagtcaagggtattatggagaactacgaaagacagatgcctccaataaaagactttttttggtggtatttggttttgggtttgggnggatgatttggatcccaaaagagaaaccacttaagatttgggaattcccccccaaaatttctaccttnagaaagacccaacaattgttgnttntggngacagcttaatcactggaagacttttgcattnttttttattaanagagaggattgggtngatttaagatcctcttntncctgcaggtntccatttaaattncaccncagataatnnggaaaannntccanatnatggcatcctatttgctngcttttttccaattggaaattngatttnaaanaaaaaaatnnnnnnagntcttttttttttttt

SEQ ID NO: 806 - DNA, 911 bp, Homo sapiens
  misc_feature 432, 545, 586, 606, 647, 681, 682, 697, 739, 745, 767, 773,798, 807, 821, 837, 856, 857, 865, 879, 897, 901: n = A,T,C or G
cgatcactactatagggcgaattggagctccacccgcggtgggcggcccgcccgggcaggtactattaaaatttaatgagaggtaacccatgcaccggcaggaagttcaaggggacagaaggggcttgctccactctggagccctatctcctctcacctccttccttctagtttgacatgcgatcttgtctctctcttttataaagtgcttccaggcccttttgattaggatgctgtcctaaatccttcctcccacgtacctcggccgctctagaactagtggatcccccgggctgcaggaattcgatatcaagcttatcgataccgtcgacctcgagggggggcccggtacccagcttttgttccctttagtgagggttaattgcgcgcttggcgtaatcatggtcatagctgtttcctgtgtgaaattgntatccgctcacaattcacacaacatacgagccgggagcataaagtgtaaagcctggggtgcctaatgagtgagctaactcacattaattgcgttgcgctcactgcccgctttncagtcgggaaacctgtcgtgccagctgcattaatgaatcgncaaccgcggggagaggcggnttgcgtattgggcgctctttcgcttcttgctcaactgactngcttggctcggtcgttcggttgcggcgagccggnnttaacttactcaaangccgggaataccggtattccacaaaaatcaggggataacccnggaaanaacatgtgaaccaaaaggccancaaaanggccaggaaccgtaaaaaaggcccngttgcttgngttttttccatagnttccccccccctgacnagccttaaaaaaaattganncttaagtnaaagggggggaaancccgccgggccttttaanaaanccagcgtttt

SEQ ID NO: 807 - DNA, 457 bp, Homo sapiens
  misc_feature 2, 3, 4, 5, 7, 12: n = A,T,C or G
gnnnnangccgnatcactactatagggcgaattggagctccccgcggtggcggccgcccgggcaggtacgcgggatgattaatcttcccttatccacaaacttaactgtggagaaacaggagaaagtgtgtgcctagaagctggattcagggacccatggttacccacttctacttatgattccgtcattactgttgttttaggaaaataaacagatcttgattctttcataaaagtcgattcttcaacaagcaaatgggaaaatcggcaggcccagatatgtgtgtatagcagctactggttggaaatttggacacaaaagtctttatctacccagcctgtgagccacaaatctggactgagtataaaaaagaataaaactaaataccacaatgttctcacttataagtgggaactaaacatttgagtatgcatgtacctcggccgctctagaact

SEQ ID NO: 808 - DNA, 455 bp, Homo sapiens
  misc_feature 2, 10, 19: n = A,T,C or G
gnggccgcgnatacgactnctatagggcgaattggagctccccgcggtggcggccgggggccattgagactgccatggaagacttgaaaggtcacgtagctgagacttctggagagaccattcaaggcttctggctcttgacaaagatagaccactggaacaatgagaaggagagaattctactggtcacagacaagactctcttgatctgcaaatacgacttcatcatgctgagttgtgtgcagctgcagcggattcctctgagcgctgtctatcgcatctgcctgggcaagttcaccttccctgggatgtccctggacaagattttactcccataacccaggcagaagtacctcggccgctctagaactagtggatcccccgggctgcaggaattcgatatcaagcttatcgatacccgtcgacctcgaggggggggcccggtacccagcttt

SEQ ID NO: 809 - DNA, 936 bp, Homo sapiens
  misc_feature 2, 3, 8, 505, 510, 513, 514, 515, 516, 517, 518, 519, 521,522, 538, 576, 600, 643, 647, 650, 662, 667, 675, 678, 688,697, 701, 712, 716, 745, 746, 765, 780, 805, 806, 813, 840,857, 871, 906, 916, 918, 920, 930, 931, 932, 934, 935: n = A,T,C or G
annggacncgcgtcatccgactcactatagggcgaattggagctccaccgcggtggcggcccgcccgggcaggtacttgaagctgtcatggatcaggtcatctagggcaagcaggtagagtgagaaaaactctggagagcttcaggacttaaaatgtgatcagaaaaaaggatccttatagaagagactgagaggtaggaagggaacagaagtgatattgcagaggcctgaggcagacactgttaaagagggaggcacctggacacttttgctgtagacaagtagcccatctaatcctaaagagcccctttgatatggccacttaatgacgtatgaaatacttcaaaaatgattttaaaagtgtttaaagtaatgggcttctgtgtcatttccataatattattctgggtgcctgccatgcgcaagacactaacataggtgttggatgtttcaaacaaataacatttatttgcaaactctcgtaactgatacttttcttcaaaanaaaanatnnnnnnnannaggtccctcggcccgntctagaactagtggatcccccgggctgcaaggaattcnatatcaagcttatcgatacccgcnaccttgaggggggggcccgggacccaacttttgtttcctttangganggnttaaattgcccnccttngcgtaatnatnggtaatagcntgtttcctntgtnaaaattggttntccncttacaaatttccccacaaacataccgannccgggagccttaaaaagtntaaaagcttgggggngcctattgagggagcctaacttccnnttaattncgtttgcgctcctggcccgtttccaancgggaaaaccttttttnccacttcattaatnaaattcggccaaccccccggggagaagcggtttgnttttgggccntntntcctttcttnnntnnt

SEQ ID NO: 810 - DNA, 915 bp, Homo sapiens
  misc_feature 4, 15, 29, 32, 57, 574, 676, 685, 694, 700, 728, 733, 743,754, 769, 770, 772, 776, 791, 805, 810, 815, 834, 836, 844,848, 851, 860, 863, 871, 892, 900: n = A,T,C or G
acgnacactactatngggtacttggggcnaancggagctccccgcggtggcggccgnccgggcaggtactttttttttttttttttttttggagacgaggtcttgctatgttgttcaggctagacttggactcccagcctcaagcagtcctactgcttcagccttccaagtagctggaaccacaggcacacaccactataaccagtttattttacattgttcttgtaattctggtatcagtgattcttataacaatatgctctcaatttattttaagcatgttgagaccttaatgataactattcagaaaccatactaaacatttgatcttgaaatcttccatcgttttccatcctctgcttatgcctcagttattccattcgcatgatatgggcacttaatttagccaactcactgacccatttcatctactgctcccaactctatggctggatctaagcacagtttctacatccaatattagccggtcattggttcacagggacagatttccacagctgacaactctacttcataactggaatgaacacttcaatctgcatttttatatcangatcctttctggattaaaaaactccgcgtaccttcggccggtctagaactagtggatcccccggctgcaggaattcgatattaagcttatcgaatcccgtcnaccttcganggggggggncccggnacccaaacttttggtccctttaagggangggtnaattgccccncttggcgtaantcatgggcaaacctnntnctgngtgaaaatgttattnggttccaaattccnacaanatccnaacccggagcattaaagtntnaaagcctngggngcntaaagaagnganccaacttnccattaattgggttgggctcnctggcccnttttcaaatcgggaa

SEQ ID NO: 811 - DNA, 460 bp, Homo sapiens
cgcccctaatcgactactatagggcgaattggagctccaccgcggtggcggccgcccgggcaggtactgtgatatccacatatttttgagaaaaattcccaagccaggcgaatgtggattggaataaagacataggcagtgtataccaccatagcaataatggttagtaagatggtgttaaacatagatcgctcccagggctctaaaacagcacagcagctaatgatttggtattgatagtagagccaggagaaatattccttcacacgcctcaaatccatggttggctccttcaagctgcagtaagtttgtcctaagaaagtccaggtctggttcttcagccttgctccttcgcgaaatgatcctgtgtgggttaagttctcctctctgggttgctgtttcctcatctcccagttggggtgtatcttccctgcggcttaggtgaagcgcccgaggcttt

SEQ ID NO: 812 - DNA, 466 bp, Homo sapiens
  misc_feature 2, 3, 4, 5, 7, 277, 447, 454: n = A,T,C or G
gnnnnangcggccgcgtaatacgactactatagggcgaattggagctccaccgcggtggcggccgaggtacaagcatataatgccaactggtaaagtcagaactccagatgacaaggtacagcatgtaatcttttgcagtctattgacagcaatctaaataaaagcaaaggaagatgcttccagtactacaaactttatgggaacttagggtctctcaaagccacactgttttgggtcactagcaggaggtacagtatattaaagcaagcagctcancctctcactagtggtgagatgtatgaaaatcctggcaatgccagggggaaaagaatctatgagtcttcccttcggtcatctctcctatttcttgcattagttttttcagggttaaatacacatctcacaagaagaagctagctatatatgggctgggttggtcttcaatngaatctncaaatgtatcaa

SEQ ID NO: 813 - DNA, 460 bp, Homo sapiens
  misc_feature 5, 8, 14, 447: n = A,T,C or G
gtgcngcnaatacnctactatagggcgaattggagctccccgcggtggcggccgaggtacgtggcgtagcattccatgttcagctttgacatttattttctcatatcaaccctttttacacgtgaaacacaatctcgctcttgaagtcttaactgcatgatctgtgaaacctgtatttatattttcttcagtgtattcttgtcgtgtgtgtgtcctaaacaaaccaaaagaaaactttccaaatctaaagtattcattctccaattggagcaagaggagtcagttagatactatcacggcattcatttgtggctggcttgtcatatttacttatgattgataataaatctattttgctttttagagcctcccgagaagccatctgccttcgaggtatttagtttcatgattttcattttgaatgacttattaactatgtattttggngaagtatacattt

SEQ ID NO: 814 - DNA, 458 bp, Homo sapiens
  misc_feature 2, 3, 4, 5, 6, 12, 13, 16, 19: n = A,T,C or G
gnnnnntcccgnnacnctnctatagggcgaattggagctccccgcggtggcggccgcccgggcaggtacgtctgttgtcttcatcatgagatcagaaaactctatgctgctccctaactatgtgaccttgagcaagtctcttaaaggagaacttcagtttctgtatttggagaagaaagaagatcatggtagatgatcctcttgaattggcttcaggcctctaaaattctgtagtttggtaaaaatgcctaatgaccaaatggaggcaagatctcgttaccaagatcatggtggctttggaagtgacagagatggctgagaccaggaggctgaaatgaaattaaagtcctatgatgttgctttaagttaatgctatctaagaaaaggtgctggtagaggaagtggggccccaaacttggcttcatagtgattggagtttccaaatcaatggaataggg

SEQ ID NO: 815 - DNA, 463 bp, Homo sapiens
  misc_feature 2, 3, 4, 5, 7, 13, 14: n = A,T,C or G
gnnnnangccgcnnatcactactatagggcgaattggagctccaccgcggtggcggccgaggtacgtgaaactgcatctctcactttttctctctcttcgggcagtgctaggaagattactcacaaaaagtcaaatcacatcccccattctaatgttggtatttctggggaagccttatggaaagctgcgttttttcatgggggaacacttttgtgccatggttttacaaagctaaagaatttcaatagtcaaactgttgccataaaaaaatcaaacttaggaatagaactaaacatgttattaacagaataggcttgagagagcaagagaattcttttggagtaaagttatccaaagtctatgtgttctcctttgacacataaatctactatcgacctagtcttggactttttttttggacagaaattgggtaagttttgcaaaaggacaggcacaaagcct

SEQ ID NO: 816 - DNA, 922 bp, Homo sapiens
  misc_feature 522, 543, 556, 581, 583, 603, 615, 617, 636, 647, 731, 790,791, 805, 820, 831, 842, 848, 852, 857, 862, 888, 910, 919,920: n = A,T,C or G
acgacactactatagggcgaattggagctcaccgcggtggtggcgcgccagcgccgcctcgatgcgcgggatcttgcaaatgtcggtgccgatgccgtagatcatgggctagtcctattccttatgctttgttgcccaggcgcgcagccaccatgatggccttcatttcgcgcacggcgttttcccagcccgacaaacaccgcatgcgcgacgatggcgtggccgatgttcagctcagtaatatcgggaatggcggcgatcgcctgcacgttggtgtaatgcaagccgtggcccgcattgaccttcaagccacggcccacgccgaacagtacgcctgccttgatgcgctccagctccgcaactgctcggcgcctgccgtatcggcgtagcggcccgtgtgcaactcgatcacgggcgcaccgagttcggcaagcggcggcgatcttgttgctcgtcggcatcgatgaacaggctcacgcggatgccctcgccctgcaattgcttgacggcagcctgtacttncttgaagtagcgcaccacgtncaggccaaccttnggtggtcactttccgtgcgtttttncngcaccaggcaaaacttcggntggcttgatacngnaggcgaagtcgatcatttncttgcgttacnggccggtctaagaactagtggaatcccccgggctggaaggaattcgatatcaagcttatcgatccggcgaccttgagggggggncccggtaccaacttttgttcccttaatgaggggtaattgccccctggcgtaataatggnnatagttgtttctgngtgaaatggtatccnttaaaattccnacaaatacaanccggancatnaaggnaaagnccggggggctaagagggagctacttnaatttaatgggttggctaatgncggtttcanngg

SEQ ID NO: 817 - DNA, 917 bp, Homo sapiens
  misc_feature 2, 544, 621, 666, 682, 688, 736, 753, 775, 794, 800, 808,828, 833, 852, 874, 878, 885, 913, 917: n = A,T,C or G
angcactactatagggcgaattggagctccaccgcggtggcggccgaggtacaatgggaacaaggagataagcagtgaaaggccaagggaatgtctggagttaggacttcaggtgattcacaacttggctgccactcacccgagactgcccaagcccagatttcttccttctataagaatattgattcttgcaaataagatgaacctaaatgtggtccaggagtcagcatcttctacatggtacctgcccgggcggccgctctagaactagtggatcccccgggctgcaggaattcgatatcaagcttatcgataccgtcgacctcgagggggggcccggtacccagcttttgttccctttagtgagggttaattgcgcgcttggcgtaatcatggtcatagctgtttcctgtgtgaaattgttatccgctcacaattccacacaacatacgagccgggagcataaagtgtaaagcctggggtgcctaatgagtgagctaactcacattaattgcgttgcgctcactgcccgctttccaagtcngggaaacctgtcgtgccaactgcattaatgaatcggcccaacgcccggggagaggcggttgcgtattggggcgcctnttccctttcctcgctcacttgactccttgcgctcggtcgttcggnttgcggcaacggtatnaagttncttaaaaggcggtaataccggttttccccaagaatcaggggatacccnaggaaaaaacattttanccaaaaggcccacaaaaggccngaaccgtaaaaaggccgcnttgctngctttttncaaaaggctccgccccctgncagcnttacaaaattaccctaaantaaagggggcaacccccggctntaanaaccagngtttccctggaactcctttgcccttctntccn

SEQ ID NO: 818 - DNA, 459 bp, Homo sapiens
  misc_feature 1, 2, 3, 4: n = A,T,C or G
nnnnatgccgtatcgactacttagggcgaattggagctccccgcggtggcggccgaggtaccaggttcaaatagtcagcagctcatcataatcaatgagcgaggacataaagtaggaaaaatgcatcaccatggtgagcaaggaaagcaagttattggaggcacatgttaacacataaaatataaaattaatatgatcacactggaaaggcttgcctgagcccacagtttgaatgcctacaataagatgagatgcacaacaaaaagcaagagaacctgatcaagtgggtgacctggccatggtgctctcatcagtggggacccaaatgcttatgtggactcaccaggtatcgaattagacatgaataggagtgtttgttgtgatccaaggaaactatataatcaaaatgaatacaatgaaactttaaaaataattgtaaggatctttacaccagcccaa

SEQ ID NO: 819 - DNA, 924 bp, Homo sapiens
  misc_feature 591, 649, 656, 681, 699, 720, 726, 727, 729, 737, 744, 760,768, 805, 812, 833, 845, 848, 872, 876, 891, 894, 895, 896,904, 914, 920: n = A,T,C or G
cgcgcgtatacgactcactatagggcgaattggagctccccgcggtggcggcccgagggtacgcggggaatcttactccctcgtagaacaggcgatatcttcaccatgcgcacaatgaaatcaatactcagagaaggcagataattctccacgaagccagaaaactaataaatgaacaacttgggtgaaatgtcccaccagacggtgtgatatttagtagcccagaaagctgccaaggggttgaatgacactatctgaagatatgaaccagtttgctctccatagggaggatttcatcaacaggaaacagatgcctggaaggcattggatttgctaagtgtctatgccatatgattctgctgtttgcgtttgatttagaatgctgagctgactcaaagtcaaactaaaaaaaaaaatgaaataaaataaaaatctttatttccaatgagctaatgaggaaaaaggggatgatgaaaaaacagggagtgggagcaatttggaaatggaaagaatgctgaatacctacatgatgcctaattcagaagaacattctggtatgtagggacattattttcaactctatcacttacngcagattttttttttatatcagatgtatctctacttttctaaagatgtaccttgcccnggccggncgctctagaactagtggatcccccnggctgcaggaatttgatntcaagcttatcgatcccgccnaccctnnangggggggncccggtncccaacttttgttccnttaatgangggttaaatgcgcccctggcgtaatctggcatacttntttctgngtgaaattgttatccgttacnattcccacaaantanaaccggggcataaagggtaacctngggngcttatgaggggccnacnnncttaatgnggttgggccnctgccncttt

SEQ ID NO: 820 - DNA, 934 bp, Homo sapiens
  misc_feature 64, 76, 86, 87, 89, 90, 96, 114, 121, 141, 155, 172, 255,395, 462, 475, 481, 508, 527, 535, 605, 625, 709, 718, 751,757, 796, 801, 813, 816, 826, 829, 833, 834, 863, 877, 882,886, 894, 898, 901, 904, 911, 912, 913, 915, 916, 917: n = A,T,C or G
  misc_feature 931: n = A,T,C or G
aggacgcgcgtatcgactcactatagggcgaattggagctccccgcggtggcggcccgcccggncaggtacttttnttttttttanntnnttttanttcgcaataccagctttnaccctgncctctgcactgcttagcctnggctctgctgagtngtgcaacacattctganagatgccatacaatgctccaggcaaacttatagaaaaacaggaatgagtgattttatacgggatgtgtttcagctgtccaatncaaaataaatcacgtccaggtgcattctttcctaatttgtgacccaaactgcttgcactttatacattaatgaattatttttttaaaagaaattagctctatcatgaagacagggctatctaaccctttggtggtctttntcccttaaaaagcaattgttccattttataggtgttaggtttaatctacatatttggaatgaagctnaaatgaactaacntatgtnaaccagtaaaagcaggacacttaatantaatgcttccctgaaaatntacattgngcatatgtaggctctttttggcattaccaaattttccaagaaccttttttgttttaaattaaattcattntcaaaactacttaagtgggnccagccctttaaaattcccaattaaattttttggaaaactttaattaaaaatttttctgaaattcctaggggggtttttctttnaatttaatngaaaaaaatacttttgtttaaaacccctaaggntacaangcctataaccccttttataatcaaagggcttgggattanttgcnccttttaaaagncanttcatttttnatncaanngtttaagctgccaaaatggaaatggttcncattcggaaaatanttttnttanaaacaatncctnttnttnccccaannngnnnaatcaatttaattnttt

SEQ ID NO: 821 - DNA, 921 bp, Homo sapiens
  misc_feature 3, 8, 32, 334, 376, 378, 380, 381, 402, 409, 410, 421, 424,436, 437, 445, 450, 451, 466, 467, 469, 477, 479, 489, 503,511, 512, 513, 516, 517, 522, 524, 528, 529, 531, 532, 535,537, 538, 542, 546, 550, 552, 555, 558, 565, 572, 574: n = A,T,C or G
  misc_feature 576, 578, 584, 588, 591, 592, 595, 598, 599, 602, 608, 610,611, 616, 618, 619, 627, 628, 631, 635, 636, 637, 638, 640,641, 643, 646, 647, 648, 650, 651, 659, 660, 661, 663, 664,665, 666, 667, 668, 669, 678, 679, 681, 682, 684, 685: n = A,T,C or G
  misc_feature 686, 687, 689, 690, 699, 701, 702, 703, 708, 709, 711, 717,719, 722, 723, 724, 725, 726, 728, 729, 730, 731, 732, 737,739, 745, 746, 748, 749, 751, 752, 753, 754, 755, 756, 757,759, 760, 761, 763, 765, 767, 768, 769, 771, 772, 773: n = A,T,C or G
  misc_feature 774, 775, 779, 780, 782, 783, 786, 787, 788, 789, 791, 793,795, 796, 797, 798, 799, 800, 803, 804, 806, 807, 808, 809,811, 812, 813, 815, 819, 821, 822, 823, 824, 825, 826, 827,828, 829, 830, 831, 832, 834, 836, 838, 840, 841, 843: n = A,T,C or G
  misc_feature 844, 846, 850, 852, 853, 855, 856, 857, 861, 864, 866, 867,868, 869, 870, 871, 872, 873, 874, 875, 876, 877, 879, 880,881, 882, 884, 889, 891, 893, 894, 895, 896, 899, 901, 905,907, 908, 911, 912, 913, 914, 918, 920, 921: n = A,T,C or G
acncgctnatccgactcactatagggcgaatnggagctccccgcggtggcggcccgaggtacagggaactattggagcacctaagaggagcacctaccttgaatttaggggttagcagaggcatcctgaaaaaagtcaaagctaagccacaatctataagcagtttaggaattagcagaacgtgcatggtgaggagatgccaaaggcaagaagagaagagtattccaaacaggagggattccaaagagagaagagtatcccaaacaacatttgcacaaacctgatggggagagagaatgtggggtggggatggatgatgagactgaagaagaangccaggtctagataatcagtggccttgtaccttgcccgggcngncnntctagaactagtgggatcccncgggctnnaaggaatttcnatntcaagcttattnnataccttnacctnnaggggggggcccggnncncacatttngntccctttagngagggttaattgcnccccttgnnntannatggncnatanntnnttncnntgtnaaantgtntnccnttncaatttnacacacntncnanccgggncctnaannttnaannctngggtgncnnatgantnncttacttnnttnattnnnntnngnctnnntnnccggtttnnnannnnnnnaaacctgtnntnncnnnntnntttattaantnnncaaanncncggggngnggnnnnntnnnnnttggnancttttnngnntnnnnnnntnnntncntnnntnnnnntttnnannatnnnntngngnnnnnnggnntnnnntnnntnaaangnnnnnnnnnnnntntncntnntnngntttntnnannnaaanaantnnnnnnnnnnnncnnnntntcttnancnnnnaangnccgntnntgnnnntttntnn

SEQ ID NO: 822 - DNA, 917 bp, Homo sapiens
  misc_feature 388, 506, 645, 669, 671, 674, 679, 691, 695, 709, 713, 762,790, 795, 798, 807, 818, 827, 836, 837, 846, 853, 854, 859,861, 864, 866, 887, 889, 891, 893, 894, 915: n = A,T,C or G
cgacactcctatagggcgaattggagctccaccgcggtggcggccgaggtaccatgattagttaaatataagactccgtaatttttacaattttaacaataattttatttcttcaagcttgttagtttgggattgtattaaaactcagtgtgtgacttagaaaatgataatgctgctttatggaaaatggattataggtgggtaagacttcattgcaaaaattgtgtaataccatcagtgttaggaacccagttgaagtctagaagacagatgttagtatcttagactaggttggtatttgaatagatattggtaatatcagtagaatttaataatacattagaaagaaagaaatcagagaagatcttttatttcacttgatacttgnggtggtactttcaatgagataagaagggcaggccaaggagaaagttcaggggcaggggatgagaaaaaaacaagaattttatgttggacatgctaagttaaacacctgcttaactcanattggcttctgtggaagcagaggctgacatgagggtgcttatgaaaatgcttttttgaggaagccattgcaggagggaatctcttaggaagccaggggaagaaaggaaagagaagggaaagtttgtgagccagggtatnggttcagctggcattgagcctcancnggnccccnggaggagcttanaacntgatctatccccanagtngggcccgtcattgaggccatggaagccttttcattagtcattgactgcngctgtcatttggaaaaagcttcacctcnggacnggnggcttcatnactgggttcantttcctccnaaggggccnnttctttggnaaccacnngccananttnangccctggaaatgaagcctttntnangnntgggcccaaaaaaactggccngg

SEQ ID NO: 823 - DNA, 728 bp, Homo sapiens
  misc_feature 1, 2, 4, 659, 703: n = A,T,C or G
nnanagccgtgtcgacgtaatacgactcactatagggcgaattggagctccaccgcggtggcggccgaggtacttttccatatttccacatactaccaaggattttcaagtgtaggagtaattcaatcagaccctttctttcatatgagaattctcaaaagagtagaataaatggaacacagaaagaaaagactttaagcaaggggcttcttggaagccactgcagcagtccaggcaagtgatgctgaaggtctgcaacagaacaggggcccgagagtggagaagagtgggtaaactatcatattaaagaggccaaactcagactgggggcagtggctcacgcctgtaatcccaacactttgggaggcttaggcaggcggatcatgaggtcaggagtttgagaccaacctgaccaacatggtgaaaccccatctctaccaaaaatacaaaaaattagccaggtgtggtggtgcgcacctgtaatcccagctactcaggaggctgaggcaggagaatcccttgaacctgggaagcagaggttgcagtaagctgagatggtgccactgcactccagcgtgggtgacagagagagactctgtctcaaaaaaaaaaaaaagtacctgcccgggcggccgctctagaactaagtggatcccccnggctgcaggaattcatatcaagcttatcgatccgcgacctcganggggggccccggtacccacttttgg

SEQ ID NO: 824 - DNA, 763 bp, Homo sapiens
  misc_feature 4, 7, 8, 9, 10, 103, 371, 431, 442, 446, 466, 476, 492, 507,518, 519, 522, 524, 527, 528, 530, 535, 536, 546, 554, 570,582, 590, 620, 624, 626, 636, 640, 651, 654, 667, 681, 683,689, 690, 693, 709, 717, 723, 727, 731, 738, 749: n = A,T,C or G
  misc_feature 762: n = A,T,C or G
gatntgnnnngagcgcgcgtaatacgactcactatagggcgaattggagctccaccgcggtggcggccgaggtactttttttttttttttttttttttttttnaaaggtgaagtttcactttgtcacccaggctcagtctcaaacaaacaaaaaaaaaaattgggggatctttatttcatgctttctctcattaagaaaagagaggacaataaagtgttagaagataataaagcacagaagtctagccagtgtctttggaaaatgaaacggctgtgtgaattttttatcttttggcacctcttttaaaaactccacttaatgacctacctgcattactgaagtgtctcttgttggggtgattgtagttatntcttgggtgtccatgcatctgtgggccatgggaggcaggcaaatgaggcttctgagggtnaaggttgtgtnaggnatgggactgagatatcaganagtcccggcnggaacctgaggccttnggaccaaatggtttnttacccccaanncangncgnntntcttnnttttgctccnaaagaggnaaaaggaaaaccaaangagcttaaagancccaggcnttaaattcccccagaaaaagaaaaaaaggntttnancctctaaacngctnctttttggccnttnttaaaactttttnaactgggcggttantnccttcnnaanaaaaaaaaaaggcttnaataaatntccccnggtngggnttttttngcttggggggnaaacccaatggant

SEQ ID NO: 825 - DNA, 889 bp, Homo sapiens
  misc_feature 2, 4, 11, 12, 19, 682, 722, 724, 728, 739, 770, 777, 781,782, 784, 795, 799, 827, 830, 834, 839, 847, 855, 856, 880,881, 887, 888: n = A,T,C or G
angnccgtatnncacgtantacgactcactatagggcgaattggagctccccgcggtggcggccgcccgggcaggtactttctctcatagggaatttttttttaatttttaaattttaattatttaagagacagggtctcactctgtcacccaagctggagtgcagtggtgtgatcatggctcactgcagcctcaaactcttgggctaatgtgatcctcccacctcagcctcccaaagtgctgggattacaagcatgagccaccacacccggccatcctagatgattttttaaacatcacttttctcctggcagaattttctgactctgtagttcttgttaacttccagagaaagccctgagtaagccagaccctaattacaaacatgcctcagtggatgaggctacaatttgagtccaaactgctcaaggttcacactgacaaagtctcacaccgtaaacctgaaacatcatgttacagtctgaggcctgctccgagctgggtaagaaaggcctcgtgaatgcagccccctgggcagatgaggtttgggccttcacccctttgggactgcctcctcattgctccttgggaagcagccgcgcttgctgcctgtgtctttgggaaagtgaaagggaagggaggagaaatttgggcaaagcttctataatcagcctttcaaatngacagggtttcccttggactgccacaagagttttactcanangagnaaaggctggtnccaacctgggcttggtggaaacaaccagctnttgggcnaacnngnggaaggaaaancaanggcaaccctgcatttggggctttaatcnttnacgncctancctggganaagggctnnagacttttgttaaaagcccttaannttcctnnt

SEQ ID NO: 826 - DNA, 896 bp, Homo sapiens
  misc_feature 5, 574, 586, 592, 616, 672, 684, 690, 692, 696, 700, 707,723, 729, 751, 765, 779, 780, 792, 798, 803, 809, 822, 823,826, 827, 857, 858, 866, 873, 874, 882, 884: n = A,T,C or G
acgancgactactatagggcgaattggagctcccccgcggtggcggccgaggtacaatataggcagacagtttgccttcagaaattcagaaatgcagcttttgagggaggtcagcatcattggtctcagctaccattttcctgcaggatgtttataaatagttcctggcaaaggaggttgccgtatagggtcctacaagtaacctaggtggcagcatctcctcccagcgtcaggactaagcacacaagttcttccttccatctacccccgcgtacctgcccgggcggccgctctagaactagtggatcccccgggctgcaggaattcgatatcaagcttatcgataccgtcgacctcgagggggggcccggtacccagcttttgttccctttagtgagggttaattgcgcgcttggcgtaatcatggtcatagctgtttcctgtgtgaaattgttatccgctcacaattccacacaacatacgagccgggagcataaagtgtaaagcctggggtgcctaatgagtgagctaactcacattaattgcgttgcgctcactggccgcttttcaatcnggaaacctgtcntgccanctgcattaatgaatcgcccacccnccgggagaggcggtttgcgtattgggcgctctttccctttcttgctcaattgactncttggcctcggncgttcngnttgnggcnagcgggnttaacttaactcaaangcgggnataccggttttccccaaaattngggggataaccccnggaaaaactttttnnccaaaaggcccncaaaanggccngaaccntaaaaaaggcccnnttnntggcgtttttccaaaggtccccccccctgnnaggcttanaaaaatnncccttaantnaaaggggggaaa

SEQ ID NO: 827 - DNA, 654 bp, Homo sapiens
  misc_feature 5: n = A,T,C or G
gagcnccccgtaataccgactcactatagggcgaattggagctccaccgcggtggcggccgcccgggcaggtaccttcacagctgcaccacaccagttctgggcacatggacaacagatcaagctcccccatcatcacataagttaggcaccaaagagttagcaagggtattcagttcccacttaattgatttgcatatcatgcaggctctgatttcagtacctcggccgctctagaactagtggatcccccgggctgcaggaattcgatatcaagcttatcgataccgtcgacctcgagggggggcccggtacccagcttttgttccctttagtgagggttaattgcgcgcttggcgtaatcatggtcatagctgtttcctgtgtgaaattgttatccgctcacaattccacacaacatacgagccgggagcataaagtgtaaagcctggggtgcctaatgagtgagctaactcacattaattgcgttgcgctcactgcccgctttccagtcgggaaacctgtcgtgccagctgcattaatgaatcggccaacgcgcggggagaggcggtttgcgtattgggcgctcttccgcttcctcgctcactgactcgctgcgctcggtcgttcggctgcggcgagcggtatcagctcc

SEQ ID NO: 828 - DNA, 897 bp, Homo sapiens
  misc_feature 9, 19, 21, 35, 38, 45, 51, 64, 66, 71, 74, 78, 80, 88, 109,133, 149, 165, 176, 182, 186, 215, 242, 320, 329, 334, 364,369, 456, 483, 485, 490, 505, 521, 530, 537, 538, 578, 625,627, 645, 662, 682, 693, 702, 759, 763, 773, 774, 781: n = A,T,C or G
  misc_feature 782, 786, 789, 799, 808, 814, 818, 821, 823, 838, 842, 845,860, 861, 873, 881, 888, 891, 896: n = A,T,C or G
gccgtatcnactactatangncaatataggagcgnatnggagctncccgcngtggcggctcgcncnggcangtncgcngngggagganatgctgccacctaggttactngtaggaccctatacggcaacctcntttgccaggaactatntataaacatcctgcangaaaatgcagngaagtngaanagacagggatatcccataaggttatgcangaacatcaagagaagatgagaggtcanagatgggaagaaacaagaactttgacatgcttggtgttcttgcccaagctttgaagaagtttacaaagtctatatgtnagaatacanatttnccaccttgcccaacagtagaaaaacataanaaganaaaaacattaaaaaatgacaaggaagttaatggaagtcagcaatgtgatggtgtttggaggtggagccttcacaaggtaattaatgnccttgtaagaagaggccagagagcttncncaccnttttcctgccatgtnaggagccaagaaaccngctgtctgnaacctgnnagaagacccttactagaaactagccatactggcattcttnatcttggcttttcaactttcaaaactgtgaaaaatattttttttgtngnttaagtcaatggtctatnggtaatttttttatggnaaggccagccaaaaaacagnggctcatttantacatcccntttattttttttaatagggctcttttagaaacccctttttccaaattttgagattanaatncttggaaccnnataactnntttnctnagttttaagnttaccaatntttganaaanaantnggttattaacttttntttncanaaaagcccaaatccnngggggggctaanttttaaanaaaaaanggnaaaant

SEQ ID NO: 829 - DNA, 662 bp, Homo sapiens
  misc_feature 5, 529, 591, 618, 626, 627, 645: n = A,T,C or G
gagcnccgcgtaataccgactcactatagggccgaattggagctccaccgcggtggcggccgcccgggcaggtacccttcactctttaggagaaggtttgaaaaaaaactgtgtttcctgttgaaggccagtgatacctggcagcttacagttagaaaactctataactttattattttcatttgcacttaaaactgctatgagttttttaatgcaaaaaatagtgattgagaaagaaaaaagtgaacatatttatattcttccccctcagagagaaacgctgttaacattttgtgtatttcggtccaggttcttttctgtgtgtgtaagcacacatatgtgtttatattgtataaaataagagattcatgctggacatacattgtttgtaacttccttcctttccttcctttctttctttcctgagctagggtctcgctctgtcacccaggctagagtgcagtggtgggatctcagctcactgcaacctccgctgtctgggctcaagcgatcctcccacccaagcctnccaagtagctgggaccacaggcacatgccaggatgcctggctaatttttgttattttttganagacaaagtcttactatgttgcccacnttggtctnnaactcctgagctcaagcnatctactcaccttggcc

SEQ ID NO: 830 - DNA, 668 bp, Homo sapiens
  misc_feature 5, 568, 572, 573, 574, 575, 576, 577, 578, 583, 584, 585,586, 587, 588, 589, 590, 592, 593, 594, 595, 626, 629, 630,657, 660, 663, 665: n = A,T,C or G
gagcnccgcgtaatacgactcactatagggcgaattggagctccaccgcggtggcggccgcccgggcaggtactccatgccatgcttgtttctcagtcttggttgtgttagccctctccctgctcatgccccagttccgtgagcagcagcttgagtttccttaatgcctgggattggcaaccctggtaacaaggaccatgaacactctattaagagctaggattaacaatggcatcttgctatagctgcttaggcttcaggaagggtgtggaactaaaagcattttccctcccttgagcagttccttgtctcagtcccctgactgctccctatgctagattcagggattgagagggtcaaaatgctctcccaagatctagattgtatgattccccagtgagaaaatggaccacagaaaagccattgcttactttctcctgtattatagagtcactcctgatttccagctggtcttggtcacacaggctggctgtttttcttttcctttctagtttttgcagtctcctgtcacttctgttaaactcttgtgttctctcttggataatgnactnnnnnnnttttnnnnnnnntnnnnttgctttatttaacttttattaaaccaaatncannaacttttacaatgccttactaaaaggntgnctnanaac

SEQ ID NO: 831 - DNA, 426 bp, Homo sapiens
  misc_feature 45, 183, 294, 303, 305, 313, 321, 329, 332, 340, 352, 382,386, 393, 400, 401, 412, 423, 426: n = A,T,C or G
ggagctccccgcggtggcggccgcccgggcaggtacgcgggggtngatggaaggaagaacttgtgtgcttagacctgacgctgggaggagatgctgccacctaggttacttgtaggaccctatacggcaacctcctttgccaggaactatttataaacatcctgcaggaaaatgcagtgaaantataagagacagggatatcccagaaggttatgcaaaacatcaagagaagatgagaggagtctatatgtcagaatacacatttcccaccttgcccaacagtttgaaaaaaanaaaaaaaananaataaaangttccttnggccgctntanaactagtnggatcccccggngctgcaggaattcgatatacaagcttattngatnccggtcnaccttcnngggggggggcnctcgggtaccncan

SEQ ID NO: 832 - DNA, 490 bp, Homo sapiens
  misc_feature 412, 490: n = A,T,C or G
ctactatagggcgaattggagctccccgcggtggcggccgaggtacgcggggacaatgaaatcaatactcagagaaggcagataattctccacgaagccagaaaactaataaatgaacaacttgggcgaaatgtcccaccagacggtgtgatatttagtagcccagaaagctgccaaggggttgaatgacactatctgaagatatgaaccagtttgctctccatagggaggatttcatcaacaggaaacagatgcctggaaggcattggatttgctaagtgtctatgccatatgattctgctgtttgcgtttgatttagaatgctgagctgactcaaagtcaaactgtaagtacctgcccgggcggccgctctagaactagtggatcccccgggctgcaggaattcgatatnaagcttatcgataccgtcgacctcgagggggggcccggtacccagcttttgttccctttagtgagggttaattgcgcn

SEQ ID NO: 833 - DNA, 431 bp, Homo sapiens
  misc_feature 274, 304, 305, 306, 310, 311, 313, 316, 318, 320, 330, 332,334, 336, 341, 344, 352, 354, 357, 368, 391, 394, 409, 418,421, 422: n = A,T,C or G
ggcgaattggagctccaccgcggtggcggccgaggtacgcggggagctaatttctttttaaaaaataattcattaatgtataaagtgcaagcagtttgggtcacaaattaggaaagaatgcacctggacgtgatttattttgaattggacagctgaaacacatcccgtataaaatcactcattcctgtttttctataagtttgcctggagcattgtatggcatctctcacaatgtgtttgcacaactcagcagagccaaggctaagcagtgcanaggacagggtgaaagctggtattgcgcatnnnaaannanaancnangtcctgcccngncngncgctnttntaactacncngtngcgagaaggcntgcatgaatttcgatatcaagcnttntcgatcctcggcccntaacccttnacnnggggggggg

SEQ ID NO: 834 - DNA, 417 bp, Homo sapiens
  misc_feature 412: n = A,T,C or G
ggagctccccgcggtggcggccgcccgggcaggtacatgccctgtggccccccatctgacataccaccagagatctggttatcacctggcccattgactaccacagccagccttgcttgacatgcaccaccagggtccctgaggacaggtctgcccaattaagctccaccctaccacagtgaaaaacaaaaagaaagaaagaaaggaacaaaggatattcaacacaaccagaaatcaataaataaaatgacaggaataagccttcacatatcaataataaccttcaatgtaaatggattaaagtttccacttagaagatagagactggcttgaatagattttaaaaatgacctaattacatcctgcatacaagaaactcatgagggaattcaaaggaattttttgaaacaanataag

SEQ ID NO: 835 - DNA, 479 bp, Homo sapiens
  misc_feature 137, 180, 186, 300, 338, 347, 362, 378, 390, 401, 415, 420,423, 424, 434, 438, 443, 448, 450, 458, 463, 464, 477: n = A,T,C or G
ctacttagggcgaattggagctccaccgcggtggcggccgcccgggcaggtacttgcaagaaacctcaggacttgagtaacagcaacatggtaagttttctaagttttcttttcgtctcccatatacgctgggctgngctggaatcaccaacaggcacagaaaaaatgacaacaaaacancaacanaacccccaagaatatcctgttctctttggccaaagtcaggaaaggggagccccaacagagacccagtaggaagctctagcccctgttttgtacctcggccgctctagaacctantgggattcccccggtgctgcaggaatttcgataatcanagctttatncgattacccgtttcngaccttttaggtgggngggccccgggtncccccaagccnttattttgtttccnctttntanntggaaggggnttanaattnttcancnaccctttngggcnngcaattatccacngg

SEQ ID NO: 836 - DNA, 798 bp, Homo sapiens
  misc_feature 1, 4, 7, 8, 12, 13, 14, 16, 23, 25, 28, 30, 38, 40, 41, 44,48, 49, 54, 58, 61, 64, 69, 74, 75, 76, 80, 85, 86, 93,96, 97, 118, 124, 127, 129, 244, 245, 254, 261, 274, 276,311, 333, 345, 373, 382, 384, 396, 397, 404, 406, 409, 428: n = A,T,C or G
  misc_feature 440, 444, 482, 485, 493, 498, 500, 515, 542, 544, 560, 564,569, 575, 578, 596, 603, 605, 623, 637, 641, 646, 647, 664,669, 672, 678, 684, 696, 703, 706, 712, 724, 753, 761, 772,783, 786, 787, 797: n = A,T,C or G
ntcnatnntccnnntnaatcatncnatntncaacttcntnnccnactnntttanaatnatntcngctanagtannntttntttcnntaatctnatnntatattatatctcatagtatntagagnaancntatacgactcactatagggcgaattggagctccaccgcggtggcggccgaggtacaacttgacagtttataaaaatgctaacctatatcaacatttttccccaccaaagtgttcnnaagggcaanggtaagngaatacatgtttncntgcttgtgtcaggggcacacagcaagggaaggcanaaatgggcatgacctagtattnagaatccccaanaagccctttcataattcccttaataaangaactttgngngaccttgcattnntttaaananatnaaattaatttgggttcatnttttctttaatntctntgcgaattaaactatataaagtaaattggggaaaaccncanaaattgcncatgngnctttggttactttgnaatcttccttttttggacaccccaagntntggccttccttttctncctnttaanttgatnccnttaaaaccaatccttggnccccttncnggtttcttttaaattggnaaaatttataatcnttcnatggnnaccaattttaaccaatntatgnaanataggnaacctnaattttgggttntttggtnttncaagtnttttcaaaaacnatcttttccaaaattttccccaattaagnggtttggnccttatggtcnaaatttttaanttnnaaaaataaang

SEQ ID NO: 837 - DNA, 451 bp, Homo sapiens
  misc_feature 320, 366, 372, 406, 418, 425, 437, 439, 451: n = A,T,C or G
ggcgaattggagctccaccgcggtggcggccgcccgggcaggtacttatttttatattaatgtcagacttcaggatttattttagccttcctttttgagaagctttctaagccctcagcattaagcagcatttttcctcatcacacacggatctgagcaggtgaccgcggctgggataggtgctgtttgtgttagtgtgcaggtgggctggccagccattgggtgtgtgtttttcctagagtaagaagcactccaggctgagatgagagctgttgaaatgagtaacatttccgtctcctgtgatacgcgctgctgttgcnttctttcaaatgatcaagatttacaattcttttaatgggtctcttnttaaanaatgttaattcgagtgaagaaagggaacttctanaaagaatttttntttcctntttgggccctgngnattaaccaccan

SEQ ID NO: 838 - DNA, 776 bp, Homo sapiens
  misc_feature 1, 3, 5, 10, 11, 12, 22, 26, 29, 31, 32, 35, 38, 40, 47,48, 49, 52, 55, 64, 65, 67, 72, 77, 103, 104, 109, 112,117, 220, 270, 271, 299, 304, 312, 320, 324, 327, 336, 372,391, 393, 400, 413, 431, 435, 440, 442, 451, 464, 466, 474: n = A,T,C or G
  misc_feature 481, 485, 489, 490, 498, 504, 506, 510, 511, 515, 525, 563,579, 595, 606, 628, 637, 645, 651, 661, 671, 674, 692, 709,717, 722, 751, 763, 774: n = A,T,C or G
ntntnactannntctgtcttcntccnttnanntantananattaatnnnttntangctattgtnnanttaanattanataaaaacttattatatctatttctnnttttnagnttagngctatacatcatatagggcgaattggagctccaccgcggtggcggtcatagctgtttcctgtgtgaaattgttatccgctcacaattccacacaacatacganccgggagcataaagtgtaaagcctggggtgcctaatgagtgagctaactnncattaattgcgttgcgctcactgcccgnctttncagtcggnaaaacctngttngangccaagctngcatttaatgaaattccggcccaacgccgccggggnggagaagggccggtttttngncgttatnttggggggcggcnttcttttcccgcctttcncctncggcntncaactttgnaaccttcggtctngnaggcctancgggttncagnttcnnggccttgnccgggncngtannccgnggttatttcnaggtctttccatcctttcaaaaaaggggccggggttanattaaccgggggtttnaattccccaaccaagnaaaattccaangggggggggaattaaaaccggnccaaggggnaaaaaagnaaaacnaatttggttnggaaggccanaanaaaaaggggccgcaaggncaaaataaagggggccncaagtggnaaacncccggttaaaaaaaaaaaaggggccccgncccggtttttgncctttggggcngg

SEQ ID NO: 839 - DNA, 856 bp, Homo sapiens
  misc_feature 1, 5, 6, 7, 13, 360, 362, 363, 364, 365, 368, 370, 371, 372,499, 674, 689, 713, 732, 751, 757, 763, 768, 777, 798, 801,803, 845: n = A,T,C or G
ntgcnnnacgacnactactactatagggcgaattggagctccaccgcggtggcggccgaggtacctttgttcttcctcctcctccatcctcccagtgcctgtgactggaatggtgaatggcaccgctggatgggtttctgcagatgtggaacagccaggaagccagccctgtccaaattgaagtgctttctgtaggaccaagaagggtcaattactattagtggtagacttcacaagccaggcggtaggaaggcagggagagccctatgagaactgagaccgactcacctggcatgtgctggatccatgcataaaagctactgtatcaatgtttcagttgagtgaatgaaaaaaaaaaanannnnaanannnggtccctgcccgggcggccgctctagaactagtggatcccccgggctgcaggaattcgatatcaagcttatcgatccgtcgacctcgagggggggcccggtacccagcttttgttccctttagtganggttaattgccgcttggcgtaatcatggtcatagctgtttcctgtgtgaaattgttatccgcttcacaaattccacacaacatacgaaccgggagcataaaagtgtaaaagcctggggtgcctaatgagtgagctaactcacattaattgcgttgcgctcactgccccttttcantcgggaaacctgtcntgccacctgcattaatgaatcggnccaacccccgggaaaagcngtttggcgtattgggcctnttcccnttcctngttanttgactccntgggcctcggccttcggttgnggnangcggttttaacttactcaaaggggggaatccggtttccaaanaatcagggaat

SEQ ID NO: 840 - DNA, 477 bp, Homo sapiens
  misc_feature 2, 3, 4, 16, 39, 40: n = A,T,C or G
gnnnaggttgccgctnttcgactactatagggcgaattnnagctccccgcggtggcggccgcccgggcaggtacaagggagacagcatgcagggtgtgttcagaagagcttgctgaggtgctcggctcttagcattaaaaatgtgatgttggtatatcatcctgatagaaaacactgctttccaaatcctagtcactggatgggaggaaagtaagaacagattctgccaaccactactgatttgttataattctccccattgaaattgggacaaaatttgtaacatgctactctgaaattgatcacattctcaattctgtcaatagcagagaatttagcctcaacaccaccaattcaaaatagtttaggtcttgcccctgcctgattatgtaacagaaaagcataaagtttgcagggtggagcgggaggatttttctaggaaacttccttctcttccattaacgtgtgaatgagtaa

SEQ ID NO: 841 - DNA, 839 bp, Homo sapiens
  misc_feature 556, 653, 733, 759, 789, 801: n = A,T,C or G
tagggcgaattggagctccccgcggtggccgagcggcccgcccgggcaggtactaatttgtaaaattaagaagttgtagaactgtgaacatcaactattgcattatagggaaaaagttaatttaaaagaataggacaaggtaaactttttaaaaaattttgcgagtggaatataagacaaaaaagcatttccagaagtttgacattcactagaagctctctctgtgcctctcttttccaccattcatactgttaaaaaaagacaatattgaaatattaccatcagtattattgactgttgaagactgggcccttgctgtaagtcaggcaccatgctggatgcagtaaatgtatgtcctatttcaaaggtaaagccactgcatcttgcacacacagtttgggttcaaaagctttaaagagtaacaagaaggtttgcccaagcttagtcacatcactgagcaaaatccaccggatagaatgaggttgagatctctgagaaagcaaaatactaattgacagtagcagttggcgggtcatgtttttatcctaatagttgnatagctgtgctgacttcaactttttcacttcagacttttccccaagaggtcctttctctttgtgaagtggtccttcttcagtctgggactctttcantttcctgattgagtcttgctccatcgatacaggcccctggtaaaccaactttatactacagcacttccttaacaaaacanggtgatttattttgagcccatcttanaatatccaattatgtgaccacataagggtnggcttattaaancgatagaaccggatttgcctttctggagggcattcccg

SEQ ID NO: 842 - DNA, 485 bp, Homo sapiens
  misc_feature 2, 3, 12, 28, 103, 211, 228, 319, 350, 353, 453, 464: n = A,T,C or G
gnnagggttgangccactttactatagngcgaattggattccccgcggtggcggccgaggtactgatctaaccaagatattttgtttttctcacccaccagtnactttctcagtcctttctgtatcccttgcaatttgaacaaagcttggtgaatagtgtgcacacaaaaagcacactaggtgaaagacagatacataaaaagggtaaagncaggatattttaacaancctatcaagctctaaatataagcctccttggtagttttctctttaaccctctctccactgttggatgaaatttgctgcattcaattccagntcccaccccaacttccttcttaacacaaggncanggttaagccttcggtgctttaatccagaggaaaattacttattttaaaaagcagtgaaaaacaccgcattcctttggcacaggatgaagaccagctcagntcttcagttgncgatcattgtctattgttctc

SEQ ID NO: 843 - DNA, 462 bp, Homo sapiens
  misc_feature 3, 322, 325, 410: n = A,T,C or G
ctnctatagggcgaattggagctccccgcggtggcggccgaggtacgcgggaagcagtggtaacaacgcaagacttttttttttttttttttttttactgcaacaacctaacaggaaaactaatcagagatcatgaggagagtggtatatcagtcagggactaatcaggaacataatccacttgagattttaaaatagagagggcttaggctggggagttggtgacagcataatgggaaatctacaaagcaaacaggaatagggagacaacccagagcccatctaggctggcagagtcatcatctctaggctggaaggtcanaanaaggtggtgttagtggagccaggagatgcacagtctcccaggggaagctggagctagggtgtacctgcccgggcggccgctctanaactagtggatcccccgggctgcaggaattcgatatcaagcttatcgatacc

SEQ ID NO: 844 - DNA, 489 bp, Homo sapiens
  misc_feature 2, 3, 4, 9, 13, 40: n = A,T,C or G
gnnnagggntcgntcactatttagggcgaattggagctcntcgcggtggcggcccagcacataatgcagtatacgcccaattaaatttgagactcacagagtttattagtggccaccttgtccaacctctcctattagagatgaagagacttccagaggtcataccgcaagttgacagcagagatgcagtaggaactgaagtgaggcagaatttgaggattcaggtccatggggaagatagtttgctgaatgaaggagcagtgctttagggaacaattttaatggaatttaaagacagaataattcagaactggatacatagtagataccaactgcaccttgtgggaataattctctggatagtatctggcagtcttcagatactttgctgttatcctggctaaaccacataagttgttgtgtgttggttcacaatctgatcttgcaagatgtaagttagaatcttgacagttttttttgagagagttt

SEQ ID NO: 845 - DNA, 480 bp, Homo sapiens
  misc_feature 2, 3, 4, 8, 9: n = A,T,C or G
gnnnaggnnggcgccgaaacgactactatagggcgaattggagctccaccgcggtggcggccgaggtacgcaacatgacattggctggtgtaaagatcttacaattatttttaaagtttcattgtattcatttgattatatagtttcttgccatcacaacaaacactcctattcatgtctaattcgatacctggtgagtccacataagcatttgggtccccactgatgaagagcaccatggccaggtcacccacttgatcaggttctcttgctttttgttgtgcatctcatcttattgtaggcattcaaactgtgggctcaggcaagcctttccagtgtgatcatattaattttatattttatgtgttaacatgtgcctccaataacttgctttccttgctcaccatggtgatgcatttttcctactttatgtcctcgctcattgattatgatgagctgctgactatttgaacctggtac

SEQ ID NO: 846 - DNA, 476 bp, Homo sapiens
  misc_feature 4, 36: n = A,T,C or G
aggnctctatcactacttagggcgaattggagctcnccgcggtggcggccgccttcacggccgaagcccgattcgcggtaaccgccgaagccgcaagccgcgtcgaactgattggcgctgttgatccacaccacgccagccttgatggcgggagcgatgtccagcgcgaggctgatcgactcggtccacacgctggcggccaggccgtacaccgtgttgttcgccagctgcaccgcttcaggcggcgtgcggaagctcatggccaccagcacggggccgaagatttcagcctgtgccacggcggccgaggtcgacgcgcccgtgatcagggtcggcgggaaccacgagccgtcagccggcagttcgcacgccggctgccatacgtcgcaaccttcggcacgggcagagtcgaccagcgcggcgatgcgctggcgctgcacggggtcaaccagcgcgcccacgtccatcgatttgtc

SEQ ID NO: 847 - DNA, 825 bp, Homo sapiens
  misc_feature 2, 52, 60, 327, 366, 380, 510, 544, 558, 590, 603, 606, 610,617, 630, 678, 683, 693, 707, 769, 790, 793, 796, 806, 808,825: n = A,T,C or G
cnaattggagctccaccgcggtggcggccgcccgggcaggtacttggttttntttttttntttttccttttggctttgactttgagtcagctcagcattctaaatcaaacgcaaacagcagaatcatatggcatagacacttagcaaatccaatgccttccaggcatctgtttcctgttgatgaaatcctccctatggagagcaaactggttcatatcttcagatagtgtcattcaaccccttggcagctttctgggctactaaatatcacaccgtctggtgggacatttcacccaagttgttcatttattagttttctggcttcgnggagaattatctgccttctctgagtattgatttcattgngccccgcgtacctnggccgcgaccagctctagaactagtggatcccccgggctgcaggaattcgatatcaagcttatcgataccgccgacctcgagggggggcccggtcccagcttttgttccctttagtgagggttaattgcncccttggcgtaatcatgggcatactgtttcctgngtgaaaatggtatnccctcacaattccccacaacattaccaacccngggagcataaagnggnaaanctggggngccctaatgaggngagccaacctccattaattggcgtgcgctcactggcccgctttccaancgggnaacctgtcgngccactgcattaantgaatcggccacccccccgggagaagcggttgcctttttgggcccttttccccttcttgctnactgactcgcttggcctcggncanttnggttgcgggnanccgtataaacctaatcn

SEQ ID NO: 848 - DNA, 871 bp, Homo sapiens
  misc_feature 2, 3, 4, 5, 6, 7, 8, 10, 420, 497, 524, 559, 566, 583, 596,607, 610, 616, 617, 625, 629, 634, 637, 638, 641, 642, 649,651, 652, 658, 661, 673, 679, 680, 694, 713, 717, 748, 769,776, 777, 786, 789, 791, 803, 804, 805, 811, 820, 825: n = A,T,C or G
  misc_feature 826, 827, 829, 834, 837, 838, 848, 849, 851, 864, 871: n = A,T,C or G
gnnnnnnncnctaatacactactatagggcgaattggagctccacccgcggtggcggccgcatacacgcgggcgatgacttcgtcgcgccggttctggtcgatggcgcgcgtgacgatggggctgcgtccgggcggcagctcgtcgatcaccgacacttccaggtcggcgtaatacgtcatggccagggtgcgcgggatcggcgtggccgacatcatcagctggtgcggcacggcccgctctagaactagtggatcccccgggctgcaggaattcgatatcaagcttatcgataccgtccgacctcgagggggggcccggtacccagcttttgttccctttaatgagggttaattgcgcgcttggccgtaatcatggtcatagctgtttcctgtgtgaaattggtatcccctcacaattncacacaacataccaacccggaacataaaatgtaaaacctggggtgcctaatgaagtgagctaactcacattaattgncgttgcgctcactggccccttttcaancggggaaaactgtccgtggccacttgaattaatgnaatcggnccaaccccccggggaanaagccggtttgcnttatttgggcnctntttccnntttcttgnttanatganttnnttnncctcggncnnttcggnttnggggaaaccggntttaanntaacttaaaagggngggaaaacgggttttcccnaaantaagggggtaaacccgggaaaaaaatttggncaaaaggccccaaaaggcccnaaacctnnaaaggcccngtngnggggggtttttnnnaagggnccccccccnggggnnntnaaaanatnncccccttttnnanggggggaaacccngggatan

SEQ ID NO: 849 - DNA, 855 bp, Homo sapiens
  misc_feature 458, 477, 478, 502, 519, 529, 549, 553, 595, 601, 608, 615,625, 630, 631, 632, 640, 644, 649, 715, 724, 726, 729, 736,737, 742, 757, 779, 781, 794, 800, 806, 816, 836, 839, 841,848, 849: n = A,T,C or G
tatggcgaattggagctccccgcggtggcggccgccgggcaggtactgatctaaccaagatattttgtttttctcatccaccagtcactttctcagtcctttctgtatcccttgcaatttgaacaaagcttggtgaatagtgtgcacacaaaaagcacactaggtgaaagacagatacataaaaagggtaaagtcaggatattttaacaaacctatcaagctctaaatataagcctccttggtagttttctctttaaccctctctccactgttggatgaaatttgctgcattcaattccagttcccaccccaacttccttcttaacacaaggtcagggttaagccttcggtgctttaatccagaggaaaattacttattttaaaaagcagtgaaaaacaccgcattcctttggcacaggatgaagaccagctcagctcttcagctggttgatcattgnctattggtctcaaacagtnnaccagtatttcacactgagaatgncggctgcgggtatattncaattccccncttcttatgaatatgaaagngaangggctctggaccctgaaagtgggaaggtaattgccttggccnataggngaatggntcccccntcaactttanggccnnnggctttancacntcggngcccccgggacccttgggccggtttagaactaagggggatccccccggctgcagggaatttcatancaagcctancngancccgcgnncctcngggggggggcccggnccccccttttggtccctttaangnggggtaaatggcncccctngggggnaaaatgggcnaactgggtcccgggggaaantgntntccctcnnaaatct

SEQ ID NO: 850 - DNA, 873 bp, Homo sapiens
  misc_feature 1, 358, 365, 367, 425, 461, 527, 550, 573, 581, 584, 614,618, 622, 648, 650, 653, 654, 657, 658, 662, 680, 698, 701,704, 707, 713, 720, 732, 734, 735, 737, 746, 763, 764, 766,772, 778, 784, 787, 802, 817, 819, 843, 854, 857, 858: n = A,T,C or G
  misc_feature 862, 863, 873: n = A,T,C or G
ntggcatatggcagctcccccgcggtggcggccgaggtacgcgggggccctcaacttctgagagcttaaggtatttgttcatgttaggcaggtaatgtctataaaccaaaagctgccacatactatctctctgctcaacactttactggatactggaggatttaagggaaggaaaaaagtgaccttttttgcctttttaagagcttgtaatcggtaaaggagataaaactcacacaaaggtcagggtatattttgtgctaagcatatgaccgtagacatttaaagtgctgcccgtaatgcagaaagaagaagaaagtggtgtgatctaaaagtaacataggttttggttttggtttgntttttgntnttttcctttttctttttctttttctttttcttttatctagacagaagtctcactctgncccgcaggctggaagtgcagtggcatgatcttcggnttcctgcaaccttccgcctcccagggtcaagcaaattcccctggcctcgggccttcaaggcaaatnggaaattaaaggccccatgcccncccacccccggttaattttttgnatttttanganaaaacccggggtttcaccctggttgggccnagcntggnccttggaacctttggaccttcaaggnanccnnccnntctnaagccctctttaaagggnctaggattacaggggttngancanccnggcccnacccggnaacaaaggtttngnngnggaattggnacccagggggggccacnngnagcccntgaaantaaccnganccaatcccccgggcnggcccggcccctttntntccccccgccaagaagccaagccngggcctcctgnganncccnncccggggccn

SEQ ID NO: 851 - DNA, 861 bp, Homo sapiens
  misc_feature 428, 509, 521, 522, 537, 575, 587, 607, 613, 626, 627, 633,635, 664, 679, 683, 684, 685, 689, 690, 698, 731, 738, 770,778, 781, 783, 787, 807, 812, 813, 816, 828, 833, 835, 836,848, 858, 861: n = A,T,C or G
cgaattgggctccccgcggtggcggccgaggtacgcgggggtagatggaaggaagaacttgtgtgcttagacctgacgctgggaggagatgctgccacctaggttacttgtaggaccctatacggcaacctcctttgccaggaactatttataaacatcctgcaggaaaatgcagtgaagtagaagagacagggatatcccagaaggttatgcaaaacatcaagagaagatgagaggtcagagatgggaagaaacaagaactttgacatgcttggtgttcttgcccaagctttgaagaagtttacaaagtctatatgtcagaatacacatttcccaccttgcccaacagtagaaaaacataagaagagaaaaacattaaaaaatgacaaggaagttaatggaagtcaacaatgtgatggtgtttggangtggagccttcaaaaaggtattaatgcccttgtaagaagaaggccagaaaagcttgcgccccttctttctgccctgtgganggagcccaagannccggctggtcttgcnaccttgcaagaaggacccctcacttagaagctaggccntacttgggcttncttaatcttgggcttttccnaccttncagaacttgtgannaagttntnttgtttgggggttaatccaatgggctatnggaaatttttttatnaccnnncccnngccaaganagggcccttatttacttccttcccttttttttnttttttngggctcccttcaaaaaccccatgttcaaatanaaaattanaanantganacccataaccccttccttgnttttnnttncaaatttggganaaaangnnggtataaccttncttcccaganaan

SEQ ID NO: 852 - DNA, 859 bp, Homo sapiens
  misc_feature 343, 431, 461, 525, 557, 569, 583, 590, 599, 623, 624, 651,656, 658, 659, 684, 685, 701, 709, 714, 726, 727, 736, 740,744, 750, 754, 759, 760, 768, 783, 789, 807, 834, 835, 842,855: n = A,T,C or G
tactatagggcgaatggagctccccgcggtggcggccgggggccattgagactgccatggaagacttgaaaggtcacgtagctgagacttctggagagaccattcaaggcttctggctcttgacaaagatagaccactggaacaatgagaaggagagaattctctggtcacagacaagactctcttgatctgcaaatacgacttcatcatgctgagttgtgtgcagctgcagcggattcctctgagcgctgtctatcgcatctgcctgggcaagttcaccttccctgggatgtccctggacaagagacaaggagaaggccttaggatctactgggggagtccngaggagcagtctcttctgtcccgctggaacccatggtccactgaagttccttatgctactttcactgagcatcctatgaaatacaccnagtgagaaaattccttgaaatttgcaagtngtctgggttcattgtctaaagcttggttccaacttttccagaatgccccccaaagaattcactnggatcttggaaaaaggaaaaaaacctgatggnggttaactgaanccattttggttggnaccctanccagggctngatgtcatttatttgggaaacccnnacaaacttggctttttcctttgccccngggangnnttgggttttgagaagcttttttggnncctcggccccttttanaacttagnggatnccccccggcctnngggaattcnaatncaancttttngatncccgnnacccttgngggggggggcccggnccccancttttgtttccttttatngaggggttaattcccccctggcggaannaatgggnaaaactgggttcntggg

SEQ ID NO: 853 - DNA, 829 bp, Homo sapiens
  misc_feature 285, 368, 435, 459, 478, 486, 503, 514, 525, 533, 577, 586,595, 599, 600, 606, 610, 617, 651, 652, 673, 676, 678, 681,682, 683, 687, 688, 690, 694, 698, 699, 702, 707, 712, 715,725, 741, 742, 753, 757, 758, 759, 771, 780, 782, 783: n = A,T,C or G
  misc_feature 785, 786, 799, 805, 811, 812, 817, 819, 822, 827: n = A,T,C or G
ctactatagggcaaattggagctccccgcggtggcggccgaggtacgcgggggtagatggaaggaagaacttgtgtgcttagacctgacgctgggaggagatgctgccacctaggttacttgtaggaccctatacggcaacctcctttgccaggaactatttataaacatcctgcaggaaaatggtaaagcccttggttaaatttattggcttcatttatgtatctcacaacacttcttttctgttttaattctaggaatagaaacttacttttggaaatacagnacctgccggcggccgtctagaactagtggatccccccggctgcaggaattcgatatcaagcttatcgatcccgcgacctcganggggggccccggacccaactttttgttcctttaatgaagggttaattgcgcgcttggcgtaatcatnggcataagctggtttcctgggtgnaaattggtattccctcacnattcccancaacataccagccgganccttaaatgtnaaagcctgggnggcctatngagggagcctaactccctttatttggggtgggcctaactggccnctttccagntgggaaacntttnnggcccnttgnattattnaattggccaccccccggggaaggcgggttttggnntttggggccttttccctttcntgntnaannnattnntngccncggnnttngggtnggggnaanggtttaattnctcaaaggggggatannggttttccccnaaannnggggaaaccccngaaaaaacntnngnnaaaggccccaaangggccnaacccnnaaaangnccnttttntc

SEQ ID NO: 854 - DNA, 897 bp, Homo sapiens
  misc_feature 120, 131, 143, 305, 348, 384, 396, 399, 422, 423, 448, 451,461, 470, 488, 502, 504, 512, 516, 519, 533, 544, 576, 582,586, 587, 593, 611, 618, 619, 633, 643, 647, 650, 662, 670,676, 680, 685, 693, 695, 707, 716, 717, 724, 727, 734: n = A,T,C or G
  misc_feature 736, 741, 744, 756, 759, 776, 781, 787, 788, 796, 799, 813,814, 822, 826, 831, 873, 876, 881, 883, 885: n = A,T,C or G
tagggcgaattggagctccccgcggtggcggccgaggtactgcaaggaggcaaggagattacatttttcttatttctactactttttgttgcctaacaccgtttagctggtgggacaggntctaagtattngctaaatattgntctcattattttgaacatgtaaaagatgactgcattcttatatatttcccttttaagtttgaaaagtgaactactttctttatataaaaattcatttgcctattgtctcagaatatcacatataactggtgcactggacataagggatccggtccccattgnggctttgtctataaatagctacaaataaatagctataaatagntttgtctattaaatcttaaaagggatgaagtatcangtcaacatccantanaagtggagtggcttgggagcacnnctcaaggtctcctccattttttctngantggaccggcnccaatattntctttttgaccttcaatngggggagttttttncnccccttantctnagnaaaagaatcctttncttgggattancccgatcagggaatcattagccttcttcaaanggttanccanntccagnaaaattctttgggcccancgggccnngggggggccttatngcctggaaancccncanccctttgggggngggctgangggcanggcnaatcncaaagggntnaagaagaatggnaaccatccnngcccaanaangggggananccccnccnctccctaaaaanatnccaaatttaattggggncgggngggcanngcccctantanaccccccacccctnngaggcccnggcnggganaaatcccttgaatcctgaaggcccaaattgggagtggacccnatnttggncncncccccccaccct

SEQ ID NO: 855 - DNA, 870 bp, Homo sapiens
  misc_feature 5, 7, 8, 12, 23, 36, 503, 602, 603, 631, 635, 660, 682, 683,686, 713, 716, 723, 724, 728, 739, 740, 744, 748, 751, 760,774, 776, 777, 779, 789, 790, 797, 804, 811, 817, 834, 840: n = A,T,C or G
gtggncnntttntactctcactntagggcgaattgnagctccccgcggtggcggccgcccgggcaggtacgcgggggtttgtagatggaaggaagaacttgtgtgcttagacctgacgctgggaggagatgctgccacctaggttacttgtaggaccctatacggcaacctcctttgccaggaactatttataaacatcctgcaggaaaatggtaagcccttggttaaatttattggcttcatttatgtatctcacaacacttcttttctgttttagttctaggaatagaaacttacttttggaaatacagtacctcggccgctctagaactagtggatcccccgggctgcaggaattcgatatcaagcttatcgataccgtcgacctcgagggggggcccggtacccaagttttgttccctttagtgagggttaattgcgcccttggccgtaatcatggtcatagctggttcctgtgtgaaattggtatccgctcacaattncacacaacataccaacccggagcataaagtgtaaaagcctggggtgcctaatgaggtgaagcttactcaccattaaattgcgttgcgctcactggcccnnttttcaagtcggggaaaacctgtcgtgnccanttgcattaaatgaatcggcccaccnccccgggaaaaggccggtttgnntanttgggcccctctttcccctttcttggntanttgactnncttncctcggtcatnnggtncggnaancggtataanttacttcaaaggcngnntnccggttttcnnaaaaatnaggggantaccccngggaanaacattttggccaaaanggcccnccaaaaggccccgaaccccaaaaaaggcct

SEQ ID NO: 856 - DNA, 501 bp, Homo sapiens
  misc_feature 2, 3, 4, 7, 16, 19, 40: n = A,T,C or G
gnnnagnttacgcccnatncgactactatagggcgaattngagctccccgcggtggcggccgaggtacccggcttggtgaggagtcccagattgtggaacaaagtattcctctgttcaataccatcttccaaaaagaaacaatgacctagtgtgtcaaacccaatggtgtcctttattagcaagccatttgtcccatgcacagtgatgcaccttgagaagctgtgatgaaatagacaggccgtccacaaaatgttgcaatgtctgtatcctcctttataatccacgtcaccacacaggtgaaaatgaacagggtatcgccccatctgctgctgacccatgttgtttcaattccacataagaaaggatggactggaagtaaaaatttttcattatcataatggtgttcccccaaaaggttattcattaaattcaaaaaaaatttgggcacctggatttttttcttgcgtttagccatggagttccctccaactttcttccct

SEQ ID NO: 857 - DNA, 534 bp, Homo sapiens
  misc_feature 2, 3, 4, 6, 8, 9, 15, 17, 19, 20, 21, 37, 49, 232, 243, 370,405, 426, 428, 442, 454, 456, 460, 467, 480, 496, 504, 528,532, 534: n = A,T,C or G
gnnnanannttcganancnnntactatagggcgaatnggagctccccgnggtggcggccgcccgggcaggtactccacaagccagaagattagtctccttccctgtagcctcatctagcttacttattcagactttctgttcacaaggggtttgttatcttcatgaaattttaatatgtgtaagttagaaatgaaattagaaaaagaggttcttgctgtaaacactgggcangagtagctcanaagaagactgtggttcttggatgccctcatgcctttgttccagtgcaggtgcctagtggagggtgcagtgctcttgcaacatagaaggacccattcttgcagggagcttgatggcttaactttcctnggaaccgggaagggagaaggaaagggcctttgttnggacccccaaccttttgtttngnaatttggacttggngcttttttttgnanaaanaacccancccggaaaaaaanttccccctttttcccnaaactttncaacccccccccaaaattctttgntggncn

SEQ ID NO: 858 - DNA, 473 bp, Homo sapiens
  misc_feature 2, 3, 4, 5, 13, 419: n = A,T,C or G
gnnnnaggccctnaacactacttagggcgaattggagctccccgcggtggcggccgcccgggcaggtacatctcagatgaagctgagctatcaagtgacttggttcaagacctatctttcagactgtctttccttctactatgcagatcaacatcctatgtaagctgtgaccccaggcagtaattagttttcacaatccttcttcaagattgagggacccttttcccagactatgttttcatgaagtaagctggctggcctttgtctcccaacatttatggaaagcttttggtgcctgatgtatacttgatgtcaaactctttcccatttttgtgtccctctggacacagaagtcaggtaggtccaagacttcggtgtccttttccttctctgagctcagttttttttttgttcacagnaaatgtttatttttgttcatattatgcccaggggaattttaccctacaaaaaag

SEQ ID NO: 859 - DNA, 494 bp, Homo sapiens
  misc_feature 2, 3, 4, 5, 9, 11, 16, 17, 21, 39, 472, 490, 494: n = A,T,C or G
gnnnnaggngncgccnnaacnactactatagggcgaatnggagctccaccgcggtggcggtaatacggttatccacagaatcaggggataacgcaggaaagaacatgtgagcaaaaggccagcaaaaggccaggaaccgtaaaaaggccgcgttgctggcgtttttccataggctccgcccccctgacgagcatcacaaaaatcgacgctcaagtcagaggtggcgaaacccgacaggaacttataaaagataccaggcgtttccccctggaagctccctcgttgcgctctcctgttccgaccctgccgcttaccggatacctgtccgcctttctcccttcgggaagcgtggccgctttctcatagctcacgcctgtaggtatctcaagtttcggtgtaaggtccgtttcgctccaaagctgggcctgtgttgcacagaaccccccgtttcaagccccggacccggcttgcngccctttatttcccggtnaacn

SEQ ID NO: 860 - DNA, 490 bp, Homo sapiens
  misc_feature 2, 3, 4, 9, 45, 54: n = A,T,C or G
gnnnggggnccgctctcgactactatagggcgaattggagctccnccgcggtgncggccgcccgggcaggtacgcctactcaacccggctgttcaccattgatggcatcagcatcccatacacatggaaccacaccgttttctatgatcaggcacagggaagaatgcctttcttggttgaaacacttcatgcatcctctgtggaatctgactataaccagatagaaagagacactgggttttaaaattcatgcttcaatatccaaaggagatcgcagtaatcagtgcccctccgggtttaccttagactcagttggacctttttgtgctgatgaggatgaatgtgcagcagggaatccctgctcccatagctgccacaatgccatggggacttactactgctcctgccctaaaggcctcaccatagctgcagatgggaagaacttgtcaaggatattgatggagtgtgctttgggtaggcatacctgcca

SEQ ID NO: 861 - DNA, 447 bp, Homo sapiens
ggcgaattggagctccaccgcggtggcggccgggggccattgagactgccatggaagacttgaaaggtcacgtagctgagacttctggagagaccattcaaggcttctggctcttgacaaagatagaccactggaacaatgagaaggagagaattctactggtcacagacaagactctcttgatctgcaaatacgacttcatcatgctgagttgtgtgcagctgcagcggattcctctgagcgctgtctatcgcatctgcctgggcaagttcaccttccctgggatgtccctggacaagagacaaggagaaggccttaggatctactgggggagtccggaggagcagtctcttctgtcccgctggaacccatggtccactgaagttcctttatgctactttcactgagcatcctattgaaatacaccaagttgagaaattccttgaa

SEQ ID NO: 862 - DNA, 503 bp, Homo sapiens
  misc_feature 2, 3, 4, 6, 11, 13, 17, 254, 472, 492: n = A,T,C or G
gnnngnccgcnancatncactactatagggcgaattggagctccaccgcggtggcggccgaggtactgatctaaccaagatattttgtttttctcatccaccagtcactttcccagtcctttctgtatcccttgcaatttgaacaaagcttggtgaatagtgtgcacacaaaaagcacactaggtgaaagacagatacataaaaagggtaaagtcaggatattttaaccaaacctatcaagctctaaatataancctccttggtagttttctctttaaccctctctccactgttggatgaaatttgctgcattcaattccagttcccaccccaacttccttcttaacacaaggtcagggttaagccttcggtgctttaatccagagggaaaattacttattttaaaaagcagtgaaaaaacacccgcattcctttggcacaggatgaagaccagctcagctcttcaagttgntggatcatttggctatttgntcttcaaacaa

SEQ ID NO: 863 - DNA, 496 bp, Homo sapiens
  misc_feature 2, 3, 4, 6, 8, 9, 10, 365, 369, 370, 373, 374, 432: n = A,T,C or G
gnnngngnnnctatcactactatagggcgaattggagctccccgcggtggcggccgcccgggcaggtacgcggggagacctgacgctgggaggagatgctgccacctaggttacttgtaggaccctatacggcaacctcctttgccaggaactatttataaacatcctgcaggaaaatgcagtgaagtagaagagacagggatatcccagaaggttatgcaaaacatcaagagaagatgagaggagatgggaagaaacaagaactttgacatgcttggtgttcttgcccaagctttgaagaagtttacaaagtctatatgtcagaatacacatttcccaccttgcccaacagtggaaaaaaaaanaaannaannaataggtacctcggccgctctagaactagtggatcccccgggctgcaggaattcgatntcaagcttatcgataccgtcgacctcgagggggggcccggtacccagcttttgttccctttagt

SEQ ID NO: 864 - DNA, 466 bp, Homo sapiens
actactatagggcgaattggagctccccgcggtggcggccgaggtacaaccaccccccgggtatccataacctaacaataacaattgttaagcattcggccactcatgtttcttcagctcccccacctcctccctatcctcccaggttcccactgaattatatatcatttcattcataaataattctgtatatttagttacagctcaatgaatttccacaaagtgaacatgctcatgcaaaccacacctgcactgggaaatagaaattacaaacacccggagccccctctgcaatactctctcagtcctttcctcactccttcccaaaagagtagctactatcacctattgtgaaccttgcatatatggattcatagaacatgtgtattttttggtttggctacatttgtctaacattgttggtaagatttatccatgttgttgcatatagccatagtttatttat

SEQ ID NO: 865 - DNA, 725 bp, Homo sapiens
  misc_feature 1, 3, 4, 8, 9, 10, 11, 12, 14, 18, 22, 26, 30, 42, 44, 45,56, 63, 78, 80, 84, 105, 164, 168, 171, 178, 190, 191, 237,277, 288, 293, 297, 306, 308, 335, 337, 339, 345, 356, 358,364, 373, 377, 398, 404, 409, 410, 413, 416, 428, 452: n = A,T,C or G
  misc_feature 460, 461, 467, 468, 474, 484, 488, 494, 497, 499, 504, 506,508, 521, 530, 539, 542, 552, 566, 571, 573, 580, 581, 590,604, 610, 623, 624, 627, 648, 653, 655, 656, 659, 666, 667,673, 674, 679, 684, 688, 693, 696, 697, 698, 701, 702: n = A,T,C or G
  misc_feature 703, 704, 708, 710, 716, 721: n = A,T,C or G
ntnntctnnnnntntatnattnattntttnatttttagatangnngatcacccttngggcgantaggagctccccgcngnggcngccgacggtgagccgttgctngttctcaaagagccatttcttgaacgacccgttccattggctgcaccatctcggtgtgngaantcnaccgacngaacaagaccanncctgtcgaccccgccatgtgccagctccactctggagcaagcttancttgccacccgaatgagcttggccaagattcttgtgcttnaataaagcttngcacncttnccattttcngnttcatgtaggggccatttgacaccccngncnccgggnggcaataattncnattgcngcctttacncaanaacttccagttgggcaatatnaattcnatatnnganggntaccttgcaatngtgggggtctttgggcactggggnaaaaactnngtattnnttgggncattgcttgnagancccccntanancccgntnangggccaaccgccnttttttgtnaaaattttnaancaccccctanatttgccaatgttntgggngncaaaacnnaaactttcnttttttttcccggnttcccncccgggggggccnnttngtattaattggggcccccaanccccngnnaangggcccnntccccnnaaacngaatntatntgggnccnnnggnnnncccngnctccanaaggntgtg

SEQ ID NO: 866 - DNA, 534 bp, Homo sapiens
  misc_feature 2, 3, 4, 5, 12, 534: n = A,T,C or G
gnnnnggcctancactacttagggcgaattggagctccccgcggtggccgagcggccgcccgggcaggtaccttagcaaatagatagtttattcaccaactataatcaccttaacaataaaagctctcttttcgagaacactgcgtgtcaggcacttcatgaaaattatactaaacactttatgaaaattatctctagctgcaaattcccgcggatgctatgcaaattaggtatagctacactttgctgatggggaaagtatagcttagagaaggtagacgaactgcccaaggccagagctatgtggcagagatggaattcaaatgcaagtataaataatagaataattttcagttggaaatttcaaaaagctgttctagttacattgatgttaaaatctgttattcatttaagatgaagatggcaaggggagataaaattacagggaagtggtgagggatagagctgaggaaagaaacttggaatgagattttaaaaagaaatctggaaagtttgctaggggatgatagtcan

SEQ ID NO: 867 - DNA, 532 bp, Homo sapiens
  misc_feature 2, 3, 4, 522: n = A,T,C or G
gnnnatgccgctatcactactatagggcgaattggagctccccgcggtggcggccgcccgggcaggtacaagggagacagcatgcagggtgtgttcagaagagcttgctgaggtgctcggctcttagcattaaaaatgtgatgttggtatatcatcctgatagaaaacactgctttccaaatcctagtcactggatgggaggaaagtaagaacagattcttccaaccactactgatttgttataattctccccattgaaattgggacaaaatttgtaacatgctactccgaaattgatcacattctcaattctgtcaatagcagagaatttagcctcaacaccaccaattcaaaatagtttaggtcttgccccttgcctgattatgtaacagaaaaagcataaagttttgcagggtggagccgggaggatttttctaggaaaccttcctttctctttcattaacgtgtggaatgaagtaagggacaggttaaatctctgctttcttgatataaaatattaanggggtagagg

SEQ ID NO: 868 - DNA, 521 bp, Homo sapiens
  misc_feature 2, 3, 4, 5: n = A,T,C or G
gnnnntcccgaaacactacttagggcgaattggagctccccgcggtggcccgcccgggcacggtacatgacattattgtagctgttgtttacattacaggaatacttcggatataccaatgcatgtgaagaatgggtttcccctcagtttcacataaacttagaaatgtctcaactgacatttctttttcttttttttaatttttaattctttttttttttgagacagtttcgctctgtcgcccaggctagagtgcagtggtgtgatctcagctcactgcaagctccgcctccagtgttcaggccattctcctgcctcagcctcccaagtagctgggactacaggtgcccgccaccacgctcagctaattttttgtatttttagtatgagacggggtttcaccatgttagccaggatggtctccatctcctgaccctgtgaaccacccgccttgaccttccaaagtgctgggattacaggggtgagccgccgcgcccggctcaactggacatttctaaatg

SEQ ID NO: 869 - DNA, 662 bp, Homo sapiens
  misc_feature 605, 646: n = A,T,C or G
gcgtatacgactcactatagggcgaattggagctccaccgcggtggcggccgcccgggcaggtacgcgggaaagagaaggagaatatacagtctttgtattgacctgtatgcttctcatttttgttctttttgttcctttctataattctggatttccatcttgtttaatagccctcagcctgagggatatcagcatttcttgtgctatggatcttctagcaacatataatttcatcttttatgcatatccagaaattgttgctttgctttgatttttgttttgtagtttcactctgtgtagaatttctggttaccgtttttttcttcccagcattttgagatattgatccagtgagttctgtcatgcatttgcctacttgggtgaaatgtcccaccagacggtgtgatatttagtagcccagaaagctgccaaggggttgaatgacactatctgaagatatgaaccagtttgctctccatagggaggatttcatcaacaggaaacagatgcctggaaggcattggatttgctaagtgtctatgccatatgattctgctgtttgcgtttgatttagaatgctgagctgactcaaagtcaaactgnaagtacctcggccgcgaccacgctatcatggtcatagctgnttcctgtgtgaaattg

SEQ ID NO: 870 - DNA, 668 bp, Homo sapiens
  misc_feature 6, 8, 13, 29, 30, 31, 41, 53, 72, 76, 77, 79, 92, 102, 118,132, 133, 139, 147, 164, 174, 177, 178, 199, 203, 205, 211,217, 223, 224, 228, 232, 233, 252, 253, 270, 277, 288, 292,298, 305, 307, 310, 313, 315, 331, 342, 343, 346, 352: n = A,T,C or G
  misc_feature 373, 374, 383, 385, 386, 394, 416, 420, 457, 465, 473, 474,479, 480, 487, 506, 508, 511, 512, 518, 519, 522, 526, 539,540, 541, 542, 543, 544, 552, 575, 576, 583, 589, 590, 594,595, 597, 598, 600, 602, 611, 612, 615, 623, 626, 631: n = A,T,C or G
  misc_feature 655, 663: n = A,T,C or G
gagctntncgggnaacactcactataggnnngaaggggagnacccaccgcggnggcggccgcccgggcaggnacgnngntggagggggtgtnaaaacccccngacgccgggaggagangctgccacctaggnnacttgnaggacccnatacggcaacccccttngccaggaacnatnnataaacatcccgcaggaaaangagncnatatgncagaanacacanntccnaccnngcccaacagtagaaaaacnnaagaagagaaaaacaanaaaaaangacaaggaagncaanggaagncagcaangnganggngnttggagggggagcccncagaagggaannaangccccnggaagaagaggccagagagcnngcgcacccncnncccgccangggaggagccaagaagccggcnggcngcaacccgcaagaggacccccaccagaagccagccanaccggcanccccaacnnggccnnccaaccnccagaaccgggagaaggananggnngggggnnagncaangggccaagggaannnnnnaaagcagncccagccaagacagggccccaannaccacanaccaannaaannannananaggcccccnncanaaacccanggncaaanaagagaaaagaaaccgaaacacanaacacccncacag

SEQ ID NO: 871 - DNA, 714 bp, Homo sapiens
  misc_feature 1, 3, 19, 20, 21, 22, 23, 26, 29, 32, 33, 34, 35, 37, 38,487, 505, 521, 525, 533, 563, 571, 574, 575, 581, 590, 592,598, 604, 613, 614, 634, 651, 653, 658, 671, 677, 681, 687,691, 700, 702, 705, 712, 714: n = A,T,C or G
ntntttttttttttttttnnnnntgnttnttnnnnanncgcgcgtaatacgactcactatagggcgaattggagctccaccgcggtggcggccgcccgggcaggtacaatcattacataatcatgacattttaattcttaattacaatgcctttccaactatataaaaatatgtctagtgacacatattttggaaagctttcttggaaaaacatccagagattgtgttcatcactatctatataaatgagcttatactgaaccttaaatatgtttattcagcctaacaatcagaaaaagaaaacgttttttaacagtataaagttcagatgagtccacttgtcttggaattttattttgattttaattagaagaaagactgccattagaattgttttctaatgaaatctttataaattctctgggcagtgccctgtatctttattagaaagacttcttatttttaacaattttatttggaagaagtnctactcatttgcatcagnttcatcgtctacatantttngtgtgtgngtgtgtattgtgtgtgtttacaactttganttttgaanctnngatagnatcaggtananatctanaacagngtgccagcnnttgacctgaatcatcgggcnccatgatgggtgttggncnccttnaaacctaccttgnccggtnctanaatagnggancccgcggcntncanggaattncn

SEQ ID NO: 872 - DNA, 664 bp, Homo sapiens
  misc_feature 557, 559, 560, 562, 567, 568, 569, 570, 572, 573, 574, 575,576, 577: n = A,T,C or G
gcgtaatacgactcactatagggcgaattggagctccaccgcggtggcggccgaggtactcagtaacttcctgggaccccttttgcctatcttctgaatagaaacatagagcttcttgcagagtattagctcctggctttattgcttgctcatttctacataactgggtcaaccctggggcaccacagtgacagaaaaaagaaagaaaaataatggggtccccaccctgtcactctttggagtttatggttcccttttcttagttcttcttgtcaaaaagataggtttttccttcaggattttagatcagctatcaccgccacattgcagctgtatgattggggtggcccttgacacaggaccaaaagagagcaacaacaacagcatcaacaacaaccatagtgatcctaccccctactcctggtgacggcttcctggggctccttatccccattcttgggacagcttatctcagattttctctgctcacccctgctatgcagttccaaatttgatatttggaactggtagtatcttcagatcaagttgagagacanannanaaaannnnannnnnnaagtacctgcccgggcggccgctctagaactagtggatcccccgggctgcaggaattcgatatcaagcttatcgataccgtcgacct

SEQ ID NO: 873 - DNA, 834 bp, Homo sapiens
  misc_feature 577, 602, 616, 683, 690, 703, 709, 722, 724, 728, 741, 764,778, 782, 804, 809, 812, 817, 823: n = A,T,C or G
gcgtatcgactcactatagggcgaattggagctccccgcggtggcggccgcccgggcaggtacgtataacaacatgaattcatctcaaagacattatgttgaagccagatttgacataactcattctttgtcattccatttatgtgaactttgggaatagtcaaaacttagctatggtgacagcagtcagggcagtaattatctatcgagtgtggagattgactgaaaagggcacaggagaactttctgaaataataaaaatgtcctatatcttgttttgcatcgtagttacacaggtgtagacagttgctaaaacgctaaaaactaaatgtgtaagatttatgcattttagtgtatttaaattataacccccagaaagcattgcctcattttttctggagggtaaatatgctcgttaggagcataaggggatgattttgagaaacccttgctctgtcattctgtcagtaaaccgccactaacttttctggtttcaaaaaagcaaggtccattgatgaaactcctttgtgccttaatgacaaataacattgataaggcctactggcaacaagagtgnggttggtatatcttttggttttagngactaaatttggangaatgatattttcatgggattactcaatctcacccccattagtttgcaggggacaagaaagcttaantgggcanatgtttgtgctanaaccgnggggttacctctncnttgngccttgggttccnaacattccaatggcttggttttnaacatcatgcccangggngccagggaagtttttggggttntaatnggntgccnggcccngggggattcct

SEQ ID NO: 874 - DNA, 878 bp, Homo sapiens
  misc_feature 4, 24, 527, 539, 540, 548, 560, 564, 571, 626, 630, 640,675, 718, 726, 729, 731, 740, 766, 771, 786, 794, 796, 804,810, 827, 832, 833, 851, 853, 863, 864, 872, 878: n = A,T,C or G
atgnccgtatacgactcactatanggcgaattggagctccccgcggtggcggcccgcccgggcaggtactggtgttatttatctattgccatcatttcagggacacctaggaaaataaattttcaattgcataaaacctaattatttcatactgcagacatttgatcaaaggcttacttgatcaaaggcttgtcccaattgctcctccagggattcgttctgctcagataagatatggttccgctttaagagagcttgtccaattcgagcagcgagttccagatcacgatccctctctgccaggagatgtgtaaccatgtcgatgtcattgtaagttttggtcatctgctccaccctgtctggtgcctaagaatcatgtaaccggaaagtctcttcagcaaggactggagagagagcatcagatgcatgctgcccgctggtgtggagactgagtccagcttggatttcatatagaaagagagtgtctacttttaacctatacttgggggaggtggtcttttaagcanactcaccagctnnacttttangggagaaccctnattnggaccanacattaagggatacctttcccaggcttttgggattgctttttaatgagggtttcntcancctgttgggngaaggaaaaaattggatttcttggggatggcctcntgccaggatcctttttttggttttgggtggaaaaaggacagcntttgggtntgnanttcagaggntaaagggaattcctttaagcccttcnattantggaaatgggatttnggcacatngntttttttnttttanacaaaatttttttttgnttganncaaaaggaacatccgtgnancagcccctcnnatggggantataan

SEQ ID NO: 875 - DNA, 840 bp, Homo sapiens
  misc_feature 1, 4, 5, 6, 7, 8, 9, 10, 12, 486, 625, 672, 679, 689, 709,758, 793, 824: n = A,T,C or G
ntgnnnnnnncncgtatacgactactatagggcgaattggagctccccgcggtggcggcccgaggtacaacttgacagtttataaaaatgctaacctatatcaacatttttccccaccaaagtgttcccaagggcaaaagtaagtgaatacatgtttccatgcttgtgtcaggggcacacagcaagggaaggcagaatgggcatgacctagattagattccagaagccttcaaattccttataagacttgggactgcatcttaaaataatattgtttttttttattctttgataataaaagaatggaaccaaatcctggttgtctgattctttgcccagtgctctttcttatgtctaacactgcctcgtcttatgaataactctgacattacagagaaagactattgtttgttcagttcaacactcaattccataggtgctagcaattatgaaaaaggctgttagtatccagcggggaaagcaaangatcccgcaggtggtaacaccctactgagagcagagggggatgaatacataaaattttgcagaagcacgttgggaattccgccatcttcacatagcacccctgcaagctacggccgctctagaactagtggatcccccnggctgcaggaattcgatatcaaagcttatcgatccgtcgacctcganggggggncccgtcccanctttttgttcctttagtganggttaattgcccgcttggcgtaaatcatggcatagctgtttcctgtggngaaatggtattccctcacaatttcccacacattcnaacccggagcataaagggtaaagcctggggngcctattgagggacct

SEQ ID NO: 876 - DNA, 862 bp, Homo sapiens
  misc_feature 1, 2, 4, 5, 7, 340, 357, 466, 485, 512, 532, 534, 570, 579,580, 600, 604, 607, 647, 656, 679, 700, 702, 724, 728, 744,749, 751, 767, 768, 770, 781, 786, 794, 796, 797, 813, 829,832, 846, 847, 848, 852, 853, 860, 861: n = A,T,C or G
nngnngncgcgcgtaatacgactactatagggcgaattggagctccccgcggtggcggccgaggtacacttggtgcaataaagtgcatctttaaagtgttttgagtttggacacagacccgtgaaaccaacaccataatcaagattcatgatgaatatgttccacgtagttttcatttaaatccctctcagtagcatatttgtctgtttaagagccatttgcattttttccataaattgcttgttcctctccccctgcccgcccccgcgtacctgcccgggcggccgctctagaactagtggatcccccgggctgcaggaattcgatatcaagcttatcnataccgtcgacctcganggggggcccggtacccagcttttgttccctttagtgaggggttaattgcgcgcttggcgtaatcatggtcatagctggttcctgtgtgaaattgttattcgctcacaanttcacacaacattacgaanccggaagcattaaagtggtaaagcctnggggtggctaatgaagtgancnacctcacattaattggcgttcccctaattggccccntttccaatnngggaaaacttgcctgcccanctgnganttaattgaattcggccaccccccggggaaaggcgttttgnttttttggngcctttttcctttttttggttanattaaatggtttgccttgggngntttggggttgggggaaagcggntttngcttccctcaaagggngggtntncgggttttccccaaanntnggggttacccncgggnaaaaaaantnngaacaaaagggccccnaaaggggccggaaccntanaaaaggcccggggnnngggnntttttcnnt

SEQ ID NO: 877 - DNA, 879 bp, Homo sapiens
  misc_feature 3, 16, 598, 607, 611, 638, 646, 740, 744, 774, 776, 795,805, 827, 829, 851, 864, 873: n = A,T,C or G
ccntaaccactactangactcctatagggcgaattggagctccccgcggtggcggcccgaggtacacttatagttgagagccaagtctcccttatcattggtgaatgagaatgagctactgaaaacaaaaagagggtcttctactcagcctctacccctaatatttatatcagaagcagagattaactgtccttactcattcacacgttaatggaagagaaggaagtttcctagaaaaatcctcccgctccaccctgcaaactttatgcctttctgttacataatcaggcaggggcaagacctaaactattttgaattggtggtgttgaggctaaattctctgctattgacagaattgagaatgtgatcaatttcagagtagcatgttacaaattttgtcccaatttcaatggggagaattataacaaatcagtagtggttggcagaatctgttcttactttcctcccatccagtgactaggatttggaaagcagtgttttctatcaggatgatataccaacatcacatttttaatgctaagagcccgagcacctcatcaagctcttctgaacacaccctgcatgctggcttccttgnacctgcccnggcnggccgctctaaaactagtggatccccnggctgcanggaaattcgatatcaacttatcgataccgtcgaccctcgagggggggcccggtacccaacttttggttcctttaagtgagggttaattggcgcncctngcgtaatcatgggcataagctggttcctgngngaaaatggtatcccgttcncaattccccncaacattccaagccgggagcantnaagtggtaaaagcctggggggncctaatgaggggncctacctcncattat

SEQ ID NO: 878 - DNA, 833 bp, Homo sapiens
  misc_feature 2, 4, 7, 8, 10, 19, 505, 507, 512, 527, 540, 555, 559, 561,574, 605, 606, 608, 612, 622, 633, 634, 638, 646, 653, 670,672, 673, 679, 682, 706, 709, 718, 723, 727, 729, 732, 734,735, 738, 745, 747, 748, 750, 751, 756, 760, 761, 766: n = A,T,C or G
  misc_feature 775, 780, 787, 788, 794, 795, 799, 801, 813, 820: n = A,T,C or G
gncncgnncncgtcatacnactcactataggggcgaattgggagctcccccgcggtggcggcccgcccgggcaggtacgcgggtatccagttatttcattggttgaaatagctgaccgcttataataaagtagtctgtggactgcttaaattttgtagtgaattcctgtgtgtgcatttttgtaatggtcattctcagtcgtaaatgtctttagaaagtcatctaacacaaatacattgagagaagttttcctagcataagcctggtcataaactccacctgataacttggggcttgatttaaatcaagtggaagctctgtgcaaaaagatggatatgtgaccaatataataatggctccttttgcaagaacaatacttctgaaattaaggggaatgcattaagatgtgtatgtaataaataattgaaaataattttggaggcagaagttattgtaagtgaaattctgtcataaggtgaaacaatcctttacagccttttttctntntcatnaacatgtcatgtcanaaaatgacaactnatggcttcctgaccnggtncncaggtctttccanaactgtttttttttcgaaccctacgagttanncntccnctagggaatnttttgtcctgnngtgnagctgggnaaaaacntttcccattaagggggncnnaccatnctnacaagccgaaacccttggaccccntcnggggccccnaatgngggntnggnannaanttttttncnngnnggggnacanncccantaacccccngaaanacgaagnncccccnntttntnaaaagaaaaaanccggganagggccctgggtt

SEQ ID NO: 879 - DNA, 856 bp, Homo sapiens
  misc_feature 486, 488, 497, 498, 499, 529, 535, 537, 548, 586, 603, 611,627, 646, 658, 659, 660, 701, 705, 707, 715, 733, 736, 737,748, 757, 761, 765, 766, 779, 789, 813, 825, 829, 830, 832,843, 853: n = A,T,C or G
gcgccgaatacgactactatagggcgaattggagctccccgcggtggcggccgaggtactggggccttacttccctaaagacccagggaggggagagaaagtgctctgcttgtatcctaagcacaaatgcaatacagcaacatcagtaatggtaactgagtgcttactgcatgccagacccgtgctaagctctctccatgcactatcttaatgttcacaacctcacacagtaagcattattaacaacagcactttacaaatagaaatttgttgaggctcagagttgccatagctggtgagcatccacagcctacattcaaacccaagtttcattccaaagctttgctttcctgctgctgtatgtcttttgcgtcatcttcgcatatttaacctccttggctcaactgggaactctttgaaggctagggccatcaattacatttttgtttcttcaaaaaattggccgtacctgccccggcgggccgntntaaaactannnggatccccccggctgcaagaattcgatatnaaagcntntcgatacccgncgaccctctaggggggggcccggtacccacttttgttnccttttagtgaggggtnattgcgcnccttggcggtaaacangggcataagcttgttttcncgggggaaaaannnttttcccttacaattttcccacaaaaatattaaaaccgggnggcntnaaatgtgnaaacccggggggggcccntgnngggagcccacnccccatttnttgnggtnngggcccacttggnccctttttanataggggaaacctttgtgcccctntttttttaatanattnncncccccgggagnagggggtttnttt

SEQ ID NO: 880 - DNA, 851 bp, Homo sapiens
  misc_feature 358, 418, 513, 516, 533, 534, 605, 649, 655, 696, 705, 712,732, 738, 748, 761, 763, 765, 770, 772, 779, 782, 786, 787,788, 805, 814, 820, 823, 829, 831, 838, 839, 844, 847: n = A,T,C or G
cgtaatacgactcactatagggcgaattggagctccaccgcggtggcggcccgcccgggcaggtacagtgtcagggcttatgctaccagactaggtggaggagatgacatgcagattcaggagaggatccagggctcatgaggacgtggaggttttgttctaagcattgggtttttgtttggctttttctgtgtaaacttctctttcaccttccattcagaatggctccaaattctttcttcaatagtggaagtattattgttagtcaggtttttcaatacttaatagtggtctgtatttgtgggtgcatgtggtattttggtgcatgcataccatgtggaattatcagaccagggcngccgggacatcagtcaccccagacatccaccccttctttatgttgggaacatttcacttnctctctttcagcaattttgaacaatgcaacaaactactgttagctttaaacacccaactgtgctatcaaacagtacatcttacttcactaaatgnggnttttatgcccacgccanncttcctggataaaactttgtctaaagtgtttcaaagaggctgctcaaaggaaatgtggcttgttttgggangtctgaaatgttttcaaaatttctggctttgaaaaaaaaaaacngacatnttgggaatttcttcatgcaaaaatcccaatcacattgtggntggttaagnatcaaanaagacaggtttaccctggcnggaatntaattttttnccttttttttggnancnttggncnctttaanaanctannnggaaccccccgggcttntaggaattncaattnaancttttngntacccgnngaacnttngagg

SEQ ID NO: 881 - DNA, 850 bp, Homo sapiens
  misc_feature 344, 345, 346, 347, 348, 349, 350, 351, 352, 353, 354, 355,356, 357, 359, 360, 362, 364, 365, 366, 368, 369, 370, 371,372, 373, 374, 375, 376, 377, 378, 379, 380, 382, 384, 385,386, 387, 388, 389, 390, 391, 393, 394, 395, 396, 398: n = A,T,C or G
  misc_feature 399, 400, 401, 403, 404, 405, 406, 407, 408, 409, 410, 411,414, 416, 417, 418, 419, 421, 422, 424, 426, 431, 432, 433,434, 435, 436, 437, 438, 439, 440, 441, 442, 443, 444, 445,446, 447, 448, 449, 450, 451, 452, 454, 455, 456, 457: n = A,T,C or G
  misc_feature 458, 460, 461, 462, 463, 464, 466, 467, 468, 469, 470, 471,472, 473, 475, 476, 477, 478, 480, 481, 483, 484, 485, 486,487, 488, 489, 490, 491, 492, 493, 494, 495, 496, 497, 498,499, 500, 502, 503, 504, 505, 506, 507, 508, 509, 511: n = A,T,C or G
  misc_feature 512, 513, 514, 515, 517, 519, 520, 522, 524, 526, 527, 528,530, 532, 533, 534, 536, 537, 539, 540, 541, 543, 544, 545,546, 547, 548, 550, 552, 553, 554, 555, 556, 557, 558, 559,561, 562, 564, 565, 567, 568, 569, 571, 572, 574, 575: n = A,T,C or G
  misc_feature 576, 577, 578, 579, 582, 584, 585, 587, 589, 593, 595, 596,597, 598, 599, 600, 602, 603, 604, 605, 606, 607, 610, 614,615, 617, 618, 621, 622, 623, 626, 628, 629, 630, 631, 632,633, 638, 639, 640, 641, 642, 645, 648, 649, 650, 651: n = A,T,C or G
  misc_feature 653, 655, 659, 661, 664, 665, 666, 667, 668, 669, 673, 674,675, 676, 677, 678, 679, 680, 681, 683, 684, 686, 687, 691,692, 693, 695, 699, 700, 703, 705, 709, 710, 712, 717, 719,727, 728, 729, 730,731,733-739,741-745,747,748,750-752,754,756,757,759-761,763-766,768-774,776,780-782,785-786,788-790,792,794,796-798,800-803,808,810-819,822,825,826,828-829,831-833,835-841,843,844,846,848,849: n = A,T,C or G
actactatagggcgaattggagctccaccgcggtggcggcccggcccctcgtggtggccaggcgcgatgcgcgcggcgtggcagaactgctgcgtccgtacaccaaagaggcgctggcgcccggcgaattcctgctcgaactgacgccgaaggatggcaattgggtgctggtcagcgatgcctggttcttcaaggaaggcgaggcgacgcgctgggaaaaggcccgctatggcgagttccgcgtgctgcccgatggccgcgccttgctggtgggcatgcgcggggaagatttacaggcactgtaaccgcttgattgaacaaacccaatggcagaatccgggggnnnnnnnnnnnnnntnntntnnntnnnnnnnnnnnnntntnnnnnnnntnnnntnnnntnnnnnnnnnttntnnnntnnantnaattnnnnnnnnnnnnnnnnnnnnnntnnnnntnnnnntnnnnnnnntnnnnanntnnnnnnnnnnnnnnnnnnannnnnnnnannnnntncnntntnannnantnnntnntnnnannnnnntntnnnnnnnnanncnntnnncnntnnnnnnttntnngntntttncnnnnnncnnnnnnggnaggnntnnttnnnttntnnnnnnttttnnnnnttnttnnnntnantaantntcnnnnnncttnnnnnnnnntnntnngggnnnangggnnttntnctgnntnaaaangncgggtaannnnntnnnnnnntnnnnncnntnnntntnncnnntnnnntnnnnnnntncttnnntanntnnntntntanntnnnnatttctnnnnnnnnnnaanttnntnntnnntnnnnnnntnntntnnc

SEQ ID NO: 882 - DNA, 861 bp, Homo sapiens
  misc_feature 4, 5, 634, 651, 673, 698, 706, 779, 813, 829, 843, 844, 845,847, 851: n = A,T,C or G
agcnntaacactactatagggcgaattggagctccaccgcggtggcggccgccgggcaggtactttggcacatgctggtagccaggagtctgggcctgaaatttggtcctgactccaccctcatctctctgcatgacttctctgggagatacagcctctccattttacactgagagaactaaatgagctctaaagctgccctgacagctgacagtcaaggttagcatatttctgtgtggctctggcaaaagtacctcggccgctctagaactagtggatcccccgggctgcaggaattcgatatcaagcttatcgataccgtcgacctcgagggggggcccggtacccagcttttgttccctttagtgagggttaattgcgcgcttggcgtaatcatggtcatagctgtttcctgtgtgaaattgttatccgctcacaattccacacaacatacgagccgggagcataaagtgtaaagcctggggtgcctaatgagtgagctaactcacattaattgcgttgcgctcactgcccgctttccaagtcgggaaacctgtcgtgccagctgcattaatgaatcggccaacgcgcggggagaggcggtttgcgtattgggcgctttttccgctttctngctcactgactcgctgngctcggtcgttcggctgcggcnagcggtattaactcactcaaaggcnggaatacnggtattccacagaaataaggggatacccaggaaagaacatgttaacaaaaggccacaaaaggccaggaacccnaaaaaggccggttgcttggcgtttttccataagnttccgcccccctggcnagcatacaaaaatnnncncttnaagtcaaagg

SEQ ID NO: 883 - DNA, 863 bp, Homo sapiens
  misc_feature 2, 3, 4, 5, 7, 8, 10, 570, 593, 684, 711, 714, 722, 757, 769: n = A,T,C or G
gnnnnanncncgtaatacgactcactatagggcgaattggagctccccgcggtggcggccgaggtacacttatagttgagagccaagtctcccttatcattggtgaatgagaatgagctactgaaaacaaaaagagggtcttctactcagcctctacccctaatatttatatcagaagcagagattaactgtccttactcattcacacgttaatggaagagaaggaagtttcctagaaaaatcctcccgctccaccctgcaaactttatgcttttctgttacataatcaggcaggggcaagacctaaactattttgaattggtggtgttgaggctaaattctctgctattgacagaattgagaatgtgatcaatttcagagtagcatgttacaaattttgtcccaatttcaatggggagaattataacaaatcagtagtggttggcagaatctgttcttactttcctcccatccagtgactaggatttggaaagcagtgttttctatcaggatgatataccaacatcgcatttttaatgctaagagcccgagcacctcaacaagctcttntgaacacaccctgcatgctgctnccttgtacctgcccgggcggccgctctagaactagtggatcccccggctgcaggaattccattcaagcttatcgataccgtcgacctcganggggggccccggacccagcttttggtnccnttaatgangggtaattgccccctggcgtaatcattggccatanctggtttctggngtgaaattggtatccgttcacaattccccacaacataccaaccgggagccttaaagtgtaaagcctggggggcctaatgagtgacctacctcct

SEQ ID NO: 884 - DNA, 868 bp, Homo sapiens
  misc_feature 4, 18, 20, 31, 660, 677, 703, 762, 764, 765, 770, 779, 812,828, 835, 844, 861: n = A,T,C or G
taanccacgtactctacncntataggagctnccgcgcggtggcggccgaggtaccggttgatgtaagcacagggatggtggggacagggtgaccaaagtgaactgggcacgagatgagtagctggtatatagtgacttggaaggcaaggtgcttgaaatttcctggaaaatctctgcaagtgcacagtagaaactattatcattggttacgtgcttcaagaggactgggcagatgggggggcaggaataagagagccactattcacttgacaaattcttggacattttgatttctgagccatatggatgtgtgtcctatcaaaaagaataagtgaaaatgttcaatagtaagagaacactttgtaaatctctggctgctgctctttgtgattagcctctcagcactcttatttggaataatcagaaaaatacaactatctaaattttgggaggagagtatacttgtggagatttgggaagaaagaaaataagtatggaaagtttcccccaataataaaatgaaattcattggaaagccatttcaaacatttagaaagttaacccagaaaaatagaaaggtgcccgggcggcccctctagaactagtggatcccccgggctgcaggaattcgatatcaagcttatcgataccgtcgacctngagggggggccccggtncccagcttttgttccctttaagtganggggtaaattgcgcccttggcgtaatcatgggcataggtgtttcctggggtgaaaatgntnntccgntcacaattncacacaaacatccgagccgggagcttaagggtnaagcctggggtgcctnattgagngactaactncatttaattggcttgcnctcactc

SEQ ID NO: 885 - DNA, 663 bp, Homo sapiens
  misc_feature 4, 7, 8, 13, 28, 34, 38, 65, 66, 432, 439, 489, 530, 536,545, 553, 559, 566, 567, 581, 593, 597, 599, 603, 606, 616,618, 624, 627, 630, 633, 639, 644, 647, 648, 650, 653, 654,659, 661: n = A,T,C or G
caanctnntactntagggcgaattgganctccancgcngtggcggccgcccgggcaggtactcgnnaagcagtggtaacaacccagagtactcgggaagcagtggtaacaacgcagagtcccgggaagcagtggtaacaacgcagagtcccgggaagcagtggtaacaacgcagagtcccgggaagcagtggtaacaacgcagagtcccgggaagcagtggtacctcggccgctctagaactagtggatcccccgggctgcaggaattcgatatcaagcttatcgataccgtcgacctcgagggggggcccggtacccagcttttgttccctttagtgagggttaattgcgcgcttggcgtaatcatggtcatagctgtttcctgtgtgaaattgttatccgctcacaattccacacaacatacgagccggnagcatanagtgtaaagcctggggtgcctattgagtgagctaacttacattaattgcnttgcgctcacttgcccgctttccattcggggaaacctgtcntgccanatgcattantgaatctngccacngcgcggnnagaggcgttttgtntattgggcgctntttncncttnttntttatttgantngttgtnctntgntcnttttgnttggnggnnanctnntatantntt

SEQ ID NO: 886 - DNA, 675 bp, Homo sapiens
  misc_feature 3, 5, 17, 18, 26, 28, 30, 38, 64, 65, 66, 67, 71, 75, 161,180, 310, 330, 441, 452, 604, 648, 667, 670, 671: n = A,T,C or G
gtnanactactactatnnggcgagtngnanctccccgntgcggcggccgcccgggcaggtaccnnnnactnattntgctgtgatcctaaaacactctaaaagataaagcctattaaaaccatatttttaaaaaactgacaggtgttcttaagattaactantgagttcagagaataaatngaggatgagatgaatttctaaaaacagcagcaccatacatcaaaaatacccagctagaaattataaatttttaaaagatcacagaagataaacaaaaacaaacccctccccatcttatctttattatttnttcttatttgtataaaaatnaggagatataaataaatagaaaacactactgaaatatttacagggattcatgaaaacagattttaagaaattaagatacatattgtcaggtgtggtgggtcacgcctgtantcccagcactntggaaggccaaggtgggtggatcacttgaggtcaggagtttgaggaccagcctggccaacatggcaaaaccccatctctactaaaaatacaaaaattagccaggtgtggtggcacaagcctgtaatcttagctaccttgggaggctgaagcnccagaatcactttgaacctgagaggtggaggttgcagtgaactnaaatactgccactgcactncannccta

SEQ ID NO: 887 - DNA, 393 bp, Homo sapiens
  misc_feature 393: n = A,T,C or G
tactatagggcgaattggagctccccgcggtggcggccgaggtacgcgggggtagatggaaggaagaacttgtgtgcttagacctgacgctgggaggagatgctgccacctaggttacttgtaggaccctatacggcaacctcctttgccaggaactatttataaacatcctgcaggaaaatggcctctttaaatatacacttctctgtagtgtatgctagaaatggagtggctggaataaaagtggctgaatcatcttcaactctagtagctgagaccaatgatgctgacctccctcaaaagctgcatttctgaatttctgaaggcaaactgtctgcctatattgtacctgcccgggcggccgctctagaactagtgggatcccccgggctn

SEQ ID NO: 888 - DNA, 404 bp, Homo sapiens
actacttagggcgaattggagctccccgcggtggcggccgaggtacattctaatcccagtttacatttaaaacacttcaaatggagccactaggactcaaagttgctaaatacacccatgccctcttatcgccttccactgggggtggttcttcggtattttaagtcttggaagttaatttttgaggaaaaaaaagtaatagacatgtgacaaaaacaggaagaagggacacagttcaactgggttgtagctctaatctcactttatcagctgcttgaaagagggaaatgaaggacagagcggtaggaagtctgcacacaccaacctcatggagaccagctcagcccccaatgcagtcaagctacctaacctcctggaaacataaagatcggcgtgttacttgg

SEQ ID NO: 889 - DNA, 431 bp, Homo sapiens
  misc_feature 2, 5, 24, 26, 27, 35, 64, 185, 187, 194, 202, 223, 339, 387,397, 418, 427: n = A,T,C or G
gnttngccgctaacactacttaantnnttagggcnaattggagctccaccgcggtggcggccgnccgggcaggtacttgcttagtcagttctgtgggccagaggacactcatggggagagatcaaggttactttttgcaggtggggcattttgtaactgaataaaacccagtcagtaaaagtaancnacatgcngaatctangcaagtgttgcaatgtatgtntgctcttgatctgaggaagaccatgcatttgactcagactagaaacctacaccacagaaatcccacccacaagcaatgctctattactgtaggtacctcggccgctctagaactanttgagatcccccgggctgcaggaattcgatatcaagcttatcgatacncgtccacctngagggggggcccggttcccancttttgttncctt

SEQ ID NO: 890 - DNA, 408 bp, Homo sapiens
  misc_feature 4: n = A,T,C or G
actnctatagggcgaattggagctccccgcggtggcggccgaggtacctggggctacaggcaggcaccacctcacccagctaattttttgtatttttagtaaagacagggtttcgccatgttgcccaggctggtctcgaactactggcctcaagtgatcagctcatcttggctgcccaaagtgctggggttacaggcgtgagccaccatgcccggcccccgcaggactttctgctgtttctctcaattttatgtaagtaaaacaacagcaacaataaaatccctgtcacttgaacacagaatgaattctgctttatatattttgtatagtttgtatagatattttgtatagtttatgaggcactgaactttccagaacagcaactactgtgtatactgatggggcaat

SEQ ID NO: 891 - DNA, 405 bp, Homo sapiens
  misc_feature 405: n = A,T,C or G
taatacgactactatagggcgaattggagctccaccgcggtggcggccgaggtacattctaatcccagtttacatttaaaacacttcaaatggagccactaggactcaaagttgctaaatacacccatgccctcttatcgccttccactgggggtggttcttcggtattttaagtcttggaagttaatttttgaggaaaaaaaagtaatagacatgtgacaaaaacaggaagaagggacacagttcaactgggttgtagctctaatctcactttatcagctgcttgaaagagggaaatgaaggacagagcggtaggaagtctgcacacaccaacctcatggagaccagctcagcccccaatgcagtcaagctacctaacctcctggaaacataaaagatcgggcn

SEQ ID NO: 892 - DNA, 401 bp, Homo sapiens
tagggcgaattggagctccaccgcggtggcggccgcccgggcaggtactttatattacttacttgttcactaataaacttctggcattgcatgtttattattctaatttggattaataaatatgtcaatttattttataagtcaaccgatatgcttttttcagcttataattttgtctacttagtatcctctaagtagcatatcctaatctattcttaagattcacattgttatatgcttgacataactttacaaccatcaccatggagaaagagatctataatgtagacagattttaatttaatcataatatcatcacattttaattttatttgaacctacacaggtgccatttaaataggtgacaagctaatattaaaattatgatgggagttggggat

SEQ ID NO: 893 - DNA, 402 bp, Homo sapiens
  misc_feature 5, 402: n = A,T,C or G
gggcnattggagctccccgcggtggcggccgaggtacaggtcccctcacaccttctgttgatgccttattaccaccaggcagattagaagttctggtttctctaaatttcagttgactctgtaaacttataatacttatcttataattctgttgagaatataaaatgaaatgatgcatgtaatatatcaagccactgtctgatgtagaataatattactaacatttatgattttgaaaattaataacaaagttggaggaaatacaccaccaacttcaaatgctaatatgaagttacaacgatcaagatagtgtggcattggtgtaaaaacagacatgcttatcaatggcgcagaattaaaagaatagaaattaacttctgctttgataggcaatggagtttn

SEQ ID NO: 894 - DNA, 423 bp, Homo sapiens
  misc_feature 423: n = A,T,C or G
actactatagggcgaattggagctccccgcggtggcggccgaggtacctgcacttcagaccctggctccatgtacacctgtgctccaaacctggctctgtggctactgcacaggtgccagcagctcaaacagtcaaacagtgccacccttgcaataaggaaacctacaagctagaccggatatcaagaaagattccttcagacatgacatcccctgtggaagaaaaagacattagggagtccctagcagcctttgtctttgaagatcccttactgctgctgtggatgcccacagccttgtttgttgaaaacccttgcaatcttcaccaattctgatcttcagctgacaaaagatgcacagggggaggtttgccacaggcccttcccagacctagaactgccacaccttcactctggctagtgn

SEQ ID NO: 895 - DNA, 408 bp, Homo sapiens
  misc_feature 397: n = A,T,C or G
actactatagggcgaattggagctccccgcggtggcggccgcccgggcaggtacttggaatgctgtgtggagtcctttttctacttttgttcctgagaaagagagattcacaaacttcccacattcttccagtggcatctaaggatcccttcctaaatggcctttctcccagccaatagactgaagcaaaccatgtccctgatgcttcctgcccaccaccatccattctttcaaccaacagcttctccgggctttcacgtgccatgcactttgctaagagcttgagggaaatacagcaatgaagaagagatgatttctgtttggacccagtgctcagggattcctcctattaggaaatcaaaggaggcttccaaaagccctacaattttttccctgntaactaaagaa

SEQ ID NO: 896 - DNA, 406 bp, Homo sapiens
  misc_feature 372: n = A,T,C or G
ggcgaattggagctccaccgcggtggcggccgaggtacgcgggaggaaaacacaacatgaacaggcagagtgcacacgccgtggcctcgggaagccacaatcatgtggctgacatggttccagagtgtggcattagggagaccaacttctgagctgcagattcacagcatggccatgcaagcagggaagatgtgctctactccaggatcaaggagcaagcccatatttcctcttgattctgggactccctcttgagactgatttgctctaatgttagctcttgagagaactggggtccctgccttcttggggagcctgaaaagaagttttgcttgtctgggcatcacagcatccaggagtgttacctgcccngggcggcccgctctagaactagttgggatccccc

SEQ ID NO: 897 - DNA, 398 bp, Homo sapiens
  misc_feature 92, 397: n = A,T,C or G
ggcgaattggagctccaccgcggtggcggccgaggtacgcggggactcatgacaactaatgggaagacatggctcagatgtgcagccacagngagcttctgaacatttcttctcagactaagctcttacacacagttgcagttgaaagaaagaattgcttgacatggccacaggagcaggcagcttcctgcagacatgacagtcaacgcaaactcatgtcactgtgggcagacacatgtttgcaaagagactcagagccaaacaagcacactcaatgtgctttgcccaaatttacccattaggtaaatcttccctcctcccaagaagaaagtggagagagcatgagtcctcacatggaaacttgaagtcagggaaatgaaggctcaccaattatttnc

SEQ ID NO: 898 - DNA, 423 bp, Homo sapiens
  misc_feature 8, 381: n = A,T,C or G
tatcactncttagggcgaattggagctccccgcggtggccggccgcccgggcaggtacgcggggaaaaatccaagacaagaaaagactgtaataaagctaaatataacagtataatgataccaggttgcaggcagcaaatagcaaacttgaaaccatggaaaagggaattcatatagtagaggacaaatttaaggagggtttcaaaagtgtaagaacaaaagacttaaactgatgagctaatagttggatgacaggtcttggagatcccaattctttgggaataacagtttctgaaggaaaaaacaacaaagagaacaaccatgttcaaagggaacaaaggaaaaataaatctttcaattaaaggaaagttttctgcttgnaaaatgaatgaccattgggttaagagggtaaaacttatgaaa

SEQ ID NO: 899 - DNA, 648 bp, Homo sapiens
  misc_feature 2, 3, 6, 7, 11, 12, 13, 14, 16, 17, 20, 23, 24, 25, 26, 28,35, 37, 38, 42, 43, 48, 52, 53, 67, 71, 74, 80, 82, 83,94, 97, 100, 104, 105, 112, 114, 117, 119, 122, 273, 350,351, 359, 366, 385, 393, 396, 408, 409, 416, 429, 458, 469: n = A,T,C or G
  misc_feature 475, 479, 489, 495, 517, 522, 541, 550, 560, 579, 581, 602,614, 620, 625, 630, 635, 638, 641: n = A,T,C or G
tnnttnntttnnnncnnaanctnnnntnaaaatcnanntaanntctanagcnnttcatttttcattngaanttnattatntnnttatatttctnttntantttnnttaggantngancnaancgactcactatagggcgaattggagctccaccgcggtggcgtatcagctcactcaaaggcggtaatacggttatccacagaatcaggggataacgcaggaaagaacatgtgagcaaaaggccagcaaaaggccaggaaccgtaaaaaggcncgcgttgctgggccgtttttccataaggctccgcccccctgacgagcattcacaaaaaatcgacgcctcaagttcannaggtggcngaaaccncgtacaggaacttattaanagcatacncanggcggttttccnnccctggnaaagcttcccctncgtggcgcctcttccctgttatcacgacncctggcccgcntttacncggnataccttgtnccggcncttttcctcccctttccggggnaaagnccggtggggccgccttatnctttcaaanaaggccttcnaccggccttggtaaggggntnatttccttcaaggttattccngggttgggttanggggtncccgnttttncggcnttnccnaaaaggg

SEQ ID NO: 900 - DNA, 417 bp, Homo sapiens
  misc_feature 4, 358, 404, 415: n = A,T,C or G
actnctatagggcgaattggagctccccgcggtggcggccgcccgggcaggtacaacgatgcacacagatgggaggagctgccttgagcgagaggacactgtcctggaggtgacagagagcaacaccacatcagtggtggatggggataaacgggtgaaacggcggctgctcatggaaacgtgtgctgtcaacaatggaggctgtgaccgcacctgtaaggatacttcgacaggtgtccactgcagttgtcctgttggattcactctccagttggatgggaagacatgtaaagatattgatgagtgccagacccgcaatggaggttgtgatcatttctgcaaaaacatctgtgggcangtttttgactgcggcttgcaaagaaagggattttaaaatttaattnaccagatgagnaa

SEQ ID NO: 901 - DNA, 412 bp, Homo sapiens
  misc_feature 4, 408, 412: n = A,T,C or G
actnctatagggcgaattggagctccccgcggtggcggccgaggtacccccagcactttagccctgtgtggccagcgccccatgcgcaagcgtctttctgccccagagttgcggctgagtctgactaaggggcctggaaatgatggagcttcacccacccagtctgcaccttcctctcctgatggcagttctgacctggagatagacgaattggagacaccttcagactcggagcagctggacagtggacatgaatttgaatgggaagatgaactaccccgggcagagggtctgggcaccagtgagacagctgaaaggctgggccgaggttgtatgtggggatgtgactggagaagatggacatcactgggagggggtgttccgaatggggacccaccggggagcagncgcn

SEQ ID NO: 902 - DNA, 429 bp, Homo sapiens
  misc_feature 44, 347, 348, 349, 350, 351, 354, 360, 362, 364, 366, 377,384, 387, 389, 390, 392, 393, 399, 401, 406, 407, 409, 417,419, 420, 421, 422, 424, 428, 429: n = A,T,C or G
ggcgaattggagctccaccgcggtggcggccgaggtacttacanggggaccgccaggggcctcgagaatcggtatcctgagtcctcttgaagagcagtagaggttgtttcattaagtgcaaacacattgttcttaatttgaaaactgtgggcagaaacagaagcccgagactaatttttccattgctaactctagattctcggccactggagtctgaagatactctctttgagaatgcatattattttgctcacagctaaaacatttaagtatcatagctgatcagtggagtgagattaaaaggtttcttttttgaatcatcagctagagatgtctggccccccggnnnnntanatatcntntntntttacttcatnctatatntancnntnngctatncnctatnnanataatctngnnnnanttann

SEQ ID NO: 903 - DNA, 409 bp, Homo sapiens
  misc_feature 3: n = A,T,C or G
ctnctatagggcgaattggagctccaccgcggtggcggccgcccgggcaggtacgcgggatgattaatcttcccttatccacaaacttaactgtggagaaacaggagaaagtgtgtgcctagaagctggattcagggacccatggttacccacttctacttatgattccgtcattactgttgttttaggaaaataaacagatcttgattctttcataaaagtcgattcttcaacaagcaaatgggaaaatcggcaggcccagatatgtgtgtatagcagctactggttggaaatttggacacaaaagtctttatctacccagcctgtgagccacaaatctggactgagtataaaaaagaataaaactaaataccaccatggttctcacttattaagtggggaactaaac

SEQ ID NO: 904 - DNA, 750 bp, Homo sapiens
  misc_feature 2, 3, 4, 7, 11, 13, 14, 19, 26, 27, 31, 33, 40, 41, 44, 46,53, 54, 56, 58, 60, 61, 62, 70, 71, 76, 90, 91, 94, 95,96, 100, 110, 124, 126, 130, 131, 232, 268, 289, 327, 344,368, 407, 425, 426, 428, 431, 434, 452, 454, 463, 475, 479: n = A,T,C or G
  misc_feature 483, 484, 491, 496, 514, 523, 528, 546, 554, 555, 564, 581,592, 618, 622, 629, 635, 636, 637, 656, 658, 660, 667, 672,675, 680, 710, 714, 726, 735, 739: n = A,T,C or G
tnnnttnttgntnntgctnactttcnnattntnttattannacncnacatgannanantnnnttttaatnnatttntcttaatttattannaannntctncataatattnacagttcaggtttngntccnnatcgactcactatagggcgaattggagctccaccgcggtggcggccgcccgggcaggtaccctggatcgtttcagagatctaacgtgttgccacaccatanctctaagaagctgtggggcacagttcaaattcttantggagtgtatgattgcacaangaaatactttaaatatgtttactttttaatttctaatngactaagaaaatcagcnagcataaaaactaactttttttanaaggactccccaaaaattttgcatgtttttttccaggtntttttatttttaatttanntntgntanggggcattaaattaaatntngttggccanaattttaaaacnttanttgnnttacccnttcgngccccgcctttcttatgnaaaaccttngattngggaaattcacccccccngggggggnnttgggcaanggggtaaaaattttccngaatttatttncaaaaggacccttttaaattccggtnaatnaaccacnggttcnnnaatcccctttctatgaaangngnggggggnggggnccnccccnggtgttaaccccccaaaaaccttttttttnggtnttcccccctttntaaaagttnggangggggtgttta

SEQ ID NO: 905 - DNA, 419 bp, Homo sapiens
  misc_feature 1, 5, 6, 7, 8, 16: n = A,T,C or G
naggnnnnccgcgaancactcactatagggcgaattggagctccccgcggtggcggccgctttctcttactgatagtaggatatttctgctttagttattgtcaccttaaatatattttcaatgttgaaatcctcacagcatgtttgatgaaatctagttttcaaattttcttaggtatatttctgtcacgttggcatgataacaaatgcaataacccaaaagaccccaaaagctagtgtaatcccttttgcaatccaagcatgaggattcatcttcatgttgacagtgcgtgaatgttcggtaggctttgtcaagcttgcatacaataaattatattatgtccctttttcttttaggggtctcctgtttaaaggatgggtcttctggaagggctaacctgcgggaatggaaaagtttc

SEQ ID NO: 906 - DNA, 388 bp, Homo sapiens
tagggcgaattggagctccaccgcggtggcggccgaggtacaattcctttattccaaggcctgctagaatcttacatgtttataaattgcctttataagctggcatgcctcttggagtggggacagacatttgtttttcatgtggtatgtcgggagtatgaactggaaagaccgaaatcagttataatatgtcagcatggaattgatcgtcggttctgtgaatccaagttgagttgtattcctgggccttgtccaacttcagatgatttgaaatatactatgattcgtttagcagtagatggagcccgatatttacattgtttgagcatgggttgtgcctacaaatataaagatgggtgcaattcgagttgccaaaactgtaatctcc

SEQ ID NO: 907 - DNA, 432 bp, Homo sapiens
  misc_feature 2, 6, 7, 8, 9, 10, 18, 418, 432: n = A,T,C or G
gnaggnnnnncgccgtancactactatagggcgaattggagctccccgcggtggcggccgaggtacgcgggcggtctgaatggaggaagttggtaatacttggcttttttttttcttctctcatgcaagtttccaggatatagcttctttttttgctgtatgtaattgagaccaaactctaagcttggggccctggagagaacagttgtggcctgcaggtcattagtgaggtgagcagaagggaatcctggacttcccagagaaagaggagaccatgccagcctcgtggaacacagctaccaggaaatacagaagccaggttctattccttgccgaactcccggaagtccatggaaaaaaaccgggacccacagtgggggtgggcctaaaaatgtcccagccgccaaggctgcccgcntgcctgcctggatn

SEQ ID NO: 908 - DNA, 422 bp, Homo sapiens
  misc_feature 5: n = A,T,C or G
cgaancactactatagggcgaattggagctccccgcggtggcggccgcccgggcaggtaccaggctaggcagctctggagaaagcagaagtggataaataaggtgtggactcaccaaagacagttccaaagtcaatttcactctgacacactctctgtgatcttccacagtcagcacaatgcctgccccctgtgggtgttgtataaatatttgttgaatgaatgaatcaatcattcaacagaccaaggccaaatcagaaccccaaaccctaaggtctttatactctcactgtccatccatcgatcttcctgtcagaaatcagaatatacctttgcaataccctttgctagcctttcagttatcttttgaatagaggctctgagccttgaaaatattgcctgggaaaatattaacacccattt

SEQ ID NO: 909 - DNA, 389 bp, Homo sapiens
  misc_feature 372: n = A,T,C or G
ggcgaattggagctccccgcggtggcggccgaggtacatgcatactcaatgtttagttcccacttataagtgagaacatgtggtatttagttttattcttttttatactcagtccagatttgtggctcacaggctgggtagataaagacttttgtgtccaaatttccaaccagtagctgctatacacacatatctgggcctgccgattttcccatttgcttgttgaagaatcgacttttatgaaagaatcaagatctgtttattttcctaaaacaacagtaatgacggaatcataagtagaagtgggtaaccatgggtccctgaatccagcttctaggcacacactttctcctgtttctccacagttaaagntttgtgggataagggga

SEQ ID NO: 910 - DNA, 426 bp, Homo sapiens
  misc_feature 2, 7, 8, 11, 17, 21, 31, 174, 181, 328, 347, 387, 395, 398: n = A,T,C or G
gnaggcnntantttganccanttgactactntagggcgaattggagctccccgcggtggcggccgaggtacctggtagtcccagctactcagggggctgaggtgggaggattgcttgagtctggcaggtcgtagctgcagtgagcccagatggcaccacttcattccaccctgngtaacangagtgagaccctgtctcaaaaaaaagaaaaaaacatacacacagacatatatgcatacatacaaggagcagccactacccttagggctaagacagtgtgtccaagaatgagtcccccatttccctaccaccaccccagggcttgatnattcataccctggtttagnaaaggggcctcagttgtgggctcactggaatggccagagntaattgcntgnatgtgccttctctgggggaaagcgttgc

SEQ ID NO: 911 - DNA, 407 bp, Homo sapiens
  misc_feature 246: n = A,T,C or G
ggcgaattggagctccccgcggtggcggccgaggtactaaaaaatttcaattaacccaaaaaaggcaggaatggaggaacaaaggaacaaaaaaatgacaaataaaaaacaaatgacaagataagacacttagaaaacaagtagcaagatgggggatctacagcaacctcatcaatcattactggaattgcaaatggagaaactccatgtgcaaagcagggattgtcaccaagacccaactccatntacagacacccacgtaagatacaaagacaggttgggtgtctaaaggatagaaaaagatccacagtggtccaggagtggtcccagcattgtggtaggcacaagagtgaggatcacttgagtcttagagttttgacctgtaatccaaggcactttgggaggct

SEQ ID NO: 912 - DNA, 425 bp, Homo sapiens
  misc_feature 5, 10, 48, 50, 55, 56, 59, 65, 70, 208, 312, 361, 365, 414,425: n = A,T,C or G
cgaancactnctatagggcgaattggagctccccgcggtggcggccgncnggccnngtncttctnttttncatgcttgatttgtgaggcttattagaaaacaatggcatttgacgtttcatttctgactccttgatttccattgttttcaggaagttttcatctgctgaaggcaactaatccacaatgagcaaattatcctgccctgnagggtaagctataatatcggccccatgcttcaggaagagaaaatcatgtgttcaggggtgactttgagtcagctcagcattctaaatcaaaccgcaaacagtancaatcattattggcatagaacaccttaagcaaaattgggtcattttacntaangttttctggctttcgtgggagaattaattctgccctttctcctggagtnatttggatgtn

SEQ ID NO: 913 - DNA, 397 bp, Homo sapiens
  misc_feature 1, 4, 9, 210, 393: n = A,T,C or G
naancactnctatagggcgaattggagctccccgcggtggcggccgcccgggcaggtactttttttttttttttttttttggagacgaggtcttgctatgttgttcaggctagacttggactcccagcctcaagcagtcctactgcttcagccttccaagtagctggaaccacaggcacacaccactataaccagtttattttacattgntcttgtaattctggtatcagtgattcttataacaatatgctctcaatttattttaagcatgttgagaccttaatgataactattcagaaaccatactaaacattttgatcttgaaatcttccatcgttttccatcctctgcttatgcctcagtttatttccattcgcatgatatggggcactnaatt

SEQ ID NO: 914 - DNA, 405 bp, Homo sapiens
  misc_feature 386: n = A,T,C or G
cgaatacactactatagggcgaattggagctccccgcggtggcggccgaggtaccctgctgaaagattatttctaacaggcttgtagagaaacgtcggttcatgtaaattagaaattatggggccactttgccattcttcacacctgcaatgaacaggtgtttatctgcagttctgacttatctcttgaactccatttgcatgttatagtgggatgcagctgatgccctgtccagatcttcttcaggccactacatctatatatgcattcatattccagtggctgtgagtgttggctgttggttgacagaggagctgcatcctcctgggagggaaactggaactcagcctggatgaaaagccaccctggtcctgggaggtgaaagncatcttccaaatgacagcc

SEQ ID NO: 915 - DNA, 424 bp, Homo sapiens
  misc_feature 4, 277, 308, 338, 343, 349, 368, 383, 384, 396, 408, 419,420, 423: n = A,T,C or G
actnctatagggcgaattggagctccccgcggtggcggccgaggtacgcggggagacctgacgctgggaggagatgctgccacctaggttacttgtaggaccctatacggcaacctcctttgccaggaactatttataaacatcctgcaggaaaatgtgaagtagaagagacagggatatcccagaaggttatgcaaaacatcaagagaagatgagaggagtctatatgtcagaatacacatttcccaccttgcccaacagtagaaaaacataaaanaaaaaaaaaaaaaaaaaaaaagtacctgccngggcggccgctcgagttgctggcgtttttncatangctccncccccctgacgagcatcanaaaaatcgacgctcnngtcagaggtggnggaaaccccccngggactattannatnc

SEQ ID NO: 916 - DNA, 425 bp, Homo sapiens
  misc_feature 1, 4, 6, 9: n = A,T,C or G
naancnctnctatagggcgaattggagctccccgcggtggcggccgaggacgcgggagtttttcagaatcaggcctgctttgtccctaaatgctttcttatttccccagagcccttattggatttaagccccatatcatatctcacatacctgagacagacataccacagtgaaccctgcatgtccttgtaagttcttttccgtgcctagaagttgcagaagaccaaggaaccttggaagtgacttactcttttgcctcataaagttgctttaaaacagcctttattttaattattaacaaggtatgtcacacatttttaaattttaaggttaatttagtcattaattctgtcaaacaagtgttctttggaagctagttgtcttcaatgtcttttacttggagttacttggaaggtttgcttaaa

SEQ ID NO: 917 - DNA, 424 bp, Homo sapiens
  misc_feature 3, 8, 11, 424: n = A,T,C or G
ccncactnctntcgggcgaattggagctccccgcggtggccggccgcccgggcaggtacagatgtaactgggagatacctgaatgtgcagtcagtgccaagtggaggcctaggtaggtttatttggttattgggaaaaggagtggcaccagaaaattggaggactagaggacagttgggtgagagcagtttagtttctttgattctgtgctaacttttttggatatttgctggaaaatgcaatttatagaggatatttgctcttggctatggaatgcatttgctgtttcttctcttttatacgtaagatacatctgtgagaccctctacaggagatgaattcctggtgtaaaagagtcatgtgaatattgtggagtaattattctgagccaggggagcaggctaattagccttctggggaatgn

SEQ ID NO: 918 - DNA, 420 bp, Homo sapiens
  misc_feature 1: n = A,T,C or G
naatacgactcctatagggcgaattggagctccaccgcggtggcggccgaggtacagagaaaataaaactgacatatttgagtagctttaaaaaaaaaacttttttttaaaaaaaggctgcatgatgaatcagttatgtggctttggaccagtaaggagtcaatttcaacccagactgttctgacttggaaggccattgtgattccatgtctaactccagaatattgttttcacaataccataacatcttctaaactgaacaaaatacttgcacgaaatagttgattctcttcttccaatttcttttcattcatggaaagggaaagaagacacattgaattaagcatccaacaaatataaatacagcattaacatttaaatgctatctcagcaaatattttaaagggataaaccaaaagg

SEQ ID NO: 919 - DNA, 421 bp, Homo sapiens
  misc_feature 6, 10, 15, 18, 22, 24, 29, 31, 46, 48, 50, 127, 139, 152,155, 158, 411, 413, 421: n = A,T,C or G
ctctanggcnaaggnganctgnanctccncngcggtggcgggcgcngncncggggatctcactcaatcttactcccttgtagaacaggcgatatcttcaccatgcgcacaatgaaatcaatactcanagaaggcagatnattctccacgaanccnganaactaataaatgaacaacttgggtgaaatgtcccaccagacggtgtgatatttagtagcccagaaagctgccaaggggttgaatgacactatctgaagatatgaaccagtttgctctccatagggaggatttcatcaacaggaaacagatgcctggaaggcattggatttgctaagtgtctatgccatatgattctgctgtttgcgtttgatttagaatgctgagctgactcaaagtccaaaaaaaaaaaaananaaaaaaan

SEQ ID NO: 920 - DNA, 425 bp, Homo sapiens
  misc_feature 1, 3: n = A,T,C or G
nancactcctatagggcgaattggagctccccgcggtggcggccgcccgggcaggtaccgttcctccagtgcccagagatgctctccgcaccaagccacagatgtggaggaggcagatgtgatactctaacaatgtctgaagctctgtcacttgggtgctgaatccttttctatactttctcaatactggtcaggattttacggtgttgtctaggagagagcaaccatgatgggcatgcaatgctcaagttcacagaaaaacatgaatagcaagactcaaatctggctgccagatttctgcaaggtatttttctctccaaacgaggtaatgtgtttcttataacagtctttataataaggagatgtgtgtggaaaaaaatcaagtgttaaacggagtcatgcaaattagccatctggataaaaca

SEQ ID NO: 921 - DNA, 430 bp, Homo sapiens
actactatagggcgaattggagctccccgcggtggcggccgaggtacgcgggggccctcaacttctgagagcttaaggtatttgttcatgttaggcaggtaatgtctataaaccaaaagctgccacatactatctctctgctcaacactttactggatactggaggatttaagggaaggaaaaaagtgaccttttttgcctttttaagagcttgtaatcggtaaaggagataaaactcacacaaaggtcagggtatattttgtgctaagcatatgacgtagacatttaagtgctgccgtaatgcagaagaggaagaagtggtgtgatctagagtaacataggttttgttttgttttgtttttgtttttttctttttctttttctttttctttttctttatctagacagagtctcactctgtcgcgcaggc

SEQ ID NO: 922 - DNA, 428 bp, Homo sapiens
gaatacgactcctatagggcgaattggagctccaccgcggtggcggccgcccgggcaggtacccttcactctttaggagaaggtttgaaaaaaaactgtgtttcctgttgaaggccagtgatacctggcagcttacagttagaaaactctataactttattattttcatttgcacttaaaactgctatgagttttttaatgcaaaaaatagtgattgagaaagaaaaaagtgaacatatttatattcttccccctcagagagaaacactgttaacattttgtgtatttcggtccaggttcttttctgtgtgtgtaagcacacatatgtgtttatattgtataaaataagagattcatgctggacatacattgtttgtaacttccttcctttccttcctttctttcctgagctagggtctcgctctgtc

SEQ ID NO: 923 - DNA, 431 bp, Homo sapiens
gaatacgactactatagggcgaattggagctccccgcggtggcggccgaggtacgcgggaaggttaagcatttgtttattaaatagcacagatttccacccccatttggtttatctagtttccatttgtagtaactaatagaaaaaactctaaaatgcatcgggagggaaacacatttaaagctctggaggcataaaaacctgcatataaattcaggctgcaccgattgataagtgtgttactttctcaatttacttattctttcttaaccttagttttctcatcagcaaactatcttaattacatgactttgtaatccataaagcttgcttcaagctcttagcatgcacacagcacatctgcaaaagtaagcatttgccactttcggttctcaggataacatattcacccttccctacctactagcaagc

SEQ ID NO: 924 - DNA, 428 bp, Homo sapiens
cgaatacgactcctatagggcgaattggagctccccgcggtggcggccgaggtactcaatgaagagtggctacttttattagatcataaacagtttccatgttactaaccagactttacgactattaagatagcatcttaacctacgactgtataaatattttatgatcaataaatcttaattggtagactctgagaataaagatggtgtttttccaacccctcaatatttgcatacgtaaaagtatttagctactattttaaagcacctaaccggtatctgatgttaagtgcatgcaatcatgaaacatctttatgaaacacctaacaggatatggcattacatgaagcttttataaaagcaattaaaccaaaatagcctttacctcctggcaacttaaactccagccaaatattgatgcagactaa

SEQ ID NO: 925 - DNA, 432 bp, Homo sapiens
  misc_feature 4: n = A,T,C or G
actnctatagggcgaattggagctccaccgcggtggcggccggctttgctccaggcctcaggagtgtaagtttaagggcgcgaacctgggtgggacggggcagtttttccagcgggccatacgggaaaatttttggttcgaggaagacaaccaccctttttaaggagaaaactgcatcttgccctgcgttattcctacgcggtgcccaggtggggtgtgtgtggaccagtcaatgaccgcccaagctctccgagtagaaaacccaaacatggttttgtggggtgtgtgcctttgaccccggacttaagcaaaaagcgtggtcttgggcgtagctacgaggtggttggtgggctccagggcctgcgtgcccctcgacgtgagcgatgattggcggtgcaggataacagaatcgccctcttggccactcagtgg

SEQ ID NO: 926 - DNA, 428 bp, Homo sapiens
  misc_feature 91, 213: n = A,T,C or G
actacttagggcgaattggagctccccgcggtggcagcggccgcccgggcaggtacttttttaatttcttttttttttttttttttttagnagaagcattcaagtcaggtaacgggacaaacaagaaagaatgtaggcaggtaattctggagactctgagaagaacagttgagtgaactcacttcagatgcatgtagattatttgcactccanaatgtagactgtgggcactccagagactaccagaattgggggaaccacagtgactcattaggtttctctgttacaatcaggcatgagaaatatatatattttgttgatgttagctattgaaatgagatatattggaaactgagaacattggctttatgtttaaggaagtgtgttgttttggtaaaattgccattccacaaaaatttattatagga

SEQ ID NO: 927 - DNA, 447 bp, Homo sapiens
  misc_feature 1, 2, 6, 9, 20, 41: n = A,T,C or G
nnaggnttnccgtatcactncttagggcgaattggagctcnccgcggtggcggccggcgccaggaagccgccatcgcggatattcaaaatggaccagggagccgcgaagtatggttcgtgccagcgcagcacgaacgccaggcgcgccgccagcaggccggcgatcagcaggtcggaaacgagggggccggcgtcgggcagctggcggtagcgccgcagccaccacgccacgccgtaggcgacgcacagggaaaggaacagcagtaccaggcccgtgggcaaagccagggggccgatttgcagggacagcatgggcgctctctatcacgtcgaatggacggccattgtggcccatgcggattaaagcgtgcattaatccggcgtcaagaagcggccagtgctttcttgcgcacgaaatgcatggcttgcggctggtccaccaacacg

SEQ ID NO: 928 - DNA, 437 bp, Homo sapiens
gaatacgactactatagggcgaattggagctccccgcggtggcggccgaggtacaacttgacagtttataaaaatgctaacctatatcaacatttttccccaccaaagtgttcccaagggcaaaggtaagtgaatacatgtttccatgcttgtgtcaggggcacacagcaagggaaggcagaatgggcatgacctagattagatcccagaagccttcaaattccttataagacttgggactgcatcttaaaataatattgtttttttttattctttgataataaaagaatggaaccaaatcctggttgtctgattctttgcccagtgctctttcttatgtctaacactgcctcgtcttatgaataactctgacattacagagaaagactattgtttgttcaagttcaacactcaattccataggtgctagcaattat

SEQ ID NO: 929 - DNA, 435 bp, Homo sapiens
  misc_feature 1, 151, 190, 251, 257, 341, 392, 403, 425: n = A,T,C or G
naatacgactccttagggcgaattggagctccccgcggtggcggccgaggtacttttttttttttttttttttttttttttttaagcatatcctcacttatctgatgtaaatgaccaaatacctaattcatgcaaggcttaaaacctaggngacgggttggcttaaaacctaggtgacgggttgataggngcagcaaaccaccatgacacatgaatgcttatgtaacaaatctgcacgttcaacacatgtntttaanaacttaaagtaaaataattttttttaaaaatgcaaagaaaccatagattaaagagtcaacaaaataaaaagaaaacaaaaaatntttgattaacccaaaagacagcaggaaagaaggaacagagattaaaaaatntgggataaatncaaaactaatagaaaattgatntaattttttt

SEQ ID NO: 930 - DNA, 430 bp, Homo sapiens
  misc_feature 3, 47, 49, 57, 59, 63, 71, 72, 82, 86, 97, 106, 109, 128,133, 152, 155, 177: n = A,T,C or G
ctnctatagggcgaattggagctccccgcggtggcggccgggggccntngagactgncntggnagactggnnaggtcacgtntctnagacttctggngagaccatncanggcttttggctcttgacanagatngaccactggaacactgacnaangagagaattctactggtcacanacaagactctcttgatctgcaaataccacttcatcatgctgagttgtgtgcagctgctgcggattcctctgagcgctgtctatcgcatctgcctgggcaagttcaccttccctgggatgtccctggacaagagacaaggagaaggccttaggatctactgggggagtccggaggagcagtctcttctgtcccgctggaacccatggtccacttgaagttccttatgctactttcactgagcatcctatgaaaa

SEQ ID NO: 931 - DNA, 436 bp, Homo sapiens
atacgactactatagggcgaattggagctccaccgcggtggcggccgggggccattgagactgccatggaagacttgaaaggtcacgtagctgagacttctggagagaccattcaaggcttctggctcttgacaaagatagaccactggaacaatgagaaggagagaattctactggtcacagacaagactctcttgatctgcaaatacgacttcatcatgctgagttgtgtgcagctgctgcggattcctctgagcgctgtctatcgcatctgcctgggcaagttcaccttccctggggatgtccctggacaagagacaaggagaaggccttaggatctactggggggagtccggaggagcagtctcttctgtcccgctggaacccatggtccctgaagttccttatgctactttcactgagcatcctatgaaat

SEQ ID NO: 932 - DNA, 446 bp, Homo sapiens
  misc_feature 7, 8: n = A,T,C or G
aggaggnncaggatcactacttagggcgaattggagctccccgcggtggcggccgtagcttgcaggggtgctatgtgaagatggcggaattcccaacgtgcttctgcaaaattttatgtattcatccccctctgctctcagtagggtgttaccacctgcggatcctttgctttccccgctggatactaacagcctttttcataattgctagcacctatggaattgagtgttgaactgaacaaacaatagtctttctctgtaatgtcagagttattcataagacgaggcagtgttagacataagaaagagcactgggcaaagaatcagacaaccaggatttggttccattcttttattatcaaagaataaaaaaaaacaatattattttaagatgcagtcccaagtcttataaggaatttgaaggcttctggggatctaatctaggt

SEQ ID NO: 933 - DNA, 442 bp, Homo sapiens
  misc_feature 3, 4, 5: n = A,T,C or G
agnnnccctatcactacttagggcgaattggagctccccgcggtggcggccgcccgggcaggtacgcgggggcacaatgaaatcaatactcagagaaggcagataattctccacgaagccagaaaactaataaatgaacagtatggctccacataaggtagagcgtgtctggtgccctgccgtttggaaatgacccaaaggcaggagtggaagatggagtttcagcaggagagactgaggatctcagaggatttgctctgggatgcagagacgcttgcctatttgctaagtgtctatgccatatgattctgctgtttgcgtttgatttagaatgctgagctgactcaaagtcaaactatttgctaagtgtctatgccatatgattctgctgtttgcgtttgatttagaatgctgagctgactcaaagtcaaactgtaagtac

SEQ ID NO: 934 - DNA, 435 bp, Homo sapiens
  misc_feature 208, 371, 401, 410: n = A,T,C or G
actacttagggcgaattggagctccccgcggtggcggccgcccgggcaggtactttttttttttttttttttttttttgggacagctttctattctgtcacccaggctggagtgcagtggcacaatctcagctcactgcagcctccacctgttgggctaaatccatcttcccacttcagcctcctgagtagctgggaccacaggcacncatcaccactcccggctaattttgtttttcatagcacattacattaccgatttcccagtttataagtaaccaagatgctcaaacaagcaaatattttccttgagtatgacttactacaaaaaagagaaagaacagagaaattagttctgaaagtgcatttttntaaagcccatttcagtatttgatagctcanatcatatangaagttttaatcaaaatgctaaaga

SEQ ID NO: 935 - DNA, 445 bp, Homo sapiens
  misc_feature 3, 4, 5, 6: n = A,T,C or G
agnnnnccctatcactacttagggcgaattggagctccccgcggtggcggccgaggtacctcctccctatgcatctgctgtgggaagtgtgggtaactcacagatgatgccacagggcatgtattcaggcaccacaggcagcagtgaatgaatgaagtgaaatggtatttatccatttcctggaaaggtccagggtttggctctgcagggccaagagaacagctttagctgtgccttaacccagtcctggagaagccagcaggccgtaatcacggggaggaaacccatcttttaagggctcctcgctcaggtggtgacaaggtgaggtggtcatctatgctgtctttatcagtatctgtcctaaatactgtgctctgacatttgatgctaatattccatattatcagggcttctgtggtgtttaggcctctaatttttctcttca

SEQ ID NO: 936 - DNA, 424 bp, Homo sapiens
  misc_feature 1, 2, 34, 382, 389, 404, 410: n = A,T,C or G
nnaatacgactactatagggcgaattggagctcnccgcggtggcggccgtaccggcgccgctggcgctcaggaccgcacccgcgttcagcgtgacgtcggcgccgatgccgcgataaccgaggtcgaagccgcagcagttggcggccaggttcggcaggtctcccaccgtgccggcgccattgccctgattgatcagtttgatggtggcgccggtgatgctgttgacgctgatggagccggccatatggttggtcttgtcgctgccgtccgccatcagcagcgacacgttgccggtgccggcgtcgatcttcgccgccacgccctgcttgtcgacgcccatgctgaagggtgggcgatgcccggcgtcgcggtaggccgtcnttgaacncccgtttggccaaancttgtncgtttgggcgggtc

SEQ ID NO: 937 - DNA, 444 bp, Homo sapiens
  misc_feature 9, 10, 64, 76, 94, 137, 302, 355, 413, 419: n = A,T,C or G
gtttttttnnctctaatacgactactatagggcgaattggagctccaccgcggtggcggccgangtaccgttcctncagtgcccagagatgctntccgcaccaagccacagatgtggaggaggcaggtctggacttnaggcagacaaggaacttcagaaaatcctggggagagacagcacagggtaagagatggcctgtgaaaactgaaggcaatttggaaggcatttttaaattccgtggagccactggagaaatgtttacaggaatgatgccttaaaattcctcagtggtaagatctgantacctgcccgggcggccgctctagaactagtggattcccccgggctgcaaggnaatttcgatatcaagcttattcgatacacgtgcgacctcgagggggggggccccgggnacccangcttttggttcccttttagtggagg

SEQ ID NO: 938 - DNA, 428 bp, Homo sapiens
  misc_feature 1, 3, 6, 7, 9, 12: n = A,T,C or G
ngnttnncntancactactatagggcgaattggagctccccgcggtggcggccgcccgggcaggtacgcggggagacctgacgctgggaggagatgctgccacctaggttacttgtaggaccctatacggcaacctcctttgccaggaactatttataaacatcctgcaggaaaatgcagtgaagtagaagagacagggatatcccagaaggttatgcaaaacatcaagagaagatgagaggtcagagatgggaagaaacaagaactttgacatgcttggtgttcttgcccaagctttgaagaagtttacaaagtctatatgtcagaatacacatttcccaccttgcccaacagtagaaaaacataagaagagaaaaacattaaaaaatgacaagggaagtttaatgggaagtcagcaatgtgatggg

SEQ ID NO: 939 - DNA, 406 bp, Homo sapiens
  misc_feature 259: n = A,T,C or G
ctactatagggcgaattggagctccccgcggtggcggccgaggtacttacagtttgactttgagtcagctcagcattctaaatcaaacgcaaacagcagaatcatatggcatagacacttaacaaatccaatgccttccaggcatctgtttcctgttgatgaaatcctccctatggagagcaaactggttcatatcttcagatagtgtcattcaaccccttggcagctttctgggctactaaatatcacaccgtctggngggacatttcacccaagttgttcatttattagttttctggcttcgtggagaattatctgccttctctgagtattgatttcattgtgccccccgcgtacctgcccgggccggcccgctcgaaattgttatcccgctcacaattccaca

SEQ ID NO: 940 - DNA, 432 bp, Homo sapiens
  misc_feature 2, 3, 4, 5, 8, 11, 12: n = A,T,C or G
gnnnnggnttnnctatcactacttagggcgaattggagctccccgcggtggcggccgaggtacacaataaatactttcaactattttgttgctagctttacatatttttttgcgataaaaatagcttttcccaaaaggaataaaaactaaaacaaaaaattcaaacatccaaaagttaacatccaaaagtgttggtttttcttctcagaaatagcaatttgttctgcttctcatcagtcccacttaggctctctctaggacttaactgagcaactcctaagatccaagttcccttaaattcctacaggcagtggtcccaccaacaaagacttctctactcttcctttgcctccagatgctcagacttgggcttctggtattctgaaaggcatccttgtttattttcctaccagagattgttggatttgcccc

SEQ ID NO: 941 - DNA, 410 bp, Homo sapiens
  misc_feature 14, 409: n = A,T,C or G
actactatagggcnaattggagctccaccgcggtggcggccgaggtggcacggtgtatgaaggcctgtgtttgaagacttaggtcagaccttttgcccgcctttcccctatgcagctctatgcaactgtctgtgcaaggtcctgtaatttgcgtaggacgccttgacacagtctctgcttatggacgctttacaaaactatcttgcaaagaaataagtacctgcccgggcggccgctctagaactagtggatcccccgggctgcaggaattcgatatcaagcttatcgataccgtcgacctcgagggggggcccggtacccagcttttgttccctttagtggagggttaattgcgcgcttggcgtaatcatggtataagctgtttcctgtgtgaaattgttatcccctna

SEQ ID NO: 942 - DNA, 435 bp, Homo sapiens
  misc_feature 83, 158, 212, 248, 250, 252, 258, 273, 276, 282, 291, 301,306, 314, 324, 325, 334, 336, 338, 348, 351, 355, 363, 388,390, 404, 408, 415, 430: n = A,T,C or G
actactatagggcaaattggagctccccgcggtggcggccgcccgggcaggtactttttttttttttttttttttttttttgnatatattccaccctcatggcaaatatgaaagatttccattggatgagacactgaactcagtaaccacaacaatgnggggcataatgcaatgaaactaaaaacatattcttaggaaagaaaaatgaaagngaggaagtaagaaaattttttttttttatgagacanantnttgctntgtcacccaggctangtngccagnggcccgaanccttcggcangcctnggagcctncctgcccgcnnggggggaancngnaaaacccggnctnccanctgcattnacgtatggggggcaaccgcgcgggnancaaaccctggtacncctnttggggnggcctctttcccgcntccct

SEQ ID NO: 943 - DNA, 945 bp, Homo sapiens
  misc_feature 14, 39, 53, 102, 109, 121, 125, 131, 143, 154, 162, 174,176, 180, 182, 198, 199, 218, 222, 225, 232, 236, 252, 256,258, 270, 276, 293, 311, 319, 321, 326, 330, 334, 335, 348,374, 376, 388, 400, 408, 410, 431, 444, 455, 464, 469: n = A,T,C or G
  misc_feature 479, 492, 494, 497, 500, 524, 532, 550, 553, 556, 561, 566,577, 585, 599, 608, 619, 626, 639, 646, 652, 680, 689, 692,725, 742, 747, 748, 778, 799, 804, 814, 819, 829, 853, 855,867, 878, 880, 883, 886, 897, 924, 932, 942: n = A,T,C or G
ctttatttaagggngtccgaaaattttggggtaaggctnctcaactccgtcgngttggtgtccgggtctccgtaaggggttacctccattttggtgaaggtnactttantgtgatccgtcnattnctatcnggtggtctcttnaccggtgtgcnaattcaangggtctcctttnanaagncnctcttgcaatataggnnaaaaccaaatccagtctanttcnagnggggggncctncctggctgggcaaggnaagncnccgtctccaccnccttgnaagccccttcaaccccnggctttttaaagtttttncaattaananaaaancaanggcnnccctttgggtggntgctccttttttgctttacccaaaanangtccccaagggntttccggttggnttattttntnctttaactccccatccaaagnttgtttcgaatgngggaaaccttnccccaaggnccggntttatggtancccaaggtcctananaanccnaaccaagaaaataaccattttggnttatctancccctttttttttttggnaanaanatccnaaaanaacatcccaanggttcgtnttcaagggtggatntaaaaaggnccaaaaataanaaccaanaaaaaccaaaaanccccaancccaanaatttcccttcaaaaaaaccctcaaagncctcccggnccnggtaaggggggaaataacccccccttttttttnccccttttcccccggcngggtnnaaccccctttgggccccccccggggggggncccgggggggctcccggttcntttcntttaaagggnaaaancctttatggntttgggggggaaatttcccccccncncccggggggggnggccctttggncncanagnggggtaaaaantttttccgggaaatttatttcccaaanaagggccntttttatttnccg

SEQ ID NO: 944 - DNA, 410 bp, Homo sapiens
actacttagggcgaattggagctccccgcggtggcggccgcccgggcaggtacgcggggacaatgaaatcaatactcagagaaggcagataattctccacgaagccagaaaactaataaatgaacaacttgggtgaattgtcccaccagacggtgtgatatttagtagcccagaaagctgccaaggggttgaatgacactatctgaagatatgaaccagtttgctctccatagggaggatttcatcaacaggaaacagatgcctggaaggcattggatttgctaagtgtctatgccatatgattctgctgtttgcgtttgatttagaatgctgagctgactcaaagtcaaactagatggaagcattcgactgccggcacaaagatgtttggtgtgtagtgactgcctaca

SEQ ID NO: 945 - DNA, 415 bp, Homo sapiens
  misc_feature 2: n = A,T,C or G
tntcactcctatagggcgaattggagctccccgcggtggcggccgtagcttgcaggggtgctatgtgaagatggcggaattcccaacgtgcttctgcaaaattttatgtattcatccccctctgctctcagtagggtgttaccacctgcggatcctttgctttccccgctggatactaacagcctttttcataattgctagcacctatggaattgagtgttgaactgaacaaacaatagtctttctctgtaatgtcagagttattcataagacgaggcagtgttagacataagaaagagcactgggcaaagaatcagacaaccaggatttggttccattcttttattatcaaagaataaaaaaaaacaatattattttaagatgcagtcccaagtcttataaggaatttgaaggc

SEQ ID NO: 946 - DNA, 440 bp, Homo sapiens
  misc_feature 7, 14, 266, 365, 368, 396, 397, 426, 439: n = A,T,C or G
tgttttncccctancactactatagggcgaattggagctccccgcggtggcggccgaggtacttctgtgacatgtatcaccaactcacacagtgattcttacgttcttaggtcactgcttggattatgcagcaagaacaaggccatgtaaggggtaggggtggggccaggattagacctgatcattgagaaatggcagatggtaagggaaggtcagtcgcagatacctacactggtaggaaataaaaagcatatgagacagaacanagtattacaaatgaagtgtaacagaccacaggtcctggggtgtacctgcccgggccggccgctctagaactagtggatcccccgggctgcaggaattcnatntcaagcttatcgatacccgtcgaccttnnaagggggggccccggtacccaaccttttngtttccctttagng

SEQ ID NO: 947 - DNA, 412 bp, Homo sapiens
  misc_feature 2, 361, 363, 388: n = A,T,C or G
tnatacactactatagggcgaattggagctccccgcggtggcggccgaggtacttacatggggaccgccaggggcctcgagaatcggtatcctgagtcctcttgaagagcagtagaggttgtttcattaagtgcaaacacattgttcttaatttgaaaactgtgggcagaaacagaagcccgagactaatttttccattgctaactctagattctcggccgctctagaactagtggatcccccgggctgcaggaattcgatatcaagcttatcgataccgtcgacctcgagggggggcccggtacccagcttttgttccctttagtgaagggttaattgcgcgcttggcgtaatcatggtntnagctgttttctgtgtgaaattgttnttccgctcacaatttccacaccaa

SEQ ID NO: 948 - DNA, 941 bp, Homo sapiens
  misc_feature 1, 4, 29, 288, 433, 469, 472, 490, 501, 508, 521, 527, 530,548, 568, 575, 581, 587, 596, 600, 601, 606, 615, 635, 638,643, 650, 655, 658, 666, 667, 669, 671, 676, 690, 696, 699,700, 703, 706, 711, 713, 720, 736, 739, 748, 750, 760: n = A,T,C or G
  misc_feature 778, 783, 800, 801, 806, 808, 844, 846, 847, 850, 859, 860,861, 863, 865, 866, 869, 874, 879, 882, 885, 889, 890, 891,894, 902, 908, 930, 934, 940: n = A,T,C or G
ntgncgtatccactactatagggcgaatnggagctccccgcggtggcggcccgccgggcaggtacaatctctggccctacattttctaaacgttatgccaccctgaccaaggggcaactcctacaaagccaggcaaaataataaaatcatatttgtctctagtggaatggataactatgcctaaaactgcccctttgaaaagcaactagagagataatttctgaagtgtttgtccctacctgaatgtgtggcaaaattctaaactccctgaagtgtgaaagtggtttncaagccacatgcacatccagttgtggtaaagggtgaaaatctaactggctaagagggcttcatagcaacattaaccaaaaagtggttatgtagactttgcctgcttcataattccctagggcattctatgctattctgtaccttnggccgctctagaactagtggatcccccgggctgcanganttcgatttcaagcttatngatacccgtcnaccttcnaagggggggggcnccggtnccnagcttttgttccctttantggaggggtaaattgcgccncttggcngtaatnatgggncaatagctntttnnttgtntgaaaattnttttccgttacaattttcanacnacatncgaagcncgggnggnattaaagnngnanagccntgggggggctaaangagtgngcnntanttncattnanttgcggntgtgcttacctggccngcntttccagtntnggaaaacctnttagtgccacttgcattnaatgnaaaatgggttaatctcnngggtnangggtgcttttgtcgtatgtggcgctttttctctttntnngtnaaataactnnntnannttntgttntctgnacnatngtannnggnaatttttntaattnaagtgggttatacttgtttttntctntattang

SEQ ID NO: 949 - DNA, 971 bp, Homo sapiens
  misc_feature 178, 203, 217, 225, 229, 242, 251, 252, 264, 267, 268, 269,279, 281, 283, 288, 292, 294, 295, 305, 308, 309, 311, 313,314, 317, 319, 323, 335, 339, 340, 343, 347, 348, 349, 352,353, 354, 362, 365, 366, 367, 368, 369, 370, 374, 375: n = A,T,C or G
  misc_feature 378, 382, 385, 394, 398, 402, 406, 408, 410, 413, 415, 417,424, 426, 431, 432, 435, 438, 441, 442, 449, 453, 458, 462,467, 469, 475, 476, 477, 479, 485, 488, 490, 493, 495, 497,499, 500, 501, 504, 505, 509, 510, 517, 520, 529, 531: n = A,T,C or G
  misc_feature 535, 536, 540, 543, 545, 546, 550, 555, 556, 558, 561, 564,566, 571, 572, 587, 588, 591, 593, 596, 597, 598, 601, 611,612, 615, 617, 618, 620, 624, 660, 661, 663, 667, 668, 670,677, 679, 682, 683, 685, 686, 688, 697, 707, 708, 709: n = A,T,C or G
  misc_feature 710, 718, 719, 722, 728, 732, 733, 734, 738, 747, 749, 750,751, 754, 764, 767, 768, 775, 782, 783, 785, 791, 797, 806,809, 811, 813, 816, 819, 820, 824, 826, 827, 828, 831, 834,843, 847, 848, 851, 862, 864, 868, 879, 881, 893, 894: n = A,T,C or G
  misc_feature 898, 904, 906, 913, 916, 919, 923, 928, 932, 939, 942, 949,964, 966, 967: n = A,T,C or G
tataggggcgaattggagctcccgcgcggtggcggccgtctccggcttctattttgcccacccggagtcgaaatacttcgtcgtcggcaagatcggcatggaccaggtggaagacatggccaagcgccgcggcgccagcatcgaggacgtggaacgctggctggcaccgaattgtcgnagtgccataatataagcacaaggcncgcggaacttatcngcgcgccncagngcacttacgcatnatgcacggnngggatgctgcangcnnnctcctgctcntntnctgantgcntnnggacgatatnttnncngnngangncagncttatacgtttngccnnatnagannngtnnnttctcctnggnnnnnncgcnntgngatntgntgacatgtngcantatntcanantntcntntntctccgngntcagnnatnacnatnntacgatnatgntctcnggtngatangnttattnnnantttttntgntnatntntngnnntannaganntcttgcngangtggcatgncntcannaatntgntnnatgntgtgnngnatnatngnggtgnnatacggttatgatgnngtngntcnnngtnatcatcgacnnttngnngntgancatgttatgacgatgattgtgacgaacgtctatgtnntngtcnncnattatcnangtnntnntnctgatcatnttggtgacgnnnnttgatgannatnttaacnattnnntgantatggactnannntgntgacgatggncgnntattatngtaattnncnccgacnatgatnatggttatnaangntnatnttnntaanannnttncgnatattgatnttgnnatnatcgattatcnanatgntgatcacatgntnatgatgtcgcanntcgnagtggncnatcgttnatnatnatgntcgangatnatgattntcntatgatngattatcattgatancnnatcg

SEQ ID NO: 950 - DNA, 930 bp, Homo sapiens
  misc_feature 3, 5, 8, 9, 14, 15, 33, 245, 273, 280, 288, 395, 420, 431,432, 443, 454, 463, 467, 471, 473, 498, 515, 519, 523, 532,552, 554, 555, 563, 571, 572, 576, 580, 583, 585, 586, 591,599, 602, 603, 608, 614, 615, 618, 621, 626, 627, 628: n = A,T,C or G
  misc_feature 629, 630, 631, 632, 633, 634, 635, 637, 638, 640, 643, 644,646, 649, 650, 651, 656, 657, 658, 659, 660, 663, 666, 668,669, 683, 691, 697, 701, 703, 704, 705, 710, 717, 725, 726,728, 729, 730, 731, 732, 733, 735, 736, 742, 743, 747: n = A,T,C or G
  misc_feature 750, 751, 753, 754, 766, 769, 770, 772, 774, 776, 777, 779,780, 781, 783, 784, 789, 791, 793, 794, 795, 796, 800, 802,805, 807, 808, 811, 815, 816, 818, 819, 820, 822, 825, 826,828, 829, 830, 832, 833, 834, 835, 837, 840, 841, 843: n = A,T,C or G
  misc_feature 847, 848, 849, 850, 851, 852, 854, 855, 856, 858, 862, 864,865, 866, 868, 869, 870, 872, 873, 875, 876, 877, 878, 880,881, 882, 883, 884, 885, 886, 887, 888, 889, 894, 895, 896,897, 899, 901, 903, 907, 909, 916, 918, 920, 921, 925: n = A,T,C or G
  misc_feature 926: n = A,T,C or G
gcnancgnntatannactactatagggcgaatnggagctccaccgcggtggcggccgtctccggcttctattttgcccacccggagtcgaaatacttcgtcgtcggcaagatcggcatggaccaggtggaagacatggccaagcgccgcggcgccagcatcgaggacgtggaacgctggctggcaccgaatctgtcgtagtgccataatataagcacaaggcgcgcggaacttatcgcgcgccgnagcgcactaacgcagtatgccggtcggnatgctgnatgcccgntccggcccgttccctgactggctaaggaggatatatggcaagcaatttcaaactgaaacgctggcaagatcaagtgatcctgttgctgggcctgtggctgctcgttncgccatgggccgttttgctatcccnaaggctcgccnnaaatgatcaangcctttgcctngggcctggngatnatcngnactggcctgcttttacctgtacaanatctatttttgggcctntcgnctcnaccttgctngtgggcgttttggaccgtcntnnttccatgnggtgctgnncatngccnacnanngcgtnaatatgtntgnnaccangtttanngtntgnaaatnnnnnnnnnntnntnganntngannnaaaannnnnccngantnnattaattttaaaanacttggtntgctcntttntnnnaattntattatnaaaaatanntnnnnnntnnataacnnattnttnntnntataaaaaattntannanantnntnnntnnataanantnnnnaatntnttntnnaantgtnnannnantanntnnntnnnntnacnntnttcnnnnnnannnanaatntnnnannntnnannnntnnnnnnnnnnaatannnnantntntatntntatatanantnnaatnntccg

SEQ ID NO: 951 - DNA, 909 bp, Homo sapiens
  misc_feature 4, 6, 13, 14, 16, 597, 676, 691, 723, 801, 818, 826, 828,841, 864, 872, 874, 875, 882, 883, 886, 895, 897, 901, 904: n = A,T,C or G
agcnancgcgtanncnactactatagggcgaattggagctcaccgcggtggcggccgcccgggcaggtacgcggggggtttgtcatactttaacttttgtccctttcccaggtggcccatgcttctaggccagcctcccaattcctagcttgcttcatgctcctggtctttgcctactcaaaacaatctgtcctccccaccctgtcatctctgttcagagtaaatacctccctccctctgcttttgccctaagttattttttcaactcacctaacatctaacttggctttgcagctctgtttctccaaaaccctctctgcctgtttcctcccaagctatctatgaccagtgccagaaaccagaaaatcttcttggaagttgcactctttgcttctcttccctctcctttatccttccacttgggaatctctctccttctacctgtctctatctgctgcaatcctgttcatcttttccaggtacctcggccgctctagaactagtggatcccccgggctgcaggaattcgatatcaagcttatcgataccgtcgacctcgagggggggcccggtacccaagcttttgttccctttaantgaggggttaattggcgcccttggcgtaaatcatgggcatagctgtttcctgggtgaaattgttatccggtcacaattncacacaacatacgancccgggagcataaaatgtaaagcctgggggtncctaatgagtgagctaacttaacattaattgcgttgcgctcaactgccgctttccaagcgggaaacctggccggccancttgatttaatgaatcngcccaacncncggggagaggcgntttgcgtatttgggcgcttttcngttcttgntnntgactcnntgnctggcattngnttgnggnaaggg

SEQ ID NO: 952 - DNA, 975 bp, Homo sapiens
  misc_feature 5, 7, 239, 247, 257, 277, 290, 292, 303, 311, 315, 317, 321,323, 327, 332, 344, 345, 349, 353, 360, 368, 369, 370, 380,382, 394, 396, 407, 409, 413, 414, 418, 427, 429, 438, 439,451, 452, 454, 458, 461, 462, 463, 464, 468, 471: n = A,T,C or G
  misc_feature 476, 477, 478, 481, 482, 486, 487, 489, 490, 492, 494, 499,501, 502, 503, 504, 506, 510, 515, 516, 517, 518, 520, 526,528, 529, 530, 533, 536, 538, 539, 551, 558, 559, 560, 561,568, 569, 572, 584, 585, 588, 590, 601, 602, 607, 616: n = A,T,C or G
  misc_feature 618, 621, 628, 630, 631, 634, 637, 638, 639, 641, 647, 650,653, 654, 655, 656, 672, 675, 676, 677, 682, 684, 686, 691,693, 695, 697, 699, 706, 708, 715, 722, 723, 724, 732, 734,735, 738, 756, 764, 769, 770, 773, 777, 783, 789, 793: n = A,T,C or G
  misc_feature 794, 798, 800, 803, 804, 807, 809, 820, 821, 824, 829, 831,838, 839, 841, 852, 859, 860, 862, 864, 865, 872, 873, 874,876, 877, 886, 889, 890, 892, 896, 902, 907, 911, 912, 918,922, 928, 936, 938, 944, 951, 953, 957, 959, 960, 967: n = A,T,C or G
  misc_feature 973: n = A,T,C or G
gcgcnangcgcgtatcgactactatagggcgaattggagctcccccgcggtggcggcccgaggtacagcactgggcttacagcggcgctcaacagatttttttctttttaagaaaatgaattcactgaggtttagagatgttaaaatacttgcccaagttcctgcttgcccagatgtgcctttgggaatgcatcttctttctcaagcctccttacaggggttgtagtgaagattggaangggataangcaggtgaancaattggaatatattaaagngctccaattaatnangacctgtcatntttttttntcangntgancnatangaccngccctctggtgnntggnaaanaaacttntggggtcnnnctttctaagngnagggggataaancntcatatcgttntnatgnncctnatggttttntnaaacgttgnntgtaacattacnnanccgngtnnnntaanatnatacnnnttnngggnncnnantnccttntnnnnantacntactnnnntntcttantnnnatnttngnnacatattttgantttaatnnnnagttttnntanataatatattanntananttagtcatttnnctctncttttaatntncantaactantnnatntcnnnantcctanttnctnnnnctctcacaatttatanttnnntctantncnttgtnancntncnataactngntttattnttattcnnncattggantnnaanactctcataccctcactntataagantaatnnctntttnttcatnttgtcnaccnnatcngncannatnanctttgatcccnnttngaacntncgatatnngncttcctttaanttttctnncncnntttttcnnntnnatataatcnatnncntttnattgtnggtantgtnngatccncgtngtggtnatttaaananactccnggctctncncgcntnnaattacntccccncg

SEQ ID NO: 953 - DNA, 926 bp, Homo sapiens
  misc_feature 19, 197, 235, 265, 359, 386, 388, 389, 391, 420, 421, 430,433, 442, 443, 451, 456, 486, 488, 489, 492, 511, 517, 518,519, 529, 537, 544, 545, 548, 559, 561, 566, 567, 569, 572,573, 575, 580, 585, 587, 588, 590, 596, 598, 601, 606: n = A,T,C or G
  misc_feature 609, 612, 620, 621, 626, 629, 633, 638, 639, 640, 641, 644,649, 651, 654, 657, 659, 662, 667, 669, 671, 674, 675, 685,687, 690, 693, 694, 699, 710, 712, 717, 720, 725, 727, 731,733, 734, 743, 746, 752, 758, 763, 766, 770, 771, 772: n = A,T,C or G
  misc_feature 777, 778, 783, 786, 787, 788, 789, 796, 801, 808, 811, 814,816, 820, 823, 831, 834, 835, 838, 840, 843, 845, 854, 858,861, 866, 872, 882, 889, 890, 891, 895, 900, 902, 904, 907,908, 910, 911, 914, 915, 916, 919, 921, 922, 925: n = A,T,C or G
tagggcgaattgtactatngggcgaattggagctccccgcggtggcggcccgcccgggcaggtacgcgggggagatgctgccacctaggttacttgtaggaccctatacggcaacctcctttgccaggaactatttataaacatcctgcaggaaaatgtgaagtagaagagacagggatatcccagaaggttatgcnaaacatcaagagaagatgagaggagtctatatgtcaanaatacacatttcccaccttgcccaacagtngaaaaacataagaagagaaaaacattaaaaaatgacaaggaagttaatggaagtcagcaatgtgatggtgtttggaggtggagccttcatgaangttattaatgtccttgtaagaaaagcnannanagcttgcgcaccttttttctgtcttgtgnnggagccaanaanccccgttgnntttcaatnttgtnagaaggacccttacttagaaacttgcctgncnngcntccttatttgggctttccnacattnnnaaacttggtnataaaganttttttnntgnggttttttccntnggttnntnagnnanttttntattntnntntcgttncntgnttganatnttncttttgtnntcttnttnttcntaatnnnnatntattngnttntgntntcnttttngncnaannccctctgttncntgntgnnggtgntgttgattctngntaatnttntattngngttntnnttatctttnatntttaanatagtntatgntgnattnnntttcnnttatnatnnnncatgttnctcancgagagnatnatnantatnatnagttgatnttnnttntnttnangcgattcanttgnatnatttnttgatntttgttatgntaattannnttcnatatntntnttnntnncgnnnttntnnttnt

SEQ ID NO: 954 - DNA, 847 bp, Homo sapiens
  misc_feature 396, 505, 508, 509, 516, 518, 521, 526, 527, 529, 530, 533,534, 535, 536, 546, 551, 561, 563, 564, 565, 566, 568, 572,574, 576, 577, 584, 592, 594, 602, 604, 608, 611, 612, 620,621, 624, 627, 628, 629, 631, 632, 633, 634, 637, 644: n = A,T,C or G
  misc_feature 645, 649, 652, 657, 664, 668, 671, 680, 686, 688, 698, 699,702, 703, 705, 710, 714, 720, 738, 739, 740, 747, 748, 751,752, 754, 758, 759, 767, 774, 775, 776, 779, 781, 782, 783,785, 787, 796, 798, 802, 804, 806, 809, 812, 820, 821: n = A,T,C or G
  misc_feature 822, 824, 826, 827, 829, 831, 846: n = A,T,C or G
cgaattggagctccacccgcggtggcggccgaggtacctctcctgggaagctcttcttcaaacattggtgactcagggatttgggctgctttcatcttatagctctgtcatctctatcatggagctttcaaggccttgtttgcgccaatatcctctcctggatgcttgggaaacacatcgatgcatcccgtcagtcagcagctgtttacggaacaccagctgcaggccaggcaccgtgctgcaaggcgtagatatgttgctgaacacgactcccttccagatgttcaggatttaacaggcaagtaaacagagggtccagagaaggcactcagcactgcctcatgacatcagggaggattgctcaaaggaagtgatgcctaaacccagctggatcgnagtgtaatggatagaggggtaaacaagagctgatttcctagcggtcctgagtctcgacaggttgccaccgtcaggagtattgatctttttctccccgcgtaccctcccnggnnataactntntgnagagnngnntcnnnnccttttcacngtggnaaaaaaaagntnnnncnaaantncnntagttgnatgtagantntacgagcnanaatntannctcacttnnaanaannngnnnnttnttaaagnncganttnttagnaatattncggngcnggtaagttnaatctngntctgaatgtnnttnngnggttntcanaaggtngtaaatagttaggaagtnnnactgaanncgnngntatnncgttgganaaaaaannnggnannntnangatagtatnangttntncnacnttntgtacgcnnntntnncntntatgtatgactgtgnt

SEQ ID NO: 955 - DNA, 857 bp, Homo sapiens
  misc_feature 10, 91, 95, 96, 544, 570, 590, 661, 672, 724, 777, 792, 814,820, 847: n = A,T,C or G
atgcgccgtnatcgactactatagggcgaattggagctccccgcggtggcggccgcccgggcaggtacttttttttttttttttttttttnaggnnatatgtatacatagtaagtgtatatatttttggggagaagatcatgcatttcctaggacaggactaatacatttagctgtggctattatcaaagagcaccaagaccttaggtggggcaaccagactggctatggggcttgatgtaagccagacccatgacccataaactatttcaggtaggaagtaagcaatactataacttggactcgagggggagcaaaagggcacccctcaatggtgatggctgcccacttggtctcaacactgtaaaacttgggacttgctgccaagctccaccaggcagggggcagaggacactgagtctcctccaactgagtcaggagtggctcaggagctgacactggcctaagcttgcagcaaagggcccctacgtacctcggcccgctctagaactagtggatcccccgggctgcaggaattcgatatnaagcttatcgataccgtccgacctcnagggggggcccggtacccanctttttgttccctttagtgagggttaattgccccttggcgtaaatcatggtcatagcttgtttcctgtgtnaaaatgttatnccctcaccaatttccccacaacataccaacccggggagccataaaagtggtnaaaccttgggggtgccttaatgagtgagcttaacctcacattaaattgcgttncgcttacttgccccnttttcaatccgggaaacctttntgccancttgattaatgaaatggccaacccccngggggaaggg

SEQ ID NO: 956 - DNA, 841 bp, Homo sapiens
  misc_feature 524, 557, 576, 606, 631, 640, 641, 648, 666, 671, 672, 676,688, 696, 699, 706, 712, 729, 731, 738, 745, 747, 748, 755,761, 775, 776, 783, 785, 787, 788, 791, 805, 807, 813, 816,818, 822, 824, 831, 832, 838, 840: n = A,T,C or G
ggcgaattggagctccaccgcggtggcggccgaggtacgcgggggggacaggccatctcgctataggaaaggaaagtggaacagcattcatcctcaacatttttacgaagacaaaatgaagactggagtagaagactgatcagtgcaggtgtagcataaaagtgtaatcctggaagatgtggtgtgagaaggtagcacaagtgaagcaaagatacaggagatagggaaggaaagctggaagcagaggtcactggagggagagggagatggacacattcagggctacaaagcaagttctatgtgatttgctcacctcttcaattgtgggacccctcaaaatgtgtacctgcccgggcggccgctctagaactagtggatcccccgggctgcaaggaattcgatatcaagcttatcgataccgtcgacctcgagggggggcccggtcccagcttttgtcccttttagtgagggttaattgcgcgcttggcgtaatcatggtcatagctgtttcctgtgtgaaattngttatccgctcacaatttcacacaacataccanccgggagcattaaagtgtnaagccttggggtgccctaatgagtgagctnacttacattaatttgcgttgcgctnactgcccgnntttccanttcgggaaacccggtcgncccanntgcnttaaatgaatcngcccaacnccncgggganaaggcngtttgtcttattgggcncntcttctncttttcncnntttactngacttnttgcgcttcggtcnntttggcntncnncgnagctgttttctacntntcttantangncggncnattccgnntatccncng

SEQ ID NO: 957 - DNA, 867 bp, Homo sapiens
  misc_feature 38, 104, 151, 262, 342, 416, 424, 425, 465, 491, 510, 512,515, 517, 531, 539, 542, 549, 550, 551, 590, 618, 619, 626,637, 646, 654, 655, 662, 663, 665, 672, 680, 685, 692, 701,705, 713, 714, 716, 719, 732, 738, 743, 745, 752, 754: n = A,T,C or G
  misc_feature 766, 776, 782, 794, 805, 809, 818, 819, 824, 846, 857, 866: n = A,T,C or G
tatagggcgaattggagctccccgcggtggcggccgangtacccgggacgctgggaggagatgctaccacctaggttacttgtaggaccctatacggcaacctnctttgccaggaactatttataaacatcctgcaggaaaatgtgaagtngaagagacagggatatcccagaaggttatgcaaaacatcaagagaagatgagaggagtctatatgtcagaatacacatttcccaccttgcccaacagtagaaaaacataanaagagaaaaacattaaaaaatgacaaggaagttaatggaagtcagcaatgtgatggtgtttggaggtggagccttcatanggtaattaatgcccttgtaagaagaggccagagagcttgcgcaccttcttcctgccatgtgaggagccaagaancccgctgnnctgcaacctgccaagaggaccctcactagaaagctagccnttactggcatcctcatcttggctttncaactttcaagaactgtgnanagnantttgttgggggttnagtcaatnggnctatggnnnattttttttatagccagagccccgcccaaacaagtggcntcatttctacatacccatttatttttanntatttangcctccttttnaaaaacccncgttttcnnatttacnngntttgcantacttggnacccntttaaanccctttctnttangtttttanntnttncaaaattttgaanaaaatnatttngnttttttncnttcctcattccnagaaatgccngattcnttggtggttctnaatatttttantttnagttgggcnnaaatngggtgtacctttccccatcctnaattttttacntggccaaana

SEQ ID NO: 958 - DNA, 855 bp, Homo sapiens
  misc_feature 569, 641, 690, 707, 780, 809, 826, 827: n = A,T,C or G
ctatagggcgaattggagctccaccgcggtggcggccgaggtactgactagacaattgagtctcaaagacgataatttatccaacataattgtgtgaataatgacaaaaaaacacccagttttgggaaaattacaaatgcaatttctagcagacactgcttggttatctagtgttttgaaataaacaactccaaaacttcgtggcttgaaataagcattatttatcttattacagttgtttgggttgataatttagacagagcttagctgggatggcttgtctttgctccatgttatgctgacttgactcactcatctagttgcagttaactggcagggcagctggagcctggctggtcccagatggccacacactttgtggctggtagttgcctggcactcataaggtgccttcattttcctccacctagcctatccagcagactatcttgggcatcctgggcttcaagaagaaaaccgcgatgtacctgcccgggcggccgctctagaactagtggatcccccggctgcaggaattcgatatcaagcttatcgataccgtcgacctngagggggggcccggtcccagctttttgttccctttagtgagggttaattggcgccccttggcgtaaatcatnggtcatagctggtttcctgtgtggaaattgttattcccgctcacaattncaacacaaacatacgancccggggaaccataaagtgtaaagccctgggggtgccttaatgaggggagcctaacttcacattaaattggcnttgcggctcacctggccccctttttccantccggggaaacctggtnngtgccaacctggaattaatggaattcgg

SEQ ID NO: 959 - DNA, 871 bp, Homo sapiens
  misc_feature 149, 301, 304, 341, 392, 434, 475, 480, 481, 506, 513, 516,556, 579, 582, 588, 596, 597, 598, 606, 631, 637, 639, 646,648, 651, 659, 666, 672, 675, 676, 677, 691, 700, 701, 714,732, 736, 739, 744, 749, 750, 751, 754, 762, 771, 772: n = A,T,C or G
  misc_feature 776, 784, 785, 787, 790, 791, 797, 808, 809, 810, 814, 832,837, 843, 846, 850, 851, 856, 857: n = A,T,C or G
ggcgaattggagctccaccgcggtggcggccgaggtacgcgggggtttcctgcgtttgtagatggaaggaagaacttgtgtgcttagacctgacgctgggaggagatgctgccacctaggttacttgtaggaccctatacggcaacctnctttgccaggaactatttataaacatcctgcaggaaaatgtcagagatgggaagaaacaagaactttgacatgcttggtgttcttgcccaagctttgaagaagtttacaaagtctatatgtcagaatacacatttcccaccttgcccaacanttnaaaaacataagaagagaaaaacattaaaaaatgacanggaagttaatgggaagtcagcaatgtgatggtgtttggaggtggagccttnacaaggtaattaatgcccttgtaagaagaggccagagagctngcgcaccttcttcctgccatgtgaggagccaaagaagcccngctgnnttcaacctgcaagaggaccctcacntaaaagntanccatacctggccattccttaatcttggcttttcaacttcncaaaacttgggaggaaggtatantgntttggnggtttaannncaatgggnctttgggaaaatttttttttatagnaagttncnagccaanancanggggcctnatttttnttcatnccnnnttattttttatttnttttagggnnccttttgaggaanccccatgttttaaatttngganganagggngtccnnnggnacccattnacacccttnncttngtttttanntnttnnaaattnttggaaaatannnttgnggtttaacctttttcccncaagnaaatcngantcannggtgnngtctaaatttttaa

SEQ ID NO: 960 - DNA, 839 bp, Homo sapiens
  misc_feature 440, 457, 489, 491, 501, 528, 556, 585, 588, 599, 600, 606,608, 610, 614, 617, 623, 624, 627, 632, 636, 641, 649, 655,665, 668, 670, 675, 677, 681, 682, 687, 697, 701, 710, 711,712, 724, 725, 731, 733, 734, 750, 751, 752, 753, 757: n = A,T,C or G
  misc_feature 759, 763, 765, 769, 770, 774, 777, 780, 783, 786, 789, 791,792, 795, 797, 801, 810, 817, 821, 826, 832, 835, 836, 839: n = A,T,C or G
tactcactatagggcgaattggagctccccgcggtggcggccgcccgggcaggtacgcgggagtgactaaatttgtaggaatgatattttcatgggattactcaatctcacccaccattagttgcgggtgacaagaaagctaagttggcagatgtttgtgctagaagctgtgggtttacgtctcctttgtacatgtgttccagacataccagtggcttggtatttaaacatcatgctcaggtgtgcagggtagtttttgagttataataggtatgcaggcgctgtgggattacttggttgtttatgtaaaaattattttgcactcacttctgaaatgagtgttagtagaatcatctttagaggaggttccaaggcattgaactgagatacctgcactgtttgctgtaaatttaagcttaaaattgaaaccaggttatcancatttcatgccaagganagagtgggcatgaatgatttcaggaaatgaananctagaatttncagcccttgaatttgcttccacccttntgtgggcaaaatagtgtgggctcactgngcactttatctgcccgggtaattattttnccngacgggggggnnactttngnantccnagntggagnnccnttggnccgntctanaaactagngggatncccccgggcnttnanggaantntgannttaanctttttcggncccncgcccttcnnnggggggggcccnngacccnannttttggtttcttttannnngggntnattngncccnntggnctnaanttnggnctnanntgntnccgngggaaaaangttttcngttncaatnccaacnaannccn

SEQ ID NO: 961 - DNA, 867 bp, Homo sapiens
  misc_feature 545, 553, 590, 591, 592, 612, 621, 634, 659, 685, 687, 710,720, 723, 731, 746, 756, 767, 768, 772, 775, 781, 784, 790,791, 793, 795, 796, 800, 808, 810, 813, 814, 816, 817, 824,825, 831, 832, 833, 835, 855, 867: n = A,T,C or G
ccgtaatacgactcactatagggcgaattggagctccccgcggtggccgagcggccgcccgggcaggtaccttaaagtttgagtctcactttcctcttatatataaggcttcctgaaagcattaacagtgatgtatatgaactggccaatacaaagtaagacctcaataaatggtgggcaccttcttttatatgccagcttgtattcttattggacaaggtatgcaacctctttgggccccaatttctttctgaaagaatcaattctagtgctcaaagattcagaacttagtgcttacactttgggaaggaggactgatgtaaagaatcaggattttctggacaagttgatgaatctcctccctctctttggtgtccctgaatgagtgatagatggataaaagtccagtgtccacatatgcacagatgctaataaaatgaggtggaatgatggtaaggccttaaagtagaaagtatgaaacctccactcttgtcttggctttctctctttcccttgcttactcactctatctccttctctctctncctttctncaaatgtcaagatgtaatctcttgccttaaaatttcnnnaaatcatcaacacccttgtnaaacacctnccaaccttagttnttattattaactatgtaatcattgntgcagacatacctttaagtcaaggtntncaaactttcttgggtggaaactnacatcaactntgnattttctnaaaagaaggaccccngggacccttnaatccaaaatnncaanggntttggnggntacccnntncnncccnaaaacctngnggnnannactttcnnttcctnnngntttggaaggaaccctgtttntgcctttaaccn

SEQ ID NO: 962 - DNA, 874 bp, Homo sapiens
  misc_feature 2, 586, 598, 600, 629, 642, 662, 665, 679, 691, 692, 698,700, 701, 703, 714, 715, 716, 723, 727, 728, 731, 739, 740,743, 745, 746, 750, 755, 760, 765, 766, 767, 768, 769, 776,777, 784, 785, 788, 789, 791, 792, 793, 795, 796, 797: n = A,T,C or G
  misc_feature 801, 803, 804, 805, 807, 808, 809, 811, 812, 813, 814, 815,816, 817, 818, 819, 820, 821, 822, 824, 825, 826, 827, 828,829, 830, 831, 832, 833, 834, 835, 837, 838, 839, 840, 841,842, 845, 847, 848, 850, 851, 854, 855, 858, 859, 860: n = A,T,C or G
  misc_feature 861, 863, 864, 865, 866, 867, 868, 869, 870, 872, 873, 874: n = A,T,C or G
tngccgtatcgactactatagggcgaattggagctccccgcggtggcggccgcccgggcaggtacgcggggactcaatcttactcccttgtagaacaggcgatatcttcaccatgcgcacaatgaaatcaatactcagagaaggcagataattctccacgaagccagaaaactaataaatgaacagatggctccacataaggtagagcgtgtctggtgccctgccgtttggaaatgacccaaaggcaggagtggaagatgaagtttcagcaggagagactgaggatctcagaggatttgctctgggatgcagagacgcttgcctatttgctaagtgtctatgccatatgattctgctgtttgcgtttgatttagaatgctgagctgactcaaagtcaaactgtaagtacctcggccgctctagaactagtggatcccccgggctgcaggaattcgatatcaagcttatcgataccgtcgacctcgagggggggcccggtacccaacttttgttccctttagtgagggttaatttgccgcttggcgtaatcatggtcatagcttgtttcctgtgtgaaattggtatnccgctacaattncncaccacataccaaccgggagccttaaatntaaagcctggggngcctaatgagtgactaactnacntttatttgcgttgncctcacttgccnnttttcnanncnggaaaacctgnnntgcccanctgnnttnattgaatnngcnanncccnggggngaggnggttnnnnntttgggnncctttcnnttnntnnntnnnttantnnntnnntnnnnnnnnnnnntnnnnnnnnnnnntnnnnnnttnanngnnggnnttnnnntnnnnnnnnannn

SEQ ID NO: 963 - DNA, 845 bp, Homo sapiens
  misc_feature 265, 266, 343, 583, 598, 673, 689, 690, 696, 706, 710, 727,761, 783, 790, 794, 802, 806, 814, 816, 825: n = A,T,C or G
ctatagggcgaattggagctccaccgcggtggcggccgcccgggcaggtcagcagctttgcatgttgacaaatccgctctctgctgcagatgcctaggggaagttgcagacttaaattttcttttgtaaaatgggggaacacaaacagatcttatgtcacactggttactccagaaaaaaaaaaagaaaaagaaggaaggaagaaaagaaaaagaaggaaggaagaaaagaaaaagaaggaaggaagaaaaaacagaaggaagcnnaaaaaaaaaaaaaaaaaaaaaaaggttcctcggccgctctagaactagtggatcccccgggctgcaggaattcgatntcaagcttatcgataccgtcgacctcgagggggggcccggtcccagcttttgttccctttagtgagggttaattgcgcgcttggcgtaatcatggtcatagctgtttcctgtgtgaaattgttatccgctcacaattccacacaacatacgagccgggagcataaagtgtaaagcctggggtgcctaatgaagtgagctactcacattaattgcgttgcgctcacttgccgctttccagncgggaaacctgtcgngccactgcattaattaatcggcccaccccccgggagaggcggtttgcgttttgggcgctttttccctttcttagntactggactcgcttgnnctcggncgtttccggnttgnggccaagccggtttcancttcactccaaaaggggggaaataccggttttcnccaaaaatccgggggttacccngggaaanaacnttgttaancaanaaggcccncnaaatggccnagaaccctttaaaaaggcct

SEQ ID NO: 964 - DNA, 841 bp, Homo sapiens
  misc_feature 502, 533, 554, 633, 638, 659, 673, 686, 687, 689, 710, 734,735, 747, 761, 787, 788, 791, 794, 800, 804, 821, 832: n = A,T,C or G
ctatagggcgaattggagctccaccgcggtggcggcccgaggtacttccgtgagatataaggctgatgataaggattggggtaaagagttgattcggtcacacttgactgccttgaaatctgtcttggcatcgggtcctcttcctccatcgataggtggtcagtctcagagggttggtcatctccctcttgcttcagagacacagcctggaatccttcaaaactcccaattgttgacatttcttcagcctgactaggctggtcctcaaggctcttctttctctttctgcacaaagggggctagaccacagatagtggccaggagaggtgtgactggctcagataaagccaggcaagacagtgccctgtgctgtgaccccactcagtctgaatctcacttcaccaagtaggctgagagttacactgccaccctcaaatagtcaaaaaaaaaagtacctgcccgggcggccgctctagaactaagtggatcccccgggctgcangaattcgatatcaagcttatcgatcccgtcnacctcgagggggggcccggtncccagcttttgttcccttttagtgagggttaattggccccttggcgtaatcatgggccatagcttgtttcctggggtgnaaatngggattcccgctcaccaattncacaccaacatacnaagcccgggagcnntnaagggtgaagccctggggggncctaatgaagtgaacttactcacnnttaattgggttnggctcactgccccntttcaagccgggaaaccctccggccnnccngcnttaatngaanggccaccccccggggangaggcgttttncgttttggg

SEQ ID NO: 965 - DNA, 851 bp, Homo sapiens
  misc_feature 640, 665, 671, 722, 724, 744, 745, 746, 749, 750, 751, 752,753, 754, 755, 756, 757, 758, 759, 760, 761, 762, 763, 764,765, 766, 767, 768, 769, 770, 779, 790, 798, 803, 809, 829: n = A,T,C or G
cgactcctatagggcgaattggagctccccgcggtggcggccgcccgggcaggtacgcggggattataatgtatgttggaatgtcctcctttgagtaaattttacttaagggtctttgggctgcataaatttgtatgtgcatatccctatcaacatttgggaagttctcagccagtatttctttaagtaagatgtttatcttttctctctctcttctcctactggaaattccataaattatatgttcatatgcttgatagtgtgccataggtccctcatactttgttcacttatttcattctttttttcttttgtttccccaagtggctaattttaaataacatgtcttaaagttgactaattccttcttctgctgaatgaactttaaaagatttttaatagaagttttttggtaatcaaaaagaaaaacatatagtagaaatgctttttaaagttcaggcatggtggctcatgcctgtaatcccagcactttggccagcctaaagtaggaagatcatttgaggccaggagtttgatcccagtctgaggaacatggcaaaaccccatctctactaaaaaaacgaaaattagcttggacatggtggtgccctactgtagtcccagcttaacaaaaggagangggggaaagatctttgagcctgggnaagcanaaggttacaggtagctgaaaatgggcccctggacttccagccctaaaaaanangtaagactctgtctaaaaannnaannnnnnnnnnnnnnnnnnnnnngggtccctnggccgctttanaacctagnggatncccccnggccggcaggaaattcgatntcaagcttttcgatcccggccg

SEQ ID NO: 966 - DNA, 870 bp, Homo sapiens
  misc_feature 2, 7, 10, 56, 63, 68, 224, 360, 411, 419, 429, 433, 436,440, 449, 456, 458, 470, 474, 486, 490, 503, 505, 522, 527,530, 537, 543, 547, 550, 551, 563, 565, 591, 599, 606, 621,627, 640, 641, 642, 647, 652, 657, 661, 666, 676, 677: n = A,T,C or G
  misc_feature 679, 687, 688, 690, 691, 693, 699, 700, 701, 708, 717, 722,734, 736, 746, 751, 753, 758, 759, 763, 769, 771, 778, 800,807, 812, 814, 819, 822, 830, 834, 840, 845, 851, 858, 864,866, 870: n = A,T,C or G
tnactangantcctataggggcgaattggagctccaccgcggtggcggccggcccngcaggtnccctngggacacccttttttaccatgatccattttttgaatacaaagacacagtaccccgcttttgggaaacaactgaaaaataggggaatagataagaaagtttttttgcttacttgtttttgtgttttttttatattaaactaaaatttcattcactantaaagttttttttaaagaataaattgcttgctggatgtattgaggtaataaaagttttccttttcctttatatgaagcaatataggatattagctttatgaggcacttgccagtaaaaaatagatgaatatgtggnagttaagaataaagagacatgaggacatgaggatactcccatgatcaggtnactttcanccatctaagngggnaanaacnggcccgaanatttccncntcccataaattnaccncatgtttgaaantggngaaacctgcctgnanaaaaaaagacttttttngtctnggntaccacnccccgnggtnttnnaagggacactcncnttttcttttttagagaattgggcaantttctttngggttantcaaaaccaaaatcntccagncttggtgcttagnnncaaantttcntttgngganacccntttttttaannanggccaatnntnncnagaacnnnttaaaanctttttagncccgngggtcctttttntntttttccccnaaatngnacccnngggnttgggncnccaagangattttggtgaaactcttgggntgtcccnggcgngnttttnggntttctacnaaanattttngaacncctgancccttantttatnanagcn

SEQ ID NO: 967 - DNA, 943 bp, Homo sapiens
  misc_feature 323, 373, 413, 438, 442, 446, 449, 456, 459, 469, 471, 476,477, 481, 501, 506, 507, 509, 513, 514, 515, 516, 520, 523,524, 525, 526, 534, 537, 541, 546, 547, 556, 557, 560, 561,564, 566, 572, 575, 581, 582, 584, 586, 593, 594, 598: n = A,T,C or G
  misc_feature 605, 609, 611, 616, 618, 626, 627, 628, 629, 630, 639, 647,648, 650, 651, 653, 658, 661, 663, 664, 665, 670, 671, 672,676, 678, 679, 682, 687, 694, 697, 699, 702, 706, 708, 721,722, 724, 726, 727, 731, 735, 736, 738, 739, 740, 742: n = A,T,C or G
  misc_feature 747, 749, 755, 760, 761, 764, 765, 766, 769, 774, 778, 780,781, 782, 784, 787, 790, 796, 797, 798, 802, 803, 805, 812,818, 826, 832, 841, 846, 847, 855, 856, 857, 860, 861, 866,870, 877, 879, 880, 887, 895, 898, 899, 901, 904, 913: n = A,T,C or G
  misc_feature 914, 921, 926, 932, 936, 937, 940: n = A,T,C or G
gactcactatagggcgaattggagctccccgcggtggcggccgaggtacaaaccagggctgttactcctcaacaaggaggaataacgcctcttagaagcatggcaagcaggtgccataaaacatgtctactacaatttctcactgcctggaataattggaaaagtttcataaatgctctggctttcaggttcttcacttttgcaataaagctgctaagtctggttgcaaagcttttatgatgattagaaataatatatgtaaaatgcctgatgcacaagagtcactcaataagtgacagcagtgtgattaatctatgacatantaaaaagttctaacttgaaacacgagagaaaaaaataacttccagtgcgnaaagagataatttcatgatctcagggacactaaccttccntattacccattcctccacccgcgtncctncccnggngtgtcgncanggtttttctntntttcnngagnttgtctctcgctacatggcntagtnncntgtnnnnggtngtnnnnttgagcanacntggncgcgnnaagagagcnnacnnggngngacacnagnctagtnngntngatacanntganttgtgtntagncntctangngagtagtnnnnnaacatggtntacattanngnntnatgcnatntnnnctacnnnagtntnnttngtctntttgtgnatntntcntctntntatgcgactacgnngntnnctcncgtnntnnngnggacnangagganacggnntgnnnacncggancacntnnnangangtncgagcnnnacannangtagtantagtgnacgtagangtgacnctagtagangtagnngagttgtnnnttnnatttnctcngatgacnannctcgtcntcgtgctngannancgnggctatganntatgtgntggcngagtcntgtnnttntcg

SEQ ID NO: 968 - DNA, 900 bp, Homo sapiens
  misc_feature 2, 3, 4, 5, 6, 7, 8, 9, 10, 11, 13, 576, 583, 585, 593, 621,631, 671, 691, 730, 732, 737, 738, 741, 745, 754, 755, 762,767, 777, 779, 808, 811, 817, 822, 823, 827, 830, 833, 837,839, 843, 846, 847, 859, 860, 866, 873, 879, 881: n = A,T,C or G
  misc_feature 884, 896, 900: n = A,T,C or G
gnnnnnnnnnncntaatacgactcactatagggcgaattggagctccaccgcggtggcggcccgaggtactcaaatctctgcctcaggaaaacatccaactttcaaagtttctggtaagggttgtaaaggaagcaattagtgtcattagaaagaactatcgatgtcactatgccaagggagaaaaggggtagcaaaaatgagaaagaaggcatgaggcacagacattgaaaactaacctgtatttaagcttagtgtattttcgctttgcctctactccaagtggggagttttcattgcaggcactacaaaccccaggtatgacaatgacataagaatcagggaagtggctggaaagggaaagctatatagttagactggcctgcctttgagtcctgccctgccatttgtacctgcccgggcggccgctctagaactagtggatcccccgggctgcaggaattcgatatcaagcttatcgataccgtcgacctcgagggggggcccggtacccagcttttgttccctttagtgagggttaaattgcgccgcttggcgtaatcatggtcatagcttgnttcctgngngaaaatgntatccgctcacaattcccaccacatacnagcccgggancctaaaagtggaaaaccctggggggccctaatgagtgganctaacctcacattaattgcnttgccttactggccccttttccaatcgggaaaacttgtntngcccnnttnattnaatgaaatnngccaacnccccnggggaaagcngnttgcgtattgggccctttttccctttctntgnttactngaatnnttgnctnggncatngnttgnggnnaaccggtttaanntaactnaaaggcnggaaananggnattcccaaaatnaggn

SEQ ID NO: 969 - DNA, 888 bp, Homo sapiens
  misc_feature 1, 4, 433, 586, 635, 655, 684, 690, 696, 704, 711, 720, 750,751, 752, 754, 774, 782, 784, 789, 807, 809, 813, 819, 838,840, 845, 857, 864, 872, 886, 888: n = A,T,C or G
ngcngtatcgactactatagggcgaattggagctccccgcggtggcggcccgaggtactgcaggaaaccatgttgccagcactctcctagcccaaaaaaattacatctaggaagcaggggccattaacctactggaatcattgactatgtcatagaagtccagtcaccccgcaggaaccagaatcttcccatggatatttaaacccaattagaaatggccaccaggtggtgccaaactgcagctaaggtccaggtgaatttgaaccatgcaatcttggatcttttggctctcctggtgatttttatagagtttttttcatcgttaatccatttatgaataaatgctgtcagttttgataactctttcttattgtctataggtaaaacagaaaacctttagcattggataaaagtcttccttattttttactgngacctctttctttcttttgatctctaatatttagtcgcatgggaacaccaactgttaactgaatttccatttttccatgcctttgcaaatgctcttctgtctggagggcctttcctgccacaggccttgcactttagatttaaattaaaagcntttgcttgaaaaagagggcaaaacctgtaatggaactaccctcaaaggnggtggtggctgaaaattttnggaatactttccttttaaaaaaaaagccnggattnttaatnctgcaatnttttggnttgccaaancactttgttcatattttgttaaagccgggnnntntccaaataaaaatctttaanggcttaantnagttngccctttaaaaagtgacncngtcngttttnaaaccaaaccaaacttttnantttanggcatcatggcntaaggcncttttttnatttcctttcgggncn

SEQ ID NO: 970 - DNA, 825 bp, Homo sapiens
  misc_feature 134, 135, 457, 480, 513, 520, 580, 602, 611, 624, 641, 643,650, 666, 687, 701, 708, 710, 712, 713, 727, 729, 732, 733,740, 742, 749, 750, 781, 785, 790, 791, 794, 795, 814, 823: n = A,T,C or G
ggagctccccgcggtggccggccgcccgggcaggtacgcgggggtttgtagatggaaggaagaacttgtgtgcttagacctgacgctgggaggagatgctgccacctaggttacttgtaggaccctatacggcnncctcctttgccaggaacttttataaacatcctgcaggaaaatgcagtgaagtagaagagacagggatatcccagaaggttatgcaaaacatcaagagaagatgagaggtcagagatgggaagaaacaagaactttgacatgcttggtgttcttgcccaagctttgaagaagtttacaaagtctatatgtcagaatacacatttcccaccttgcccaacagtagaaaaacataagaagagaaaaacattaaaaaatgacaaggaagttaatggaagtcagcaatgtgatggtgtttggaggtggagccttcagaaggtaattnatgcccttgtaagaagaggccanagagcttgcgcacctttttccttgccatgtgangagccangaagccggctggctgcaacctgcaagaaggaccctcctagaagctagccatactggcatnctcattttggcttttccacttncagaactgntgagaaagtattntgtttgggggtttagancnatgggtntttggtaatttttttntagcaagtcccaagccaaganaggtgcctcatttnacttacntncnnttttttttattatntnggnntcttttnanaaacccnngttcaaatagagattagatctggaacccatnaacnccttnnctnnttttagtttccaatttggnaattgtttntt

SEQ ID NO: 971 - DNA, 880 bp, Homo sapiens
  misc_feature 18, 350, 382, 400, 406, 455, 465, 503, 506, 520, 538, 549,550, 555, 571, 573, 577, 583, 590, 597, 601, 602, 603, 610,626, 630, 632, 644, 649, 651, 652, 653, 665, 668, 669, 676,679, 684, 686, 697, 702, 705, 706, 708, 724, 735, 740: n = A,T,C or G
  misc_feature 741, 742, 743, 744, 751, 760, 769, 770, 776, 796, 797, 811,819, 820, 823, 827, 829, 832, 837, 840, 844, 852, 855, 863,876, 878: n = A,T,C or G
actactatagggcgaatnggagctcccccgcggtggcggccgaggtacacttgccaattgagataatatgaaattgtattccattttagttttaattacatttccatgattactgctgaggtttagcatctttttgagtattacggaatttagtttactcctacgtgcattacattttcataattttgcccagtttttccttgggttgtttttattttcttactgattccaaaggtatctgtaaattattgaaatgaattattttagtattgtgcttttcagcttttcttttcactttaattgtgcattacatcatataaaagttttcattttaatgtaatcttagttgnaaatatttttaaatttggtttggttttcctgntattttttaaaaaatatntctctnccctaacatctaacaaaatattattcacttctggtttttctataaaatnttccaatttncttttcacacttatgaaaataccttgggaaattattcnagntactaaataaaccnttggtaccttgggtcaanttaggcccacnnttttnagtttattttaaaaantnaaanaatttnggggggntttaaancccnnntttaaangggtccattaaaatancccntnggcctttgaacnccggngnnnattggggaaaanctnnttacccnccntattncngccaatcccanggggnggnnancctccccaaaaagttnactttaaattnggttnnnnngggcgcncttcctggnccaggttgnnaaaacntttccgtgtaaaaattttannaatttgggacccanggatttcnntgngtgnanggnaaaanggntttnaaaccatnaanaaaaaaancccctaacggggngngg

SEQ ID NO: 972 - DNA, 907 bp, Homo sapiens
  misc_feature 1, 87, 97, 189, 206, 207, 371, 375, 379, 382, 383, 384, 385,386, 392, 398, 407, 414, 420, 430, 442, 448, 450, 453, 475,481, 483, 484, 491, 493, 496, 511, 512, 524, 541, 548, 552,558, 569, 571, 573, 574, 575, 581, 590, 591, 597: n = A,T,C or G
  misc_feature 601, 614, 622, 627, 629, 634, 636, 639, 642, 643, 645, 651,653, 690, 692, 697, 698, 699, 700, 704, 707, 708, 714, 715,722, 734, 735, 740, 742, 747, 752, 753, 758, 762, 764, 768,770, 772, 774, 775, 788, 811, 814, 818, 819, 820, 821: n = A,T,C or G
  misc_feature 822, 824, 829, 832, 837, 847, 849, 853, 862, 865, 866, 869,873, 874, 877, 880, 884, 887, 889, 890, 893, 896, 897, 906: n = A,T,C or G
ntgccgtatacgactactatagggcgaattggagctcccccgcggtggcggccgcccgggcaggtacaggagagttcccatagactnctgccccctnccacagacagactaccctagaatattgtaaaaggatctatcactcattttcctcacctctcttatagatgtctctcttcaacagtgagattnttccgtaactctctgtnncaggactgggcttgtttgcactcaaatccatgactcattgtttctctgcctttccgtgtgttacaggtgggctgatccccctgcagccagtttcccataagcaactgacttccaactgggaatgtctcgggggataatgggggtggggatatggaaatataganaaancatncgnnnnnacaggntgtatncaccttgcnctctctnagtgtnaacgacactnctgactcattgnggcatntngtnactcctggcttgagccggatangtacantnnacggtcnanaancaggtggttcacacnngctgggggaatnccatgtaaagaccaatngagccanacgnccctcnaaggggggccnancnnnaaaaangtcgatttnnttgcgnaagngtcaaaagctccncccccctnactancngtaananaanttnncnttttananaaaaggtagccgatccccaattggacatataaaaaananccggnnnncacncanngggaanntccttgngggcgcttaacnnaggtncnctccnttccnntaaangganantgtntncncnntttctttttttanggaagaaagcctttttctcatanttnaatnnnnnanatagntcnattcngggtagaggntntttncaaattggnatnnttncacnnaanccntttnagntnntancgnnttgtgtatnt

SEQ ID NO: 973 - DNA, 871 bp, Homo sapiens
  misc_feature 523, 538, 559, 561, 562, 564, 566, 567, 568, 570, 571, 573,574, 575, 576, 577, 579, 580, 581, 582, 583, 584, 623, 643,669, 688, 705, 720, 724, 731, 734, 739, 741, 745, 747, 749,756, 759, 766, 772, 774, 775, 776, 781, 786, 803, 807: n = A,T,C or G
  misc_feature 818, 820, 827, 847, 869, 870: n = A,T,C or G
tagggcgaattggagctccaccgcggtggcggccgaggtacttgcaaaccaaattggcagcatattaaaagaattacacaccagggaaaataaccctagaccttgcattctagtgctctgcttatctgtgacttcagacaaagatggagagagctgaccatcagtataatttagctgaatgaaataatgagatattttaggaagaagaacattgaatgtcagaagttaaatgtgagatccaagaagtaacagtgaacagacaagtttgtgggtatgtggatatgtcttaaataagtcaggttgtgtcaaattatgatggatgatgatgactgcgaggcaggaaggaagatgaaaaggaggaggcattgaacactaatggtcacagggagcacccgggagcgtggtgaccccagggtgagctgcttgttctgtgagggtggagggaagagatttattaaccttagactttggttaaagtatacatgtgacgtctacatgggaaactgctaaatgaatagaaagnggaaggtgtaacttncccaccatttaaaggggaatntnntnannngnnannnnntnnnnnngttcccttgccccgggccgggccgcttctaaaaactagngggatccccccgggctggcngggaatttcgattttcaaggcttttngattcccgccgaccttcgngggggggggccccggtnccccaactttttgtntccnttttagnggngggtnanttgngncnccttggnggnaatcatngggcanannntgttncctgnggggaaattgttttccnctcncaaattccccncncctttcnagccggggggccttaaaagngttaaacccggggggccctaanng

SEQ ID NO: 974 - DNA, 965 bp, Homo sapiens
  misc_feature 351, 357, 367, 392, 454, 484, 486, 494, 499, 502, 514, 526,529, 531, 532, 534, 537, 539, 541, 555, 567, 568, 576, 582,583, 590, 592, 614, 615, 621, 631, 633, 635, 645, 648, 649,654, 665, 671, 673, 680, 688, 694, 695, 696, 697, 706: n = A,T,C or G
  misc_feature 707, 708, 710, 711, 713, 715, 718, 719, 720, 730, 734, 735,738, 751, 758, 759, 766, 770, 772, 773, 778, 784, 792, 795,797, 801, 803, 809, 819, 820, 823, 825, 826, 829, 834, 844,845, 853, 857, 858, 859, 861, 863, 869, 873, 881, 884: n = A,T,C or G
  misc_feature 887, 889, 890, 894, 895, 897, 899, 900, 904, 910, 911, 912,917, 920, 928, 930, 934, 940, 945, 950, 954, 956, 957, 959,965: n = A,T,C or G
gccgtatacgactactatagggcgaattggagctcccccgcggtggcggcccgaggtactctgacatcatctgacatggcagctccccagccatggtggtggtgatagaaatataaatggtgacagcagcagcagtgtgatagtcacggtggagggagattgcttttctgcagccaggcttctggatctcccaacctgggtgggacccagctgaagatctgcagagaaaccagccatttctgagagcaaggcaatcagtgggcatttactggagggtgtctaggttcttaacatctcactgttatttgggctcatgggatcataagaatgacaaaataaagagaagtcctnattttnttaccacaanaagcttgacacaatttccagtaaantcttggattgaaaggagagacatgttttcatgtgttttatattcccttaacaacccaatatnccttgacattgaagagccaagatgttagtngnaggtagtngctantcntatgtttacatntttcccaaaatntantnntnttngnanacttaaaccctacnatgcaaacggcnnatgacacnttgtannttataanantcattgatatgtatttcaccgnnatctcnacattttatnananattaaaagcnttnnattantagaacgaacnattttnanttctatncttctatnataatnnnntgatgacgnnncnncntnatnnngatttcgacncgannttnatactatatatcnatgacanntcattanatcntnnatgantatacntcattatnatnancagntngtatantacttctatnnctnannatnataancttatgttcnnattattantaannntnanttattntgcncgatcctnacncancnntatnntnannatcnctctcnnntattnttnttcatacnanactnttctcncattntctcntctncnncntatacn

SEQ ID NO: 975 - DNA, 888 bp, Homo sapiens
  misc_feature 540, 560, 582, 598, 619, 637, 656, 747, 753, 755, 756, 794,796, 800, 802, 818, 846, 848, 849, 857, 866, 873, 875, 885,887: n = A,T,C or G
actactatagggcgaattggagctccccgcggtggcggcccgaggtactccacttgtaactgcttctcccctgatgccaccactgacctctgtagccatggttctgcaagttctctaattttctgagcctctgagtcactgacgaagtcatggtagagagcaatgtagggctccaggtggatgacctccttccggatgggctggagcagcaggtaggcgttggaattggtctcataggaacagtagaggctagggatctggtagagagtgggctgggaacccagggtctgacatagcccctcgtaggtgtctctggtctgcaggtggggtatattgggcctctggatgacggcctcagctaccacgtggttggggctctctgccaagagcctttcatatttcaagacattcctggccatcctcttattatctgggctgtagagaagaaactcccgccgcgtacctgcccgggcggcccgtctagaactagtggatcccccgggctgcaggaattcgatatcaagcttatcgataccgtcnacctcgagggggggcccggnacccaacttttgttccctttantgaggggtaattgccncgcttggccgtaaatcatggncaaaagctgtttcctggngtgaaaatggttattcccntcaccaatttcccacaaccataccaacccgggagccataaaagtgtaaagcctgggggtgcctaatgaggtgagctaacttcaccattaantggcgntnngcctcacttggccccttttcaaacgggaaaacctggtnangccnanttgcaataaatgaatnggccaaccccccgggggaaaggcggttncnntatgggcntttttcctntccttgntnattgaattgntng

SEQ ID NO: 976 - DNA, 874 bp, Homo sapiens
  misc_feature 588, 605, 614, 648, 675, 706, 713, 717, 725, 735, 753, 761,763, 773, 795, 799, 800, 803, 805, 810, 813, 817, 823, 825,829, 831, 833, 843, 845, 858, 859, 862, 871, 872, 874: n = A,T,C or G
gcgaattggagctccccgcggtggcggcccgaggtacttacagtttgactttgagtcagctcagcattctaaatcaaacgcaaacagcagaatcatatggcatagacacttagcaaatccaatgccttccaggcatctgtttcctgttgatgaaatcctccctatggagagcaaactggttcatatcttcagatagtgtcattcaaccccttggcagctttctgggctactaaatatcacaccgtctggtgggacatttcacccaagttgttcatttattagttttctggcttcgtggagaattatctgccttctctgagtattgatttcattgtgcgcatggtgaagatatcgcctgttctacccccgcgtacctgcccgggcggccgctctagaactaagtggatcccccgggctgcaggaattcgatatcaagcttatcgataccgtcgacctcgagggggggccccggtcccagcttttggttccctttagtgaggggttaattgcgcgcttggcgtaatcatggtcatagctgtttcctgtgtgaaaatggttatccgctcacaatttccacacaacataccnaccggggagccataaangggtaaagncctgggggtgccttaatgaggggagcctacctcncatttaatttgcgttgcgcctcaactngcccgcttttccaagccggggaaacccggcngggccangctngcattaantgaatcgggnccaaccccccggggagangcgggttngntttttgggcnctttttccgctttcctcggttnatgnnttngnttggnccncggnccgtcngntggngngnagcggtatcnantcaccaaaggggnnatncgggtttcnnan

SEQ ID NO: 977 - DNA, 780 bp, Homo sapiens
  misc_feature 9, 219, 366, 370, 398, 421, 430, 435, 446, 447, 450, 466,470, 471, 476, 487, 489, 522, 523, 525, 546, 547, 548, 555,556, 559, 561, 562, 566, 567, 568, 569, 574, 580, 585, 590,592, 593, 596, 597, 604, 612, 613, 618, 621, 622, 623: n = A,T,C or G
  misc_feature 627, 628, 631, 634, 636, 644, 645, 646, 647, 648, 651, 654,658, 665, 672, 673, 678, 694, 703, 705, 708, 715, 723, 725,726, 731, 732, 737, 740, 748, 750, 753, 766, 772, 774, 779,780: n = A,T,C or G
agagacgangcttttagagggatggggcacggcatctcaataccatttcctatttttgagatggttgcttcattcacaaagaagctacattccacaagcaggtgtctcttcctactttatcaactcatccattcttttcccacaaatacttactgaacactctctatgcctgtcgtattgcagacatgcggaatatatcgacaaaactgactgaacttnctgcccttggggtgcttccttctttatctggctcaaaactctgttcgctgcaggtgctagctgcaggttgttgctcattaaaaaggaaaatctattctacaattagaaaaataccttgggagaacattgcaaaacagtatttgaatnagtnaaagctggtgtcaccccataggagaagnttgtacctgcccgggcggacgcnctagactantggancccccgggctnnagngaattccatatcaaantaanngaacncgtctacctangngggggggcccggtacccaagttttggtcccttnntngaggggtaaattagggcgctnnncgtattnntgngnnttannnnatacngggggnaaatngcatntnnatnnaaatgcnattgtgannccggncannnagtnntangtntntcaaactnnnnntgntgntttngggggantcacttnnattgntgtggtgtgccttatntgccgcatnanacnatgtganaatcagancnncccanntgttntangaaacgcncnaanaccaggaggggangcgttntntaatnn

SEQ ID NO: 978 - DNA, 856 bp, Homo sapiens
  misc_feature 394, 547, 559, 564, 576, 606, 616, 622, 632, 682, 693, 717,718, 719, 728, 733, 734, 740, 751, 755, 757, 767, 771, 783,785, 788, 793, 804, 806, 815, 818, 832, 847: n = A,T,C or G
actactatagggcgaattggagctccaccgcggtggcggccgcccgggcaggtacgcggggtcttacctcagagctgagctgggcatgagtagatgctcagtaagtggtgcacagggttggtccctatggtggaggccccctaacaccgcccaacccccctccatgttctcacagctccacgcactgagcacgggcatgaaggccatgatgtcagaattctgcacccagggagctgagatgtgccgcagggcctgtggcggacatggctactcaaagctgagtggcctgccatcactggtcaccaaattgtcggccttctgtacctcggccgctctagaactagtggatcccccgggctgcaggaattcgatatcaagcttatcgataccgtcnacctcgagggggggcccggtacccaacttttgttccctttagtgagggttaattgcgcccttggcgtaatcatggtcatagctggttcctgtgtgaaaatgttatcccgtcaacaattcccacaaaataccagcccgggagcataaaagtgtnaaaccctggggngcctnatgagtgagctnactcacattaattgcgttgggcctacttgncccttttcantcgggnaaacctgtcngccaacttgattaatgaatcggccaaccccccgggagaggcggttgggtntttgggcgctntttcgcttcttggttaattgcttnnntggctcggncgttnnggttgnggggaccggtntaantnactcaaaagngggnaatccggttttncnaanaatanggggattaccncnggaaaaacnttnagccaaaggccccnaaagggccggaaccnaaaaggcct

SEQ ID NO: 979 - DNA, 857 bp, Homo sapiens
  misc_feature 77, 133, 167, 290, 297, 311, 338, 348, 422, 436, 448, 449,450, 451, 578, 604, 676, 685, 686, 698, 701, 708, 717, 721,725, 729, 733, 746, 749, 750, 754, 756, 760, 762, 764, 770,772, 775, 776, 777, 778, 779, 780, 781, 782, 783, 784: n = A,T,C or G
  misc_feature 785, 786, 787, 788, 799, 800, 801, 803, 819, 821, 822, 826,827, 828, 832, 837, 840, 841, 844, 845, 856: n = A,T,C or G
ctatagggcgaattggagctccaccgcggtggcggccgaggtacaactgacatctcatcactgaagtgttatgaatngatcagcttggatatacacttaggtcataatactaaatatgaatattcgttttttnccataaccatagggtgtaatcatatgcctatgantctgatcctctactttatccatctgaatgcttctcgatccactcatgcaagatgtgtaaagctcatcatggaaataatctatactaagctttcaatattgacatatttatataaaaatttatngtaatangattgaataaacantaagtaactttttttatattgataagncaccacaatntttatcttaaaaagcaatcttattattcaagtataaattcagtattttttcagatcctacaattcgcctggttnggtgtatcattagnctataataaatnnnngtggaatggcaattttaccaaaacaacacacttgcttaaacataaagccaatgttctcagtttccaatatatctcatttcaatagctaacatcaacaaaatatatatatttctcatgcccggattgnaacagagaaacctaatgagtcactgnggttccccccaattctggtagtctctgggagtggccacaggttacattctggaggcaaataatctacatgcntctgaaggnngttaaatcaacnggnccccccncacctccanaaanaccnggcnacanttttttttggttnggnngggnancggncngnaagccncnctnnnnnnnnnnnnnnaaaaaaaaagnnntngggggggggggggggntnnaaannngggnccccnggnnganngaatttatttnt

SEQ ID NO: 980 - DNA, 875 bp, Homo sapiens
  misc_feature 3, 6, 7, 8, 9, 13, 23, 511, 560, 578, 614, 615, 620, 632,636, 639, 646, 648, 649, 655, 657, 670, 677, 681, 682, 689,690, 691, 696, 701, 704, 713, 719, 723, 725, 731, 732, 734,737, 740, 741, 743, 747, 748, 749, 750, 754, 756, 759: n = A,T,C or G
  misc_feature 761, 769, 770, 774, 777, 779, 780, 783, 786, 791, 795, 796,808, 810, 811, 818, 820, 822, 825, 828, 830, 831, 833, 834,835, 836, 838, 839, 843, 845, 846, 848, 853, 856, 857, 861,862, 865, 870, 871: n = A,T,C or G
agnggnnnntttncgccgtattngactactatagggcgaattggagctccaccgcggtggcggccgaggtacaatataggcagacagtttgccttcagaaattcagaaatgcagcttttgagggaggtcaacatcattggtctcagctaccattttcctgcaggatgtttataaatagttcctggcaaaggaggttgccgtatagggtcctacaagtaacctaggtggcagcatctcctcccagcgtcaggtctaagcacacaagttcttccttccatctacccccgcgtacctgcccgggcggccgctctagaactagtggatcccccgggctgcaggaattcgatatcaagcttatcgataccgtcgacctcgagggggggcccggtcccagcttttgttccctttagtgagggttaattgcgcgcttggcgtaatcatggtcatagctgtttccttgtgtgaaattgttatcccgctcacaattccacacaaacatacgagccgggancataaagtgtaaagcctggggtgcctaatgaagtgagctaaactcacantttattgcgttggcgctnactggcccgcttttccagttcagggaaacctgtcgnncccancttgcatttaangaantcngccaacncnncggggnanagggcggttttgngtatttngggnncttattnnngtttntttanttnaattgactngatttncctngntcgttnngnttnagnnangcgnnnnttantnttnanttaaaggnnggtnttncnngtnttncccanaatnngtggataaacangnnaataaantntntcntangnncnnnnannggcncnnanctgtnaannggcnnttnattgnntttt

SEQ ID NO: 981 - DNA, 842 bp, Homo sapiens
  misc_feature 11, 13, 22, 574, 599, 619, 641, 690, 694, 707, 723, 730,763, 772, 777, 795, 806, 807, 810, 821, 831: n = A,T,C or G
cgactactatngnctcactatngggcgaattggagctccccgcggtggcggcccgaggtacgcgggaggaaggatttaggacagcatcctaatcaaaagggcctggaagcactttataaaagagagagacaagatcgcatgtcaaactagaaggaaggaggtgagaggagatagggctccagagtggagcaagccccttctgtccccgtgaacttcctgccggtgcatgggttacctctcattaaatttaatagtacctgcccgggcggccgctctagaactagtggatcccccgggctgcaggaattcgatatcaagcttatcgataccgtcgacctcgagggggggcccggtacccagcttttgttccctttagtgagggttaattgcgcgcttggcgtaatcatggtcatagctgtttcctgtgtgaaattgttatccgctcacaattccacacaacatacgagccgggagcataaagtgtaaagcctggggtgcctaatgagtgagctaactcacattaattgcgttgcgctcacttgccgctttccagtcgggaaacctgtcgtgccanctgcattaatgaatcggccaacgcncggggagaggcggttttgcntattggggcgctttttcgcttncttgcttactgactcgttggctcggtcgttcggcttgcggcgagccgtnttancctcacttcaaangcggtaattccggttntccacanaatcaggggattacccaggaaaaaacatgttanccaaaaggncagcnaaaaggccaggaaccctnaaaaaggcccnnttnctgcgtttttncatagctccnccccctgacct

SEQ ID NO: 982 - DNA, 842 bp, Homo sapiens
  misc_feature 1, 5, 640, 657, 659, 671, 744, 770, 779, 787, 794, 795, 801,808, 818: n = A,T,C or G
ncgtntacgactcctatagggcgaattggagctcccccgcggtggcggccgaggtactgtatataaatactgaaacaaaacaatggaaaaagcaaataggaaatagagtgagaatcaggggaactgaggggaagcaccaagtttatcttctttagatagttcttattttggagacaggatatttatttcttgcgagctctaaggactgtgcatttagcaaggaccgttcatttttcatcttcctcactaatgtcttaagggagggaaagataaatctgagtgtcatcaggatacatatggagctgagggccacagttgctaattaagtcctcttcaaagacccatttggatgcctcagcatacgtgataaaaaagattacccccaatgatgtcatgtttttccaggcatcaaaagaaccccaaattaccttgtgttaacaagagtggttggagaaagctaagataccactacaatctccccttaccctctgcatagtgctggctaagtggtatggtcctgattttctgataattactacttttaaggagatggtattttgttgcagtgtcactgaggaaacgggattccaatcataacagccccgaacaattttaagtgctgcaaacccgacccaaatanaatcacttgaaccttgncngaaattggaatntactttcttgaacctcaaggggagagaaaaagtaatttgggaacaaacagttcccttgcccggccggccgttntaaaacttagggatcccccggcctgnaggaattcnatttcaancttatcnntcccgncaccctnaagggggggncccggtccccactttttttccctt

SEQ ID NO: 983 - DNA, 880 bp, Homo sapiens
  misc_feature 94, 342, 353, 446, 538, 573, 616, 626, 636, 653, 654, 660,665, 678, 706, 711, 721, 729, 735, 737, 745, 748, 751, 752,756, 759, 765, 769, 772, 776, 777, 779, 780, 783, 786, 794,796, 800, 807, 810, 812, 815, 823, 827, 831, 842, 852: n = A,T,C or G
  misc_feature 864, 873: n = A,T,C or G
aggggggggtatcgactactatagggcgaattggagctccaccgcggtggccggccgcccgggcaggtactttttttttttttttttttttagntttcaaaacccgcttatttcacgcgaggactcctctgcgaagacaggaaggatggggtcccacacctgagccaggcgcggtccccactgggtgctccgcagcccggagtggctccggacgacagcccgctcagcggacctttcgccaggctcggtggaccttctccgctgttctcctcagggcgcagtcaggtttcttcgacacacaccaaccgaagttgaagcgcgtgtcccgcgtacctcggccgntctagaactangtggatcccccgggctgcaggaattcgatatcaagcttatcgataccgtcgacctcgagggggggcccggtacccaacttttgttccctttantgagggttaattgcgcccttggcgtaatcatggtcatagctgtttcctgtgtgaaattgttatcccgctcacaattccacacaacattcganccgggagcataaaatgtaaaagcctggggtgcctnaatgagtgaacttaactcacatttaatttgcgtttgggcttcnacttggcccnttttccaatncggggaaaaccttgtcnnggccancttgnatttaattgaatnggcccaacccccccggggaaaaggcggntttgngtttttggcncttttccnctttcntnggttaatnaantcnnttgnctngggtcntttnggnttgnngnnaancgnttttaacntnattnaaaaggnggnanacnggtttttncaanaatnaggggattacnccaggaaaanaaaatttttacnaaagggccnccaaagg

SEQ ID NO: 984 - DNA, 883 bp, Homo sapiens
  misc_feature 8, 11, 16, 18, 19, 20, 23, 44, 107, 475, 535, 581, 584, 619,633, 663, 727, 729, 734, 736, 742, 744, 793, 794, 798, 821,842, 865: n = A,T,C or G
agtggggnccnttttnannnttncgactcactataggtcgaatnggagctccccgcggtggcggccgaggtacatgaactaataatgcatttctaaaggtgaaaaangaataggtatttttctgtttaatattcaattttatagagagtagtacgttaatttttttaaaccccagaagctcaggatcttatcattttaaaagaaattatcaccagttctgtgtgagtaaataaagtattataacactttgtgtttttcatccatgataccttgtatttacttacctgagctttttttctagggaaagaaaaatgctcaggtaataacagagccttgaaaaatttggattttcaaaactacctatttatgtataggcctttagatcatctgatgttgaatactctttaagtgatctaaaggcctacatataaaaaggtatttttattaaattctggaattaaacatttcagcattncaagaaaagaaagcaaatccactggaacaattctgggaaaaaaggaaagactggtgattnaatgcctcttaactactttagattcctggattggatgtcttatctncangctttctttttaaaaatcaagaacgattggctggngagttaccaaggantataggttgaaggctaaaggaccacttctnaaggaaaagcccctgttcttccatttaccggtccaatgcctgacccttggagtttttccctcananaaaanantgcccntnttaccggaaaccttcccaagttttccattggggaaagggtttctttggnnccanaggttcccaaaaatttttgtaanccccacttttttaatttttgnaaccatctaaatgatttcacccnccttggaagtggtttaat

SEQ ID NO: 985 - DNA, 855 bp, Homo sapiens
  misc_feature 1, 4, 5, 6, 7, 9, 10, 14, 50, 68, 528, 575, 578, 617, 619,630, 646, 705, 724, 730, 744, 749, 763, 777, 784, 786, 809,811, 812, 817, 819, 843: n = A,T,C or G
nttnnnncnntttngactcactatatggcgaataggagctccaccgcggnggcggcccgaggtacttnttttttttttttttttttttttgtgcaataccagctttcaccctgtcctctgcactgcttagccttggctctgctgagttgtgcaacacattctgagagatgccatacaatgctccaggcaaacttatagaaaaacaggaatgagtgattttatacgggatgtgtttcagctgtccaattcaaaataaatcacgtccaggtgcattctttcctaatttgtgacccaaactgcttgcactttatacattaatgaattattttttaaaaagaaattagctctatcatgaagacagtgctatctaaccctttgtggtctttctcccttaaaaagcaattgttaccattttataggtgttaggtttaatctacatatttgaatgaagctgaaatgaactaaccgtatgtcaaccagtaaaagcaggacacttaataataatgctttcatgaaaatatacattgngcatatgtaggctctttttggcattaccaaatttgccaagaactttnttntataaaaaaaattcattatcaaaactacttaatgagccngnctttaaaattnccattaaattttttgnacaacttttaattaaaaacttctgaattcccaaggggggttctctttcaatttatgaanaaaaaactttagtcttaancccttngatttccaggcctntaccncccttttttatccnagggcttgagaaanctgtcancngtttaaaggcatctcaatctttnanngcaangntttaagctgaccaaaatgggaatnggtcccatccgg

SEQ ID NO: 986 - DNA, 905 bp, Homo sapiens
  misc_feature 1, 2, 3, 551, 554, 608, 628, 640, 649, 652, 656, 675, 678,679, 698, 707, 713, 740, 748, 758, 769, 779, 782, 798, 799,800, 801, 803, 804, 806, 824, 825, 833, 835, 837, 839, 851,853, 854, 855, 860, 862, 878, 879, 884, 897, 898, 899: n = A,T,C or G
nnnacgctatacgactactataggggcgaaattggagctcaccgcggtggcggcccgtcacggtgatgttgttgtcgcgccggggcacgctcagcgagcgcacgccggcgtagccggcattgacattcacgctggtgcgcgcactggcttgccagttccagcccacgttggcgccgatctggcgcgtgcggtcttcgctgccgaactccatgccgggcagcagggcgctgtcgatgccgctggccgtttgcgccgtacggtcgacggccgctctagaactagtggatcccccgggctgcaggaattcgatatcaagcttatcgataccgtcgacctcgagggggggcccggtacccagcttttgttccctttagtgagggttaattgcgcgcttggcgtaatcatggtcatagctgtttcctgtgtgaaattgttatccgctcacaattcacacaacatacgagccgggagcataaagtgtaaagcctggggtgcctaatgagtgagctaactcacattaattgcgttgcgcttaactggccgcttttcantcnggaaaactgtcgtgccaactgcattaatgaatcggccaacccccgggaaaagcnggttgcgtaattgggcgctnttccctttcttngttaattanttncttngcttcggcgtttcggttgnggnnaaccggattaacttaattnaaaggcggnaatacngttattcacaaaaataaggggataacncaggaaanaaaattttanccaaaaggccncaaaaaggcnagnaacctaaaaaaggccnnnntnntnggtttttcataaggttcnncccccttncnancnttaaaaaaattnannnttaantnaaaggggggaaacccnnaggantttaaaaaacaannntttcct

SEQ ID NO: 987 - DNA, 836 bp, Homo sapiens
  misc_feature 2, 25, 513, 538, 541, 563, 608, 610, 647, 662, 688, 694,697, 709, 736, 739, 746, 748, 751, 755, 766, 775, 776, 783,821, 822, 828, 829: n = A,T,C or G
tntacgactcactatagggcgaatnggagctccccgcggtggcggcccgaggtacgcgggtccctgagttcagaacataggaattagattgatagacatcaacatacccgctttattgctgactcatgacaactaatgggaagacatggctcagatgtgcagccacagtgagcttctgaacatttcttctcagactaagctcttacacacagttgcagttgaaagaaagaattgcttgacatggccacaggagcaggcagcttcctgcagacatgacagtcaacgcaaactcatgtcactgtgggcagacacatgtttgcaaagagactcagagccaaacaagcacactcaatgtgctttgcccaaatttacccattaggtaaatcttcctcctccaagaagaaagtggagagagcatgagtcctcacatggaaacttgaagtcagggaaatgaaggctcaccaattatttgtgcatgggtttaagttttccttgaaattaagtcaagtttgnctttgtgtgtacctggcccggcggncgntctagaactagtggatcccccnggctgcaggaattcgatatcaagcttatcgatcccgtccacctcnanggggggccccgtacccacttttgttccctttaatgangggtaaattggcccnctggcggaattatgggccataacttntttccnggnggaaaattggtnttcccctacaatttcccaccacattcnganccggggncnttnaaanggtaaagcccnggggggccnnatgagtnagcttaactcacattaattgcgttgggctcctggcccnntttccnnccgggat

SEQ ID NO: 988 - DNA, 885 bp, Homo sapiens
  misc_feature 1, 4, 243, 311, 325, 367, 378, 404, 434, 454, 470, 588, 633,668, 679, 697, 700, 710, 712, 715, 733, 743, 748, 754, 755,796, 810, 813, 815, 820, 825, 831, 840, 853, 862, 872: n = A,T,C or G
ngtntacgactactatagggcgaattggagctccccgcggtggcggccgaggtacatctctagctgatgattcaaaaaagaaaccttttaatctcactccactgatcagctatgatacttaaatgttttagctgtgagcaaaataatatgcattctcaaagagagtatcttcagactccagtggccgagaatctagagttagcaatggaaaaattagtctcgggcttctgtttctgcccacanttttcaaattaagaacaatgtgtttgcacttaatgaaacaacctctactgctcttcaagaggactcangataccgattctcnaggcccctggcggcccctgtaagtacctgcccgggcggccgntctataactantggatcccccgggctgcaggaattcnatatcaagcttatcgatacccgcgacctcnagggggggcccggtacccancttttgttccctttantgagggttaattgcgcccctggcgtaatcatggtcataactgtttcctgtgtgaaattggtatccgctcacaattcccaccacataccagccgggagcctaaagtgtaaacctggggngcctaatgagtgagctacttacattaattgcgttgcgctcactgncccttttcaatcgggaaacctgtcctgcccctggnttaatgaatcngccaccccccggggaganggnggttgcgtantnggngccctttccctttcttgnttactgaatncttgnctcggnngtcgggtggggggagcgggttaacttacttcaaaggggggntaccggtttccccnaananggggnacccncggaanaaaatttgnccaaaaggcgccnaagggcggnaccctaaaanggcccctttttgg

SEQ ID NO: 989 - DNA, 826 bp, Homo sapiens
  misc_feature 604, 619, 646, 701, 742, 794, 815, 819: n = A,T,C or G
cgactactatagggcgaattggagctccaccgcggtggcggccgcccgggcaggtacatgtcaaaggaaaaacacgtgaaagatgaattcagccaaacccaccagtgttcaacctcagtctaatcaatctcatactcctagaggcttaagtatcagcaggtaagatcgtgatgacctgtctctgaggctccagacaataatttctaactgccaactggaaatccttatatggttaggctgccaacatcccagggaacaggaccaaaataaaaagcatcactcattatcctactgcaattttcctcttccctttgtcaaatgggaatgatctttacgatcatgatcctttattgcaaccaggacagaaatcatgaagtcatctatggccccttcctctcactccgcctccaattagttgtcctatctgccccttccgttctccttccatctccataatgcccaagctagtctatcacctctccattcatctttcactcaacctccagaattatcttcctaaaacccagactgattctgatttttcctcctcaagaaacgctctctaacactaaagcactttgcttctacctctatcgagcccaanggtattcatccttgnaatctctctaaatgagttcccagctgnccaccccacgagactaggagtttggtaaggacagaatcactcatttcatccttgnacctcggccgctctagaactagtggatcccccgggctgcangaattcgatatcaagcttatcgataccggcgacctcgagggggggcccggtncccagcttttggtccctttantggngggtaat

SEQ ID NO: 990 - DNA, 885 bp, Homo sapiens
  misc_feature 1, 604, 617, 665, 681, 710, 715, 718, 725, 741, 743, 753,762, 765, 775, 777, 789, 803, 808, 820, 833, 835, 840, 843,846, 855, 862, 885: n = A,T,C or G
ngcgcgactcactataggggcgaattggagctccccgcggtggcgggcaggtactgtgtggtttaaagataagcagcctgtgctgtcttttattttcagaaataacataaataaacaacaattactgaacgcaatgtgcaatctctatcttctgtgtttcggggtcaattgtctaacaggagccacaggaagagcttcagaggcacccagatgccaagcctcaattcccactgtgactctactctggcagaggtgagacttcaccttccagaaactatgctgggggcctctgtgtctgtggcatattgtttatattgtgtgtttataggcaattttaacaatcactgtttctagattgcaaccctcctgaggcactgcgctgacacagcaaagttattccccttactgaagagaaaaattagaggcctaaacaccacagaagccctgataatatggaatattagcatcaatgtcagagcacagtatttaggacagatactgataaagacagcatagatgaccacctcaccttgtcaccacctgagcgaggagcccttaaaagatgggtttccttcccgtgattaccggctgctggcttcttcangactggggttaangccaacttaagctggtctcttggccctgcaaaacccaaccctggaccntttcaggaaatggatnaataccatttactttcccggtaccttggncggtntanaactagnggatccccggcttgangnaattcatttnaacttttcnatncctcaacctnanggggggcccggncccactttgttccnttaangagggtaattgncccttggggaaananggganagntgntcctggggnaaatgtntcccttcaaattcccacaaaaan

SEQ ID NO: 991 - DNA, 883 bp, Homo sapiens
  misc_feature 3, 7, 11, 547, 551, 556, 578, 600, 666, 673, 702, 716, 719,726, 749, 750, 762, 765, 773, 792, 802, 814, 834, 839, 841,856, 860, 868, 874: n = A,T,C or G
agngggncgtntcgactcctatagggcgaattggagctccccgcggtggcggccgaggtaccaggttcaaatagtcagcagctcatcataatcaatgagcgaggacataaagtaggaaaaatgcatcaccatggtgagcaaggaaagcaagttattggaggcacatgttaacacataaaatataaaattatatgatcacactggaaaggcttgcctgagcccacagtttgaatgcctacaataagatgagatgcacaacaaaaagcaagagaacctgatcaagtgggtgacctggccatggtgctctcatcagtggggacccaaatgcttatgtggactcaccaggtatcgaattagacatgaataggagtgtttgttgtgatccaagaaactatataatcaaatgaatacaatgaaactttaaaaataattgtaaagatctttacaccagccaatgtcatgttgcgtacctgcccgggcgggcgctctagaactagtggatcccccgggctgcaagaattcgatatcaaagcttattgatacccgncgancctcnaggggggggccccgttccccanctttttggtccctttaatggangggttaatttgccgccttgggcgtaaatcattgggcattagcttgtttcctttggtggaaaattgnttttccnttcacaatttccacaccaacatttccaanccggggggccttanaanggtaaanccctggggggggccttattgagnngggcttaccccncanttaattgnggtggggcctactggcccnttttcaaatnggggaaaaactntctggccaacttgatttttnaattngncacccccccgggggnaagngggttggntttttngcgcctttt

SEQ ID NO: 992 - DNA, 854 bp, Homo sapiens
  misc_feature 5, 6, 7, 11, 657, 672, 705, 738, 743, 775, 818, 832, 833: n = A,T,C or G
agggnnncgtntcgactcactatagggcgaattggagctccccgcggtggcggccgcccgggcaggtacctacttactattttatgagaattgatttttactaagcctgatttgaatgggttgcatttacaccaactgctatttattaatgaaagtggtagcctgctttttaagtaatatgtgttttgcaacaggagagggttttctgagcttttaacaccagtaaccctgaacttcttccaaaatccacaccttttattcccccttttccttgtctccttctaggtgcctcagtcctggcatctcgggaggactctgccattactcatctgttactgattctgaatcttgtgctctagctctacagcccagtgaagaagcaatatatctttaattcagggcttgcctcttgctttccaactctaacctgagagcagtgctacttttgtaattgcaggtctaaataacttaagcgtatatacagaagccaatcactgatcacttccattgcaatgaggcatctgttgtcaaagaaggaaaccatttgtcaagtcccttatagatattgaatcttcaaacccaaatctggggatgtttacatttctggattaaaatcagtgtaccctcggcccgctctagaactaagtggatcccccnggctgcaggaattcnatttcaaagcttatcgatccgtcgaccctcganggggggcccggtcccagcttttgttccctttangtgangggttaattgcccccttgggcgtaatcatggncatagctggttccggggggaaatggtattccggtcacaaattncccacaacataccnncccgggaccttaaagtggtaa

SEQ ID NO: 993 - DNA, 874 bp, Homo sapiens
  misc_feature 1, 2, 6, 26, 27, 34, 35, 42, 86, 87, 100, 101, 159, 378,422, 510, 572, 573, 578, 579, 581, 605, 636, 648, 678, 695,749, 762, 768, 794, 795, 800, 801, 813, 819, 838, 846, 853,859: n = A,T,C or G
nngctnctactatagggcgaattganntttaccnnggtgtcntgcgcggcgatggcggcaagcgatgcgccctcctcgcacactgnnccggccagcatgnncgtgcgcagttcggccagcacggcgcgcgcgcaggccagggtttgcacgcggccgtantgtgcaatcagctcaaggcaagccgcgtcgcccaggatgcggtcgaccgacggcaggcgcacggtttgccccgtcgtcatgctggctggccctcgccgctgtcgttcttccccagccacagcagcggattgccgctggcgcgctggtagcccgcttcgccaccaacaggtcgagcataagctggccagatcgtcggcagcggttcgacgttgtaatcgngttcctggttgaagactttgcgataggtatggcaatcgtcgcangtttccgcgcgcgccaccttcttcggatcattcgccttgttgggcaatttgtcgtccttcgccgcacggggtcgaacgggtttgcgtnggcgctctaaaactagtggatccccggctgcaggaattcatatcaagcttattgataccgtnnacctnnanggggggccggtacccaacttttgntcctttagtgaggggtaattgggcccttggngtaatcatgggnataactggtttctgggtgaaatggtatccnttacaattcacaacaanatacaagccgggaacataaatgtaaacctggggggctaatagtgaactaactanattaatgggttgngcttantggccgttttcaatcgggaaactgtnngccanntgattatgaatngcaaancccgggagaggcggtttgntattgggncttttcntttttngtaattaattgttgg

SEQ ID NO: 994 - DNA, 902 bp, Homo sapiens
  misc_feature 590, 645, 734, 812, 815, 831, 843, 856, 890, 899: n = A,T,C or G
atgggcactacttagggcgaattggagctccccgcggtggcggccgaggtacgcggggtagatggaaggaagaacttgtgtgcttagacctgacgctgggaggagatgctgccacctaggttacttgtaggaccctatacggcaacctcctttgccaggaactatttataaacatcctgcaggaaaatggtaagcccttggttaaatttattgacttcatttatgtatctcacaacacttcttttctgttttagttctaggaatagaaacttacttttggaaatacagtacctgcccgggcggccgctctagaactagtggatcccccgggctgcaggaattcgatatcaagcttatcgataccgtcgacctcgagggggggcccggtacccagcttttgttccctttagtgagggttaattgcgcgcttggcgtaatcatggtcatagctgtttcctgtgtgaaattgttatccgctcacaattccacacaacatacgagccgggagcataaagtgtaaagcctggggtgcctaatgagtgagctaactcacattaattgcgttgcgctcactgcccgctttccagtcnggaaacctgtcgtgccagctgcattaatgaatcggccaacgcccggggagaggcngtttgcgtattgggcgctctttccctttctcgctcctgactcgcttgcgctcggtcgttcggctgcggcgagcggtatcaacttacttnaaggcggtaataccggttattcacagaatcagggggataacgcaggaaaaaacatgttgaaccaaaaggccaccaaanggncaggaaccctaaaaanggcccgttgctngcgtttttcctangctccgcccccctgacaacattacaaaaatgacnttaagtcanagg

SEQ ID NO: 995 - DNA, 901 bp, Homo sapiens
  misc_feature 2, 3, 5, 21, 680, 818, 847, 854, 866, 867, 878, 890, 891,893, 898: n = A,T,C or G
tnntncgctactcctatcagncgaattggagctccaccgcggtggcggccgaggtacagggctcttgatatatcctggccttaagtctcaggttctccaacaaagctggcagcctgtggtatgccttctggggccagagagtgtggcatgatccgaggtcctgagtctctctctcaatgagcccatcatattggcttaaccaaagccagtggtcttcaggacacggaaaagggagtcccttaggctccaggtttttttcccttcagttcacactgggagaagggtcacagagctccagtgaaatctggtcctgttagatcatttgtggttggctgcagatgcacatgtgggcatgtgatagttttgatttagataaaaagcccacaactgagtggagtgttgaaacctcagggttatagactggtgtatctgtgagaaaaccacaacaagtatggtatttgcccgcgtacctgcccgggcggccgctctagaactagtggatcccccgggctgcaggaattccatatcaagcttatcgataccgtcgacctcgagggggggcccggtacccagcttttgttcccttagtgagggttaattgcgcgcttggccgtaatcatggtcatagctggttcctgtgtgaaattgttatccgctcacaattccacacaacatacganccgggagcataaagtgtaaagcctgggggtgcctaatgagtgaactaactcacattaattgcgttgcgcttactggccgctttcagtcgggaaacctgtctgcccacttcattaatgaatcggccaacccccgggganaggcggtttgcgtattgggccctttcccntttcttncttaatgaattnntggctcggtcntcggtggcgggnncnggttnaac

SEQ ID NO: 996 - DNA, 906 bp, Homo sapiens
  misc_feature 2, 3, 4, 5, 6, 7, 562, 575, 634, 637, 649, 656, 666, 697,730, 741, 744, 762, 764, 765, 776, 777, 784, 799, 800, 804,809, 810, 816, 820, 846, 856, 862, 868, 869, 870, 879, 880,881, 885, 889, 892, 893, 897: n = A,T,C or G
gnnnnnncgcgtaatcgactcactatagggcgaattggagctccccgcggtggcggcccgcccgggcaggtacatgccaggcacaaactggagtcacagatgccacactgactatcacattgtcatcatactcagagagagaaaggtgtatacacccagtattttcttatgttttctctatacttccatatccccacccccattatcccccgagacattcccagttggaagtcagttgcttatgggaaactggctgcagggggatcagcccacctgtaacacacggaaaggcagagaaacaatgagtcatggatttgagtgcaaacaagcccagtcctgctacagagagttacggaaaaaatctcactgttgaagagagacatctataagagaggtgaggaaaatgactgatagatccttttacaatattctagggtagtctgtctgtgggagggggcaaggagtctatgggaactctctgtacctcggccgctctagaactagtggatcccccgggctgcaggaattcgatatcaagcttatcgattccgtcgacctcgangggggggcccggnacccagcttttggttccctttaagtgagggttaatttgcgccccttggcgtaaatcatnggncatagctggttncctgtgngaaattggtnttcccctcacaaattccccaccacataccancccgggagccataaagtgtaaaagcctgggggngcctaatgagnganctacccacattaattgcntnngctcctggccnntttccantcgggaaaccttgcnngccncttcnnttaatnaatnggccacccccggggagaaggcggttnggttttgggnctttcncttctnnntaatgaatnnnttgncttnggnntttnggttgggga

SEQ ID NO: 997 - DNA, 896 bp, Homo sapiens
  misc_feature 583, 640, 641, 695, 696, 701, 710, 711, 722, 724, 734, 750,791, 803, 804, 820, 823, 830, 834, 835, 837, 851, 865, 868,871, 874, 886, 892, 895: n = A,T,C or G
agcgtatcactcactatagggcgaattggagctccccgcggtggcggccgccgggcaggtaccatggccaaagctgaggcagccagggtgggacaggggcctccaagcaacacagcagtgttagcagttcacctggacctgttgatgagctgtcttagatgcacgaaggcaagagatgtctcatctctctctaagatcttagatcttaagtgcagagggaaggcagctgggagtgtggacggcagccacaagggagaaaagtgcaagagcatttacaaccagaagagaagccgaggggacatgatggcccatggacaatgtagccatggacagtgccctgggaggctggtaaggggggtgctgggactggtggtgaagagatcatttttaagaaaaagaatcccgcgtacctcggccgctctagaactagtggatcccccgggctgcaggaattcgatatcaagcttatcgatccgtccacctcgagggggggcccggtcccagcttttgttccctttagtgagggttaatttgccgcttggcgtaatcatggtcatagctgtttctgtgtgaaattggtatnccctcacaattccaacaacattccaacccggaacctaaaagtgtaaagcctgggggnnctaatgagtgagctactcacattaattgcgttgcgcttacttgccccttttcannccggnaacctgtcnngccaacttcantnatgaatcggnccaccccccggggaanaggcggtttgcgttttgggcgcttttccgtttcttggttanttaaattgtttnncttggtcgtcggttgnggnaaccggnttanntnacttcaaagggggnattccggttttccncanaantanggggataccccnggaaanaant

SEQ ID NO: 998 - DNA, 930 bp, Homo sapiens
  misc_feature 462, 482, 490, 518, 560, 562, 566, 568, 605, 610, 613, 630,697, 756, 764, 767, 768, 782, 786, 787, 793, 796, 797, 801,809, 811, 813, 816, 827, 828, 835, 845, 861, 863, 868, 871,872, 874, 885, 889, 890, 896, 898, 900, 901, 904, 905: n = A,T,C or G
  misc_feature 907, 911, 913, 914, 916, 917, 927, 929: n = A,T,C or G
cgcgtatacgcgtatacgactcactatagggcgaattggagctccccgcggtggcggcccgcccgggcaggtacatgccaggcacaaactggagtcacagatgccacactgactatcacattgtcatcatactcagagagagaaaggtgtatacacccagtattttcttatgttttctctatacttccatatccccacccccattatcccccgagacattcccagttggaagtcagttgcttatgggaaactggctgcagggggatcagcccacctgtaacacacggaaaggcagagaaacaatgagtcatggatttgagtgcaaacaagcccagtcctgctacagagagttacggaaaaaatctcactgttgaagagagacatctataagagaggtgaggaaaatgactgatagatccttttacaatattctagggtaagtctgtctgtgggagggggcangaagtctattgggaactctnttgtcctnggccgcttttaaactaatggatcccccnggcttgcagggaattcgatattaagcttatcgatacccgtcnanctcnanggggggcccggtcccactttttggttcctttaatgangggtnaantgcgccctggcgtaatnattgggcataactggtttcctggtggggaaaattgttatcccgttcccaattccacacaaacatacnagcccggggccttaaaagtgtaaacccttggggtgccctaatggagtgaacttaacttncaattaantgnngttggcctacttgncccnnttttcnaanngggnaaaccttncngnccncttcatttaannaatttgncccacccccngggaaaaggcggtttncnttttnggnncnttttccctttnttannttaatnantnnatnncntggnanntnnggttggggananc

SEQ ID NO: 999 - DNA, 871 bp, Homo sapiens
  misc_feature 55, 369, 516, 558, 585, 602, 603, 604, 605, 606, 607, 608,609, 610, 612, 613, 614, 615, 616, 617, 618, 619, 620, 621,622, 623, 624, 625, 626, 627, 628, 629, 630, 631, 632, 633,634, 635, 636, 637, 638, 639, 640, 641, 642, 643, 644: n = A,T,C or G
  misc_feature 645, 646, 647, 648, 649, 650, 651, 652, 653, 655, 656, 657,658, 659, 660, 661, 662, 663, 664, 665, 666, 667, 668, 669,670, 671, 672, 673, 675, 676, 677, 678, 679, 680, 681, 682,683, 684, 685, 686, 687, 688, 689, 690, 691, 692, 693: n = A,T,C or G
  misc_feature 694, 695, 696, 697, 698, 699, 700, 701, 702, 703, 704, 705,706, 707, 708, 709, 710, 711, 712, 713, 714, 715, 716, 717,718, 719, 720, 721, 722, 723, 724, 725, 726, 727, 728, 729,731, 732, 733, 734, 735, 736, 737, 738, 739, 740, 741: n = A,T,C or G
  misc_feature 742, 743, 744, 745, 746, 747, 748, 749, 750, 751, 752, 753,754, 755, 756, 757, 758, 759, 760, 761, 762, 763, 764, 765,766, 767, 768, 769, 770, 771, 772, 773, 774, 775, 776, 777,778, 779, 780, 781, 782, 783, 784, 785, 786, 787, 788: n = A,T,C or G
  misc_feature 789, 790, 791, 792, 793, 794, 795, 796, 797, 798, 799, 800,801, 803, 804, 805, 806, 807, 808, 809, 810, 811, 812, 813,814, 815, 816, 817, 818, 819, 820, 821, 822, 823, 824, 825,826, 827, 828, 829, 830, 831, 832, 833, 834, 835, 836: n = A,T,C or G
  misc_feature 837, 838, 839, 840, 841, 842, 843, 844, 845, 846, 847, 848,850, 851, 852, 853, 854, 855, 856, 857, 858, 859, 860, 861,862, 863, 864, 865, 866, 868, 869, 870: n = A,T,C or G
tcgactcctatagggcgaattggagctccccgcggtggcggcccgaggtactttntttttttttttttttttttttggggaacaaggtgaggttctctgaggtaacattccctaagacaggaaccccaggactttccaactctaaggatttcccacattcaggatccagaagttttcaaaattacctcttaagttttcctactaagtttatggccccagaggcttctactccaggtaagcagttctctgcaactctgaatttgcttgtatttctagattttaaggtgacagtttgccctgtaatatcagttctctgacgggtccaagacaagccatcaattttaaggttctttaactatttcttattgnaagggatgggaattggaaatgctaaagctctttaaagatttgggctaaaactggaggtaatgctcatattctgtttttatcaaattcactgttaaatatatatcatctatccttcacactcagacaaaatcaaaacaattttcaggngatcagtcactcatttttagatatttgggtaactgaccaaangctttcatttccttctcctatataaanccttggccctggcccgnnnnnnnnntnnnnnnnnnnnnnnnnnnnnnnnnnnnnnnnnnnnnnnnnnntnnnnnnnnnnnnnnnnnnntnnnnnnnnnnnnnnnnnnnnnnnnnnnnnnnnnnnnnnnnnnnnnnnnnnnnnnngnnnnnnnnnnnnnnnnnnnnnnnnnnnnnnnnnnnnnnnnnnnnnnnnnnnnnnnnnnnnnnnnnnnnnnntnnnnnnnnnnnnnnnnnnnnnnnnnnnnnnnnnnnnnnnnnnnnnntnnnnnnnnnnnnnnnnntnnnc

SEQ ID NO: 1000 - DNA, 443 bp, Homo sapiens
  misc_feature 418, 436: n = A,T,C or G
ggcgaattggagctccaccgcggtggcggccgaggtacacacagacccctgaaaagcaccatggcagtaagaccttccccacatgagttggtaacctgtaaattatcttagcctttccttattcaacttatcaaaccctcctcagaactccacactattacttcccctttggtgacgtgaagggttggaaccccagcatctcccattcccgatgagtcataactcacacactgcacaaaacgcagtccacataactgaccgctctagaactagtggatcccccgggctgcaggaattcgatatcaagcttatcgataccgtcgacctcgagggggggcccggtacccagcttttgttccctttagtgagggttaattgcgcgcttggccgtaaatcatgggtcataagctgtttcctngtgttgaaaatttgtgtnattcccg

SEQ ID NO: 1001 - DNA, 476 bp, Homo sapiens
  misc_feature 4, 48, 280, 281, 303, 314, 327, 332, 336, 342, 348, 351,352, 355, 357, 362, 365, 366, 373, 380, 382, 386, 387, 406,425, 433, 440, 442, 445, 451, 454, 463: n = A,T,C or G
actnctatagggcgaattggagctccccgcggtggcggccgaggtacncgggggtttgtagatggaaggaagaacttgtgtgcttagacctgacgctgggaggagatgctgccacctaggttacttgtaggaccctatacggcaacctcctttgccaggaactatttataaacatcctgcaggaaaatggtaagctgagaccaatgatgctgacctccctcaaaagctgcatttctgaatttctgaaggcaaactgtctgcctatattgtaccttgcccnnatcaaattttttaaaaaatacnccccactgatncaactcaatacangagtntttnttcttnaaattnttnntancnccatnaannattcttnaagtttncngaanntactatttaatttaccccnccttcttgttttttattgnaaaccaanaaaaccnanatncaaagnganccccttcangtttttaattttt

SEQ ID NO: 1002 - DNA, 469 bp, Homo sapiens
  misc_feature 304, 306, 316, 318, 320, 321, 324, 365, 371, 372, 373, 374,379, 385, 391, 398, 400, 401, 403, 407, 411, 414, 415, 416,426, 432, 437, 439, 441, 444, 454, 458, 459, 462, 466, 467: n = A,T,C or G
ggcgaattggagctccccgcggtggcggccgaggtacgcggggtgaagggctctctgtatactgctgaagattctatagtttctcctgaaatccatgagggagccccctgaaggattttggccaggaaagtgtcatgaatcaaatttctattttaagaatagtatcgaggcagcaatgtcaaagtttgtttagaaaataggatggttcctgtaatcccagaacttttggagaccaaggcgggaggattgcttgagtccaggaatttgagtccagcctgggcaacatgggagaggacctcatctntnctaaaatttnantnnttntaataaaaggttcccttgccccggggccggcccgttcttanaaactnnnnttggnaattcncccccngggcttngnnantggnaatnttnnncaataattcnaaggcntttantntngantttccccggntcgnnccntttnnga

SEQ ID NO: 1003 - DNA, 435 bp, Homo sapiens
  misc_feature 76, 252, 283, 284, 286, 321, 325, 344, 355, 356, 361, 365,368, 406, 424, 425, 431, 432: n = A,T,C or G
ggcgaattggagctccccgcggtggcggccgcccgggcaggtacccccatgctacctgggcactggggtttctcanccactccactgaaatttgcattggcttattgaaagtcaatcacaagtcaaaaccacagactcacataggagaacactgttgtttgggcccagcagctctgaaatcaatacctttaatggtagaacctaaaactaaaataaataggaaggaaggaaggagaaagaaagaaagagaangaagaaagaaagagaaagggagagagtgaannanaaaaaatggaaaaataagtacctcggccgctctanaacnagtggatcccccgggctgnaggaattcganntcaangctnatngataccgtcgacctttaagggggggccccggtacccanctttttgttccctttaanngagggnnttt

SEQ ID NO: 1004 - DNA, 441 bp, Homo sapiens
  misc_feature 65: n = A,T,C or G
taatacgactactatagggcgaattggagctccaccgcggtggcggccgcccgggcaggtaccanggctaggcagctctggagaaagcagaagtggataaataaggtgtggactcaccaaagacagttccaaagtcaatttcactctgacacactctctgtgatcttccacagtcagcacaatgcctgccccctgctaggcctgatggatgatctgatagaaaactggcttcagcaaggagcttccacaggtaaccttggttctgcagtgataacagctcctatgaaggagaccccatcagactaacagtggatttctcagcagaaatcataaaggccagaaaacagtggaatggcattttcaaaatgctctttccattgcttttccataccactgcttttcccagggactgggagactttgggttttcagctctttgcac

SEQ ID NO: 1005 - DNA, 852 bp, Homo sapiens
  misc_feature 400, 429, 442, 443, 461, 482, 484, 492, 506, 512, 514, 518,524, 526, 527, 528, 529, 534, 535, 536, 537, 538, 543, 547,548, 552, 556, 557, 558, 559, 560, 561, 563, 564, 566, 567,569, 573, 582, 587, 591, 592, 593, 595, 598, 599, 600: n = A,T,C or G
  misc_feature 601, 605, 606, 607, 608, 609, 612, 613, 615, 616, 617, 618,619, 624, 627, 632, 633, 635, 636, 637, 640, 641, 642, 643,644, 649, 650, 652, 654, 656, 658, 660, 661, 663, 664, 665,668, 669, 670, 673, 674, 675, 676, 680, 681, 682, 683: n = A,T,C or G
  misc_feature 685, 686, 687, 690, 691, 692, 694, 695, 700, 701, 705, 706,707, 710, 712, 714, 715, 716, 717, 719, 720, 724, 725, 727,729, 731, 732, 733, 736, 737, 740, 741, 743, 744, 747, 748,749, 750, 753, 757, 760, 762, 763, 764, 766, 768, 769: n = A,T,C or G
  misc_feature 771, 772, 774, 776, 778, 779, 783, 786, 788, 790, 792, 793,799, 802, 810, 812, 813, 819, 820, 821, 822, 824, 825, 826,829, 830, 832, 833, 834, 836, 842, 845, 848, 849: n = A,T,C or G
tagggcgaattggagctccccgcggtggcagcggcccgcccgggcaggtaccaaaagaatgttcatagcagcattatttgtcatagtcaagagctggaagcaacccagttgtgcatcaatggtagaatggatgactaaattgtagtgcattcttacaataaaatactatagagcaatgaaaataaataaactatggctatatgcaacaacatggataaatcttaccaacaatgttagacaaatgtagccaaaccaaaaaatacacatgttctatgaatccatatatgcaaggttcacaataggtgatagtagctactcttttgggaaggagtgaggaaaggactgccagagtattgcagagggggctccgggtgtttgtaatttctatttcccagtgcangtgtggtttgcatgaacatgttcctttgnggaaattcattgnngctgtacctaaatatacngaattatttatgaaatgaagngntatattantcatggggaacctnggaggntngganggaggntnnnnccccnnnnnatctncatnnctgntctnnnnnnanngnntngcgncaccttgcnggggngccnnngnccnnnntttnnnnnctnngnnnnnggaantcncgtcnngnnntannnnntgtgnnancntntncnntnnnaannngtnnnnactnnnncnnnatnnncnntaatnncgtnnngancnannnncnnatgnntngngnnnccnnacnntnnagnnnntcnatcnttntnnncncnntnntngnanntttntanancntnnattccnttntaaccgcncnnacattnnnntnnnganncnnngnggtganganggnnccg

SEQ ID NO: 1006 - DNA, 431 bp, Homo sapiens
  misc_feature 387: n = A,T,C or G
ggcgaattggagctccaccgcggtggcggccgcccgggcaggtacgcgggggtagaacaggcgatatcttcaccatgcgcacaatgaaatcaatactcagagaaggcagataattctccacgaagccagaaaactaataaatgaacaacttgggtgaaatgtcccaccagacggtgtgatatttagtagtccagaaagctgccaaggggttgaatgacactatctgaagatatgaaccagtttgctctccatagggaggatttcatcaacaggaaacagatgcctggaaggcattggatttgctaagtgtctatgccatatgattctgctgtttgcgtttgatttaaaatgctgagctgactcaaagtcaaactatttcatatgttngaaatccttgactcccagcctggaggggcctttaccgaaggggg

SEQ ID NO: 1007 - DNA, 888 bp, Homo sapiens
  misc_feature 3, 645, 694, 697, 733, 741, 743, 770, 774, 789, 791, 820,822, 832, 849, 851, 852, 855, 857, 860, 876, 886, 887: n = A,T,C or G
cgnatcgactcactatagggcgaattggagctccccgcggtggcggccgcccgggcaggtacaaatttgggcatagtcagaaactctgctgactctctcttcccatttaacctaatcttaccatagcactcctcaccctatgacttgcccattgcagtaaaccagaaagcaaaaaaaggtcaagcacgtgtgtttgagatccaactctagtgtttgtagcagctctgcagaaccacagtttgcacatctgtaaattgagcaataacaactgccctgcctgtttcacagggttgcttaaagagttatatgagctattgcatgtgaaagtgttccataagctgccatttgctctgaagctcacgggtataattattctagtctaacctacttatgtttgccctcttttctgcagttgcatctttgtgcataaagattctctctccaacctgtgcaattgattcatctttaaagaccaactcaaattcgaccttctaaaagaaaatcttctctgaccttcaactctaaactagagtaatttactaactggtatttatcactttcaaattcttcattaggtcttgaatcatagaatattggttacccattgggcatttatcatccctgccaacaagaacaggggggttncatggtggttagacttcgggtcccattgcttcctttgcattcttcaaangcncatccccccaaggcttttttgcacaatgtcttgggngaaggggnanaaaccccactggaatgttcaatttcgnttangctttttcttttacnanttaagcctgttgcttttccctgggcaccntnactggagaancctttttcctttccttntnnaanantgnggaattgaaacacaantccttgggannt

SEQ ID NO: 1008 - DNA, 882 bp, Homo sapiens
  misc_feature 447, 516, 576, 579, 635, 639, 670, 676, 677, 678, 686, 692,704, 718, 725, 731, 741, 767, 776, 808, 809, 826, 830, 837,847, 865, 874: n = A,T,C or G
cgactcctatagggcgaattggagctccccgcggtggcggccgcccgggcaggtaccgcggtttttaaatctgtcactgttcttcccccacttcaaagctgacttgacaactgcatttatttcacattgcaattgctgcaggttaataatattgttttatcaggaaacatttatcttgaggaagaaagttatcctaatacagcagataacttatccaaggacagatagaaaggggactgtgtctagagggtaatgctaatgcctggcatgctataaaaataaatgaaatctgattaacactattggaggggaagaataagtcatcgtttctatgaaatattattttcctgattggaaccatttccattttcgcagcttaaaacattgcattaaagatgagatgactttaaaacccggggacagctatctcaagccctgtggattatnaatggggtataggcttgtaatcctatgggtttagactaaagtatttcttcataaattgaaaagaaaacncaccttggaattcagaagattttaattaaaggtggtcaaaaaatttaatgggggaatttnaanggctgactccctaagtagttttggttaatgatttaatttatagaagaaaggtcttnggcnaatttggtatgcccaaaagagcctactatgncccaannntttttctnggagcnttattattaagnggcccgcttttccnggtggcntccctnagtcatttcngcttcatccaaatttgtggaattaancctaccccntttaaatggggaccattggctttttaaggggnnaagaccccaaagggtanatancctggcnttatgataantattttttttaaaaaaanttctttatngtttaagg

SEQ ID NO: 1009 - DNA, 890 bp, Homo sapiens
  misc_feature 15, 39, 110, 543, 546, 631, 643, 688, 696, 698, 734, 752,777, 786, 788, 795, 796, 798, 802, 804, 813, 826, 842, 846,868, 877, 888: n = A,T,C or G
tggtttatacactcntatagggcgaattggagctccccntggtggcggccgcccgggcaggtaccaaaagaatgttcatagcagcattatttgtcatagtcaagagctgnaagcaacccagttgtgcatcaatggtagaatggatgactaaattgtagtgtattcttacaataaaatctatagagcaatgaaaataaataaactatggctatatgcaacaacatggataaatcttaccaacaatgttagacaaatgtagccaaaccaaaaaatacacatgttctatgaatccatatatgcaaggttcacaataggtgatagtagctactcttttgggaaggagtgaggaaaggactgagagagtattgcagagggggctccgggtgtttgtaatttctatttcccagtgcaggtgtggtttgcatgagcatgttcactttgtggaaattcattgagctgtaactaaatatacagaattatttatgaatgaaatgatatataattcaatgggaacctgggaggatagggaggaggtgggggganctnaaaaaacatgagtggcccgaatgcttaacaattggtattgttaggttatgggatcccggggggtggttgtcctcggccgctctanaactagtggatncccccgggctgcaggaattcgatatcaagctttatccgatacccnccacctcnanggggggcccggtacccaactttttgttcccctttantgaggggttaaatgcccncttggccgtaatcatggccatactngtttcctgngngaaattnntntccntnacaatttcncaccacattccancccgggcataaagtgntaanccgggggtgcctattggggganctaactcanattaatttgcngg

SEQ ID NO: 1010 - DNA, 893 bp, Homo sapiens
  misc_feature 1, 9, 14, 16, 50, 547, 651, 691, 724, 748, 760, 761, 764,772, 774, 781, 784, 795, 796, 800, 804, 820, 829, 863, 864,868, 880, 882: n = A,T,C or G
ntttccccnttttncnactcactatagggcgaattggagctccacccgcngtggcggccgggggccattgagactgccatggaagacttgaaaggtcacgtagctgatacttctggagagaccattcaaggcttctggctcttgacaaagatagaccactggaacaatgagaaggagagaattctactggtcacagacaagactctcttgatctgcaaatacgacttcatcatgctgagttgtgtgcagctgcagcggattcctctgagcgctgtctatcgcatctgcctgggcaagttcaccttccctgggatgtccctggacaagattttactcccataacccaggcagaagtacctcggccgctctagaactagtggatcccccgggctgcaggaattcgatatcaagcttatcgatacccgtcgacctcgagggggggccccggtacccaacttttgttccctttaatgagggttaattgcgcgcttggcgtaatcatggtcatagctgtttcctgtgtgaaattgttatcccctcacaattnccacaacataccaacccggagcataaagtgtaaaacctgggggtgcctaatgaagtgaagctaactcacattaaatgcgttgcgcctcactgcccccttttcantcgggaaacctgtctgccccttgcattaatgaaattaggncaacccccccggggagaaggcgggttggcgtanttgggcgctctttcccctttcttncttactgactcnntgngcttcggncnttcgggntgnggggaagcggnnttanctcncttcaaaagggggggnataccggtntcccccaaatcaaggggaaaaccccggaaaaacnntttnaccaaaaggccncnaaaggcccggg

SEQ ID NO: 1011 - DNA, 888 bp, Homo sapiens
  misc_feature 2, 4, 5, 6, 7, 8, 15, 648, 727, 732, 764, 769, 797, 798,819, 847, 887: n = A,T,C or G
angnnnnnacgactnctatagggcgaattggagctccaccgcggtggcggcccgaggtacttcatactactttaagttacctcctattgggggcattataaatgggtaagcagagaacatcatggaaagacatggagcttagtatatgcaaatgttgagttactcagtgtaatgtgtgaaaaaggagtttcataagtttcggtcagggaagaaggcagggtcaaaatttctgcttgagagtttgggagcttggggagactttaaacagggagcaacacagcgcctctgtacctgcccgggcggccgctctagaactagtggatcccccgggctgcaggaattcgatatcaagcttatcgataccgtcgacctcgagggggggcccggtacccagcttttgttccctttagtgagggttaattgcgcgcttggccgtaatcatggtcatagctgtttcctgtgtgaaattgttatccgctcacaattccacacaacatacgagccgggagcataaagtgtaaagcctggggtgcctaatgagtgagctaactcacattaattgcgttgcgctcactgcccgctttccagtcgggaaacctgtcctgccagctgcattaaatgaatcggccacccgcggggagaggcggnttgcgtattgggcgctcttccgctttctcgcttacttgactcctgcgcctcggtcgtttcggcttgcggcgagccggtntcagntactcaaagcggtaataccggttattcacaanaatangggataaccgcaggaaaaaacatgtganncaaaaggcccaccaaaaaggnccggaaccgtaaaaaggccccgttgctngcgtttttccataaggttcgccccccctgaccagcattant

SEQ ID NO: 1012 - DNA, 918 bp, Homo sapiens
  misc_feature 2, 3, 4, 5, 6, 7, 8, 9, 10, 13, 26, 307, 339, 356, 363, 365,366, 369, 379, 386, 392, 404, 409, 411, 412, 417, 421, 422,426, 433, 434, 441, 442, 448, 453, 456, 461, 463, 476, 484,485, 492, 493, 495, 498, 500, 501, 502, 503, 505: n = A,T,C or G
  misc_feature 506, 507, 522, 532, 550, 551, 558, 559, 561, 564, 565, 567,575, 577, 579, 582, 583, 584, 585, 586, 589, 590, 591, 607,620, 628, 630, 632, 633, 645, 646, 647, 649, 656, 658, 659,663, 665, 671, 674, 676, 677, 694, 695, 698, 703, 707: n = A,T,C or G
  misc_feature 708, 717, 718, 719, 721, 722, 735, 736, 737, 743, 746, 747,751, 754, 764, 765, 767, 768, 769, 774, 775, 777, 779, 781,783, 784, 786, 790, 795, 796, 797, 798, 799, 800, 804, 816,817, 818, 821, 826, 829, 830, 831, 836, 838, 839, 842: n = A,T,C or G
  misc_feature 843, 844, 845, 848, 849, 851, 864, 868, 870, 874, 875, 878,882, 888, 889, 890, 894, 895, 896, 897, 898, 900, 902, 905,906, 907, 908, 911, 912, 913: n = A,T,C or G
gnnnnnnnnnatngtcgctactatanggcgaattggagctccaccgcggtggcggcccgcccgggcaggtactaaaactattccaggaagactttaacttttgttgattcaaaaggaacatggtgcatcatttagcaccgtagggtcatcgttatgataatccatttttattacagtcctgtggttctcatctaccctaatatccagcaagtggttcattgcagattctgatttattccatcctacctcaaccctattaccaactatcaccacccaccacccgccacccaaactggaagacaaccanagataaatcctcaagaaacttctttttaaganggcgggtaacaaagttnaataggntnnaangcagatgaancgagtcnaatctnttgctcaacccnaatantnncctcnttgnngaangtggacnnggaattnnaacttnggggnggnaaaancnagggtccttaaanggcgtgcnngaaaaannangcntnnnnannnggcccttggcccttntaaaaactangggatccccccggctgcnnggaattnnanttnnangcttattngntnccnnnnnccnnnaggggggggccccggnccccaccttttgntccctttnangnnggggtaaattgnnncnccttggngnnaaanangggcanaancnngtttcctgggggaaaannttnttccncttnnaatttcccnnnanntccaagcccgggnnnttaaanggnnaaanccngggggggccnnannnggggnncnancncnnanttantgggnnnnnntcantggccctttcannnggnaaacnttnnnccccngnnttnnnnaanngnccccccccggggnaggngnttgnnttngggncttttnnnttcnnnnntnanaannnnggnnnggggg

SEQ ID NO: 1013 - DNA, 877 bp, Homo sapiens
  misc_feature 1, 4, 8, 598, 684, 693, 752, 763, 796, 815, 829: n = A,T,C or G
nggntcgnaacgctcctatagggcgaattggagctccccgcggtggcggccgaggtacacctgtccatgtgatgaattagaacatgcttttccacctataaactacaacttaatttgcataacttaatataagtagtattaatgtaagtgttatacatatttcaggttataattttgattacaatttgaagacataaatacaattggtttagttataaaattacactacttacttgctactttataactgctcactacctccttagtggaacccagattttctctatgatttgagaaaaattactccacatgttgcctagttatcaaactatattgggaagcagaaaaagctatgaaaggcttcaaagcttctgagaaccttagcacgaaaaactcttccaaaaagcttttttcacttttcaatagttcctctttacatcacatttataatcactcaccagcaatctcttttccatgcttgatttgtgaggcttattgaaaacaatggcattgaccgttcattctgactccttgatttccattgttttcaggagttttcatctgctgaaggcaactaatccacaatgagcaaattatnctgccctggagggtaagctataatatcggcccatgcttcaagaaagagaaaatcatgtgttctttcttataccctggatagtcatncattgctgnggcttccatggcagaaggggcaaacgatctctctgagcctttttataagggcactaatnccattcatganggcttcacccttatgacctaatccctccaaagncccctcgtaatgccctcangctgggggtagganttcacatatgaaatagttggcctttgagcaactcaacattcttaaatg

SEQ ID NO: 1014 - DNA, 899 bp, Homo sapiens
  misc_feature 2, 3, 4, 5, 6, 7, 8, 9, 10, 13, 20, 489, 599, 608, 614, 618,619, 645, 654, 657, 696, 705, 755, 814, 862, 877, 884, 896: n = A,T,C or G
gnnnnnnnnnatngtcgctnactatagggcgaattggagctccccgcggtggcggccgcccgggcaggtactaaaactattccaggaagactttaacttttgttgattcaaaaggaacatggtgcatcatttagcaccgtagggtcatcgttatgataatccatttttattacagtcctgtggttctcatctaccctaatatccagcaagtggttcattgcagattctgatttattccatcctacctcaaccctattaccaactatcaccacccaccacccgccacccaaactggaagacaaccagagataaatcctcaagaaacttctttttaagagggtggttaacaaagttaaattgggtagaaaacagatgaagcaagttttaatctctttgctgagtaagaatagtgcctacatggtgtgggtgatcatgtgtaagactctgatgggcaaacctggggcccattaggagggcatgaagactcangcatctgagctggaccatggcactaaaagattacagtgatgacaactgtaacgatgatggttatgacgggaatatctctaacatcatcatcttcaattttagcatgtggncttatggtncaagcnctgnnctaacactttgcatatactaacaatncactgagangcnctaggaatggccccagtgttcgcatgcaaaattcagtancttgcccanggtatcaagtaagtggcggatctaggacctgaacttgggcaagctggctntaaccttaagccactacaacatgcttccttcaacatgcacttatcactcaatcccctanatgttgagtttttcttttccaactaccttacctttaaatggaatggcncttttggttggggcncataatntctaacccaaangcc

SEQ ID NO: 1015 - DNA, 467 bp, Homo sapiens
  misc_feature 2, 3, 4, 5, 6, 7, 9, 10, 12, 23: n = A,T,C or G
gnnnnnngnngnttgcgtatcgnttactatagggcgaattggagttccccgcggtggcggccgcccgggcaggtacgcgggaatgagagcctacagttgaaagcacacttggatgaggctcggaccctgcttcatggcaccagaggaacccaccagcaccaggttgagcttattgagcgagatgaggttagtcttcataagaagctgaggactgaagtaattcagctagaagatacattggcccaggtccgcaaggagtatgaaatgctgaggatagaatttgagcagacccttgctgccaatgaacaagcaggccctataaacagggagatgcgccacctcatcagtagcctccagaatcacaatcaccagctgaaagggggaggtcctgagatataagcggaaattgagagaagcccagtctgacctgaacaaagacacgcctgccgttaagtgggttagttgcc

SEQ ID NO: 1016 - DNA, 463 bp, Homo sapiens
  misc_feature 235, 340, 358, 406, 422, 437, 451, 463: n = A,T,C or G
taatacgactcctatagggcgaattggagctccaccgcggtggcggccgcccgggcaggtacgcgggaatgagagcctacagttgaaagcacacttggatgaggctcggaccctgcttcatggcaccagaggaacccaccagcaccaggttgagcttattgagcgagatgaggttagtcttcataagaagctgaggactgaagtaattcagctagaagatacattggcccaggtncgcaaggagtatgaaatgctgaggatagaatttgagcagacccttgctgccaatgaacaagcaggccctataaacagggagatgcgccacctcatcagtagcctncagaatcacaatcaccanctgaaaggggaggtcctgagatataagcggaaattgagagaagcccantctgacctgaacaagnacacgcctgcgttanttggtagtgccctnctgcagtcccan

SEQ ID NO: 1017 - DNA, 448 bp, Homo sapiens
atacgactactatagggcgaattggagctccaccgcggtggcggccgcgccccgcgtgacgagcggacttgcgtccggcgtatcggcgatttcgcggttctcgttcagcagggaaaacaggcgttccatgtcggccaggctttgcttgatttcgcggtaaatgacgcccaggaaattgagagggatgtacagctggatcatgaaggcgttcaccagcaccaggtcgcccagggtcatgctgccgttgatcacgcccacggtggcgcgccacaggatcaaggtgacggccgctctagaactagtggatcccccgggctgcaggaattcgatatcaagcttatcgataccgtcgacctcgagggggggcccggtacccagcttttgttccctttagtgagggttaattgcgcgcttggccgtaatcatggtcataagctgtttcctgtgt

SEQ ID NO: 1018 - DNA, 406 bp, Homo sapiens
  misc_feature 5: n = A,T,C or G
gagcnccgcgtaatacgacttcactatagggcgaattggagctccaccgcggtggcggccgggggccattgagactgccatggaagacttgaaaggtcacgtagctgagacttctggagagaccattcaaggcttctggctcttgacaaagatagaccactggaacaatgagaaggagagaattctactggtcacagacaagactctcttgatctgcaaatacgacttcatcatgctgagttgtgtgcagctgcagcggattcctctgagcgctgtctatcgcatctgcctgggcaagttcaccttccctgggatgtccctggacaagagacaaggagaaggccttaggatctactgggggagtccggaggagcagtctcttctgtcccgctggaacccatggtcc

SEQ ID NO: 1019 - DNA, 406 bp, Homo sapiens
  misc_feature 5, 384: n = A,T,C or G
gagcnccccgtaatacgactcactatagggcgaattggagctccaccgcggtggcggccgcccgggcaggtacgagatgccacggcacgaagtctacgttctcctgatccgaaacatctttttgaaaatatcaatcattggcattctttgttactattggctcaacaccgtggccctgtctggtgaagagtgttgggaaaccctcattggccaggacatctaccggctccttctgatggattttgtgttctctttagtcaattccttcctgggggagtttttgaggagaatcattgggatgcaactgatcacaagtcttggccttcaggagtttgacattgccaggaacgttctagaactgatttatgcacaaactctggtgtnggattggcatcttcttctgccc

SEQ ID NO: 1020 - DNA, 479 bp, Homo sapiens
gacgcgctaacactactatagggcgaattggagctccaccgcggtggcggccgaggtacaaggactgcatcgagtccactggagactattttcttctctgtgacgccgaggggccatggggcatcattctggagtccctggccatacttggcatcgtggtcacaattctgctactcttagcatttctcttcctcatgcgaaagatccaagactgcagccagtggaatgtcctccccacccagctcctcttcctcctgagtgtcctggggctcttcggactcgcttttgccttcatcatcgagctcaatcaacaaactgcccccgtacctgcccgggcggccgctctagaactagtggatcccccgggctgcaggaattcgatatcaagcttatcgataccgtcgacctcgagggggggcccggtacccagcttttgttccctttagtgagggttaattgcgcgcttggcgtaatcatgg

SEQ ID NO: 1021 - DNA, 467 bp, Homo sapiens
  misc_feature 1, 2, 3, 151, 215, 232, 247, 269, 279, 300, 354, 376, 400,423, 444, 453, 463, 464: n = A,T,C or G
nnnatcccgtaacactacttagggcgaattggagctccccgcggtggcggccgaggtaccgttcctccagtgcccagagatgctctccgcaccaagccacagatgtggaggaggcaggtagggggtcaaagaggggtggtatcggttattnaggactttttttttttcttaaatatcctgtgcttctttcaatcatttgaaggtaaaaaccagcntccctgtgagtggtaanctgatttttaggttnttatgaaggtattattttctgngtagatagtngttaacttggtgtccttgcanggtaagacgatcagcgaagctttctgttccaccatcttgctcctctcattttanacctaatatattgactatacantgttatccctctggaagtatctgnctatatctgcatcaatactaagnaaaataaaatataatcataangagcactgnaaacaatatnnaaa

SEQ ID NO: 1022 - DNA, 909 bp, Homo sapiens
  misc_feature 644, 666, 681, 694, 708, 710, 732, 737, 740, 745, 778, 797,803, 808, 810, 833, 866, 879, 892, 893, 899, 902: n = A,T,C or G
acgatcgactactatagggcgaattggagctccccgcggtggcggcccgcccgggcaggtaccaaagaacaaacggaagcctaaagatggaccacaaacctttggatatccaggataactgagttaaaaacctaccacacggttaataaaataatgatgtccactgagtccatgaccacaaaacaaatcaccagcagcaggatggcatgggcggcccttttcgctggggagggactggagcagaggctggggctgtgaaggtgatgggatcacctctgatggttaaacaagagtacctcggccgctctagaactagtggatcccccgggctgcaggaattcgatatcaagcttatcgataccgtcgacctcgagggggggcccggtacccagcttttgttccctttagtgagggttaattgcgcgcttggcgtaatcatggtcatagctgtttcctgtgtgaaattgttatccgctcacaattccacacaacatacgagccgggagcataaagtgtaaagcctggggtgcctaatgagtgagctaactcacattaattgcgttgcgctcactgcccgctttccagtcgggaaacctgtcgtgccagctgcattaatgaatcggccaacgccgcggggagaggcngtttgcgtattgggcgctcttncgctttcttgcttanttgactcgcttgngctcggtccgttcngnttgcggcgagcgggattaactnactcnaangcggnaatccggtattccccagaatcaaggggataccncaggaaagaacattttgancaaaanggccncnaaaaggccaggaaccctaaaaanggcccgtttggtggcgtttttcataggcttccnccccttggcagcnttaaaaaaattgnncttaantanaaggggt

SEQ ID NO: 1023 - DNA, 427 bp, Homo sapiens
  misc_feature 405, 407, 420: n = A,T,C or G
tagggcgaattggagctccccgcggtggcggccgaggtaccctcggttgcaagcacaagcaaatgtgccagggtggttgatgcagctgtggtcacaggtcctatccaaagagcactcatccacatcttggcaagacttctcatctgttaataatttaaatcctttcttgcagcccgcagtcaaaactgcccaccgatgtttttgcagaaatgatcacaacctccattgcgggtccccgcgtacctgcccgggcggccgctctagaactagtggatcccccgggctgcaggaattcgatatcaagcttatcgataccgtcgacctcgagggggggcccggaacccagcttttgttccctttagtgagggttaatatgcgcgctttggcgttaatcatggtcataancntgtttttcctgtnctgaaaa

SEQ ID NO: 1024 - DNA, 789 bp, Homo sapiens
  misc_feature 227, 229, 457, 492, 497, 521, 525, 559, 572, 606, 610, 635,640, 644, 647, 655, 661, 664, 673, 683, 715, 716, 724, 727,728, 739, 741, 750, 753, 756, 773, 774, 779, 781, 784: n = A,T,C or G
ggtacgcggggacccgcaatggaggttgtgatcatttctgcaaaaacatcgtgggcagttttgactgcggctgcaagaaaggatttaaattattaacagatgagaagtcttgccaagatgtggatgagtgctctttggataggacctgtgaccacagctgcatcaaccaccctggcacatttgcttgtgcttgcaaccgagggtacctcggccgctctagaactagngnatcccccgggctgcaggaattcgatatcaagcttatccgataccgtcgacctcgagggggggcccggtacccagcttttgttccctttagtgagggttaattgcgcgcttggccgtaatcatggtcatagctgtttcctgtgtgaaattgttatccgctcacaattcacacaacatacgagcccgggagcataaaagtgtaaaagcctgggggtgcctaatgagtgangctaactcacattaattgccgttgcgctcacttgncccgnttttcaagtcgggaaaacctgttngtgncagcttgcaattaaatgaaattgcccaacgcgcnggggagaggcggntttggcgaattggcgctttttccgctttcctcgnttanttgacttagctgcgctcgggtcggntccgnctgnggngaggcggnattcanctnacttcaaanggcgggaatnccggtttccacagaaataagggggttaccgcnngaaagaanatnngagcaaaaggncngcaaaaagnccnggnaaccgaaaaaagggccnnttgtngnggnttttc

SEQ ID NO: 1025 - DNA, 431 bp, Homo sapiens
  misc_feature 2, 3, 7, 9, 10, 12, 13: n = A,T,C or G
gnntttnanncnnttcgcgtaatacgactactatagggcgaattggagctccccgcggtggcggccgaggtacgcgggatggaaaaatcacacttcacaagagatccatcccagcttaaaggtgtccttgttcgagcatcactgaaaaaaagcacaatgggatttggttttactattattggtggagatagacctgatgagttcctacaagtgaaaaatgtgctgaaagatggtcccgcagctcaggatgggaaaattgcaccaggcgatgttattgtagacatcaatggcaactgtgtcctcggtcacactcatgcagatgttgtccaagatgtttcaattggtacctgcccgggcggccgctctagaactagttggatcccccgggctgcagggaatttcgatatcaagcttatcgatacccgtcgacc

SEQ ID NO: 1026 - DNA, 425 bp, Homo sapiens
  misc_feature 3: n = A,T,C or G
tancactactatagggcgaattggagctccccgcggtggcggccgggggccattgagactgccatggaagacttgaaaggtcacgtagctgagacttctggagagaccattcaaggcttctggctcttgacaaagatagaccactggaacaatgagaaggagagaattctactggtcacagacaagactctcttgatctgcaaatacgacttcatcatgctgagttgtgtgcagctgcagcggattcctctgagcgctgtctatcgcatctgcctgggcaagttcaccttccctgggatgtccctggacaagagacaaggagaaggccttaggatctactgggggagtccggaggagcagtctcttctgtcccgctggaacccatggtccactgaagttccttatgctactttcactgagcatcc

SEQ ID NO: 1027 - DNA, 431 bp, Homo sapiens
  misc_feature 8, 363: n = A,T,C or G
ggggtgcngctatcactactatagggcgaattggagctccccgcggtggcggccgcccgggcaggtaccaagcagaggagttcactcttcttccctgttctgaatgcagccattttcaggtcaaagtcaaagaaacccttcagttcctgcacatgggtgagatcatagacggtgtagacatgagagctgaggttggaattcttacccggaatattgtgatccaaggagaagtggaggactcatgctacgcagaaaatcagtgccaattttttgattatgatacctttgggggacacattatgataatgaaaaattttacttcagtccatctttcttatgtggaattgaaacacatgggtcagnagcagatggggcgataccctgtttcattttcacctgtgtggggggaccttgggattataaagggaggg

SEQ ID NO: 1028 - DNA, 843 bp, Homo sapiens
  misc_feature 475, 476, 477, 478, 479, 480, 481, 482, 483, 484, 485, 486,487, 488, 489, 490, 491, 492, 493, 494, 495, 496, 497, 498,499, 500, 501, 502, 503, 504, 505, 506, 507, 508, 509, 510,511, 512, 513, 514, 515, 516, 517, 518, 519, 520, 521: n = A,T,C or G
  misc_feature 522, 523, 524, 525, 526, 527, 528, 529, 530, 531, 532, 533,534, 535, 536, 537, 538, 539, 540, 541, 542, 543, 544, 545,546, 547, 548, 549, 550, 551, 552, 553, 554, 555, 556, 557,558, 559, 560, 561, 562, 563, 564, 565, 566, 567, 568: n = A,T,C or G
  misc_feature 569, 570, 571, 572, 573, 574, 575, 576, 577, 578, 579, 580,581, 582, 583, 584, 585, 586, 587, 588, 589, 590, 591, 592,593, 594, 595, 596, 597, 598, 599, 600, 601, 602, 603, 604,605, 606, 607, 608, 609, 610, 611, 612, 613, 614, 615: n = A,T,C or G
  misc_feature 616, 617, 618, 619, 620, 621, 622, 623, 624, 625, 626, 627,628, 629, 630, 631, 632, 633, 634, 635, 636, 637, 638, 639,640, 641, 642, 643, 644, 645, 646, 647, 648, 649, 650, 651,652, 653, 654, 655, 656, 657, 658, 659, 660, 661, 663: n = A,T,C or G
  misc_feature 664, 665, 666, 667, 668, 669, 670, 671, 672, 673, 674, 675,676, 677, 678, 679, 680, 681, 682, 683, 684, 685, 686, 687,688, 689, 690, 691, 692, 693, 694, 695, 696, 697, 698, 699,700, 701, 702, 703, 704, 705, 706, 707, 708, 709, 710: n = A,T,C or G
  misc_feature 711, 712, 713, 714, 715, 716, 717, 718, 719, 720, 721, 722,723, 724, 725, 726, 727, 728, 729, 730, 731, 732, 733, 734,735, 736, 737, 738, 739, 740, 741, 742, 743, 744, 745, 746,747, 748, 749, 750-842: n = A,T,C or G
tactatagggcgaattggagctccccgcggtggcggccgaggtacaacaggcttgtagttctttgtgaaggatgcaggcaagagggatgtccagtttagacgggccctgacagcagcagcctcttccacatcaagtgaagtgtgattgttaacgatcattgcctgcacaaagtatagttgcctttgaagtagtccacccaatacttcaccatgacatagcggggcaggattggggtgttcacattttgctgataagatggtgtgttaaaatctaaagcttgaagaactggataaattaaagcttgtagtttgagcttattttttaggctggcatcttgagtaaactgttgtccaagggcagcagccagatttccaccagcactgtcaccagaaatgcaaattctgcctggatcaaccatatacttctgtaagacttctggcttcaggaaatactttgtggcccgtcctgcccggnnnnnnnnnnnnnnnnnnnnnnnnnnnnnnnnnnnnnnnnnnnnnnnnnnnnnnnnnnnnnnnnnnnnnnnnnnnnnnnnnnnnnnnnnnnnnnnnnnnnnnnnnnnnnnnnnnnnnnnnnnnnnnnnnnnnnnnnnnnnnnnnnnnnnnnnnnnnnnnnnnnnnnnnnnnnnnnnnnnnnnnnnnntnnnnnnnnnnnnnnnnnnnnnnnnnnnnnnnnnnnnnnnnnnnnnnnnnnnnnnnnnnnnnnnnnnnnnnnnnnnnnnnnnnnnnnnnnnnnnnnnnnnnnnnnnnnnnnnnnnnnnnnnnnnnnnnnnnnnnnnnnnnnnnnnnnnnnnnnnnnnnnnnnnnnnnnnnnnnnnnnnnnnc

SEQ ID NO: 1029 - DNA, 478 bp, Homo sapiens
  misc_feature 4, 30, 32, 397, 449, 456, 460, 475, 476: n = A,T,C or G
ttcncgctattctactatagggcgaattgntnctccccgcggtggcggccgaggtacgcgggggacaggccatctcgctataggaaaggaaagtggaacagcattcatcctcaacatttttacgaagacaaaatgaagactggagtagaagactgatcagtgcaggtgtagcataaaagtgtaatcctggaagatgtggtgtgagaagcatcatcagcatcatgctattacaatcccaaaccatgggggtttctcacagctttacaccaaagggcatcactatccctcaaagagagaaacctggacacatgtacctgcccgggcggccgctctagaactagtggatcccccgggctgcaggaattcgatatcaagcttatcgataccgtcgacctcnagggggggcccggtacccagcttttgttccctttagtgagggttaaattgcncgcttgngcgnaatcatgggtcatanntg

SEQ ID NO: 1030 - DNA, 437 bp, Homo sapiens
  misc_feature 61: n = A,T,C or G
tactatagggcgaattggagctccccgcggtggcggccgaggtacgcgggtcttttaaccngtaatttaatcttcacatcacttttacttagaccttgatgaatgctcccagtccccgaaaccatgcaactacatctgcaagaacactgaggggagttatcagtgttcatgtccgagggggtatgtcctgcaagaggatggaaagacatgcaaaggtgagtgaagagtctctgacaatcgtgaccctagtctgtatcttttctttcaaatttaaatattagattatcaggaattatgccatgtgcatcaccttcattaaaaggtcccatcctagtggccatgttattgctcataagaaaaactctaccaatatgctcattgcaggaagcagagaggattaaaacccaagttaaaaccagtttggcttcttattagaa

SEQ ID NO: 1031 - DNA, 459 bp, Homo sapiens
  misc_feature 54, 456: n = A,T,C or G
ggcgaattggagctccaccgcggtggcggccgaggtacgcgggtcttttaaccngtaatttaatcttcacatcacttttacttagaccttgatgaatgctcccagtccccgaaaccatgcaactacatctgcaagaacactgaggggagttatcagtgttcatgtccgagggggtatgtcctgcaagaggatggaaagacatgcaaaggtgagtgaagagtctctgacaatcgtgaccctagtctgtatcttttctttcaaatttaaatattagattatcaggaattatgccatgtgcatcaccttcattaaaaggtcccatcctagtggccatgttattgctcatagaaaaactctaccaatatgctcattgcaggaagcagagaggattaaaacccaagttaaaacagtttgctttcttatagaaaactgccataaattttaaaaaaattaaanata

SEQ ID NO: 1032 - DNA, 574 bp, Homo sapiens
  misc_feature 19, 207, 209, 215, 222, 236, 240, 249, 260, 262, 264, 269,283, 287, 306, 307, 317, 320, 324, 331, 334, 337, 364, 371,378, 380, 384, 387, 388, 411, 417, 429, 430, 434, 436, 439,472, 474, 484, 489, 497, 510, 513, 515, 516, 520, 529: n = A,T,C or G
  misc_feature 540, 555, 557, 558, 559, 560, 569, 572, 573, 574: n = A,T,C or G
ttatcactcctatagggcntattggagctccccgcggtggcggccgcccgggcaggtactgagtcaaggacgtctttaacgtcatggacggctcctaggacagccacagaaaaaaatggggtaaaggggtaggaagaaaaaaggaagggaaagagagccagggaattggggaaggagaggtaggggaaggggaaggggaaggtattncntttaangcctttntctgtaatctatantttnctttttttncttcttctttngntntttantaattaattctttncttnttttttctttacttatctnntatgttgttnttntttntttgttnttntantttctcttctttttatctttatttatntctttcntctttantntatnttnnattttaattttattttccctatnttattnttctttttttannattntnttntattctatttatatttcacttaattacttattntntttatattgnttttnttatgttnttgtttttccctntcntnntctngttcctttnttttttttttncttcatttttctatntnnnnttttctaanttnnn

SEQ ID NO: 1033 - DNA, 457 bp, Homo sapiens
  misc_feature 4, 304, 447, 453: n = A,T,C or G
ggcnaattggagctccccgcggtggcggccgaggtactagacggggctgtaatctagtaactgtatgtattttagttcttcagtccctgggaaggagacaggagaaggtgggagggaggaaggggccagctgaaatggaaacagatccctgatccggggcggtcagtggaaccctttcttggtgtgccgagagcctgtgtatttcagaggcagcaaaaaagtaaaaaaaaaaaaaaattgatctttgtttagattaacagacccctgactatgaagaaggaaggcatccataccagaaaccganaaatgtctagcaaatccaaaaagtgcaaaaaagtgcatgactcactggaggacttccccaagaacagctcgttttaacccggccgctctaagaactagtggatcccccgggctgcaggaattcgatatcaagcttatccgatnccgtcngacc

SEQ ID NO: 1034 - DNA, 686 bp, Homo sapiens
  misc_feature 2, 3, 8, 9, 12, 14, 16, 17, 20, 22, 23, 25, 27, 29, 31, 33,36, 37, 38, 43, 44, 45, 50, 53, 59, 63, 64, 65, 66, 83,85, 90, 93, 99, 106, 107, 192, 302, 303, 347, 368, 393,419, 470, 475, 496, 508, 543, 567, 571, 575, 580, 582, 587: n = A,T,C or G
  misc_feature 632, 639, 657, 665, 673: n = A,T,C or G
annatgannatntncnnagncnntnanangnancannncaatnnnaattnagntgaatntaannnnatattatataaatctantnacatnctncaaagncccgtcnngcattctcaaatcggcgaattgttctccaccgcggcggcggccgcccgggcaggtacttttcttgaactcagcattgctgccctnaaccctcccccagctgccttccctactttgggagcctctatttctagaacaggaaaacgctaggctaaatatatgtcctaatggtctcttccatcggtgtgaagggaaannaaaaatgggcccaatgttgttgcaaggaattaagggaaggtccntgccttgccacccagtggggnttaggaaatccatcttttaccgggnctccagtagtaagcctggttgaacangggttcccaggaccatcaagacaaattcctggttttccctggagggaggcntttgntgggggggctcaaatattggnggggaatgaatncttggggttcccttaggacaaaaagggaggccccncctaaaccttggaatggggggggnggtncacntgggngnattangccaagggggggggccccaatggggcttggaacctatttttttgnttccctngggggaatggttcaaggnccaagggnttaacccnttcggggccccgg

SEQ ID NO: 1035 - DNA, 811 bp, Homo sapiens
  misc_feature 2, 4, 6, 7, 8, 10, 12, 29, 30, 32, 36, 39, 41, 46, 48, 50,57, 58, 86, 88, 89, 93, 101, 108, 122, 128, 131, 145, 147,153, 157, 163, 249, 315, 369, 380, 381, 401, 409, 417, 439,443, 447, 451, 454, 455, 458, 473, 474, 481, 489, 492: n = A,T,C or G
  misc_feature 502, 507, 511, 515, 520, 522, 527, 532, 535, 536, 537, 545,552, 562, 566, 601, 617, 621, 629, 630, 664, 666, 683, 714,735, 740, 742, 751, 752, 763, 766, 767, 768, 789, 791, 803,810: n = A,T,C or G
antntnnnancnaattaactatcgtaatnntntatnatntntacantntnactattnntatatatctatgtttatttatttatcancnntcanaactttanctaaatntagatatgcgccgnccctantcnactcctatagggcnanttgganctcnaacttngtggcggccgctccgggcaggtacgcgggatacttgggttgaccctaaccaaggattgcaaattggatgctatcaaggtattctgnaatatggaaactggggaaacatgcataagtgccaatcctttgaatgttccacggaaacactggtgngacagatttctaagtgctgaagaaagaaaaacaacgtttttgggttttgggagnagtcccattgnnattgggtgggtttttttcangttttagncttaccgngccaaattccttgtaaactttnctgnaatncatngtnnctntggaattgttgctanncttgggncaattttnctnttcggaactntcctncttnccangctcngnagacnttttntcnnnaaggaaanccaattntaccaattanttcnaaccttggccaaaaaaaaaattatggtcaattttngcccattaaccaattngggnaattccannggggctccaaggttgggggaaaaaattggtttananaagaaaaaggggccacncttgggaaaggcctttggaattggggggggnttacaaaaaaatggtaaaagngggtngnaaaattttnnaacagggggcnttnnnaaagggggaaaaaatttatgncnaaaaaatttttnccacccnt

SEQ ID NO: 1036 - DNA, 744 bp, Homo sapiens
  misc_feature 2, 3, 4, 5, 6, 8, 10, 22, 25, 28, 30, 33, 37, 39, 41, 42,50, 54, 55, 62, 64, 67, 74, 75, 76, 79, 80, 87, 91, 104,118, 119, 123, 126, 128, 141, 361, 374, 403, 430, 441, 474,498, 502, 514, 529, 530, 541, 542, 562, 564, 592, 596, 607: n = A,T,C or G
  misc_feature 611, 617, 637, 662, 669, 681, 683, 688, 722, 728: n = A,T,C or G
cnnnnntntnaatatatattanccnacntnacnaatntntnnatcttatntttnnattctananaanacttatnnnatnnattaatnatantatcactccactnatttatctataaanntttnagncnttcggacggctanacactcactatagggcgaattggagctccaccgcggtggcggccgaggtacgcgggaagcacatatttggtagcctttgcatacaagaatgtgaaatttgttctcaagcacaaagtagcacagaagagggaggatgctgtttccaaagaagtgactcgaaaactttctgaagctgataatagaaaggatgtcctcggtaaggggagaaagattgaaaagnaatccttgttgtnaagaaagaaatgaaagttgcttgattatngaagctacaaacatttttccatctttnctataaacaancactcttgtttccctgggtccgatgggctcatntgattgctttccttctttcattanttgnaaggaacctttnaactcccacaagttnnaaacctaacannatttggttccattaaaggtngncttttcaattccaggggaaccttcaatncggnccccttccctngatnctaacnttggggccttccccaaaaanttaggtaactcaattggttcaagancttttcnaccccccccctngngcctnttttgattggtccttaattggggggttggggccnttggtngggataaatatttggg

SEQ ID NO: 1037 - DNA, 825 bp, Homo sapiens
  misc_feature 3, 7, 9, 10, 21, 22, 24, 28, 29, 31, 35, 36, 39, 40, 46,49, 50, 56, 61, 63, 64, 65, 68, 72, 73, 79, 86, 95, 99,102, 103, 111, 114, 126, 216, 364, 373, 423, 429, 433, 441,461, 485, 494, 497, 504, 508, 510, 523, 530, 536, 578, 593: n = A,T,C or G
  misc_feature 606, 608, 612, 613, 619, 621, 624, 640, 651, 678, 681, 691,699, 701, 703, 710, 719, 725, 726, 747, 760, 798, 801, 806,813, 825: n = A,T,C or G
ctntctnanntatcgaatctnngnattnnantaannaanntgtcantcnntttatnacttntnnnttntttnnactatntaattanttattaatntatntannaaaaatcnaantagctatgtgtngaccctatacgactcactatagggcgaattggagctccaccgcggtggcggccgaggtacagaggcgctgtcttggctcactgcaacctntccctaccagcttcaagtggccctctcatctcagcctcccaagtagattgggattacagacacgtgccattatgacacggctaatttttgtattttttgtagagaccggtggttttaatacatgttgacccaatgctgggttctgagnccacacatnatgcccggcccttgatagtccttattttctattcaaagtctttcttgggngtattngccntttttttntctttaattaaaaaaaaaanaaacttttccaaggttttggaagngtgccttcncanaaaaaanggtngnaaatttaccgaanaataagnttacantaattttttaaaaaaaattttttaattaatttcttaattaantggcaagggtaaaanaatttaattaaanangtgnnctttgntnttnggggaaaaggaaattntccctcggttnatttttgggccaaaaaaattaattttnttnccttggcctnaattaaantntnggttatnggggttggncctttnngtaaaaaatttttatttaccnccaattaatatanaaataaattaacccctttcttttttttgggaaccttanaanaaagnggaaccntttggttttttn

SEQ ID NO: 1038 - DNA, 399 bp, Homo sapiens
cgcgtaataccgactcactatagggcgaattggagctccaccgcggtggcggccgccggcaggtaccacacacacacaggcacacacaggcacacgcaggcacacacgcagacacacacacataaacacacagagttcactagtccgagttactgattttcttaggattctcaaagtgacaacaccggaaacaaggtaattcatgttaaaacacaagggttatatcagtaagagatgggatccccgaagtaaaccgtggaatttgaatcaagcttcgaagagctaaaaaaagaaattggagtttcaacattcaccttcttgaatccttaagaaatacagaagttcaaaatagaaaacattacagtttcaggatacaaaagtagaaacatctgagattaa

SEQ ID NO: 1039 - DNA, 408 bp, Homo sapiens
  misc_feature 5: n = A,T,C or G
gagcncgcgtaataccgactcactatagggcgaattggagctccaccgcggtggcgcgtggtcgcggccgaggtactttttttttttttttttttttgaaccaaaatcatagatttagagttggaagtgacctttgtgatcattatttcaatcctttcagagaattctctctgcaggaatatctatgtaggacttggatttgacccaagcacatacaatgtctcagagggctctctgctcctggccaagagcatcaggtcttgtttttaatataatcagtgttgtaaattatggcacagagaacaggctcattcagctgtggaatgaactgagttaaatggacttgtaaacatccctaaatgaaagaattaaaaagtcaaatgaggaattatatagccgtcccttggt

SEQ ID NO: 1040 - DNA, 414 bp, Homo sapiens
  misc_feature 234, 273, 296, 328: n = A,T,C or G
cgcgcgtaatacgactcactatagggcgaattggagctccaccgcggtggcggccgcccgggcaggtacttttttttttttttttttttttttcacaacaccactgtaagtctttgccattcccttgttcttaaaaacattgctgtttcttttaatgcatggaaattctaaatcatacagattgggaatttaaaatagtaaataggggaaataatttttttttttttttttganacagtcttgctctgtcacccaggctggagtgcagtggcncaatctcggctcactgtaacctntgcctcctgggttcaagtgattctcctgcctnagcctcccgagtagctgggattacaggcgtgtgccaccaggcctggctaatttttgtatttttagcaaagacagagtttcaccatg

SEQ ID NO: 1041 - DNA, 403 bp, Homo sapiens
  misc_feature 5, 98, 110, 275: n = A,T,C or G
gagcnccccgtaataccgactcactatagggcgaattggagctccaccgcggtggcggccgaggtactttttttttttttttttttttttttttttanaaattgcctcanacagggattgatgtcaggaggcttcaaggagagaaatatacatgaatgggagaccccaggttgcaggcaacaagagtcacaggtatgggagaaaccaggaagtctgtgccatgttaactttgctcatctcatcgtgctttgtacctgcccggacggccgctctanaactagtggatcccccgggctgcaggaattcgatatcaagcttatcgataccgtcgacctcgagggggggcccggtacccagcttttgttccctttagtgagggttaattgcgcgcttggcgtaatca

SEQ ID NO: 1042 - DNA, 447 bp, Homo sapiens
ttgtgtgccctaaacgactacttagggcgaattggagctccccgcggtggcggccgcccgggcaggtacgcgggcggtcccagatttggtgggactctcctctggtatcagttttcaacgccacttcttgtttggagtcattcccagtgcagtcatggactctatgaacaaatacggttatttaaatgtatttgtccagtatgagaatcagaatgaactagtagaggctttacagatcagttggtctgacccattttacagatgaggaaacaggcctgagaagatggagggagttacccacaatctgaaggggctctaccatgactagacccaggtcacctgcctcccaggcctggctctttccactccgaggtgctggctcaccacagacttattctttaatggaattttggaaaggcctcactccagtggactctttgggatctt

SEQ ID NO: 1043 - DNA, 436 bp, Homo sapiens
  misc_feature 2, 13, 431: n = A,T,C or G
tnccctatcactncttagggcaattggagctccccgcggtggcggccgcccgggcaggtacgcgggggttactaaggcagcagagtagaaagatgaagtgcaaggacctggaaatcagacacacctgggttcctggtaagcttcactgcttcctggtctctgatatcagctctgcccaaatttcagctgtcacagaatgagtgatcctcatagtataatggaaatgcatcatctcagtttccccatggcctgaatatccatacaaaatgagagcccggtagagaaaaacagaggacgtgaggagtttttaaaaattgaggaaaaagtgggaagggaaaaagtaagggatgaaaggtgaaaggatgaaagggaatatgttcaggagatgcctaggcacttggcatcccccacccacacaggtaccctcggcncgctc

SEQ ID NO: 1044 - DNA, 450 bp, Homo sapiens
  misc_feature 2, 3, 5, 22, 385, 446: n = A,T,C or G
tnngncacgtcatatacgactnctatagggcgaattggagctccccgcggtggcggccgcccgggcaggtacttagaaaaatggttatttctaagcctcagtgaaacgtgtccaatgaaagaaaagcctgaattaccaacatgggttagcatcactcacacgcaggcagagataacagcaagtgtcatttaagacttttctaaaacttcatgccttaaggagtaaagatccagttcatatagggttagcaactgccttcagcgaagaggaaaacagtaaataattaacaaaaagatcaagtcaggagataaggcctaagagagacaggactgaaaaggttagagggaggataggtgagggcttgggagaccttggaaaaaacagnagggagccggtggaagaattaaggtggggaggacaaaacgggcaccaccagggaaacaggnaaat

SEQ ID NO: 1045 - DNA, 447 bp, Homo sapiens
  misc_feature 2, 4, 5, 8: n = A,T,C or G
gnannggngggcgccatatacgactactatagggcgaattggagctccccgcggtggcggccgcccgggcaggtaccgcgggggagatgctgccacctaggttacttgtaggaccctatacggcaacctcctttgccaggaactatttataaacatcctgcaggaaaatgagtcaaggaagcttttcttttgagctatttacagcttttagcaattgagtaaagtatactcctgtgaacaaaatttggaacatatttgtttctctctaactgatttctccagaatttggaactaagttgtagctgagaccaatgatgctggacctccctcaaaagctgcattttctggaatttctggaagggcaaaactgtctgccctattatttgtaccctcggcccgctctaagaactaggtggggatcccccccggggcctgcagggaatttcc

SEQ ID NO: 1046 - DNA, 449 bp, Homo sapiens
  misc_feature 2, 3, 5, 6, 10, 11, 17, 378, 425: n = A,T,C or G
gnntnngggnncgtcanatcgactactatagggcgaattggagctccccgcggtggcggccgcccgggcaggacgaccagtgtgaatgaatggagcaaccaagaggttaggcagtaggagatgaggccagagaagaaagagggtgtggtagccccctaatgctggcacttacttccactggatctaaaatccagcacggaattatgctgaccacatcagcctaactaatattgatctaagtaacatttatgttctagcacctaaatcaggagcctgcaaaggatagcccactgccaaaatctggcccactctccagtttttgtaactaaaaatgttatcaggaacttcaagcccaaggtccatttcattttaccaaanctggtcttacgggtgggcaggagaccaattaccggctcacaaaaggncttaaaaatattttacctctctgg

SEQ ID NO: 1047 - DNA, 443 bp, Homo sapiens
  misc_feature 1, 3, 4, 14, 16, 23, 38, 333, 338, 342, 355, 358, 365, 369,378, 387, 411: n = A,T,C or G
nannggccccctcncnactactntcgggcgaattgganctccccgcggtggccggccgcccgggcaggtacctgtttaaaaaattctagagagaaaactatagagagtgtagtgtgtgattcagacatactaaccatcctcacatggactcactctctaaaaactccagacatagccagaaagaggcagaacagccacagcaggagagatcactgatgctcactgaggcagaggactttgtcataacctgtagaaaacattttcccaatgtctctttaccacattgggattataaattttctacattcttcttcttcttttactggggcattntatancaancttggaaatacanaanatatggngaanaattaatcnttaaaaatnttaaattttcacccatcccttgtncaggacaaaattaacattcatttatggaatcc

SEQ ID NO: 1048 - DNA, 502 bp, Homo sapiens
  misc_feature 2, 3, 4, 5, 8, 9, 21, 311, 349, 355, 361, 366, 375, 379,381, 405, 447, 458, 472, 479, 480, 493, 496, 502: n = A,T,C or G
gnnnnggnnccctatacactnctatagggcgaattggagctccccgcggtggccagctctgtctctcctcggagcaggattccatcttttccatggctggggcccttgacacatgtcactgtgcactgctcttttcgctgggatttccaaaagaccttggctcaggtgtcacttttgcagaaaagcatttactgactgttgacttggccaaatccctgtgctgtgtttcctagcacggtgagttgcattttcacatgaactcatgcctaccttctcttgttttataagcttcatgaggcaggtacctcggnccgctctagaactaagtgggatcccccgggctgcaggnaattcnatattnaagcntattgaatncccncnaaccttaaggggggggcccgggancccaaactttttgttccctttaaagggggggttaaattgccncccttgggggnaaaaaaaaaggggnaaaaaanntttttcctggggnggnaaaaan

SEQ ID NO: 1049 - DNA, 439 bp, Homo sapiens
  misc_feature 2, 6, 8: n = A,T,C or G
angcgncnaatacgactactatagggcgaattggagctccccgcggtggcggccgaggtacattttacaaaattaaagtcactttgtaggtatataaaaagttttaaaagttggtttattaatgagagtagtgtactacatttcttttcaagcagtagtttaaatattaaccagtttacttttttttaaagtcaatttacttttccagcctggacaacatggtgaaacctcgtatctacaaaaaatagaaaaattagctgggcgttggtggctcacgccggtagccgtgtttcttttggtggtgatacaaatggttctaaactgactgtggcactgggtttattacaacctctgtggactattacctaaaaaattcacctggaatttgtacctggccccggggccggcccgctctaggaactagtgggatcccccccgg

SEQ ID NO: 1050 - DNA, 445 bp, Homo sapiens
ttatgaccactatacactactatagggcgaattggagctccccgcggtggcggccgaggtacgcgggtttcctcaacatggctgcgcccttgtcagtggaggcggagttcgggtgagtcacagagctggggcgccgtggggatggattgaagtcgtcgggcccagaattcctttccttctgccgtggggcctgacacggccgctctagaactagtggatcccccgggctgcaggaattcgatatcaagcttatcgataccgtcgacctcgagggggggcccggtacccagcttttgttccctttagtgaaggggttaaattgccgccgcttgggccgtaatcaatggtcataggctgttttcctgtggtgaaaattgttatcccgcttcaaccaatttcccaccaccaacattaccgaagcccgggaagcataaaagtgttaaag

SEQ ID NO: 1051 - DNA, 460 bp, Homo sapiens
gccgggccgaatcgactcactatagggcgaattggagctccccgcggtggcggccgaggtacgcgggggaaaatgtcagagatgggaagaaacaagaactttgacatgcttggtgttcttgcccaagctttgaagaagtttacaaagtctatatgtcagaatacacatttcccaccttgcccaacagtagaaaaacataagaagagaaaaacattaaaaaatgacaaggaagttaatggaagtcagcaatgtgatggtgtttggaggtggagccttcagaaggtaattaatgcccttgtaagaagaggccagagagcttgcgcaccttcttcctgccatgtgaggagccaagaagccggctgtctgcaacctgcaagaggaccctcactagaagctagccatactggcatcctcatcttggctttccaactttccagaactgtgaagaagtatatgtttg

SEQ ID NO: 1052 - DNA, 458 bp, Homo sapiens
  misc_feature 11, 151, 153, 160, 162, 217, 224, 226, 240, 271, 290, 292,383, 392: n = A,T,C or G
agccggccgcnaatacgactactatagggcgaattggagctccccgcggtggcggccgaggtacttttttttttttttttttttttttgaaccaaaatcatagatttagagttggaagtgacctttgtgatcattatttcaatcctttcananaattctntntgcaggaatatctatgtaggacttggatttgacccaagcacatacaatgtctcanagggctntntgctcctggccaanagcatcaggtcttgtttttaatataatcagngttgtaaattatggcacananaacaggctcattcagctgtggaatgaactgagttaaatggacttgtaaacatccctaaatgaaagaattaaaaagtcaaatgagggaattntatagccgncccttggtatcctcaagggattgggttctagggacccctgggggataccaaaatcctagggatgct

SEQ ID NO: 1053 - DNA, 529 bp, Homo sapiens
  misc_feature 2, 3, 4, 5, 9, 14, 340, 345, 381, 398, 417, 433, 435, 471,472, 488, 493, 494, 499, 511, 513, 515, 519, 524, 528: n = A,T,C or G
gnnnngtgngacgnctatacgactactatagggcgaattggagctccccgcggtggcggccgcccgggcaggtacgcgggggcagtgggaagctcgcagcagctggggaggagccaaagcctcggcgctcacctaagccgcagggagatacacccaactgggagatgaggaaacagcaacccagagaggagaactaacccacacaggatcatttcgcgaaggagcaaggctgaagaaccagacctggactttcttaggacaaacttactgcagcttgaaggagccaaccatggatttgaggcgtgtgaaaggaatatttctcctggctctactattcaantaccnaaatcatttaaccttggttgggcttttttttaaaanccctgggggggccaatnttttttttttaaaaaccantttttttttaacccantntttgggtttttggggggggttaaaaccccggccccnnttgtttttttttttcnaaaannccaantttttccccgtngngntttnggganaaant

SEQ ID NO: 1054 - DNA, 563 bp, Homo sapiens
  misc_feature 2, 3, 4, 5, 8, 11, 12, 19, 241, 251, 255, 256, 271, 272,277, 282, 284, 293, 298, 320, 321, 324, 336, 343, 347, 364,373, 396, 398, 401, 416, 419, 424, 425, 443, 445, 459, 464,470, 485, 488, 491, 511, 520, 521, 522, 523, 538, 541: n = A,T,C or G
  misc_feature 543, 551, 552, 554, 563: n = A,T,C or G
gnnnnganccnnatcactnctatagggcgaattggagctccccgcggtggcggccgaggtactgtgagtattgcttatatgtccttatggggatgggtgccacaaatagaaaatatgaccagatcagggacttgaatgcacttttgctcatggtgaatatagatgaacagagaggaaaatgtatttaaaagaaatacgagaaaagaaaatgtgaaagttttacaagttagagggatggaanggtattgttnaatnnttgaatgccatggannggccnaaatngnttttttttnggccnccaaaaacccccccctttaaannttntttttggggacnttttggnaaanggtttttaaaagttttnatctttttnaaacccctttttttttttttccncnccnccaaaagggggggtnttnttttnnaaaaaaaaaaaaaaaaananggggggggcccccnccctntttttnggggggggggggggnggnagntttttttttttttaaaaaanttttttttnnnnccccccccccccccnccnantttttttnntnttttttttn

SEQ ID NO: 1055 - DNA, 463 bp, Homo sapiens
  misc_feature 2, 3, 4, 7, 8, 9, 16: n = A,T,C or G
gnnnagnnnggccgcnaatacgactactatagggcgaattggagctccaccgcggtggcggccgggttaaacgagctgttcttggggaagtcctccagtgagtcatgcacttttttgcactttttggatttgctagacatttttcggtttctggtctggatgccttccttcttcatagtcaggggtctgttaatctaaacaaagatcaattttttttttttttttttacttttttgctgcctctgaaatgcacaggctctcgcacaccaagaagggttccactgaccgccccggatcagggatctgtttccatttcagctggccccttcctccctcccaccttctcctgtctccttcccagggactgaagaactaaaatacatacagttaccagattacagccccgtctagtaccttcggccgctctagaactagtgggatcccccgggctggcagggaattc

SEQ ID NO: 1056 - DNA, 452 bp, Homo sapiens
  misc_feature 2, 3, 4, 5, 8, 9, 10, 11, 12, 371: n = A,T,C or G
gnnnnagnnnnnggcgcgctaatacgactactatagggcgaattggagctccaccgcggtggcggccgaggtacgcgggaaggagatgttgccacctaggttacttgtaggaccctatacggcaacctcctttgccaggaactatttataaacatcctgcaggaaaatgcagtgaagtagaagagacagggatatcccagaaggttatgcaaaacatcaagagaagatgagaggagtctatatgtcagaatacacatttcccaccttgcccaacagtagaaaaacataagaagagaaaaacattaaaaaatgacaagggaagttaatggaagtcagcaatgtgatggtgtttgggaggtggagccttcagnaagggtaattaatgcccttgtaaggaagaggccagagagccttgtggcacccttcttcctgcccatgtgagggagccaaag

SEQ ID NO: 1057 - DNA, 435 bp, Homo sapiens
  misc_feature 7, 17, 118, 325, 415, 435: n = A,T,C or G
ggccgcnaatacgactnctatagggcgaattggagctccaccgcggtggcggccgcccgggcaggtactttttttttttttttttttttttttttgggcagctaaaatctaggatggngttaagtttcttcattttgtcaattatatataaaaaattagaaacaacatgaatctgcatttcttggatgagatagttaataacaaactatttctcaatatttgtatactaaaaactagtgaaggtgttatgtgtttcagtatcttatctcttatttgaacatgggtttctgaaaggagcctatataataatataaatggtatgtantaaatgaggcactgtcttggctgggactgctataaaaaaattaccatagaccattggactaaaccacaaacatatacttttcaacagttntgggaaagttgggaaagccn

SEQ ID NO: 1058 - DNA, 422 bp, Homo sapiens
  misc_feature 6, 15: n = A,T,C or G
cccgcnatacgactnctatagggcgaattggagctccccgcggtggccggccgcccgggcaggtaccctgctgaaagattatttctaacaggcttgtagagaaacgtcggttcatgtaaattagaaattatggggccactttgccattcttcacacctgcaatgaacaggtgtttatctgcagttctgacttatctcttgaactccatttgcatgttatagtgggatgcagctgatgccctgtccagatcttcttcaggccactacatctatatatgcattcatattccagtggctgtgagtgttggctgttggttgacagaggagctgcatccttctggaggaaactgaactcagctgatgaaagccacctggtcctggaggtgaagcatcttccaaatggacagccttgcaattcaatga

SEQ ID NO: 1059 - DNA, 447 bp, Homo sapiens
  misc_feature 2, 3, 4, 5, 8, 9, 10, 11, 12, 30, 390: n = A,T,C or G
gnnnnagnnnnnggcgcgcgaatacgactnctatagggcgaattggagctccccgcggtggcggccgaggtactgcagccattgttgctccctttgcccttcagggtgtctttccccagcatctgtccctgcagcacccccaccccctcactctaattctgagcactcaaattgcccatcagtccaagccttctcctaatcacagccctcctacctctgagccccttcatggagccctgttcatggtgcttggcattttatgacaactaaaccaaaaagcagtgaggtttgaaaaaaaagagtcaaaagtcaatcctggcaggggaggatttgctctttgtcttaaaaaaccaagagtacctgcccggggcggccgctctaagaactagntgggatcccccgggctgcaggaattcgatatcaagcttatcgataccgtcgacctcg

SEQ ID NO: 1060 - DNA, 680 bp, Homo sapiens
  misc_feature 92, 106, 306, 311, 329, 334, 388, 421, 465, 466, 480, 481,483, 484, 487, 488, 489, 492, 494, 498, 503, 505, 506, 507,508, 509, 549, 562, 564, 576, 582, 586, 591, 596, 608, 614,615, 619, 621, 626, 627, 642, 644, 651, 654, 657, 660: n = A,T,C or G
  misc_feature 663, 666: n = A,T,C or G
gtaatacgactcactataggggccgaattggagctccacccgcggtggcggcccgcccgggcaggtaccgcgggagaaaaaagtgggagttnggtggaatccggtngttctttcctcacatttgggatgaattggtcataagggttttttaagcatggtttccctcccttttctttcacccctccccctttttttctttctaattaaatccaagaagaaaacctttcaaaaggtttaatgggggaatgggtccggggattcctcaccagggccttggaggaaaccttcggtttccaccctcccaangccanttttcatggaaaaaaaangcctngctttcctttatttaaattcaattaccaaaaaccttcttcaaccccatggaatngtggaaaagaaggtttttcaaccaaaaaattcntttttcaaaaaaataaaaaaaaaggttaaattggaacctttaannaaaaaccttggccnngnnttnnnatnantganaatanannnnncccaaaaaggttaccccttcggggccccggttttcttaangaataccctcttntngggggaccgccncccccngggnaaccntggcnagggggaaattncccccnnttgngngccannggcctttgaaaaatngnattgacnccnttncanaanccntttagttagggggg

SEQ ID NO: 1061 - DNA, 860 bp, Homo sapiens
  misc_feature 44, 126, 136, 152, 236, 278, 285, 305, 320, 599, 604, 611,661, 678, 681, 699, 718, 737, 748, 793, 804, 814, 820, 824,829, 836, 850: n = A,T,C or G
cgactcactatagggggccgaaattggggagcctccacccgcgngtgggccgggcccgccccgggggccaggggttacggccgggggccggcctcttggcaacaagcaagtcaaaaagcccaatcntctttccggncgggttggccgccaangggccgggggccatttcggccgccaccttcttaatggggcaatttggcttgggtttcttacccaaaccgttggaaccaggggtngaatccaaaggttttaaaagaaaaagccttgggaaccgttcncttcttnccaaaccgaaccccttgggntttaattgaaaccantgtttaaaaaaggttcaattcccttttttgccccacccgttggttggtttcctccgttggttccaaggaaaaggaaaaggaataaaaaaccaaccggccccaattccaattaaggtttggggaaaacccccggggaaggaaaaaaaagggggggggttaaaaaattaattggttgggggtcctttggtttttttttggaattccccccccttttggaattggggggaattcctttttcccaaaaccaatttccgggaattttgggcccctttttggttngtttnccccggnttttgggggaaaaaccccaaattttttttttttgggggccaatttccttnaattaagggaaaaaaanggnaaaaaaatttcccaaaanccttgggaattgggaaggncccccttttttcctttggnaaagaaaaaanggggaaattgggcctttcccccggccaaaaaacccccaagggggncccccgggggnaaaacccccnttgggngttnggggnccaaagnccccccgggggccnttaacccgct

SEQ ID NO: 1062 - DNA, 715 bp, Homo sapiens
  misc_feature 11, 14, 15, 19, 21, 27, 28, 31, 32, 39, 44, 48, 54, 56, 57,58, 61, 62, 63, 67, 68, 69, 72, 77, 78, 79, 80, 81, 82,83, 84, 86, 93, 96, 98, 99, 100, 103, 115, 117, 120, 121,300, 346, 350, 358, 372, 373, 387, 396, 399, 409, 427, 434: n = A,T,C or G
  misc_feature 472, 480, 497, 502, 513, 520, 523, 536, 549, 553, 557, 559,561, 562, 563, 582, 626, 628, 632, 649, 660, 664, 665, 666,670, 685, 691, 692, 703, 705, 710: n = A,T,C or G
ttgtataatantanngttngntttgtnngtnnttttatntcttntctnttcaantnnnttnnngatnnntanaattnnnnnnnntntataatnttncnnnttnttaggttgggtncntcnncgctactactcactatagggcgaattggagctccaccgcggtggcggccgcccgggcaggtacttgttgctttggtgtagtgaaatgaatgccttgatgaaattgcattgcaccatttttgaaagagagaatactcaaacgtgtcacttctgtttcttgcaagcaactgtgatcctganctgtgccacactttcttggttgggattatttctcggtttctacttncctngttctganagtatgttggccanngtgtagtagttganacatagtcntgnatgctccacncactctaggcaatcaacnagcaccncagtaatcttcaaacgtaatttttcccattggggtacncaccaagncattcttccaattcttnttggngacttggaatnctcacgnaanatagaaacccccnctttaccttggantagnttcncnannnagggccacccttttttttntttgaaaaaaggggccttccttggccttttttggaaccacttgnanaggnttaatttttttttaatnccttaatttcncctnnnaagngatccttccaagggntaccanncttgttattgntnttggngggaa

SEQ ID NO: 1063 - DNA, 829 bp, Homo sapiens
  misc_feature 2, 4, 5, 6, 8, 9, 10, 11, 12, 14, 18, 19, 22, 26, 28, 30,37, 40, 41, 42, 44, 47, 48, 51, 54, 55, 61, 65, 68, 72,75, 80, 81, 84, 86, 87, 89, 96, 97, 99, 100, 103, 107, 108,110, 114, 119, 262, 265, 290, 348, 373, 400, 413, 421, 429: n = A,T,C or G
  misc_feature 431, 436, 442, 471, 493, 500, 512, 514, 559, 584, 628, 635,659, 680, 687, 691, 700, 701, 710, 724, 757, 765, 769, 778: n = A,T,C or G
tncnnnannnnntnttgnngtntttncntntctttcncgnnntnttnnctntcnnatgttntatntanctgntanatttnnttntnnantgaattnnannttntttnntnaagntgggncggcgtaacgactcactatagggcgaattggagctccaccgcggtggcggccgaggtactttatttttttttttttttttttttggcagtgggagagttttttattcaatttgtgaaggacagttttaagaacaaaatgttantanacacctcttagaaaccactgggttngttcatttggaccatttttatctgccaccccaatttttttatttacaaaaaaaattcnaaaaaaaaaaggttaaaaaaatttncatttcccaaattaattttttggcaanggaggttattaanaccccacnttaagttntngcccnttaagnaaccaaaaaaaaggccttaaaattttttncttaaccaaaaaaaatttccanaaaaaanaccttttaaaantnggccaaggtttttttttaaattttaaaagaaaaggaaggttccanaaaaaatttttccttccttccaagnttttaaaaccttggggaatttattaaccaattaagggtgggggntaattanttaattccttttaaaaaaggccanggaaaaaaaaccccccccaanaaaaaanaaanccaaaaaannaacccagangggggaaaaaaaanaaaaggggaaaaaaaatttacccatttggtttncaaaaccnaggntcccaaggnttataaaaaattaattttttttggaaccccctgggaaccaagttttttttt

SEQ ID NO: 1064 - DNA, 447 bp, Homo sapiens
  misc_feature 430, 435: n = A,T,C or G
tatagggcgaattggagctccaccgcggtggcggccgaggtacgcggggacgctgggaggagatgctgccacctaggttacttgtaggaccctatacggcaacctcctttgccaggaactatttataaacatcctgcaggaaaatgagtctatatgtcagaatacacatttcccaccttgcccaacagtagaaaaacataagaagagaaaaacattaaaaaatgacaaggaagttaatggaagtcagcaatgtgatggtgtttggaggtggagccttcagaaggtaattaatgcccttgtaagaagaggccagagagcttgcgcaccttcttcctgccatgtgaggagccaagaagccggctgtctgcaacctgcaaagaaggacccttcacttagaagctagccttacctggcatcctaattctttggnttttncaaacttcccaa

SEQ ID NO: 1065 - DNA, 421 bp, Homo sapiens
  misc_feature 2, 3, 6, 8, 10, 11: n = A,T,C or G
gnnagncncnntcactacttagggcgaattggagctccccgcggtggcggccgaggtacgtggcgtagcattccatgttcagctttgacatttattttctcatatcaaccctttttacacgtgaaacacaatcccgctcttgaattcttaactgcatgatctgtgaaacctgtatttatattttcttcagtggtattctttgtcggtgtgtgtgtcctaaacaaaccaaaagaaaactttccaaatctaaagtattcattctccaattggagcaagaggagtcagttagatactatcacggcattcatttgtggctggcttgtcatatttacttatgattgataataaatctattttgctttttagagcctcccgagaagccatctgccttcgagcctgccattgaaatgcaaaagtctgt

SEQ ID NO: 1066 - DNA, 411 bp, Homo sapiens
  misc_feature 5: n = A,T,C or G
gagcnccccgtaataccgactcactatagggccgaattggagctccaccgcggtggcggccgaggtacgtggcgtagcattccatgttcagctttgacatttattttctcatatcaaccctttttacacgtgaaacacaatcccgctcttgaattcttaactgcatgatctgtgaaacctgtatttatattttcttcagtgtattcttgtcgtgtgtgtgtcctaaacaaaccaaaagaaaactttccaaatctaaagtattcattctccaattggagcaagaggagtcagttagatactatcacggcattcatttgtggctggcttgtcatatttacttatgattgataataaatctattttgctttttagagcctcccgagaagccatctgccttcgagcctgccattg

SEQ ID NO: 1067 - DNA, 412 bp, Homo sapiens
  misc_feature 5, 95, 119, 187, 210, 261, 350, 353: n = A,T,C or G
gagcnccccgtaataccgactcactatagggcgaattggagctccaccgcggtggcggccgaggtactttttttttttttttttttttttttttnacttgttaaagttctttttactgnggctgttataaaatttaaaattatatgtgtgacttgcatttcatttttattggccagggatgctccanaaggttgatgcctgaaactaganatccattacctttcctcctctctagggcttcaaattaggttttaatttaanaacacctttgctatatataatcaatacaaaaaactttacccacttattgtactttgccctgttgacactgacctcccattctccaccanaanaaataatcaaacccatcaccaacaaatcacccatccattattccccgcgtacctgcccg

SEQ ID NO: 1068 - DNA, 871 bp, Homo sapiens
  misc_feature 3, 5, 692, 751, 807, 844, 869: n = A,T,C or G
agntntcgactactatagggcgaattggagctccccgcggtggcggccgcccgggcaggtaccgcattcctacttcattgcccctgatgtaactggactcccaacaatacccgagagtagaaatcttacagaatattttgttgccgtggatgtgaacaacatgctgcagctgtatgccagtatgctgcatgaaaggcgcatcgtgattatctcgagcaaattaagcactttaactgcctgtatccatggatcagctgctcttctatacccaatgtattggcaacacatatacatcccagtgcttcctccacacctgctggactactgctgtgccccaatgccatacctgattggaatacactccagcctcatagagagagtgaaaaacaaatcattggaagatgttgttatgttaaatgttgatacaaacacattagaatcaccatttagtgacttgaacaacctaccaagtgatgtggtctcggccttgaaaaataaactgaagaagcagtctacagctacgggtgatggagtagctagggcctttcttagagcacaggctgctttgtttggatcctacagagatgcactgagatacaaacctggtgagcccatcactttctgtgaggagagttttgtaaagcaccgctcaagccgtgatgaaacagttcctggaaactgccattaacctncactttttaagcagtttatcgatggtcgactggcaaaactaaatgcaggaaggggtttnttgatgtatttgaagaagagatcacttcaggtggcttttggggagggaacccgagncatttaaccatgggggcatacagtcaagaaaggaggngccctggtcaacacagcaatggccnat

SEQ ID NO: 1069 - DNA, 876 bp, Homo sapiens
  misc_feature 4, 18, 26, 39, 56, 92, 100, 110, 120, 138, 154, 238, 255,300, 312, 345, 399, 677, 690, 707, 715, 746, 752, 755, 761,762, 764, 765, 766, 767, 770, 771, 772, 773, 774, 775, 777,797, 802, 810, 824, 836, 842, 844, 848, 856, 858, 865: n = A,T,C or G
  misc_feature 875: n = A,T,C or G
agcnttacgactcctatnggcgaatnggagctccccgcngtggcggccgacgtacngtgatcattactccccagcgcagctcaatccacttncagactgntctaattgtnggaataattntccttatgtaattcaatntcccatctattaattnatgagatatttatttaaaactgaccgtattccaggaactgggctaaacgaagaagagtagtgaattaatacagaaatcaccctngatttggcagaatattntccctggtagtgtaggtcacccctattgtggtgataatcccccanatcatacagcanaagaaacaacacacagacaaaaaccaagtcatncttctaggatgttttcatccaaggatttgaaaagatttaggtgatcttccattnttcatcctatgcaatctgggctatgctactactttacagattgaaaatatatttaaaaatcactgaactttcaatagtcaccaatgatcactgttctagttgcagttcaattaggtgttcaaggaaacacttataacttaaatttaatgtctaaatcttacacctttaattggaaaaataatgtaataagtgagcaattagattatctagtattagaaaaataactgaggattggctgggcatgggggcttatgtttggtatcccagcactttgggangcagaggcaaaanggattggtttaagtcangagttccnaaaacaacctgggcaaaaccggcaagaactncatctnttnaaaaannannnnaannnnnnanggtccttgccgggcgggccntttanaacttgtnggatcccccggctngaagaattccantttaancntatngataccgngnacctganggggggcccng

SEQ ID NO: 1070 - DNA, 886 bp, Homo sapiens
  misc_feature 694, 714, 721, 786, 799, 803, 815, 855, 861, 863: n = A,T,C or G
agctatcgactactatagggcgaattggagctccccgcggtggcggccgcccgggcaggtacctgtgaactgaggaattatagataaaccttaggtcaaatcatttcacaattgcattggtggtattgaaaaatgatgagatttctctgacagagagctttgtcctagtttttgtcttcataggtcaaaactggcaatattctcttgtctgcaagataaagtgtttgtgcttctatcaccatatgcatgaacatgtaagaatcagatacaatttctgcttcatcagtttcacatgttcatgttgtcactgaaaaaatgcatctactgtttatagctcccaaggagaccccaaatcctttttttttcttttgagatggagtcttgctcttgttgcccaggctggagagcagtagcgcgatctcagctcactgcaacccccacctcctgggttcaagtgattctcctgcctcagcctccccagtagctgggatttacaggtgcccgctaccatgcctggctaatttttgtatttttagtagagacaggctttcaccatgttggccaggctgatctcaaactcctgacctcaggtgatccacccacctcggcctccgaaagtgctgggattacaggaggtgagccacccgcgcctggcccccgtattcattttttatactggaaaacattttttttngaatttttctttgccaaagnaaatggnccttaaaaatggaatacttccaaagaaaaggaattatttttggcaaaattaaaagggacacggtncccttggccgttntaanaactaggggatncccccgggctggcaggaattcgatatcaaccttatcgatncccgcnanccttgaggggggggcccggtcct

SEQ ID NO: 1071 - DNA, 893 bp, Homo sapiens
  misc_feature 3, 5, 6, 7, 10, 28, 348, 429, 469, 517, 539, 573, 576, 583,593, 616, 645, 685, 718, 761, 769, 773, 791, 800, 821, 825,828, 836, 845, 850, 858, 860, 867, 879, 881, 884, 886, 889,893: n = A,T,C or G
tangnnnacnctcactatagggcgaatnggagctccccgcggtggcggccgcccgggcaggtactaacttatccccagaggaaacagggtttatgagcactgacagatgtcttccctgggcaaaaaaaaaaaaaatagtatatgtatacacacacacatacacatttatatttatatttcttaaagcttttaatccctttcattccctgatatctcagagatttcaaatcattgaacactgaagtatatttttcaggccagatgaaaaattgtattaaaaccctattcctggtcaggcgcagtggctcacgcctataatcccagcactttgggaggccgaagtaagcngatcacctgaggtcgggagttcaagacaaacctggccaacatggtgaaaccctgtctctactaaaactacaaaaaaattancctgatgtggtgttgtgtgcctgtagtcccagctacttangaggctgaggtaggagaattgcttgaacctgggaggcggaggttgcantgagccaaaattacgccactgnactccagcctggggcaacagaacgagacagtctnaanaacaacnacccccacanaaaccctattccttgcctttgtngggagtcaaaaaaaatgaacttctttttncttttttttattaatataccttaaggtctggggtaccttnggccgctcttagaactagtggatccccggctgnaggaattccatttcaagccttatcgattcccgcccaactttangggggggnccgntccccactttttttcccntttattgangggtaattgcccccctggcgnaaanatnggaatagntgtttcctntgggnaaatgttntncccttcnaattcccacaananacnanccnggan

SEQ ID NO: 1072 - DNA, 873 bp, Homo sapiens
  misc_feature 597, 634, 670, 682, 721, 727, 728, 729, 766, 806, 812, 828,829, 840, 841, 859: n = A,T,C or G
agctatcgactactatagggcgaattggagctcaccgcggtggcggccgaggtacgcggggcttgcctggagtctgatctgtcccggcccagtgtcctccaggaccctggcccctcatgcctccgtgcttgcgcgtgtgccatttcctctctccagaggacctttcctgctaggactcatgattgtcccctccctggcattttttacacctggagcagccagaggacgcatgcatggctcttcggaagccttctcctgccacggcatgcacccacacatgcgagcctcccgggtacctgcccgggcggccgctctagaactagtggatcccccgggctgcaggaattcgatatcaagcttatcgataccgtcgacctcgagggggggcccggtacccagcttttgttccctttagtgagggttaattgcgcgcttggcgtaatcatggtcatagctgtttcctgtgtgaaattgttatccgctcacaattccacacaacatacgaaccgggagcataaagtgtaaagcctggggtgcctaatgaagtgagctaactcacattaattgcgttgcgcttaactgcccgcttttcagtcnggaaacctgtccgtgccagctgcattaatgaatcggncaacccccgggagaggcggttgctatttgggcgctnttccgctttctngttactgactcgcttgcgcttcggcgttcggcttgcggnaacggnnntaacttacttcaaaggcggaaatacggtatccacaanaatcagggggataacgcaggaaagaacttgtgaccaaaanggccancaaaaggcccgaaacnnaaaaaaggccnngttgttggggtttttcanaggctcccccccct

SEQ ID NO: 1073 - DNA, 875 bp, Homo sapiens
  misc_feature 2, 6, 648, 746, 760, 766, 775, 778, 780, 786, 822, 847, 850,851, 859, 862, 873, 874: n = A,T,C or G
angctntacgactactatagggcgaattggagctccccgcggtggcggcccgaggtactgatctaaccaagatattttgtttttctcatccaccagtcactttctcagtcctttctgtatcccttgcaatttgaacaaagcttggtgaatagtgtgcacacaaaaagcacactaggtgaaagacaggtacataaaaagggtaaagtcatgatattttaacaaacctatcaagctctaaatataagcctccttggtagttttctctttaaccctctctccactgttggatgaaatttgctgcattcaattccagttcccaccccaacttccttcttaacacaaggtcagggttaagccttcggtgctttaatccagaggaaaattacttattttaaaaagcagtgaaaaacaccgcattcctttggcacaggatgaagaccagctcagctcttcagttgttgatcattgtctattgttctccaaacagtaaaccagtatttcacactgagattgtcggctgcgggtatattccaattccccgtctcctcatgaatatgaagtgaagggctctgaccctggaagtggtaggtaattgcttggcgataggtgattgtctcgccgctcagctataggcgatgggcttcaccncttcgggggataggcgattgtcccatctaggtcgccaaaatgtgtctggaaattggtgggttcttcgtctcactgacttcaagaatgaagccccgggnactccaagtgaggngtgcanttcttaaangcngnatggtnagagttggttccttctgagttcggatgtgttcacanattcttcttttgggggggtcggggnctnnttggttangantgaacctgggnnt

SEQ ID NO: 1074 - DNA, 895 bp, Homo sapiens
  misc_feature 3, 5, 11, 15, 578, 671, 759, 764, 787, 788, 789, 790, 792,793, 794, 795, 796, 797, 798, 799, 800, 801, 802, 803, 804,805, 806, 807, 808, 812, 823, 837, 858, 859, 861, 865, 872,874, 880, 885, 891: n = A,T,C or G
gancntagggncgcncgtaatacgactactatagggcgaattggagctccccgcggtggcggcccgcccgggcaggtacgcgggggagatgctgccacctaggttacttgtaggaccctatacggcaacctcctttgccaggaactatttataaacatcctgcaggaaaatgagtctatatgtcagaatacacatttccaccttgcccaacagtagaaaaacataagaagagaaaaacattaaaaaatgacaaggaagttaatggaagcaatgtgatggtgtttggaggtggagccttcagaaggtaattaatgcccttgtaagaagaggccagagagcttgcgcaccttcttcctgccatgtgaggagccaagaagccggctgtctgcaacctgcaagaggaccctcactagaagctagccatactggcatcctcatcttggctttccaacttcagaaccgtgagaagtatatgtttgtggtttaagtcaatggtctatggtaatttttttatagcaagtcccagcccaagacagtgcctcatttactacataccatttatattattatataggctnctttcagaaacccatgttcaaaataagagataagatcctggaaacccatacaccttcactagtttttagtatacaaatattgagaaaaagttngtattaactatctcatccaagaaatgcagattcatggtggttctaatttttatatataattgacaaaatgaagaaacttaacaccctnctaanaatttaactgcccaaaaaaaaannnnannnnnnnnnnnnnnnnnggtncttgggccgtntaaaaataatggantcccccgggctggaggaattnnantttnaagcttntngtaccngcaancttgangggg

SEQ ID NO: 1075 - DNA, 425 bp, Homo sapiens
  misc_feature 417: n = A,T,C or G
tagggcgaattggagctccccgcggtggcttggaaagccaagatgaggatgccagtatggctagcttctagtgagggtcctcttgcaggttgcagacagccggcttcttggctcctcacatggcaggaagaaggtgcgcaagctctctggcctcttcttacaagggcattaattaccttctgaaggctccacctccaaacaccatcacattgctgacattttcctgcaggatgtttataaatagttcctggcaaaggaggttgccgtatagggtcctacaagtaacctaggtggcagcatcccctcccagcgtcaggtctaagcacacaagttcttccttccatctacaaacccccgcgtacctcggccgctctagaactagttggatcccccgggcctgcaagggaatttcgatancaaggctt

SEQ ID NO: 1076 - DNA, 900 bp, Homo sapiens
  misc_feature 2, 198, 758, 760, 768, 855, 858, 859, 860, 861, 863, 864,865, 867, 868, 869, 870, 889, 892, 897: n = A,T,C or G
gngggtatcgactcactatagggcgaattggagctcccccgcggtggcggcccgaggacgcgggagacctgacgctgggaggagatgctgccacctaggttacttgtaggaccctatacggcaacctcctttgccaggaactatttataaacatcctgcgggaaaatgcagtgaagtagaagagacagggatatccanaaggttatgcaaaacatcaagagaagatgagaggagtctatatgtcagaatacacatttcccaccttgcccagcagtagaaaaacataagaagagaaaaacattaaaaaatgacaaggaagttaatggaagcaatgtgatggtgtttggaggtggagccttcagaaggtaattaatgcccttgtaagaagaggccagagagcttgcgcaccttcttcctgccatgtgaggagccaagaagccggctgtctgcaacctgcaagaggaccctcactagaagctagccatactggcatcctcatcttggctttccaacttccagaactgtgagaagtatatgtttgtggtttaagtcaatgggtctatggtaattttttttatagcagtcccagccaaagacagtgcctcatttactacataccatttatatttattatataggctcctttcagaaacccatgttcaaataagagatagatactgaaacacattacacccttcactagttttttagtatacaaatattgagaaaatagttggttatttaactatcttaatccnangaaatgcnggattcatggttggttctaattttttatttataaattgccaaaatgaagaaaccttaaccccttctagattttagcctgcccaaaanaannnntnnntnnnntggtccttgcccggcggcngtntaaantaa

SEQ ID NO: 1077 - DNA, 904 bp, Homo sapiens
  misc_feature 4, 5, 6, 7, 8, 9, 12, 621, 655, 665, 671, 688, 696, 735,749, 768, 770, 822, 823, 835, 838, 849, 862, 868, 876, 887,892, 900, 902: n = A,T,C or G
gagnnnnnngancgcgcgtaatacgactcactatagggcgaattggagctccaccgcggtggcggcccgaggtacattatcaagtgtgagatgtttgggatatacgcaagctgtgcctggaaatcatgacagtgcctctatgctgttgatgtaccagccatgccgtttcctgccctatatcctttcttaagggtaagtaatcttagtgcctggtgaagctaattttgtctcacgagcccaactgttaacctgaatccaatacctatgctgctggtgagacagagtgggtatgaaaaaacatataacctgaaaaatctacttatatatgctaaactaataaacctgagggatatgcagggggaaaaaatcaaattttaaggaaatctaacacagaaaataaattcacaatgaaataaaaacataaaattgtgcaagcaaaataaaaatactacacttaaacataaaatatacttgttaaaatatggtaactctttaccccacaattaaaaaagctttaatcaccagtctgatttctatttattttgcactgagattcttttctatgagaaatacatcacaggttgatttactttaaaagcaagcccatttagtggttgaaantaaaaaaaaaaaaaaaaaaagccagtacctgccnggcgggcggnttttanaactagtggatcccccnggctgcangaattcgatatcaagcttatcgatccgtccaacctcganggggggccccggtnccacttttggtccctttangngaggggtaaattgcgcccctggcgtaatcaatgggcataactgtttcctggnngaaaatggtttncgnttacaaattcncaaaaaataccanccgggngcataaanggttaaacccnggggngcccaaanangg

SEQ ID NO: 1078 - DNA, 891 bp, Homo sapiens
  misc_feature 11, 13, 517, 621, 828, 833, 834, 841, 842, 852, 863, 889: n = A,T,C or G
agccgtagacncncgtaatacgactactatagggcgaattggagctccccgcggtggcggccgaggtacgcggggttcatgctctctctctccatgcacaagaaagagcacacagtgagaaggaaagaggccctcaccagaacctgaccatgctggcaccgtgattgcagacttccagcctccaggattgtgagaagataaatatctgtggtttaagtcaccaagtctgtggtgtgttttatggcagcacaaggtaacccagatgatgcctttcaccactgggtggtccagcctttcatggaagctgtcagcttctcagccttgcaaaaaatgcttgctggtcactctctttggtcctttcagatgcctttcttagtggtgcctctaccaggcccttgacttcatccttttctgtcaagaggaagggtgagtaaagtacctgcccgggcggccgctctagaactagtggatcccccgggctgcaggaattcgatatcaagcttatcgatacccgtcnacctcgagggggggcccggtacccagcttttgttccctttagtgagggttaattgcgcccttggcgtaatcatggcatagctgtttctgtgtgaaattgttatncgctcacaaatttcacacaacatacgagccgggaacataaaagtggaaaagcctggggtgcctaatgagtgagctaactcacattaattgcgttgcgcttaactggccccttttcaagtcgggaaaacctgtcgtgccacttgcttaatgaatcggccaaccccccgggaaaagccggtttgcctttttgggcctttttcgcttctngcttnnttgaatnntggctttggncgttcggtggngggaacgggttaacttactcaaaggngg

SEQ ID NO: 1079 - DNA, 883 bp, Homo sapiens
  misc_feature 8, 9, 15, 75, 81, 112, 153, 219, 230, 320, 346, 378, 459,566, 595, 664, 666, 679, 742, 748, 755, 761, 775, 777, 783,787, 799, 814, 851, 868, 872, 873, 881: n = A,T,C or G
agccgtanncactcnttatacgactactatagggcgaattggagctccccgcggtggcggcccgcccgggcaggnactttntttttttttttttttttttttttttttaacngctgttcactgctacccatttagtcaacttggaccaccctntagaggggcttcaactgttattttcaatacattgtcacagggacagaggagggtgttagggaactntgtgactaaanagttttccataaatgggtggacctcagtttacaagcattaagttgttgggccaggagggggaacagatcatgattaggagagtggaaaanaaagatgacaaatcactttaagtcanacaaacctctttctgtacctcggccgctctanaactagtggatcccccgggctgcaggaattcgatatcaagcttatcgataccgcgacctcgagggggggcccggtacccancttttgttccctttagtgagggttaattgcgcgcttggcgtaatcatggtcatagctgtttcctgtgtgaaattgttatccgctcacaattccacacaacatacganccgggaacataaagtgtaaaacctggggngcctaatgagtgagctaactcacattaattgcgttgcgctcactgcccgcttttcaatcgggaaacctntngtgccacttgcantaatgaatcggcaaccccccgggagaagcggtttgcgtattgggcgcttttcccttcttgctnaattantcgttgnctcggncgttcggttggggnangcggtntaanttacttaaaagncggtaataccggttntcacaaaatagggggatacccaggaaaaaacttttanccaaaaggccccaaaanggcnngaaccctnat

SEQ ID NO: 1080 - DNA, 906 bp, Homo sapiens
  misc_feature 24, 639, 641, 657, 658, 713, 720, 788, 794, 838, 849, 854,867, 874, 882, 889, 890, 903, 905: n = A,T,C or G
gagcgcgtatacgactcactatanggcgaattggagctcccccgcggtggcggcccgcccgggcaggtacgcctactcaacccggctgttcaccattggtggcatcagcatcccatacacatggaaccacaccgttttctatgatcaggcacagggaagaatgcctttcttggttgaaacacttcatgcatcctctgtgaatctgactataaccagatagaagagacactgggttttaaaattcatgcttcaatatccaaaggagatcgcagtaatcagtgcccctccgggtttaccttagactcagttggacctttttgtgctgatgaggatgaatgtgcagcagggaatccctgctcccatagctgccacaatgccatggggacttactactgctcctgccctaaaggcctcaccatagctgcagatggaagaacttgtcaagatattgatgagtgtgctttgggtaggcatacctgccacgctggtcaggactgtgacaatacgattggatcttatcgctgtgtggtccgttgtggaaagtggctttcgaagaacctctgatgggctgagtttgtcaagatattaatgaatgtcaagaatccagcccctgtcaaccagcgcctgtttcaatgccantnggaaagtttccattgnnggatgtgaaccttgggtatcagcttaaaaggcagaaaatgcatggatgtgaaccnagtgtanacaaaatgtatgcagaccagaacagcacctgtaaggaaccacccggggtggctattaagtgcattggntctttntccaaatggaatgacccaaggcggaaaatggaaccctgtttgantttgatgaatntaaanatgggaccctcantgcaatntaaccganttgtgannatcaaaaaggcancnt

SEQ ID NO: 1081 - DNA, 494 bp, Homo sapiens
  misc_feature 2, 3, 4, 5, 6, 7, 14: n = A,T,C or G
gnnnnnnggttcgncgcgcgtaatacgactactatagggcgaattggagctccccgcggtggcggccgcccgggcaggtacacacaaagacaaacctgaacttaatttcaaggaaaacttaaacccatgcacaaataattggtgagccttcatttccctgacttcaagtttccatgtgaggactcatgctctctccactttcttcttgggaggagggaagatttacctaatgggtaaatttgggcaaagcacattgagtgtgcttgtttggctctgagtctctttgcaaacatgtgtctgcccacagtgacatgagtttgcgttgactgtcatgtctgcaggaagctgcctgctcctgtggccatgtcaagcaattctttctttcaactgcaactgtgtgtaagagcttagtctgagaagaaatgttcagaagctcactgtggctgcacatctgagccatgtcttcccattagttgtcatgagtcagcaataaa

SEQ ID NO: 1082 - DNA, 494 bp, Homo sapiens
  misc_feature 2, 3, 4, 5, 6, 9, 105, 150, 165, 190, 197, 204, 205, 248,266, 276, 280, 313, 330, 338, 352, 418, 433, 445, 454, 467: n = A,T,C or G
gnnnnnggngcgccgtatcactactatagggcgaattggagctccccgcggtggcggccgcccgggcaggtactttttttttttttttttttttttttcaggatnattaggaatcatttccaacaccaggacaaatatgcaaagtaaagngggtattgttatttntttgtccctagttcacatgatttanattgatnaaaatgnnaatttttacatatgtgaataaaacgtaaaggagcaaactgganattgctgccatgtgctancaatcattgngggngggtaaactgacaacatgtaactgcatattaanacaaatgtagaatttanacaaagtnttccatcttttttnagatgtatacttttaaacctcaggaactgttttcagtagatgtcatgccttttaacttgaaaaaanataagcgcaaataanctcccaattgtntccccaatntgtaaaccacatntggggctgctgtctctgctactccttt

SEQ ID NO: 1083 - DNA, 460 bp, Homo sapiens
  misc_feature 6, 21, 52, 167, 222, 230, 280, 328, 396, 404, 454: n = A,T,C or G
cgaatnggagctccccgcggnggcggccgaggtacgcgggggtaagatgganggaagaacttgtgtgcttagacctgacgctgggaggagatgctgccacctaggttacttgtaggaccctatacggcaacctcctttgccaggaactatttataaacatcctgcangaaaatgagtcaaggaagcttttcttttgagctatttacagcttttagcaattgngtaaagtntactcctgtgaacaaaatttggaacatatttggttctctctaactgattnctccagaatttggaactagttgtagctgagaccaatgatgctgacctncctcaaaagctgcatttctgaatttctgaaggcaaactgtctgcctatattgtacctgcccgggcggncgctctanaactagtggatcccccgggctgcaggaattcgatatcaagcttatcgatncccgtc

SEQ ID NO: 1084 - DNA, 479 bp, Homo sapiens
ccgatcactacttagggcgaattggagctccccgcggtggcggccgaggtacaccatccccaaggacacggaagtatttctcatcctgagcactgctctccgtgacccacactactttgaaaaaccagacgccttcaatcctgaccactttctggatgccaatggggcactgaaaaagaatgaagcttttatccccttctccttaggtaagctggacccacagtttctttcccagacaccagagggcaggtcctatcctcaacttgagaaaaaaaatgacaggtccttattaattgagcacttaatatattccaattgcttcacctgccttatccccttccatcttcactacaaccctgtaaggaggcttgagaaagaagatgacattcccaaaggcacatctgggcaagcaggaacttgggcaagtattttaacatctctaaacctcagtgaattcattttcttaaaaagaaaaaaat

SEQ ID NO: 1085 - DNA, 449 bp, Homo sapiens
tccccgcggtggcggccgctttctcttactgatagtaggatatttctgctttagttattgtcaccttaaatatattttcaatgttgaaatcctcacagcatgtttgatgaaatctagttttcaaattttcttaggtatatttctgtcacgttggcatgataacaaatgcaataacccaaaagaccccaaaagctagtgtaatcccttttgcaatccaagcatgaggattcatcttcatgttgacagtgcgtgaatgttcggtaggctttgtcaagcttgcatacaataaattatatatgtcccttttcttttagggtctcctgttgaagatggtcttctgaaggctaactgcggaatgaaagtttctattccaactaaagccttagaattgatggacatgcaaactttcaaagcagagcctcccgagaagccatctgccttcgagcctg

SEQ ID NO: 1086 - DNA, 475 bp, Homo sapiens
  misc_feature 2, 8, 9, 141, 303, 330, 386, 459, 468: n = A,T,C or G
gnaacgtnncatacttagggcgaattggagctccccgcggtggcggccgcccgggcaggtacacaactcactccttttaaagaaaaaaattgaaatgtaaggctgtgtaagatttgtttttaaactgtactcacattgganccactaggaatcctgagaaagaggagtggacatactcagaggagtataggccatttgactcggcattgggaaacctggagccacacctggtcattttctgtgagatcgatgatggcactccctgaagcctgatccaggtagcctttggtgtattcatcatangtgtacctcggccgctctagaactagnggatcccccgggctgcaggaatttcgatatcaagcttatcgatacccgtgcgaccncgagggggggcccggtacccagcttttgttccctttagtgagggtttaattgcgcgcttggcgtaatcatggncataagctngtttcct

SEQ ID NO: 1087 - DNA, 475 bp, Homo sapiens
  misc_feature 2, 3, 4, 7, 464: n = A,T,C or G
gnnncgnaacatacttagggcgaattggagctccccgcggtggccggccgcccgggcaggtacaatataggcacgacagtttgccttcagaaattcagaaatgcagcttttgagggaggtcagcatcattggtctcagctacaactagttccaaattctggagaaatcagttagagagaaacaaatatgttccaaattttgttcacaggagtatacttttactcaaatttgctaaaagcctgtaaatagctcaaaagaaaagcttccttgactcattttcctgcaggatgtttataaatagttcctggcaaaggaggttgcccgtatagggtcctacaagtaacctaggtggcagcatctcctcccagcgtcaggtctccccgcgtacctcggccgctctagaactagtggatcccccgggctgcaggaattcgatatcaagcttatccgataccgtcgacctngagggggggcc

SEQ ID NO: 1088 - DNA, 491 bp, Homo sapiens
  misc_feature 3: n = A,T,C or G
gcnatcactacttagggcgaattggagctccccgcggtggccggccgcccgggcaggtacaatataggcagacagtttgccttcagaaattcagaaatgcagcttttgagggaggtcagcatcattggtctcagctacaactagttccaaattctggagaaatcagttagagagaaacaaatatgttccaaattttgttcacaggagtatactttactcaattgctaaaagctgtaaatagctcaaaagaaaagcttccttgactcattttcctgcaggatgtttataaatagttcctggcaaaggaggttgccgtatagggtcctacaagtaacctaggtggcagcatctcctcccagcgtcaggtctccccgcgtacctcggccgctctagaactagtggatcccccgggctgcaggaattcgatatcaagcttatcgatacccgtcgacctcgagggggggcccggtacccagcttttgtttcccttt

SEQ ID NO: 1089 - DNA, 465 bp, Homo sapiens
  misc_feature 1, 3, 8: n = A,T,C or G
ngngcccnaacactactatagggcgaattggagctccccgcggtggcggccgaggtacagaggtgatagatcccttcttggtagtggtaattctttcctgcatagtacgcgggggctgtagtggcttcgtcttcggtttttctcttccttcgctaacgcctcccggctctcgtcagcctcccgccggccgctctagaactaagtggatccccccggcctgcaggaattcgatatcaagcttatcgataccgtcgacctcgagggggggcccggtacccagcttttgttccctttagtgagggttaattgcgcgcttggcgtaatcatggtcatagctgtttcctgtgtgaaattgttatccgctcacaattccacacaacatacgagccgggagcataaagtgtaaagcctggggtgcctaatgagtgagctaactcacattaattgcgttgcgctcactgcccg

SEQ ID NO: 1090 - DNA, 500 bp, Homo sapiens
  misc_feature 2, 3, 4, 8, 9, 10, 36, 354, 472, 487: n = A,T,C or G
gnnnagcnnncactacttagggcgaattggagctcnccgcggtggcggccgaggtacagaggtgatagatcccttcttggtagtggtaattctttcctgcatagtacgcgggggctgtagtggcttcgtcttcggtttttctcttccttcgctaacgcctcccggctctcgtcagcctcccgccggccgctctagaactagtggatcccccgggctgcaggaattcgatatcaagcttatcgataccgtccgacctcgagggggggcccggtacccagcttttgttccctttagtgagggttaattgcgcgcttggcgtaatcatggtcatagctgtttcctgtgtgaaattgntatccgctcacaattccacacaacatacgagccgggagcataaagtgtaaagcctggggtgcctaatgagtgagctaactcacattaattgcgttgggctcactgcccgctttccagntcgggaaacctgtcntgccagctgcatt

SEQ ID NO: 1091 - DNA, 518 bp, Homo sapiens
  misc_feature 2, 3, 6, 7, 34, 87, 199, 233, 242, 254, 270, 289, 313, 336,354, 364, 372, 387, 408, 429, 445, 463, 488, 492, 516: n = A,T,C or G
gnnatnnacactacttagggcgaattggagctcnccgcggtggcggccgcccgggcaggtactttttttttttttttttttttttgntttcaaaacccgcttatttcacgcgaggactcctctgcgaagacaggaaggatggggtcccacacctgagccaggcgcggtctccactgggtgctccgcagcccggagtggntccggacgacagccccgcttaacggaacctttcncccaggctngggtggaccttntccgcttgttttcctnagggcgcaagtcaggtttntttgacacacaccaaccgaagttnaagcgcgtgtccccgcgtacctnggccgctctagaactagnggatcccccnggctgcangaattcgatatcaancttatcgataccgtcgacctngagggggggcccggtacccancttttggtccctttantgagggttaattgcggcncttggcgtaatcaaggtcataagcntgtnttcctgggtgaaattgtatattcnct

SEQ ID NO: 1092 - DNA, 503 bp, Homo sapiens
  misc_feature 2, 3, 11, 18, 61, 69, 74, 155, 157, 160, 173, 196, 232, 254,270, 302, 323, 331, 332, 334, 347, 396, 466, 472, 480: n = A,T,C or G
gnngggccctntcgactnctatagggcgaattggagctccccgcggtggcggccgcccggncaggtacnatgtntagtgatgagtttgctaatacaatgccagtcaggccacctacggtgaaaagaaagatgaatcctagggctcagagcactgnancanatcatttcacccncgtacagtttaggggatcctttntaatgacaggaaggcactgctttcctcaacactgtnatctgacctgtgacaagtctgnacctcggccgctctanaactagtggatcccccgggctgcaggaattcnatatcaagcttatcgataccntccacctnnanggggggcccggtncccatcttttgttccctttagtgagggtaaattgcgcgcttggcgtaancatggttcatagctgtgtcctgtgtgaaattgttaatccgctcacaattccacacaacatactgagcccnggagcntaaagtgnaaagcctggggtgcctaatgaag

SEQ ID NO: 1093 - DNA, 766 bp, Homo sapiens
  misc_feature 2, 4, 6, 7, 8, 10, 11, 12, 15, 16, 17, 18, 19, 20, 21, 39,45, 46, 51, 52, 55, 56, 57, 61, 62, 63, 66, 68, 71, 74,77, 78, 88, 91, 94, 95, 100, 103, 111, 293, 315, 329, 330,342, 351, 381, 391, 408, 432, 442, 450, 451, 459, 469, 472: n = A,T,C or G
  misc_feature 476, 478, 501, 516, 530, 534, 543, 579, 594, 601, 613, 614,616, 629, 635, 645, 652, 655, 657, 666, 673, 675, 677, 679,718, 731, 735, 736, 744, 749, 759: n = A,T,C or G
cncnannncnnnttnnnnnnnatatattatccatttttntatttnntagcnnttnnnattnnnctntnttnttntanntttttttttnttnttnntcgtnccnaacgatcntatagggcgaattggagctccaccgcggtggcggccgtcgcactcatttacccggggacagggagaggctcttctgcgtgtagtggttgtgcagagcctcatgcatcacggagcatgagaagacgttcccctgctgccacctgctcttgtccacggtgagcttgctatagaggaagaagganccgtcgggaagtcccagccacngggaagggccgttnnttctttgtaagnttggtttcntccccggcctggccctacccccgcgtaacnctccgggccngctcttaagaaacctangttggggatccccccccggggacntgctaagggnaaatttcnnaatatcanagcctttatncgnattncncgttctgtactcttcgaaggggnggggggccccccggnttaacccccaagcntttntttggtttncccccttttttaaggttggaagaggggttttaaaantttgggccggcccgnccttatnggggccggttannanttccaattggggnttccanttaaagggcnttggtcnttntnccccttggntgggttngnananaaattttgggttttaattccccggcctttcaaccaaaanttttcccccagcnaacnnataaccantttanccggtaaagnccccggg

SEQ ID NO: 1094 - DNA, 471 bp, Homo sapiens
  misc_feature 2, 6, 8: n = A,T,C or G
gngcgnancactacttagggcgaattggagctccccgcggtggcggccgaggtacgcgggggtttgtagatggaaggaagaacttgtgtgcttagacctgacgctgggaggagatgctgccacctaggttacttgtaggaccctatacggcaacctcctttgccaggaactatttataaacatcctgcaggaaaatgcagtgaaagtagaaagaagacaggggatatcccagaaggttatgcaaaacatcaagagaagatgagaggagtctatatgtcagaatacacatttcccaccttgcccaacagtagaaaaacataagaagagaaaaacattaaaaaatgacaaggaagttaatggaagtcagcaatgtgatggtgtttggaggtggagccttcagaaaggtaattaatgcccttgtaagaagaggccagagagcttgcgcaccttcttcctgccatgtgaggagcc

SEQ ID NO: 1095 - DNA, 454 bp, Homo sapiens
  misc_feature 21, 239, 329, 449: n = A,T,C or G
ctactatagggcgaattgganctccccgcggtggcggccgcccgggcaggacgcggggtttgtagatggaaggaagaacttgtgtgcttagacctgacgctgggaggagatgctgccacctaggttacttgtaggaccctatacggcaacctcctttgccaggaactatttataaacatcctgcaggaaaatgaagtctatatgtcagaatacacatttcccaccttgcccaacagttngaaaaacataagaagagaaaaacattaaaaaatgacaaggaagttaatggaagtcaccaatgtgatggtgtttggaggtggagccttcanaaggtaattaatgcccttgtaagaagaggccagagagcttgcgcaccttcttcctgccatgtgaggagccaagaagccggcttgtctgcaacctgcaagaggaccctcactagaagctanccata

SEQ ID NO: 1096 - DNA, 473 bp, Homo sapiens
  misc_feature 2, 3, 7: n = A,T,C or G
gnngcgnatcatacttagggcgaattggagctccccgcggtggcggccgggggccattgagactgccatggaagacttgaaaggtcacgtagctgagacttctggagagaccattcaaggcttctggctcttgacaaagatagaccactggaacaatgagaaggagagaattctactggtcacagacaagactctcttgatctggaaaatacgacttcatcatgctgagttgtgtgcagctgcagcggattcctctgagcgctgtctatcgcatctgcctgggcaagttcaccttccctgggatgtccctggacaagagacaaggagaaggccttaggatctactggggggagtccggagggagcagtctcttctgtcccgctggaacccatggtccacttgaagttccttatgctactttcactgagcatcctatgaaatacaccagtgagaaattccttgaaatttgcaag

SEQ ID NO: 1097 - DNA, 530 bp, Homo sapiens
  misc_feature 2, 7, 219, 225, 330, 331, 333, 337, 340, 346, 349, 363, 371,379, 391, 402, 405, 408, 413, 422, 434, 439, 440, 443, 445,449, 450, 453, 461, 462, 464, 471, 474, 480, 485, 486, 488,490, 493, 500, 501, 512, 515, 519, 526, 529, 530: n = A,T,C or G
gntgagnatcatactatagggcgaattggagctccccgcggtggcggccgaggtacttttataaatacgccagagattgagtcgaggctctgaagaaagtccaccatgtgaaattctttccggtgacattatccagtttggagtagacgtgacagagaatacacggaaagttacccatgggtgtattgtttccacaataaaactttttctacccagatnggtatnggaagcccggctccgctcagatgtcatccatgcaccattaccaagtcctgttgacaaagttgctgctaacactccaagtatgtacctgcccggggcggccgcccnngntcangtnctccangcnacctatttttattnactttatnttctccanggtagagaatantggcttgcgtnccnttnttatngtattccantaaacaataccnttgcnnaangnttcnngtncttttttnnanttggganaantaaccntgttnncngnaanctttttnncgttatttggnaanttgntaaaatntann

SEQ ID NO: 1098 - DNA, 483 bp, Homo sapiens
  misc_feature 2, 6, 405: n = A,T,C or G
gngcgncgctatacactactatagggcgaattggagctccccgcggtggccggccgcccgggcaggtacacacaaagacaaacctgaacttaatttcaaggaaaacttaaacccatgcacaaataattggtgagccttcatttccctgacttcaagtttccatgtgaggactcatgctctctccactttcttcttgggaggagggaagaattaccctaatggggtaaaattttgggcaaagcacattgagtgtgcttgtttggctctgaagtctctttgcaaacatgtgtctgcccacagtgacatgagtttgcgttgactgtcatgtctgcaggaagctgcctgctcctgtggccatgtcaagcaattcttttctttcaactgcaactgtgtgtaagagcttantctgagaagaaatgttcagaagctcacttgtgggctgcacatctgagccatgtctttcccattaagttgtcaatgagt

SEQ ID NO: 1099 - DNA, 480 bp, Homo sapiens
  misc_feature 2, 3, 5, 7, 12: n = A,T,C or G
gnngngncctancactactatagggcgaattggagctccccgcggtggcggccgggggccattgagactgccatggaagacttgaaaggtcacgtagctgagacttctggagagaccattcaaggcttctggctcttgacaaagatagaccactggaacaatgagaaggagagaattctactggtcacagacaagactctcttgatctgcaaatacgacttcatcatgctgaagttggtgtgcaagcttgcagcggattcctctgagccgctgtctatcgcatctgcctggggcaagttcaccttccctgggatgtccctggacaagagacaaggagaaggccttaggatctactgggggagtccggaggagcagtctcttctgtcccgctggaacccatggtccactgaagttccttatgctactttcactgagcatcctatgaaatacaccagtgagaaattccttgaaatttgcaag

SEQ ID NO: 1100 - DNA, 540 bp, Homo sapiens
  misc_feature 2, 3, 6, 8, 11, 12, 36, 282, 297, 299, 306, 307, 326, 328,329, 332, 333, 335, 341, 349, 402, 408, 419, 420, 421, 424,425, 427, 433, 436, 440, 441, 447, 448, 462, 463, 466, 469,470, 474, 488, 495, 496, 501, 504, 506, 511, 517, 524: n = A,T,C or G
  misc_feature 525, 531, 532, 537: n = A,T,C or G
gnntangncgnncatcttagggcgaattggagctcnccgcggtggcggccgcccgggcaggtacgcggggagaggtcttttgaactccttcggccaccgtcgccgcgttctcgctgtgcactcttattctgcgcctgcgcgcggctacagcacggttcgtttttcctttagtcaggaaggacgttggtgttgagcataccgtatcaaggacaagtaactaccatggctcccgaagttttgccaaaacctcggatgcgtggccttctggccaggctgtctgcnaaatcatatggctgnancattcgnnctatccctggggggtttgnannctnngnataaantatcgtgnggctgatcaaagaaaaggaaggcataccgccaaatttctacaggaaactaccnatgtcnttgaaaaaaannnttnnangtatanttnaaannaacctnnagggggattttttnntcncannaagnagaaagccaaaatnttttggnnaaatntananaaaanattttnttggggnncgtttnnaaaantta

SEQ ID NO: 1101 - DNA, 466 bp, Homo sapiens
  misc_feature 113, 344, 452: n = A,T,C or G
ggcgaattggagctccccgcggtggcggccgcccgggcaggtacaaaacaagcaaagtctcccataactgaaacagaggattctgttttagaaaaaggcccagctgagcttangagcagagaaggaaaagaagaaaatagagagctttgtgcatcttctacgatgcctgcaatttcagagcttgcatcattgcttatgggaaggaatcttcagattgaagaaattaaacctttctctcccaagatcatcagcctagagtcgaaagaaccacctgcctctgtagctgaaggaggcaacccagcaagaatttcagccatttactttttctttaaaaggattatcanaggaggttagccatccagcccgactttaaaaagggaggaaatcaagaaataggcccattaccaccaactggaaatttgaaggcacaagtcatggggagatatttttanaataagctaagtga

SEQ ID NO: 1102 - DNA, 490 bp, Homo sapiens
  misc_feature 1, 7: n = A,T,C or G
ngggggnccgtatcactactatagggcgaattggagctccccgcggtggcggccgaggtacgcggggacagcgatgtgagctgaggtgcaggcaccagacctaggaattcctagaaaaatagtcaggaagcatttagacacatcaaatgttaaacgagtcctgattatgatgataatgatgatgattttggtggttgcaatagcaaagccttaagtatgaaggagacgtgccagctggaaatacaggtagacaatgaacaactgaatttagaggacgaagacattgaaagcattgatgccaccaaattgagccgtttcattgagatcaacagcctccacatggtgacagagtacctgcccgggcggccgctctagaactagtggatcccccgggctgcaggaattcgatatcaagcttatcgataccgtcgacctcgagggggggcccggtacccagcttttgttccctttagtgagggttaattgcgcg

SEQ ID NO: 1103 - DNA, 500 bp, Homo sapiens
  misc_feature 1, 5, 18, 40, 73, 79, 442: n = A,T,C or G
ngggnggccgtaacactnctatagggcgaattggagctcnccgcggtggcggccgagggacccgggggcttgncccctnatgcctccgtgcttgcgcgtgtgccatttcctctctccagaggacctttcctgcctaggactcatcattgtcccctccctggcattttttacacctggagcagtcagaggacgcatgcatggctcttcggaagccttctcctgccacggcatgcacccacacatgcgagcctcccgggtacctgcccgggcggccgctctagaactagtggatcccccgggctgcaggaattcgatatcaagcttatcgataccgtcgacctcgagggggggcccggtacccagcttttgttccctttagtgagggttaaattgcgcgcttggcgtaatcatggtcataagctgtttcctgtgtgaaaattgntatccgcttcacaattccacacaaacatacgaagccggggagcataaaagtgtaaaag

SEQ ID NO: 1104 - DNA, 499 bp, Homo sapiens
  misc_feature 3: n = A,T,C or G
gtncgggggccgcgtatacactactatagggcgaattggagctccaccgcggtggcggccgaggtacaggcatgagccactgcgcctggccccatgtttggttattattagtgcttaggaagaggcacttgcttacatagtaggagttgagaagcttggtttgttctttcctacccctagatctattctcacctcctgaccatgctctttctgccacatctattatcattacaagttgccttatctgaaattagtgaatcagaaaataaagcaggggatactttgtgtagtttcaacgttagggaaagttcagaatactgtctgtctaaactatctctctagaaggcctgatgggccacaacctgggccagaagcattcagttcagatatgagaatggtggggtgtaaggggcaatggccaatgggccatggccggaaggaaattgttacagagtagtgggaagcctgcaaagactggcttctgtccgtttttgccttg

SEQ ID NO: 1105 - DNA, 493 bp, Homo sapiens
  misc_feature 2, 8: n = A,T,C or G
gnagcgcnatcactactatagggcgaattggagctccccgcggtggcggccgggggccattgagactgccatggaagacttgaaaggtcacgtagctgagacttctggagagaccattcaaggcttctggctcttgacaaagatagaccactggaacaatgagaaggagagaattctactggtcacagacaagactctcttgatctgcaaatacgacttcatcatgctgagttgtgtgcagctgcagcggattcctctgagcgctgtctatcgcatctgcctgggcaagttcaccttccctgggatgtccctggacaagagacaaggagagggccttaggatctactggggggagtcccggagggagcagtctcttctgtcccgctggaacccatggtccctggaagttccttatgctactttcactgagcatcctatgaaatacaccagtgagaaattccttgaaatttgcaagttgtctgggttcatgtct

SEQ ID NO: 1106 - DNA, 492 bp, Homo sapiens
  misc_feature 2, 21, 30, 395: n = A,T,C or G
gnagtgcgccctaatcgactncttagggcntattggagctccccgcggtggcggccgcccgggcaggtacgcgggattgacatcccacactacctgatttgatacactaagaagggcttatcatttctgtggtactcttggccaacaatgcacgtgtaacatttattcattgaaacacattaggcagaattgcaggacattcttcaaaatagctgtcccaatactcttcaaaagtgtcaggtcctggaagacaaagagatactgaggaaccatcacagagtgggagaggacatagagtgataaaaactaactgtgatgtggaatcctacattggatcatggaccagaaagacagcactgatgggaagactgatgaaatctgaataagtctgtagntttggtttaaagaagaagaataataacaataatggtttagctgctggctccttaataaaattcccctagttactgtaatgtctgaaaatgaaccccc

SEQ ID NO: 1107 - DNA, 495 bp, Homo sapiens
  misc_feature 2, 5, 23, 33, 34, 97, 123, 200: n = A,T,C or G
gnagngagcccttaatacgactnctatagggcnnattggagctccccgcggtggcggccgaggtacttttttttttttttttttttttgagcctcanttgaactattcattcttgtcttccanaactcacttcaaatgggttttccatctatcatgagtctagtgttctcacctttgtcttacaattaattcttctgcanatcccctcacactgatctcctccccctgagctttggacaattatattctctcatctctttcacataaatcgcacttggaagacaaactcctcaggttaagctgccatctggtgtgtgtatttttcatcaagaactagcaacacccacatcaatagcatccacctttaccatcacctatataagcaacttactttgggaacctatttccttatttcagcattctcatttgaatcaatctagcctaggttagggacactggaaccaaactttgggctgtccctggactggcctgggg

SEQ ID NO: 1108 - DNA, 464 bp, Homo sapiens
  misc_feature 2, 3, 7, 13, 106, 150, 157, 159, 170, 195, 223, 257, 261,270, 300, 338, 372, 382, 387, 390, 410, 447, 456: n = A,T,C or G
gnnaggntttganggcgttgaatacgactactatagggtgaattggagctccccgcggtggcggccgaggtacttttttttttttttttttttttttttttttcgncaattcaaagtaaaccaaatcatcacatcaagaaaatacattgngcaactntnatgtccccttntgacaaaaaaggcacatagccaggngtatgttccctggaagcttaaaatctanttggggacaatcaggcaagagcacaaacggcctnttgnttgggctgnggcaaaaagctggattttatcctaattgcnacaggatgacatcaggagagcaacatgatctcataganattcttttaaatatatgaatttttaactttaaanacagggtctnactgngtnacccaggctggagaagcagnggtaagatcatagttcactgcagctttgaccttttangctgaagcnatcctcct

SEQ ID NO: 1109 - DNA, 464 bp, Homo sapiens
  misc_feature 2, 6, 12, 13, 14, 29: n = A,T,C or G
gnagtntttgannncgctctatacgactnctatagggcgaattggagctccccgcggtggcggccgcccgggcaggtacgcgggggcagtgggaagctcgcagcagctggggaggagccaaagcctcggcgctcacctaagccgcagggagatacacccaactgggagatgaggaaacagcaacccagagaggagaactaacccacacaggatcatttcgcgaaggagcaaggctgaagaaccagacctggactttcttaggacaaacttactgcagcttgaaggagccaaccatggatttgaggcgtgtgaaggaatatttctcctggctctactatcaataccaaatcattagctgctgtgctgttttagagccctgggaggcgatctatgtttaacaccatcttactaaccattattgctatgggtggtatacactgcctatgtctttattccaatccaca

SEQ ID NO: 1110 - DNA, 472 bp, Homo sapiens
  misc_feature 2, 3, 7, 31, 42, 67, 82, 83, 95, 103, 104, 446, 471: n = A,T,C or G
gnnaggntcccgttactctactttctacttnggttaattgtngctccccgcggtggccgtggtcgcngccgaggtacgcggnngcagtgggaagntcgcagcnnctggggaggagccaaagcctcggcgctcacctaagccgcagggagatacacccaactgggagatgaggaaacagcaacccagagaggagaactaacccacacaggatcatttcgcgaaggagcaaggctgaagaaccagacctggactttcttaggacaaacttactgcagcttgaaggagccaaccatggatttgaggcgtgtgaaggaatatttctcctggctctactatcaataccaaatcattagctgctgtgctgttttagagccctgggagcgatctatgtttaacaccatcttactaaccattattgctatgggtggtatacactgcctatgtcnttattccaatccacattctcctggnt

SEQ ID NO: 1111 - DNA, 951 bp, Homo sapiens
  misc_feature 3, 16, 46, 390, 433, 584, 668, 679, 682, 683, 690, 693, 696,698, 700, 702, 704, 711, 713, 714, 716, 722, 725, 726, 736,740, 742, 745, 748, 752, 757, 760, 763, 764, 766, 775, 776,777, 780, 781, 782, 783, 785, 787, 789, 795, 796: n = A,T,C or G
  misc_feature 801, 802, 804, 806, 809, 812, 813, 816, 818, 820, 821, 824,828, 830, 831, 833, 834, 837, 839, 840, 844, 847, 856, 864,868, 871, 873, 874, 875, 877, 881, 882, 887, 891, 893, 897,898, 901, 906, 907, 909, 912, 913, 914, 915, 916, 922: n = A,T,C or G
  misc_feature 924, 928, 934, 935, 937, 938, 940, 941, 943, 944, 945, 946,947, 950: n = A,T,C or G
agngcgactactatanggcgaattggagctccccgcggtggcggcncgcccgggcaggtacttatttttatattaagtcagacttcaggatttattttagccttcctttttgagaagctttctaagccctcagcattaagcagcatttttcctcatcgcacacggatctgagcaggtgaccgcggctgggataggtctgttgtgttgtgtgcaggtgggctggccagccgttgggtgtgtgtttttcctagagtaagaagcactccaggctgagatgagagctgttgaaatgagtaacatttccgtctcctgtgatacgcgctgctgttgcttctttcaaatgatcagatttacattcttttaatgggtcctttaaaaatgtaatcgagngagaaggacttctaaagattttcttttggcctggaatcacacnaaggggaattggaaaattactaattcatgaaaatgaaaatgtgggcttcttttaaggaaaaattcctttgaacattgacagaagtgggccgtagggaaggggaagaatttgcctggattcttcacttaactcttgtcaccactggagcatnctgactccctagacacaaagtgatggaagttattttgtttccactcttaaacactgtctcaagggggacattgatgggatgggngggagggtgtnttnnattgtgncancananananangtggggnanntngatgtnggnnaaaacccagngctntnacntanccanggganaanggnnanagggccggnnngcnnnntnantnggtaannggganntnanganttnngtntntnncangaantnntnnttngnncaangantcataccanattttttngcancgntnnntntccnntattnactntntttnngangggcnnantannnnnctaagntnatangttgtnntnnannannnnnaanc

SEQ ID NO: 1112 - DNA, 473 bp, Homo sapiens
  misc_feature 1, 356, 365, 465: n = A,T,C or G
nctactatagggcgaattggagctccccgcggtggcggccgaggtacagcaacagaatgagaagctacaaacaagaaatgggaaaactcgaaacagattttaaaaggtcacggatcgcctacagtgacgaagtacggaatgagctcctgggggatgatgggaattcctcagagaaccagagggcacatctgctcgataacacagagaggctggaaaggtcatctcggagactagaggctggataccaaatagcagtggaaaccggtaagaattctgagagtgagcaaattgtcttgcttatgcacagcagtcttcacaacacatgacatttcagggaaacttcaaaggagtagcanagacagcancccgagatgtggtttacatattggggagacaattgggagcttatttgcgcttatcttttttcaaggtaaaaggcatgacatcttacttgaaaacaagttnctgaggtt

SEQ ID NO: 1113 - DNA, 476 bp, Homo sapiens
actactatagggcgaattggagctccaccgcggtggcggccgaggtacacacaaagacaaacctgaacttaatttcaaggaaaacttaaacccatgcacaaataattggtgagccttcatttccctgacttcaagtttccatgtgaggactcatgctctctccactttcttcttgggaggagggaagatttacctaatgggtaaatttgggcaaagcacattgagtgtgcttgtttggctctgagtctctttgcaaacatgtgtctgcccacagtaacatgagtttgcgttgactgtcatgtctgcaggaagctgcctgctcctgtggccatgtcaagcaattctttctttcaactgcaactgtgtggtaagagcttagtctgagaagaaatgttcagaagctcactgtggctgtacctgcccgggcggcccgctctagaactagtggatcccccgggctgcaggaattcgatatc

SEQ ID NO: 1114 - DNA, 484 bp, Homo sapiens
  misc_feature 2, 5, 20, 455: n = A,T,C or G
tnacnactactatagggcgnattggagctccccgcggtggcggccgaggtacacacaaagacaaacctgaacttaatttcaaggaaaacttaaacccatgcacaaataattggtgagccttcatttccctgacttcaagtttccatgtgaggactcatgctctctccactttcttcttgggaggagggaagatttacctaatgggtaaatttgggcaaagcacattgagtgtgcttgtttggctctgagtctctttgcaaacatgtgtctgcccacagtaacatgagtttgcgttgactgtcatgtctgcaggaagctgcctgctcctgtggccatgtcaagcaattctttctttcaactgcaactgtgtgtaagagcttagtctgagaagaaatgttcagaagctcactgtggctgtacctgcccgggcggccgttctagaactagtggatccnccgggctgcaagaattcgatatcaagctt

SEQ ID NO: 1115 - DNA, 474 bp, Homo sapiens
  misc_feature 3: n = A,T,C or G
ctnctatagggcgaattggagctccccgcggtggcggccgaggtaccatgattagttaaatataagactccgtaatttttacaattttaacaataattttatttcttcaagcttgttagtttgggattgtattaaaactacagtgtgtgacttagaaaatgataatgctgctttatggaaaatggattataggtgggtaagacttcattgcaaaaattgtgtaataccatcagtgttaggaacccagttgaagtctagaagacagatgatagtatcttagactaggttggtatttgaatagatattggtaatatcagtagaatttaataatacattagaaagaaagaaatcagagaagattcttttattttcacttgatacttgtgttgttactttcaatgagataagaaagacaggcaaaggagaacgttcaggggcaggggatgagaagaaaacaagaattttatgttggac

SEQ ID NO: 1116 - DNA, 474 bp, Homo sapiens
actactatagggcgaattggagctccaccgcggtggcggccgaggtacccagcccctccccttctgagatctttcctgtcacacactctttccccagctctgcacattctgacactcaccacaccagcacagcagaatctcaaaaaaaagccacagcagagggctccgctggtagagttgaaaattttggcaagaggaagccactcctccaggcctgggtctcaccctcggagacacatccagtctcagctcagccaggcgctggaactgggtcagccaagcacagacttcatcctgtgaagccaatgaatgccacggccaccaaggttgctaactgcagcttgggaactgccaccatcatcagtgagaacttgaacaatgaggtcatgatgaagaaatacagcccctcggaccctgcatttgcatatgcgcagctgacccacgatgagctgatttcagctggtcctcaaacag

SEQ ID NO: 1117 - DNA, 449 bp, Homo sapiens
  misc_feature 2, 4, 6, 201, 202, 205, 211, 220, 221, 223, 242, 404: n = A,T,C or G
gntngntcactcttagggcgaattggagctccccgcggtggcggccgcccgggcaggtacgcgggggcagtgggaagctcgcagcagctggggaggagtcaaagcctcggcgctcacctaagccgcagggagatacacccaactgggagatgaggaaacagcaacccagagaggagaactaacccacacaggatcattttnncgnaaggancaagggctnnanaacccagacctggactttnttaggacaaactttactgcagcttgaaggagccaaccatggatttgaggcgtgtgaaggaatatttctcctggctctactatcaataccaaatcattagctgctgtgcttgttttagaagccctgggagcgatctatgtttaacaccatctttactaaccanttattgctattgggtgggtattaccactgcctatgtcttttattc

SEQ ID NO: 1118 - DNA, 824 bp, Homo sapiens
  misc_feature 2, 4, 5, 7, 8, 10, 11, 12, 14, 15, 16, 17, 18, 19, 22, 23,24, 26, 28, 29, 31, 32, 34, 35, 37, 38, 39, 40, 41, 42,43, 44, 46, 47, 48, 49, 51, 53, 54, 55, 56, 60, 62, 64,65, 67, 72, 74, 76, 78, 79, 80, 81, 82, 83, 84, 88, 89,90: n = A,T,C or G
  misc_feature 91, 92, 93, 94, 96, 98, 99, 100, 103, 104, 106, 107, 119,120, 123, 127, 134, 138, 157, 160, 315, 320, 332, 333, 334,414, 417, 429, 430, 445, 455, 456, 457, 470, 474, 477, 520,521, 557, 565, 567, 571, 573, 575, 594, 626, 663, 687: n = A,T,C or G
  misc_feature 723, 734, 740, 742, 743, 761, 769, 795, 820: n = A,T,C or G
tntnntnntnnntnnnnnnttnnntntnntnntnnannnnnnnntnnnntntnnnntatnantnntntattntntntnnnnnnntttnnnnnnntntnnnttnntnntgcgccctttcnntgnctanttggcgntccnccgctgtggcggtgcctantgngtgagctaactcacattaattgcgttgcgctcactgcccgctttccagtcgggaaacctgtcgtgccagctgcattaatgaatcggccaacgcgcggggagaggcggtttgcgtattgggcgctcttccgcttcctcgctcactggacctccgcntggcngcttgggttccnnnttccggcttgccgggccgaagccgggttatttcagccttcaaccttcaaaaaggggccgggttaaattaccgggttttanttnccaccaaaggannattccaagggggggnaattaaaccnnnccaaggggaaaanaggnaanacccaattggtttgggaaggccaaaaaaaaagggggccccaannccaaaaaaaaggggggcccccatggggtaaaaaccnccggtttnanaaanananggggccccccggccggttnttgggccttgggggcccggttttttttttttnccccaattaagggggcctttccccgggcccccccccncctttggaacccggaagggccaantttcaaaccaaaaaaaaaattccgggaaaccggccnttcaaaaaggnttccanannaagggggttgggggccgnaaaaaaanccccccggaaccaggggggaaccctnatttaaaaagggatttaaccccaangggg

SEQ ID NO: 1119 - DNA, 456 bp, Homo sapiens
  misc_feature 2, 3, 4, 5, 396, 402: n = A,T,C or G
gnnnnaggcccgaatcgactacttagggcgaattggagctccccgcggtggcggccgaggtaccaaagtgatcctccatcttaaagaagatcagacagagtacgcggggtgtttttaaaaaagaatttaattaggaaattttgatactcttcattactaggatttatccattgaaattatttattgctattacttttaacagagtctctgtgagactgtttcacagaaggatgtgtgtttacccaaggctgcgcatcaaaaagaaatagataaaataaatggaaaattagaagggtctcctgttaaagatggtcctctgaaggctaactgcggaatgaaagtttctattccaactaaagccttagaattgatggacatgcaaactttcaaagcagnagcctnccgagaagccatctgccttcgagcctgccattggaaatgcaaaagtctgttcca

SEQ ID NO: 1120 - DNA, 454 bp, Homo sapiens
aggccctaacactactatagggcgaattggagctcaccgcggtggcggccgaggtacgcggggtcccggcccagtgtcctccaggaccctggcccctcatgcctccgagcttgcgcgtgtgtcatttcctctctccagaggacctttcctgcctaggactcatgattgtcccctccctggcattttttacacctggagcagccagaggacgcatgcatggctcttcggaagccttctcctgccacggcatgcacccacacatgcgagcctcccgggtacctgcccgggcggccgctctagaactagtggatcccccgggctgcaggaattcgatatcaagcttatcgataccgtcgacctcgagggggggcccggtacccagcttttggttccctttagtggaggggttaattgcgcgctttggcgtaaatcatggtcataagctgtttcctgt

SEQ ID NO: 1121 - DNA, 466 bp, Homo sapiens
  misc_feature 2, 13: n = A,T,C or G
gnagtccctatcnctacttagggcgaattggagctccccgcggtggcggccgggggccattgagactgccatggaagacttgaaaggtcacgtagctgagacttctggagagaccattcaaggcttctggctcttgacaaagatagaccactggaacaatgagaaggagagaattctactggtcacagacaagactctcttgatctgcaaaatccactttcatcatactgagttgtgtgcagctgcagcggattcctctgagcgctgtctatcgcatctgcctgggcaagttcaccttccctgggatgtccctggacaagagacaaggagaaggccttaggatctactgggggagtccggaggagcagtctcttctgtcccgctggaacccatggtccactgaagttccttatgctactttcactgagcatcctatgaaatacaccagtgagaaattccttgaaat

SEQ ID NO: 1122 - DNA, 470 bp, Homo sapiens
  misc_feature 2, 389, 413: n = A,T,C or G
gnaggccctatcgactccttagggcgaattggagctccccgcggtggcggccgaggtacctgtgtcaggagtccccaagcccactcccaaaatagaaaattcactaaaaggagtcaaaggattcagcatacagtaatattaacaactaagatttattccagcaggatacaaagcaaaataagaaaggaaaagtcgcatggggcaaaatcaggtgaaagctttccaagagtcctctcccaatggagttacacaggatgtgcttaatacctccagcaaccagttgtgacaatacatgcaaagagtgcaaagtcttgtccacgacggatgttctttttttttttttttgagaaagccttgctctgtcacccaggctggagtgtggcacgatnctgggtgaagagcaagactccgtntcaaaaaaacaaaagaaaaggaaaagtccagtccttgtcttcaaaattacttccagt

SEQ ID NO: 1123 - DNA, 473 bp, Homo sapiens
  misc_feature 2, 3, 10, 21, 28, 30, 31, 38, 43, 64, 93, 95, 132, 213: n = A,T,C or G
gnnaatggcntttggaatccngcgaatngnnttccgcnaggtnccggccgcccgggcaggtacnttatgacccaacatttacctcaaaagctntnaatgacctttgcggggaactgtccccaagacaacctnaaagagacagcacaacatttgcagctgtttctctttcagcccaaggtcgcaaaggatataagaagccaatgcagcttgganggagaaagggattcctgtaaatcactcactatgatttcccacagcaggcaagtggatcccctaaagaaagaaggcttatagagttccctcaaaagagctcagaacttcaacaatgattctattcacataggcatttctgtcttccaaattttagctttaagagtctgaggaagtacctcgagcggccgcccgggcaggtactggaaaacctccatcttggctcccagagctctaggaactcttcatcacaactaggattt

SEQ ID NO: 1124 - DNA, 466 bp, Homo sapiens
  misc_feature 2, 9: n = A,T,C or G
tnatcactnctatagggcgaattggagctccccgcggtggcggccgaggtactgacctcttagggatctaaggaaaagattctggaccagaatgggcctaggcttgaagtggatctcttccaaaagaatagtgaatagtttttatcttttctaaaagatggattgaatggaattcttccatttgtaagtaagttcttgtaagtttaattaattttgtaacatcttttgagaatttaccacatgccactccttgagctgggtgcttactatgtgtttattattttaaccctcacaacaacctcaacaccctcatgaagtaggtcctattaggatccctgttttgaagatgaactgaggctcatgtttagcccaagttcactgagctagtaactggcaaagttagaatctgaaatgaaatctgcctgatgtcagaatgatgttgttcattcataggctgatattctta

SEQ ID NO: 1125 - DNA, 464 bp, Homo sapiens
  misc_feature 2, 3, 5, 13, 158, 190, 213, 219, 266, 295, 302, 459: n = A,T,C or G
gnntnccctaacnctacttagggcgaattggagctccccgcggtggcggccgaggtactttttttttttttttttttttttgagacaggatcttactttgttgcccaggctggagtgcagtgtcacgatcacagcttgctgcagtctcaagcttccanactcaagcgatcctcccacttcagcctccagngagttgtcttctcatttttctgntccttnaaccctttccctctccactagctggtttccctcacaggaccaacacncatgtgcagtatttgcttccacctcttanagatttntcaactacaaggacttaggcaaggtttcccttttgactggaaggcttgtagaaacgtgacaacccgccttccctaacactcatgtcacagcggtagcggaccgtattctgggacaaatgggaactcacgacattccccccgcgttacctgcccgggncggcc

SEQ ID NO: 1126 - DNA, 466 bp, Homo sapiens
ctatcactacttagggcgaattggagctccccgcggtggcggccgaggtactgtgatatccacatatttttgagaaaaattcccaagccaggcgaatgtggattggaataaagacataggcagtgtataccaccatagcaataatggttagtaagatggtgttaaacatagatcgctcccaggggctctaaaacagcacagcagctaatgatttggtattgatagtagagccaggagaaatattccttcacacgcctcaaatccatggttggctccttcaagctgcagtaagtttgtcctaagaaagtccaggtctggttcttcagccttgctccttcgcgaaatgatcctgtgtgggttagttctcctctctgggttgctgtttcctcatctcccagttgggtgtatctccctgcggcttaggtgagcgctgaggctttggctcctccccagctgctgcgagctt

SEQ ID NO: 1127 - DNA, 686 bp, Homo sapiens
  misc_feature 199, 200, 233, 293, 319, 323, 343, 354, 389, 405, 422, 426,465, 483, 489, 554, 572, 586, 600, 670, 682: n = A,T,C or G
atagggcgaattggagctccaccgcggtggcggccgaggtacgcggggagtcttgacaccctagatcccaagatctccaaggattttggtgggcatacccactccagcacacaggaaagccatggagggtttcaatggaacttcttcccttctttccttgaacagcttcttgggcagggaagccccctgggttcttgtnnccttattgaatcccaagaagggccccgcccttntggcccccaagggaatcgggggggaaaccccctttgcccattgaaagccattcaagccangcttttaaaaaagggaaaaaaattgnccanggttggaaaagaacccccangggggttttangccccagaacaggggcccacccaaaaagcccaaangggaaaggccaggaangaattccccaagccccntttnttggggaaaaaaaaagggcccttaaggaaccggggaagncaaaaaaaaaaaaaggcnttgttngggggggggggaaccttcggggaaaaaaaaccttaggggaaaaaaaagaattggccaaggtttcnggaaaaagaatttcttanggaaaaaaggccgntgggggttaaaaangggaaggccccgttcccattggaaccggtttttaaaaagaaccggtttcccttttgacctttcaagttancccttggccccngggg

SEQ ID NO: 1128 - DNA, 476 bp, Homo sapiens
  misc_feature 2, 3, 4, 5, 25: n = A,T,C or G
gnnnnagtcggccgctttacgactnctatagggcgaattggagctccccgcggtggcggccgcccgggcaggtacgcgggggcagtgggaagctcgcagcagctggggaggagccaaagcctcggcgctcacctaagccgcagggagatacacccaaccgggagatgaggaaacagcaacccagagaggagaactaacccacacaggatcatttcgcgaaggagcaaggctgaagaaccagacctggactttcttaggacaaacttactgcagcttgaaggagccaaccatggatttgaggcgtgtgaaggaatatttctcctggctctactatcaataccaaatcattagctgctgtgctgttttagagccctgggagcgatctatgtttaacaccatcttactaaccattattgctatgggtggtatacactgcctatgtctttattccaatccacattcgcctggcttgggaa

SEQ ID NO: 1129 - DNA, 467 bp, Homo sapiens
  misc_feature 453, 465, 467: n = A,T,C or G
ggcgctatcgactactatagggcgaattggagctccccgcggtggccgcctacctcggcctcccaaagtgccgggactacaggcatgagccactgcgcgcagccccacttgcccaattcttgaccatcatttattgagctaaatccaaaaaggaaactctaccactgactcttttctttctcatggcctccaaaatgaatcctaggtttttccagcagggtaaattcaaaaggactcaggttggaaattgacttcttggttaaaaaaaaaaaagtataaacagaaggtcctttttagaaatgaggtttattttcaaggctactcagtcctaaaagcctgcatatttactttttttccttcctccagcccgcgtacctcggccgctctagaactagtggatcccccgggctgcaggaattcgatatcaaagcttatcgatacccgtcgacctcnagggggggcccngn

SEQ ID NO: 1130 - DNA, 503 bp, Homo sapiens
  misc_feature 2, 3, 4, 6, 8, 10, 23, 31, 32, 37, 43, 47, 100, 379, 431,441, 453: n = A,T,C or G
gnnngngncncatacttagggcnaattgganntgcanctcccngccntggcggccgcccgggcaggtacgcgggggtttgtagatggaaggaagaacttntgtgcttagacctgacgctgggaggagatgctgccacctaggttacttgtaggaccctatacggcaacctcctttgccaggaactatttataaacatcctgcaggaaaatgagtctatatgtcagaatacacattttcccaccttgcccaacagtagaaaaacataagaagagaaaaacattaaaaaatgacaaggaagttaatggaagtcagcaatgtgatggtgtttggaggtggagccttcagaaggtaattaatgcccttgtaagaagaggccanagagcttgcgcaccttcttcctaccatgtgaggagccaagaagccggctgtntgcaacctgnaagaggaccctnactagaagctagccatactggcatcctcatcttggctttccaacttccaa

SEQ ID NO: 1131 - DNA, 473 bp, Homo sapiens
  misc_feature 15, 18, 22, 26, 37, 127, 213, 232, 465: n = A,T,C or G
ttaaccctattctantcnaggngaantttcctccgcngcggccgcccgggcaggtcctcgggagatcaggactcttacagccagtcattgaagtctcctttaaatgagatgtctgatgatgatgacnatgatgatagcagtgactaaggacacatttgggagtatttaatcaggtgtggctatccgagaaatcaactttgggggaaatgtaanattctgagctctctgtttngttctagccatgaatttgcctgacaaacttgtaacctatgtgcctcaatatattccatagaaagtaggtccccctgccttctcccactcctcacactcttctacagggataggcttttgcaaatatatcagataaattttttgtttcttgtttatttttaggttattttcttggaaggttgggaaaagatgtttgttttaacagatcatgtacctcggccgctctagaactantggatcct

SEQ ID NO: 1132 - DNA, 498 bp, Homo sapiens
  misc_feature 2, 3, 5, 7, 8, 149, 265, 289, 323, 325, 351, 368, 376, 429,431: n = A,T,C or G
gnngngnncgctatcgactactatagggcgaattggagctccaccgcggtggcggccgcccgggcaggtactttttttttttttttttttttttttttcttaagtatcaatgagttaattttaaaggtaataaactgtaacttgttttnttcaaaactgcttttaaatgttgctaatttctattcctgcacactaactgaacaaggatgctggcaatgataactgtaagacagagaaatgacatgattctgagctgcatttttanaaagattactttggcagccaggcnttatactgattagatgacagaaagaccagagaancncaaaagataacggatgggtcttcggnttaataccggggtgacnaaataatntgtacaacaaacccccgtgacacaagtttacttatgtaatgaaccttcacacncnccccggaacctaaaataaaagttaaaaaaaaaaaagaagaagatggaaagaccagaggagggaggca

SEQ ID NO: 1133 - DNA, 490 bp, Homo sapiens
  misc_feature 2, 6, 11, 16, 18, 38, 42, 46, 67, 68, 82, 95: n = A,T,C or G
cnttcncgctnttttncnatacggcgaattgttttccnccgnggtngcggccgcccgggcaggtacnntgattagttaaatntaagactccgtantttttacaattttaacaataattttatttcttcaagcttgttagtttgggattgtattaaaactacagtgtgtgacttagaaaatgataatgctgctttatggaaaatggattataggtgggtaagacttcattgcaaaaattgtgtaataccatcagtgttaggaacccagttgaagtctagaagacagatgatagtatcttagactaggttggtatttgaatagatattggtaatatcagtagaatttaataatacattagtaagaaagaaatcagagaagattcttttattttcacttgatacttgtgttgttactttcaatgagataagaaagacaggcaaaggagaacgttcaggggcaggggatgagaagaaaacaagaattttatgtt

SEQ ID NO: 1134 - DNA, 491 bp, Homo sapiens
  misc_feature 2, 6: n = A,T,C or G
gngcgnatcactacttagggcgaattggagctccccgcggtggcggccgcccgggcaggtacttttttttttttttttttgaggcaggaggatcacttgaacttggtaggccaaggctgtagggacctgagattataccactgcactccagcctgagcaacagagggagactctgtctcaaaaaaagaaaagaaaacaaaacaaaacagaaaacctagagtttaaatcacacttaataaagactaaatacatttctctcaaaatcaggaaaaatatatggttgttacttctttattcaactttgtatttgtggtcatggccaatgcaatatgacatgaaaggaaataatatatatataagaaagtagtaaacaatatttatttatagactacatgagcatgtacctcggccgctctagaactagtggatcccccgggctgcaggaattcgatatcaagcttatcgataccgtcgacctcgagggggggccc

SEQ ID NO: 1135 - DNA, 492 bp, Homo sapiens
  misc_feature 2, 3, 6, 8: n = A,T,C or G
gnnagnancatacttagggcgaattggagctccccgcggtggcggccgaggtacgcggggatatttgtgaagtatctcctggaccccacttgaatatgatcgttggagccaatggaacagggaagtcgagcattgtgtgtgccatttgccttggtttagctggaaaacctgctttcatgggacgagcagataaggttgggttttttgtgaagagaggatgttctagaaggcatggttgaaattgaattgttcagggcttctggaaatcttgtaatcacccgtgagattgatgtggcaaaaaatcagtccttttggttcatcaacaaaaaatctacaacccagaaaatagtggaagagaaagttgcagccttaaatattcaagtggggaatctttgccagtttctccctcaggacaaagttggagaatttgctaaactcagcaaaattgaactcctcgaagccactgaaaagtcaattggtcccccagaaatg

SEQ ID NO: 1136 - DNA, 496 bp, Homo sapiens
  misc_feature 2, 3, 4, 8: n = A,T,C or G
gnnnagcnaacactactatagggcgaattggagctccccgcggtggcggccgcccgggcaggtacgcgggggaacaaaacccacactatctctgaggtgtgcttgtaggtttttgtttgtaacatttgccttactgcactcctgccttgcgacagagcaagactccatcaaaaaaaaaaatgtaatttaaaagattaaaaattaagatagatttttacaaatgtatatatctaccattatagtatcatacagaatggttttactgccgtgaagtttctctgtgctctgtgtatccatctcttccttccccttggtccatggcaaccactgatctttctactgatcccatagtttcaccgtttccagaacgtcatataattggaatcgaacagtatatagacttttcggattggcttcttcttttagcaatatgcatttaagtttcctccatgtatttttttgtggcttgatagttcatctcctgttagcagtgaat

SEQ ID NO: 1137 - DNA, 821 bp, Homo sapiens
  misc_feature 1, 4, 5, 10, 12, 14, 15, 17, 19, 24, 26, 30, 36, 38, 40,41, 42, 44, 46, 48, 50, 55, 57, 58, 61, 62, 63, 65, 68,70, 72, 83, 84, 86, 89, 91, 92, 96, 97, 99, 101, 103, 110,115, 117, 118, 119, 124, 145, 162, 310, 314, 318, 357, 359: n = A,T,C or G
  misc_feature 362, 363, 369, 374, 381, 398, 404, 410, 419, 422, 427, 432,435, 455, 467, 470, 475, 481, 490, 492, 493, 498, 502, 506,512, 514, 516, 518, 560, 566, 569, 585, 591, 598, 600, 602,610, 617, 625, 629, 640, 643, 645, 656, 664, 667, 669: n = A,T,C or G
  misc_feature 673, 675, 678, 682, 696, 700, 702, 707, 715, 723, 734, 743,748, 767, 771, 791, 794, 797, 800, 803, 808, 809, 817, 819: n = A,T,C or G
nacnnatganantnntntntcatnantcancacatntntnnncntntnantcttnannttnnntnccntntntaatatcaatnntntananntaannanantncctaacnaagcngnnnaaccntttcctatacggcgaatcggntctccaccgcggtggcngccgaggtacttccgaagatgggcttgtatctggtttcggacggactgttaatgacaatttgatcgacgggaattgcacaccccagaatccaccacaaaagaaaaaggttacaaatttaacaatttatagtccttttaatagatttcntttntttnttcataaatactactgaggggaattgtacagatgcattnantgnnaaggcntttcnaaaattnacttattaaaacgattncaattncttttnaattatttnttntaaanactcnttntatggataaaattgtctcgngctttaaaatcntancaaanaaattngtcttccancnnggaanaaanatgnttacananananaaatttttcttaaggcttaacttaattgggggggcaaaaaanttcccnttntgtttaaacgccccancccaanttggtantntnttcaatanaaaaaanataattcnttcnaaaggaaatgnaantntttaatttttnccacccanaanantganangtncctntttctattttaaanaaancntaagnggaaaacntttccccnaaaccccaaanaaaaactanccaantaactttggaatattaaanttanttttggtcggttttactttnacnctnttntantttgnnaacccctngncc

SEQ ID NO: 1138 - DNA, 494 bp, Homo sapiens
  misc_feature 2, 16: n = A,T,C or G
gnagccctatcgactncttagggcgaattggagctcaccgcggtggcggctaaccctgggtcttcacctgcattttccttttgagctgctgatgcttcatggcaagggttccccgatcctggggcagaggcggcctctggatcataggcacagaccagggctcctgccagagctgtcaggaagaggagagtcatgaacctcatgcttctgtgtgctggagtgggtatgccaccaaatccttggagatcttgggatctagggtgtcccgcgtacgcggggacctcattcatttctaccggtctctagtagtgcagcttcggctggtgtcatcggtgtccttcctccgctgccgcccccgcaaggcttcgccgtcatcgaggccatttccagcgacttgtcgcacgcttttctatatacttcgttccccgccaaccgcaaccattgacgccatgtcgggttattcgagtgaccgagaccgcggccgctctagaact

SEQ ID NO: 1139 - DNA, 500 bp, Homo sapiens
  misc_feature 4, 7, 16, 34, 37, 68, 99: n = A,T,C or G
cccnttnacccctttnggaatccggcgaattgtnttncgccaaggtcccggccgcccgggcaggtacntattgtgtccactgtaaaggtaaatgatttnttttttatattgcatcaaacttggaacatcaaggcatccaaaacactaagaattctatcatcacaaaaataattcgtctttctaggttatgaagagataattatttgtctggtaagcatttttataaacccactcattttatatttagaaaaatcctaaatgtgtggtgactgctttgtagtgaactttcatatactataaactagttgtgagataacattctggtagctcagttaataaaacaatttcagaattaaagaaattttctatgcaaggtttacttctcagatgaacagtaggactttgtagttttatttccactaagtgaaaaaagaactgtgtttttaaactgtaggagaatttaataaatcagcaagggtattttagctaatagaataaaa

SEQ ID NO: 1140 - DNA, 493 bp, Homo sapiens
  misc_feature 4, 32, 493: n = A,T,C or G
tagnatcactacttagggcgaattggagctcnccgcggtggcggccgaggtacgcggggacctcagagctgagctgggcatgagtagatgctcagtaagtggtgcacagggttggtccctatggtggaggccccctaacaccgcccaacccccctccatgttctcacagctccacgcactgagcacgggcatgaaggccatgatgtcagaattctggcacccagggagctgagatgtgccgcagggcctgtggcggacatggctactcaaagctgagtggcctgccatcactggtcaccaaattgtcggcctcctgtacctgcccgggcggccgctctagaactagtggatcccccgggctgcaggaattcgatatcaagcttatcgataccgtcgacctcgagggggggcccggtacccagcttttgttccctttagtgagggttaattgcgcgcttggcgtaatcatggtcataagctgtttcctgtgtgn

SEQ ID NO: 1141 - DNA, 482 bp, Homo sapiens
  misc_feature 2, 3, 4, 9, 13, 15, 17, 25, 26, 109, 218, 260, 324, 327,334, 387, 393, 408, 431, 480, 481: n = A,T,C or G
gnnncgtgnttcntngnatctactnntatagggcgaattggagcttcaccgcggtggcggccgcccgggcaggtactttttttttttttttttttttttttgccttctngggaagtgctgggaacgcaacttaaggtgtttgtagacactgcccctcttagagcctgaaatgccacaatttaagctctaagcctttttgttctctgagtgtcctctanaaaagataacatcttcaacccttttggttttcagggattctntgccagtagccctgggggtgaaaggaggtcagcaaagggacttgccggatgtccgagtaggaanaanattgctntaaggagtccaatccaaacctcactcatttcacaattttaccggaggctcctnttgctntccccagggccctanaacattatcaaaccttggtgaanaaagctgacacctttgattgtctgctgggtaacttgatgaaagagggcnnt

SEQ ID NO: 1142 - DNA, 490 bp, Homo sapiens
  misc_feature 4, 7, 12, 26, 30, 34, 47, 108, 374, 380, 446, 485: n = A,T,C or G
gaangtnaaaantttcgacgcaattnctantatngggcgaattgttnctccaccgcggtggcccgcccgggcaggtacacacaaagacaaacctgaacttaatttcanggaaaacttaaacccatgcacaaataattggtgagccttcatttccctgacttcaagtttccatgtgaggactcatgctctctccactttcttcttgggaggagggaagatttacctaatgggtaaatttgggcaaagcacattgagtgtgcttgtttggctctgagtctctttgcaaacatgtgtctgcccacagtgacatgagtttgcgttgactgtcatgtctgcaggaagctgcctgctcctgtggccatcccgcgtacctnggccgntctagaactagtggatcccccgggctgcaggaattcgatatcaagcttatcgataccgtcgacctngagggggggcccggcacccagcttttgttccctttaggngaggg

SEQ ID NO: 1143 - DNA, 790 bp, Homo sapiens
  misc_feature 65, 319, 365, 373, 487, 615, 646, 682, 690, 733, 734, 735,736, 740, 768, 773, 784: n = A,T,C or G
acgcgtaacactactatagggcgaattggagctccccgcggtggcggccgcccgggcaggtactnggaggctatgcagatatattcttttctctttaaagttttgcccaccagttttagaattcatcagtaaatcttgtctacagtaattattactatttgctattctaatgggaattttgtatatctccatcccttctaatatatttaacaactgaattctataaacaagatttgtttcttctccacattatttattttatcaatacagacacatactttgggggttataatccaatactattgttatttattatgtngttcatattgttctagctttggctactgggatcttttataagtgtnttctgtgnccttttgacatgccccatttttttctttttaagcacatctttactttctgagactacaagattgtccaggttctcatcttgtgttttcccttccctagccttggaatgagctgnttttccaatgatctctagttcctttattagaaaatggtggccaacatggtgaaaccccatctactaaaaataccaaaaaaattagccaggcgtggtggcaggcgcccgtaatcccacctactctggangctggtgcaaaaattgcttgaaccccgggangcggaaggtgcaatggaaccaaaaacgggccactgnactttcancctggcgacagaagcaagacttcatcttaaaaagaaaaaaccnnnnaaangggtcccttggccgcttttaaaactagnggaancccccggctgnaggaat

SEQ ID NO: 1144 - DNA, 788 bp, Homo sapiens
  misc_feature 11, 16, 18, 37, 565, 650, 662, 710, 759, 775, 780: n = A,T,C or G
acgcgatacgngtatncnactcactatagggcgaatnggagctccccgcggtggcggccgaggtacatttcttctaattgatcatatctgcttattttcctctggattaaggatcaaggagatagtatattagatgatttgataaatttccaatgctttgcaaagtagttgaacaactttttctttgtgatgctaggtggcactactagtcaagacttggtatttcatagctggctttcttattctgaaggttgtaaaaagacatatgaagtaatatttaacattgaaaacatgataatcaatttgattatctatgaattgtcctaaacgttcagagtaaagtttcctttaaagttaaaatctttcaagtgaaggaaattataaagtcacatgtaaacaccaaaataagaggaatagagcaataggatatttttggctttataattcaatttaaaaattaaggtgcatttatttttttggcagctggccataaagcttcaatgtccagtaagcagttgctatctatgattcatgagatcatggggttccaacaccactgctgatnttactgtcagcaatattaaaaccgcttaactcttggagaccaaattaactagtttatatttgctttccagttcctgcccttttgnctgcatactccntggctcataaggggttggggtatgcactccaactgaccagaagaaccncactcccgtccattttctgccaagggggtcaagggaactctcccatttnacatgttttgaatttnccagngggggggg

SEQ ID NO: 1145 - DNA, 500 bp, Homo sapiens
  misc_feature 3, 62, 213, 218, 223, 225, 228, 352, 397, 398, 500: n = A,T,C or G
gancactactatagggcgaattggagctccccgcggtggcggccgaggtacgcgggggacanggccatctcgctataggaaaggaaagtggaacagcattcatcctcaacatttttacgaagacaaaatgaagactggagtagaagactgatcagtgcaggtgtagcataaaagtgtaatcctggaagatgtggtgtgagaaagcattatcancaatnatgcntnttnccaatcccaaaccatggggggtttctcacagctttacaccaaagggcatcactatccctcaaagagagaaacctggacacatgtaccttgcccgggcggccgctctagaactagtggatccccngggctgcaggaattcgatatcaagcttatcgataccgtcgacctnnagggggggcccggtacccagcttttgttccctttagtgagggttaattgcgcgcttggcgtaaatcatggtcatagctggttttctgttgtgaaaattgttn

SEQ ID NO: 1146 - DNA, 523 bp, Homo sapiens
  misc_feature 3, 8, 9, 370, 394, 396, 404, 432, 476, 482, 511: n = A,T,C or G
ttncgccnntacgactcactatagggcgaattggagctccccgcggtggcggccgaggtacacacttgtgtgcatttctgttgggtatataacaagtatgaaattgctgggtcttaaaatatttatatattaacttcattaaatgctgcctaagaatttttcaagcggttgtgctattttaccttcaccagttctagttgttccatatccttgctgtcacttggcattaatctgaattttttattttgaccagactggtctgtgtgtcatagtatcccattgtcattttaagttgcatgcctttgatgaagacattttctgatgcttaattggctctttgaatatatcctgtaactgatttgtagggagnttttatatatattctggatataantntttttatntggacataaatatttcgcagattatctnctcccacttttaacttcccttttttcttttctccttaaattcantgactntttctttaaattaacaaaaaggtttcttnaaattttttcaa

SEQ ID NO: 1147 - DNA, 765 bp, Homo sapiens
  misc_feature 2, 4, 7, 10, 11, 12, 16, 17, 21, 22, 24, 29, 30, 37, 38,40, 44, 45, 48, 50, 51, 52, 55, 56, 64, 65, 66, 68, 70,75, 88, 103, 109, 112, 115, 116, 117, 118, 121, 123, 126,149, 150, 172, 291, 332, 337, 341, 372, 375, 408, 437, 542: n = A,T,C or G
  misc_feature 549, 567, 570, 583, 597, 612, 616, 624, 626, 630, 636, 639,643, 665, 670, 673, 678, 688, 689, 692, 701, 708, 730, 734,736, 740, 750, 764: n = A,T,C or G
tnanaanctnnntttnntatnnanctttnnatataanntntaannatntnnnctnntccttttnnnantntccanctattgatcttcntttattttattaaanattttnaanttnnnngtnancgnccctatacgatcctatatggcgnntaggggctccacccgcggtggnggccgcccgggcaggtacgcggggggagcggccaacatggcggaacgcaggagacacaagaagcggatccaggaagttggttgaaccacctaaagaagagaaggctgtggccaagtatnttcgattcaactgtccaacaaagtccaccaatatgatgggncaccnggtntgattattttatttgctttcaaaaaagcagntgngacttgtctttttggaattcaaaaagatggggncaaaaggctcaaaatataatggtagtagngaagccttttatttttaccaaaccaagggggaggtcctgttgggtttggacttacctggcaaaccaggcctttttaaaaggaaaggcagtttttttttttcaccnggaggcnccttaaaaaagttaaaantgnaaaaaattggaanattaattggttatntatggaccatatatngagnacatatantncatntaattnaanaaanaaagggtacccctttcgggtcnccgcnttnctaangaaaacctannttngggggattnccccccnccgggggtcctttggcaagggnaaantnttcngtattaattncaaaaaggcctttna

SEQ ID NO: 1148 - DNA, 412 bp, Homo sapiens
cgtatacgactcactatagggcgaattggagctccaccgcggtggcggccgcccgggcaggtacccgggaggctcgcatgtgtgggtgcatgccgtggcaggagaaggcttccgaagagccatgcatgcgtcctctggctgctccaggtgtaaaaaatgccagggaggggacaatgatgagtcctaggcaggaaaggtcctctggagagaggaaatggcacacgcgcaagcacggaggcatgaggggccagggtcctggaggacactgggccgggacagatcagactcccccgcgtacctcggccgctctagaactagtggatcccccgggctgcaggaattcgatatcaagcttatcgataccgtcgacctcgagggggggcccggtacccagcttttgttccctttagtg

SEQ ID NO: 1149 - DNA, 540 bp, Homo sapiens
gttacgtatccactactatagggcgaattggagctccccgcggtggcggccgcccgggcaggtacatctttagagagtagagatacatctgcatataaaaaaaaaatctgccgtaagtgatagagttgaaaataatgtcctacataccagaatgttcttctgaattaggcatcatgtaggtattcagcattctttccatttccaaattgctcccactccctgttttttcatcatcccccttttttcctcattagctcatttggaaataaaagatttttattttattttcatttttttttttctgcagaagaagccacatatgtatggagatttaggcaatgatttctcaaggaaaaaatgttttaaaagtacagcatggctggtggtttcaaaaaacgtagtcattcttctcactgcaaccaatgtaagataagcagggtagatctgttatttccaaattaaaggtggattaagatatatggagagagaacatggcatgtgaggtttatagggctagaaactgcagaaccatgtaggaac

SEQ ID NO: 1150 - DNA, 531 bp, Homo sapiens
  misc_feature 6, 10, 45, 214, 497, 500, 501, 503, 510, 512, 513, 518, 521,522, 529: n = A,T,C or G
gatggncccnaacttagggcgaattggagctccccgcggtggctnaaacatctttttcttcttagtcccaggttgttctcattcgtggctggatcacaccagcaagaaggattttaaaggacaactccttggggccgtccaacactgaaaccgcctgaccgctgctgtctttgtgcttgcagaaaatcacgtggccccggagagggtcagcgangggcctccactgtctgagtccgctcctggcaacgcctgctctctgcactcagaggcccggtcccggcaagctgccacgttgctcagaagttctggcagggggagcctgaaacccctgtctgctggcgacactcccggagcagcaggaaatctctacattttattttttttcttaacagacaaaagtatttgactccagaatgatttccaggaattacagtatgagaacttagtctttgagatttttattttcttcttaaaaaaataaaaatgaaatcaaagcngannanaaaaaanannttaanaannggtcctngg

SEQ ID NO: 1151 - DNA, 529 bp, Homo sapiens
  misc_feature 2, 3, 224, 232, 251: n = A,T,C or G
gnntacgccctatcgactactatagggcgaattggagctccccgcggtggcggccgaggtacgctttgacgacactctcagacatgctgtgcaacttaacgtcactgccacccggcagctcttgcttatggctagtcagatgccaaagctggaagcctttatacatatctctactgcctatccaaattgtaacctgaagcacatcgatgaagttatctattccngccctggnggacccaaaaaaaatcatngattcccttgagtggttagacgatgctattattgacgagattacacccaagctgatcagagattggcccaatatttatacctacaccaaggccttgggagaaatggtggtgcagcaagagagcaggaacctgaacattgccatcataaggccctccattgtgggagcaacttggcaggagcctttcccaggttgggttgataatataaatggacctaatggaatcattattgcgactgggaaagggtttcttcgggccataaaaagctactccaatgg

SEQ ID NO: 1152 - DNA, 902 bp, Homo sapiens
  misc_feature 673, 728, 764, 767, 775, 776, 777, 778, 779, 780, 781, 782,783, 784, 785, 786, 787, 788, 789, 790, 791, 792, 794, 795,799, 807, 816, 821, 828, 838, 853, 865, 867, 871, 876, 891,896, 898, 901: n = A,T,C or G
gccgtaatacgactcactatagggcgaattggagctccaccgcggtggcggcccgaggtacgcgggggagatgctgccacctaggttacttgtaggaccctatacggcaacctcctttgccaggaactatttataaacatcctgcaggaaaatgagtctatatgtcagaatacacatttcccaccttgcccaacagtagaaaaacataagaagagaaaaacattaaaaaatgacaaggaagttaatggaagtcagcaatgtgatggtgtttggaggtggagccttcagaaggtaattaatgcccttgtaagaagaggccagagagcttgcgcaccttcttcctgccatgtgaggagccaagaagccggctgtctgcaacctgcaagaggaccctcactagaagctagccatactggcatcctcatcttggctttccaacttccagaactgtgagaagtatatgtttgtggtttagtcaatggtctatggtaatttttttatagcagtcccagccaagacagtgcctcatttactacataccatttatattattatataggctcctttcagaaacccatgttcaaataagagataagatactgaaacacataacaccttcactagtttttagtatacaaatattgagaaatagtttggtattaactatctcatncaagaaatgcagattcatgttggttctaatttttattatataaatgacaaaatgnagaaacttaacaccatcctagattttagctgccccnggnaaaaaaannnnnnnnnnnnnnnnnnannggtnccttgccngggcggccntttanaaatagnggattccccngcttgcaggaattcnatttcaagcttntngttnccgcnacctcagggggggcncggtncnccnt

SEQ ID NO: 1153 - DNA, 526 bp, Homo sapiens
  misc_feature 1, 2, 3, 7: n = A,T,C or G
nnnacgnccctatacactactatagggcgaattggagctccccgcggtggcggccgaggtaccttagatttctatgggacatcgtttaaaaactattgtttacgcgagagccttgctaatttcctaaaaattgtggatacattttttctcccatgtataattttctcaccttctatttaaaaagaaaaaaaaaagtcagtgtagtatttacatattttaccctataaggagctaacataacttttgatttagtgttattcataaaattaggttagcagtttattaaccttttgtatttgctctggcaatgtttaatatctcataagctatacacacctcgaagccatcaatgacaaccttttcttgctgaatagaacagtgattgatgtcatgaagacaattttatctccttttgccttccataatttgtacctgcccgggcggccgctctagaactagtggatcccccgggctgcaggaattcgatatcaagcttatcgataccgtcgacctcgagggggggccc

SEQ ID NO: 1154 - DNA, 907 bp, Homo sapiens
  misc_feature 2, 3, 5, 6, 9, 61, 62, 63, 134, 228, 254, 293, 434, 455,581, 595, 618, 621, 638, 649, 652, 679, 701, 704, 718, 724,726, 728, 743, 749, 757, 786, 797, 809, 811, 853, 860, 863,876, 906: n = A,T,C or G
cnncnnctnctatagggcgaattggagctccccgcggtggcggccgcccgggcaggtactnnntttttttttttttttttttttttgggaatctaaaccaaacaaaacatgataatttcagaagagattaactngatttttttccttcatcggcagcagactctgacttacccacctttcccactatttctttgagtaaggatttgaataatttaagccttcacattnggaattttatctcttttaatctttgnaaatattatgagtaaaaatcaggaaatgcctcactggtncccttggtttctcagacaactcactgatttatggtcttgagaccataaactcattttccttatatgaatgacatttccacatccacaacaatgccaccaaatatatgtatctagttcttactaactgcaaatcctcaaagngaactgggtgcattttaatgntgcgtagtttgctgattatgattcccttaatggacaatagttcacattttttgggaagaattccccaaaaggaagaagaaaagggaatctaattttaaaaatactttttttggaggggattgccanattggaaaatgganaattttggaaagtttcaataccnggngggggaaagctttgctngagtttaaaanggncgcatttggtccttaccgggggaccgncaggggccttcaaaaatcggtntcntgggtcctttgaanagcaanananggtggttcattaagngcaacncattgttnttaatttggaaacttgggggcaaaaacanaaccccgaacnaatttttccatngntaaccttaaaaatctcgggccccgggggttggaaaaaccttnttttggnaanccttttatttggnccccgctaaaactttaagttttaaaccggnt

SEQ ID NO: 1155 - DNA, 853 bp, Homo sapiens
  misc_feature 324, 405, 490, 687, 690, 702, 706, 719, 720, 725, 731, 742,748, 773, 780, 793, 799, 801, 808, 828, 840, 851: n = A,T,C or G
agccgtatcgactactatagggcgaattggagctccccgcggtggcggcccgaggtacaggagggaaccaggcgctacagactgtgtaatgagtgtcttgcagaatttggcatagacagcctccccattgacttggaagctgaacaacatcttatgtccccatcagatggagataaggattccagatggcacttgagtgaagatgggaatagatcctatgtggagattgtagaagatgggtctgctgatctggtcatccaacaggttgatgatagtgaagaaaaaaaaaaaaaaaaaaaaaggtacctgcccgggcggccgctntagaactagtggatcccccgggcttgcaggaattcgatatcaagcttatcgataccgtcgacctcgagggggggcccggtncccagcttttgttccctttagtgagggttaattgcgcgcttggcgtaatcatggtcatagctgtttcctgtgtgaaattgttatncgctcacaattccacacaacatacgagccgggagcataaaagtgtaaagcctggggtgcctaatgagtgagctaactcacattaattgcgttgcgctcactgcccgctttccaatcgggaaacctgtcctgccagctgcattaattaatcggccaaccccccggggaaaggcggtttgcgtattgggcgcttttcgnttncttggttaattnactngctgcgcttggtnnattcnggttgnggcgaggcggntttaancttaactcaaaggcgggaatacggnttttcancagaatcaggggnttaacncngggaaanaacttgtgagcaaaaggccnccaaaaaggccnggaaccgttanaa

SEQ ID NO: 1156 - DNA, 868 bp, Homo sapiens
  misc_feature 57, 697, 699, 772, 791, 797, 809, 830, 834, 844: n = A,T,C or G
agacgcgcgtaatacgactcactatagggcgaattggagctccccgcggtggcggcncgcccgggcaggtacgcgggattgacattgcaagaagcaaatgttacctctaatagcgtggtccaaaataatgtctatttacattctcagagcactttgtcaaggttattcagttgaaggctgtaacactctcaggagttaatcaagagcaatggcatctatgtttattagtgaagggaagacttacttgcacctactgcatatctgagtttactgagctcaaactggaatttaggaagccaaaaaaaaaaaaaaagaaaaagaaagacagtgtagacagaggcaagaaagtagagtgattgcatttgggcatctgaatgacccatcttggaatcacagctcagtcactggctgtatgccttgagaatgtttcttctctgttctgagccgctggttccttatttatgagataaatgaggaactgtgctgcacgcagttggttggagcctgaaatgagataatggatgttgtcctagttagaagatgagtaattttagggccggatgtgtttggctcacgcctgtaatcccaccagtttgggaggccaagggtgggctgatcacaaggtcaggagatcaagacccgtcctgtttaacacggggaaacccattctttaccaaaaaatacaaaaattagccangncttggtggcgggttgcctgtagtcccaactacttaaggagctgaggcaggaaaatgggtgtgaaccctgggangccggaccttgccagtggngctganattggcaccaantggccttcaaccctgggcganaganacgaggactntgtcttccaaaaaaaaaaaaaaat

SEQ ID NO: 1157 - DNA, 494 bp, Homo sapiens
  misc_feature 2, 3, 305, 308, 494: n = A,T,C or G
gnnacgccctatcgactacttagggcgaattggagctccccgcggtggcggccgaggtacaggagggaaccaggcgctacagactgtgtaatgagtgtcttgcagaatttggcatagacagcctccccattgacttggaagctgaacaacatcttatgtccccatcagatggagataaggattccagatggcacttgagtgaagatgggaatagatcctatgtgggagattgtagaagatgggtctgctgatctggtcatccaacaggttgatgatagtgaagaaaaaaaaaaaaaaaaaaaaangtncctgcccgggcggccgctctagaactagtggatcccccgggctgcaggaattcgatatcaagcttatcgataccgtcgacctcgagggggggcccggtacccagcttttgttccctttagtgagggttaattgcgcgcttggcgtaatcatggtcatagctgtttcctgtgtgaaattgttatccn

SEQ ID NO: 1158 - DNA, 868 bp, Homo sapiens
  misc_feature 1, 698, 723, 737, 758, 769, 778, 788, 804, 809, 813, 824,843, 848, 851, 858: n = A,T,C or G
ntggcgcgcgtaatacgactactatagggcgaattggagctccaccgcggtggcggcccgaggtacgcgggggagcggtgagtgatcctttcagcaaagtcagtcctgggcaggagacggcttcaggaatactgtcagctttactggattccaccatcgctttccaggactgtttaggccctgggcccttgaagggtttgcgtgcctcttgtctccattcatacctcaagaactttgttcatgttaattttttttcactctatcatatggaattgagcaaaaaaaaaaaaaaaaaaaaaaggtacctgcccgggcggccgctctagaactagtggatcccccgggctgcaggaattcgatatcaagcttatcgataccgtcgacctcgagggggggcccggtacccagcttttgttccctttagtgagggttaattgcgcgcttggcgtaatcatggtcatagctgtttcctgtgtgaaattgttatccgctcacaattccacacaacatacgagccgggagcataaagtgtaaagcctgggggtgcctaatgagtgagctaactcacattaattgcgttgcgctcactgcccgctttccaagtcgggaaacctgtcgtgccagcttgcattaatgaaatcggccaacccccggggagaggcggtttgcgtattggggcgcttttccgctttcttggnttaatgaattcgctgcgctcggtcngttcggctgcgggnaagccgggattagcttacttnaaagggcgggnaataccggntatccacaanaatcagggggataccncaggnaaanaacattgtganccaaaaggccaaccaaaanggccnggnaaccgtnaaaaaggccc

SEQ ID NO: 1159 - DNA, 847 bp, Homo sapiens
  misc_feature 660, 737, 748, 762, 782, 808, 816, 833: n = A,T,C or G
agcgcgtatcgactcactatagggcgaattggagctccccgcggtggcggcccgaggtaccctgctgaaagattatttctaacaggcttgtagagaaacgtcggttcatgtaaattagaaattatggggccactttgccattcttcacacctgcaatgaacaggtgtttatctgcagttctgacttatctcttgaactccatttgcatgttatagtgggatgcagctgatgccctgtccagatcttcttcaggccactacatctatatatgcattcatattccagtggctgtgagtgttggctgttggttgacagaggagctgcatcctcctggaggaaactgaactcagctgatgaaagccacctggtcctggaggtgaagcatcttccaaatgacagcctgcagtcaatgactgatgaatatgacttcattgcctcatgacaggacctactctggggtatagatcatgcttctaagctcctcctggggtcctgctgaggctcaatgccagctgaaaccatacccttgctcacatactttcccttctctttccttcttcccttgcttccttagagattcctcctgcaatggcttcctcaaaaaagcattttcataagcaacctcatgtcagcctctgctttcacagaagccaatctgangttaacaagcttgtttaacttagcatgtccaacataaaattcttggtttcttctcatcccctgcccctgaacgtctnctttgcctggntttcttaatctcantggaagtacaaccccaagtnttaagtggaaaataaaaagaaacttntctgaatnctttctttctaaaggantaataaaatccacc

SEQ ID NO: 1160 - DNA, 879 bp, Homo sapiens
  misc_feature 551, 557, 621, 626, 657, 664, 673, 703, 706, 709, 715, 727,737, 744, 753, 774, 779, 780, 788, 790, 791, 798, 808, 811,817, 819, 824, 835, 836, 839, 841, 854, 860, 867, 870, 874,876, 877: n = A,T,C or G
tgagccgtatcgactcctatagggcgaattggagctccccgcggtggcggccgaggtacgcgggggtagatggaaggaagaacttgtgtgcttagacctgacgctgggaggagatgctgccacctaggttacttgtaggaccctatacggcaacctcctttgccaggaactatttataaacatcctgcaggaaaatgcagtgaagtagaagagacagggatatcccagaaggttatgcaaaacatcaagagaagatgagaggtcagagatgggaagaaacaagaactttgacatgcttggtgttcttgcccaagctttgaagaagtttacaaagtctatatgtcagaatacacatttcccaccttgcccaacagtagaaaaacatatgaagagaaaaacattaaaaaatgacaaggaagttaatggaagtcagcaatgtgatggtgtttggaggtggagccttcagaaggtaattaatgcccttgtaagaagaggccagagagcttgcgcaccttcttcctgccatgtgaggagccaagaagccggctgtntgcaanctgcaagagggaccctcactagaagctagccatactggcatccttatcttggctttccaacttnaaaantggtgagaaggattatgtttgttggtttagncaatggntctattggnaatttttttatagcaagtccccagccaaanaanagngccttnattttacttacnataccatttnattattntttattatngggctccttttagaaaacccntggtnnaaatttanannattaaantcctggatanccntaaacncncttcnattagtttttnngtntnccaaatatttggnaaaatngttggtnttnaacnanncg

SEQ ID NO: 1161 - DNA, 487 bp, Homo sapiens
  misc_feature 2, 3, 4, 7, 22, 408, 427, 446: n = A,T,C or G
gnnnagnggccgcgtatcactnctatagggcgaattggagctccccgcggtggcggccgaggtacgcgggatgattttttattttaaaataatctggaagtaatgggaacttagtttttcctgaactccaaccagaatccaaattggttagatgaggccgggcgcggtggctcacgcctgtaatcccggcactttgggaggccgaggtgggtggatcacctgaggtcaggagttcaagaccagcctggccaacatggtgaaaccccatctctactaaaaatacaaaaattagccaggtgtggtggcgcctggttgaggcatgagaatcgcttgaacccaggaggtggaggttgcagtgagccaagatcatgcctactgcactccagcctgggcaacaaagtgggactntgtcttaaaaaaaaaaaanaaataatcggttagatgangaaagcatgtatattttctatataccaaaaacaaggaaagg

SEQ ID NO: 1162 - DNA, 485 bp, Homo sapiens
  misc_feature 2, 3, 7, 44, 452: n = A,T,C or G
gnntagngcgcgcgaatcactactatagggcgaattggagctcnccgcggtggcggccgaggtacgcgggtgcccaggtctggcatcctgcacttgctgccctctgacacctgggaagatggccggcccgtggaccttcacccttctctgtggtttgctggcagccaccttgatccaagccaccctcagtcccactgcagttctcatcctcggcccaaaagtcatcaaagaaaagctgacacaggagctgaaggaccacaacgccaccagcatcctgcagcaactgccgctgctcagtgccatgcgggaaaagccagccggaggcatccctgtgctgggcagcctggtgaacaccgtcctgaagcacgtcatctggctgaaggtcatcacagctaacatcctccagctgcaggttgaagccctcggccaatgaccaggagctgctagtcaanatccccctggacatgggtggctggattcaaaca

SEQ ID NO: 1163 - DNA, 468 bp, Homo sapiens
  misc_feature 1, 296, 299, 412, 414: n = A,T,C or G
ncgccgtatcactactatagggcgaattggagctccccgcggtggcggccgaggtacgcgggggcattgttggaagtttactctggttaaaggatagagaaaaaaatggaaagaggagggtaatcacaacagtctaggcaagagatgatggtagtttggagacagaaggtgtggcagtggacatgaagataagtggatggatttgagagaaacttggagagtgaaactgcatggatagtgatggatcaatgacagtagactgggatgaatggaagtacctgcccgggcggccgctntanaactagtggatcccccgggctgcaggaattcgatatcaagcttatcgataccgtcgacctcgagggggggcccggtacccagcttttgttccctttagtgagggttaattgcncncttggccgtaatcatggtcatagcttgtttcctgtgtgaaattgttatccgctc

SEQ ID NO: 1164 - DNA, 470 bp, Homo sapiens
  misc_feature 12, 92, 231, 239, 316, 358, 370, 375, 387, 398, 416, 434,439, 448: n = A,T,C or G
ggcgccgaatcnctcctatagggcgaattggagctccccgcggtggcggccgaggtactttttttttttttttttttttttttttttgaaangttaaaaattttaaaatttaataacttgaatatacatctgctttgaaataggacataaagtcatacagtatttttacataattttcttgcttttcaataatagtatgcaactcataaagaaataaagatctaaggagcncaaagatncatgtatgtgatttaaaagaagcatttcaaataaacaggaaaaaaattactctcttatttcataccgtatctattgncttcatcataacagaaatctataataataagaactagagctntcacagcacctntcatntgctgacactgngttaaacactntacatccatcacctcctntaatcttcacaattctgngaggnggatactgnaattgactttatctccatatta

SEQ ID NO: 1165 - DNA, 463 bp, Homo sapiens
taatcactacttagggcgaattggagctccccgcggtggcggccgaggtacgcgggggcagtgggaagctcgcagcagctggggaggagccaaagcctcggcgctcacctaagccgcagggagatacacccaactgggagatgaggaaacagcaacccagagaggagaactaacccacacaggatcatttcgcgaaggagcaaggctgaagaaccagacctggactttcttaggacaaacttactgcagcttgaaggagccaaccatggatttgaggcgtgtgaaggaatatttctcctggctctactatcaataccaaatcattagctgctgtgctgttttagagccctgggagcgatctatgtttaacaccatcttactaaccattattgctatggtggtatacactgcctatgtctttattccaatccacattcgcctggcttgggaatttttctcaaaa

SEQ ID NO: 1166 - DNA, 480 bp, Homo sapiens
  misc_feature 296, 438, 448: n = A,T,C or G
ggccgctatcactacttagggcgaattggagctccccgcggtggcggccgaggtactagacggggctgtaatctggtaactgtatgtattttagttcttcagtccctgggaaggagacaggagaaggtgggagggaggaaggggccagctgaaatggaaacagatccctgatccggggcggtcagtggaacccttcttggtgtgcgagagcctgtgcatttcagaggcagcaaaaaagttaaaaaaaaaaaaaaaaattgatctttgtttagattaacagacccctgactatgaanaaggaaggcatccagaccagaaaccgaaaaatgtctagcaaatccaaaaagtgcaaaaaagtgcatgactcacttggaggacttccccaagaacagctcgtttaacccggccgctctagaactagtggatcccccgggctgnagggaattcnatatcaaagcttattcgataccggtttgacct

SEQ ID NO: 1167 - DNA, 477 bp, Homo sapiens
  misc_feature 7, 15, 431, 443: n = A,T,C or G
ggccgcnaatcactnctatagggcgaattggagctccccgcggtggcggccgcccgggcaggtactgttgcagtgagctcaagtgttgggtgtatcagctcaaaacaccatgtgatgccaatcatctccacaggagcaatttgtttaccttttttttctgatgctttactaacttcatcttttagatttaaatcattagtagatcctagaggagccagtttcagaaaatatagattctagttcagcaccacccgtagttgtgcattgaaataattatcattatgattatgtatcagagcttctggttttctcattctttattcatttattcaacaaccacgtgacaaacactggaattacaggatgaagatgagataatccgctccttggcagtgttatactattatataacctgaaaaaacaaacaggtnattttcacaccnaagtaatagatatcatgacacatttaaaataggg

SEQ ID NO: 1168 - DNA, 487 bp, Homo sapiens
  misc_feature 3, 147, 167, 182, 194, 205, 227, 228, 249, 252, 283, 294,318, 319, 328, 334, 379, 408, 423, 435, 447, 454, 463, 475,480, 482, 485, 486: n = A,T,C or G
ctnctatagggcgaattggagctccccgcggtggcatgagagacaaagctgagaagtgtggtggaaaaggaagagagagctgaggcagacgatgtaagatctgctgttacttcttgctgtgtgaccttggggtgaagcagcaagaangcccttgctagatgaggctnctcaactgtagactncccagcctccanaactgtgaagngaagtgggtgtgcctgggatcnnacacagctgctaaaagaaggnctnaagagccacagatgtcttggatatttactgnttttcagactntactacccagacaccaaaagtaannaaatgattnaccctngaggcttgccttggtctaaggtgaaaaaatatatgtaccttggcncgctctaagaaactaggtggatccccccngggctgccaggtaanttcctaatattnaaggcttattcngataccngtctgaccnttttaggggggnggccncngcnnt

SEQ ID NO: 1169 - DNA, 463 bp, Homo sapiens
  misc_feature 9, 201, 350, 395, 406, 432, 463: n = A,T,C or G
aatacactnctatagggcgaattggagctccccgcggtggcggccgaggtacgcgggggtagatggaaggaagaacttgtgtgcttagacctgacgctgggaggagatgctgccacctaggttacttgtaggaccctatacggcaacctcctttgccaggaactatttataaacatcctgcaggaaaatgcagtgaagtanaagagacagggatatcccagaaggttatgcaaaacatcaagagaagatgagaggagtctatatgtcagaatacacatttcccaccttgcccaacagtagaaaaaaaaaaaaaaaaaaaaaaaaagtacctgcccgggcggccgctctanaactagtggatcccccgggctgcaggaattcgatatcaagcttancgataccgtcnacctcgagggggggcccggtacccancttttgttccctttagtgagggttaattgcn

SEQ ID NO: 1170 - DNA, 467 bp, Homo sapiens
  misc_feature 8, 467: n = A,T,C or G
ggccgcgnatcactactatagggcgaattggagctccccgcggtggcggccgaggtacgcgggggcattgttggaagtttactctggttaaaggatagagaaaaaaatggaaaggggagggtaatcacaacagtctaggcaagagatgatggtagtttggagacagaaggtgtggcagtggacatgaagataagtggatggatttgagagaaacttggagagtgaaactgcatggatagtgatggatcaatgacagtagactgggatgaatggaagtacctgcccgggcggccgctctagaactagtggatcccccgggctgcaggaattcgatatcaagcttatcgataccgtcgacctcgagggggggcccggtacccagcttttgttccctttagtgagggttaattgcgcgcttggcgtaatcatggtcatagctgtttcctgtgtgaaattgttatccgctn

SEQ ID NO: 1171 - DNA, 527 bp, Homo sapiens
  misc_feature 2, 6, 504: n = A,T,C or G
gntacnccctatcactcctatagggcgaattggagctccccgcggtggcggccgcccgggcaggtaccatgattagttaaatataagactccgtaatttttacaattttaacaataattttatttcttcaagcttgttagtttgggattgtattaaaactacagtgtgtgacttagaaaatgataatgctgctttatggaaaatggattataggtgggtaagacttcattgcaaaaattgtgtaataccatcagtgttaggaacccagttgaagtctaagaagacagatgttagtatcttagactaggttggtatttgaatagatattggtaatatcagtagaatttaataatacattagaaagaaagaaatcagagaagattcttttattttcacttgatacttgtgttgttactttcaatgagataagaaggacaggcaaaggagaaagttcgggggcaggggatgagaagaaaacaagaattttatgttggacatgctaangttaaacacctgcttaactcaga

SEQ ID NO: 1172 - DNA, 803 bp, Homo sapiens
  misc_feature 458, 706, 759, 766, 774, 783: n = A,T,C or G
gcgccgtatcgactcactatagggcgaattggagctccccgcggtggcggccgcccgggcaggtacgcgggattgacatcccacactacctgatttgatacactaagaagggcttatcatttctgtggtactcttggccaacaatgcacgtgtaacatttattcattgaaacacattaggcagaattgcaggacattcttcaaaatagctgtccaatactcttcaaaagtgtcaggtcctggaagacaaagagatactgaggaaccatcacagagtgggagaggacatagagtgataaaaactaactgtgatgtggaatcctacattggatcatggaccagaaagacagcactgatgggaagactgatgaaatctgaataagtctgtagtttggtttaaagaagaagaataataacaataatggtttagctgctggctccttaataaaattcccctanttactgtaatgtctgaaaatgaaccccctatggtgggctactgtgactgttcactgcatttgagaataaagaataattaaggaaaaaaatactctgtcagcctaggcaatatagtgagactctatctgtacctcggccgctctagaactagtggatcccccgggctgcaggaattcgatatcaagcttatcgataccgcgaccctcgagggggggcccggtacccagcttttggttccctttaatgangggttaattgcgccccttggcgtaatcatggtcatagctggtttcctgggtgnaaattgntattccgnttacaattncccacacataccaaccgggg

SEQ ID NO: 1173 - DNA, 872 bp, Homo sapiens
  misc_feature 12, 20, 51, 602, 610, 612, 613, 614, 615, 616, 620, 671,694, 701, 711, 714, 734, 735, 749, 759, 762, 779, 785, 793,807, 826, 835: n = A,T,C or G
acggtatacgcntcactatngggcgaattggagctccccgcggtggcggcncgcccgggcaggtaccaggcaggatggagcaggatggtgtgagatttcatcacactactcaggatagtgcacaatctaacacttatgaattgtttatttctaaagttttccatttaatatatttgaaatgaagtagaccctgtgtgtagctgaaactttggaaaggaaaactatggataagggggactactagaatacacttcaataaaatagcattttaacaaaatcctagtgtccgtagagtagttctccatctagctgtccatctttcaaacgtggagagaggtgagatgagggagaagtatggtcagagaggggagacaggtgtgtgtggtgtgggtgtgcaggtagatacatagctcagtgttcactgtgagaggtgaacagagaacattccaagcaatgggagtggcatgatacaaggcacaaagaagtcaaactgaaaggcaccttcaggaaaaagaaaggagtctcttgcaattcatacacagagatcggcactggcaagaaacaggactctgggggaaaaatcagggcttccaaaaaaaaanggaaaaanannnnnaaangtccctcggccgctctagaactagtggatcccccgggctgcagggaattcnatttcaagcttatcgatcccgcnacctcanggggggcccnggncccaacttttgttcctttanngagggttaattgcncccttggcgnaancatgggcatagctgttncttggngaaattgntttccgtccaattncccacacatacaaccgggncataagggnaagcctgggggcctaatgagtgactactcccttattg

SEQ ID NO: 1174 - DNA, 800 bp, Homo sapiens
  misc_feature 696, 717, 718, 720, 723, 753, 768, 777, 788, 799: n = A,T,C or G
gcgccgtatcgactactatagggcgaattggagcctccaccgcggtggcggccgcccgggcaggtacttaaacagttatagtcaccatcacctgcttcagaatggtcttttagatttgtgtttgttttgttaaagttgttggcaccaggatgcagagaatcagactggcctgaggtgaaggagcacacagccctgagggcttggaaccctgggtccagttcctcttcacacccccttccactctgagtagcacatctccccaggtgcccatggaacacctgctttcatcccaaatatccgtccacctaggcggggtggtatgttcttacgtctctctgactttgatgccactcattctatagtttagctggttttcgttcaagatattcttggtagtaactgacaagtatgttgcacatgtattgggggaggcgcttcatttttattttaatacacatgtatttcctccttgcacaggattttgatggtgtgggaatatcctaagtggtagccttccaaagtagcagtgagttgacattcagctgcttttaactattcaggctaccttttatactaaaccttgaaaactagaatctaatgtctaccccaaaaaagtaagttctttgatattttatactttttatgtaccttggcccggtctagaactaagtggatcccccgggctgcaggaattcnatatcaacttatcgatccggnnanccngagggggggccccggtcccaacttttgttncctttagtgagggtnaattgcccncctggcgtaancatgggcaaang

SEQ ID NO: 1175 - DNA, 803 bp, Homo sapiens
  misc_feature 532, 627, 670, 675, 684, 737, 740, 747: n = A,T,C or G
gtatcactactatagggcgaattggagctccaccgcggtggcggccgaggtacccagactccagtatgaaaactctctgggctgtgtcctatgatcttcccatgagtaactcatagtcttgatccagtggaatctggccttcattagtctcagtggcaagttggttatgtggaaagtctctgttcactcacttgggtgaataacagtaaagacctttctattgttttcactttacattaggccatgagtatttgtgcctgtagctgcagtttgtgttagtttcctaccccaggtatctcctgcagcatgcagcttcagtcctaccagaccctcaaaacttaaaagcgaacactatttctagggaggattttgcaggaaaatggagaaagggttacacacaaaaaaggttaaactactctatgcatgtttctgcaatgtgttatctcaagaattcatctctgtagcccatcagggcaggagctggtctctcacctgttgataatattccataagggaggttcttccccacaantgtttagtcttccgacgctggtatagcctgacatgatgacattctactttcatgttggtcgtgctgcagggagaattctgtgagtgtcccaatangctgggaatcacttgctaagggtgaaccccatctttggtgctnacttntctggtatnttataattagcttttattctaagccaaatccatggctatattatttaatctgnttnattaacntaattttaatgtatgggaaaaacacatttttttatttggcttaattaattaagaag

SEQ ID NO: 1176 - DNA, 822 bp, Homo sapiens
  misc_feature 3, 7, 8, 9, 60, 610, 716, 743, 761, 774, 775, 785, 801: n = A,T,C or G
gcngcgnnncgcgtaatcgactcactatagggcgaattggagctccccgcggtggcggcncgaggtacttttagtagagatggagtttcaccatgtagtccaggctggtttcaaacttctgacctcaggtgatccacctgccttggcctcccaaagtgctaggattacaggtgtgagccactgtgcccagccagaatatatcatttcactggactctgcaggtgctttggatgatcaaggaataggacatggctgtagaagtacgcgggtgttgaggaggcatatttttaaaagaatcaaatataatttagataggaaatgacaaactcagcagacatattatgaaggaaatgagacatacaggagaagagaattaatgaattggttggaggctagaacttaataccctcattgtagccaagaagagagagagagaaaaaaaaggaaaacatgaagggaataaagaaacatgttagtgggatgagagtctcacatatgtattctgtaaagtagaaactgaaggaagggacaatattcaaagtgagatgaccaagtacctgcccgggcgggcgctctagaactagtggatcccccgggctgcaggaattcnatattcaagcttatcgatacccgtcgacctcgagggggggcccggtcccagctttttgttcccttttaattgaggggttaattgcccccttggcgtaatcattggncaatagctgtttcctgtgtgaaaatgnttttccgttcacaatttncccacaacattcnnaaccggggancaataaagtgtaaaancctggggggcctaaagagggg

SEQ ID NO: 1177 - DNA, 493 bp, Homo sapiens
  misc_feature 1, 2: n = A,T,C or G
nngccctatcgactacttagggcgaattggagctccccgcggtggcggccgaggtacaccatccccaaggacacggaagtatttctcatcctgagcactgctctccgtgacccacactactttgaaaaaccagacgccttcaatcctgaccactttctggatgccaatggggcactgaaaaagaatgaagcttttatccccttctccttaggtaagctggacccacagtttctttcccagacaccagaggggcaggtcctatcctcaactttgagaaaaaaaatgacaggtccttattaattgagcacttaatatattccaattgcttcacctgccttatccccttccatcttcactacaaccctgtaaggaggcttgagaaagaagatgacattcccaaaggcacatctgggcaagcaggaacttgggcaagtattttaacatcttctaaacctcagtgaattcattttcttaaaaagaaaaaaatcttgtt

SEQ ID NO: 1178 - DNA, 515 bp, Homo sapiens
  misc_feature 2, 3, 5, 9, 10, 13, 15, 218, 274, 280, 288, 328, 370, 417: n = A,T,C or G
gnngntttnntcncnttactatagggcgaattggagctccccgcggtggcggccgaggtactttttttttttttttttttttttctgctttgatttcatttttatttttttaagaagaaaataaaaatctcaaagactaagttctcatactgtaattcctggaaatcattctggagtcaaatacttttgtctgttaagaaaaaaaataaaatgtaganatttcctgctgctccgggagtgtcgccagcagacaggggttttcagggctcccccntgccanaaactttnttgaagcaaacgtgggcaagctgcccgggacccgggcctntgagttgcagagaagcaggctgttgccaggaagcggactcanacagtggaggcccctcgcttgaccctttccggggccacgtgattttntgcaaagcacaaagacagcagcggtcaggcggttttcagttgtttggacggccccaaggagtttgtccttttaaaatccttcttgctgggggtgatcc

SEQ ID NO: 1179 - DNA, 852 bp, Homo sapiens
  misc_feature 4, 6, 10, 13, 14, 16, 23, 24, 34, 46, 63, 68, 225, 256, 350,353, 355, 394, 488, 502, 528, 530, 545, 550, 591, 601, 617,631, 700, 716, 720, 725, 735, 749, 772, 776, 779, 785, 786,806, 811, 813, 821, 829, 840, 842, 848, 851, 852: n = A,T,C or G
tcgncncgcntanncnacttacnncgagtcgganctccaccgcggnggcggcccgaggcactntactnttttttttttttttttttttgggatttttagctgatgaaatatggtcccatttatcatcagttctaacttcgtgttactactgttgttcttaaggtccttaaagtaaattttaagactcaatctaagtgtgtcagtgttgattaccattctatttanaaaggcagaatttgtcttaaaagatatttgnctaaagtgtgtgttagtatttgtcaaaataaatggagggagggagtgggtgagctgggatagaggcaggcagaaagcaacaggacagagagttngananagagaaagaaaaaaaactttttgtatcctaccatacatnttctggggagttataagttggacactgactcatcccaggaagccaactggtaaatattcagaaatcctgtgggccagtcgttaaaccaatagtngtttgaaatcagtntaggtgtacctgcccgggcggcccgntntagaactagtggatnccccnggcctgcaaggaattcgatttcaagcttatcgatcccgtcngaccctcganggggggggccccggtncccaagctttttgnttccctttaatggaggggtttaaattgcccccccttgggccgtaattcattgggtcaataagctgtttncctggtttgaaaattntttntccgntcacaatttncccaacaacatacnaacccggggagcaataaagtgtnaaanccntggggnnccttaatgggggtgagcctncctcncnttaattgnggtttgcnctccctggccngnttttcnagnn

SEQ ID NO: 1180 - DNA, 506 bp, Homo sapiens
  misc_feature 1, 3, 332, 500: n = A,T,C or G
ntngagtaccactcactatagggcgaattggagctccccgcggtggcggccgcccgggcaggtactgctaaagaactctagaacatacagggtgtagacggcagtcttcttggggaaaaagaggcttcaggattgcaagatttcagctactgtctctcctcggagcaggattccatcttttccatggctggggcccttgacacatgtcactgtacactgctcttctcgctgggatttccaaaagaccttggctcaaggtgtcacttttgcagaaaagcatttactgactgttgacttggccaaatcccttgtgctgtgtttcctagcacggngagttgcatttttcacatgaactcatgcctaccttctcttgttttataagcttcatgaaggcaggtacctcggccgctctagaactagtggatcccccgggcctgcaagggaattcgatatcaagcttatcgatacccgtcgacctcgagggggggcccggtacccancttttg

SEQ ID NO: 1181 - DNA, 488 bp, Homo sapiens
ctatcactactatagggcgaattggagctccccgcggtggcggccgcccgggcaggtacccgggaggctcgcatgtgtgggtgcatgccgtggcaggagaaggcttccgaagagccatgcatgcgtcctctggctgctccaggtgtaaaaaatgccagggaggggacaatgatgagtcctaggcaggaaaggtcctctggagagaggaaatggcacacgcgcaagcacggaggcatgaggggccagggtcctggaggacactggggccgggacagatcagactccccccgcgtacctcggccgctctagaactagtggatcccccgggctgcaggaattcgatatcaagcttatcgataccgtcgacctcgagggggggcccggtacccagcttttgttccctttagtgagggttaattgcgcgcttggcgtaatcatggtcatagctgtttcctgtgtgaaattgttatccgctcacaattccacac

SEQ ID NO: 1182 - DNA, 797 bp, Homo sapiens
  misc_feature 2, 3, 6, 61, 653, 684, 693, 700, 705, 714, 717, 733, 735,739, 743, 755, 789: n = A,T,C or G
gnnggncgcgcgtaatacgactcactatagggcgaattggagctcccccgcggtggcggcncgcctgggcaggtacacacttgtgtgcatttctgttgggtatataacaagtatgaaattgctgggtcttaaaatatttatatattaacttcattaaatgctgcctaagaatttttcaagtggttgtgctattttaccttcaccagttctagttgttccatatccttgctgtcacttggcattatctgtattttttattttgaccagactggtctgtgtgtcatagtatcccattgtcattttaagttgcatgcctttgatgaagacattttctgatgcttaattggctctttgaatatattctgtaactgatttgtaggaagttttttatatattctggatataagttttttattggacataaatattgcagatatcttctcccactttaacttcccttttctttctcttaatcatgactttcttaatacaaagttcttaattttaatgtagtccaacttagcagactttttctttatagttaatgcttatttaagtcttgctcaagaaatttttgtcaactccagtgtcataaagaaactctcttatgttatagaagcttggtttttttttttttttttttgagaaggagnctcactttgtcaccccaggctaggggggcantacacaatnttgggtnactgnaacctcctnatnccgagttcaacaattntnctgnctanccttcccagtancctggactacaggtgtccaccccatgcccgggtnaattttgg

SEQ ID NO: 1183 - DNA, 498 bp, Homo sapiens
  misc_feature 1, 430: n = A,T,C or G
ntgccctatcgactactatagggcgaattggagctccccgcggtggcggccgcccgggcaggtacgcggggggagatgctgccacctaggttacttgtaggaccctatacggcaacctcctttgccaggaactatttataaacatcctgcaggaaaatgagtctatatgtcagaatacacatttcccaccttgcccaacagtagaaaaacataagaagagaaaaacattaaaaaatgacaaggaagttaatggaagtcagcaatgtgatgggtgtttggaggtggagccttcagaaggtaattaatgcccttgtaagaagaggccagagagcttgcgcaccttcttcctgccatgtgaggagccaaagaagccggctgtctgcaacctgcaagaggaccctcactagaagctagccatactggcatcctnatcttggctttccaacttccagaactgtgagaagtatattgtttgtggtttagtcaatgggtctatgg

SEQ ID NO: 1184 - DNA, 439 bp, Homo sapiens
  misc_feature 397: n = A,T,C or G
actactatagggcgaattggagctccccgcggtggcggccgaggtacactgatttccgatcaaaagaatcatcatctttaccttgacttttcagggaattactgaactttcttctcagaagatagggcacagccattgccttggcctcacttgaagggtctgcatttgggtcctctggtctcttgccaagtttcccagccactcgagggagaaatatcgggaggtttgacttccccgcgtactttggagtcccctggtttctcaagaattgccgttgactctttctttggcttctgctggcacggtaaccagactccctacaactgcactctttgtctttgtcatggaagccgcgagccgtagaggttccgcgtgctctgccggactgtgagcaggntcactgggtcctttacacttgtgaattcgaagcttgccagat

SEQ ID NO: 1185 - DNA, 494 bp, Homo sapiens
  misc_feature 2, 3: n = A,T,C or G
gnngcgctaacatactatagggcgaattggagctccccgcggtggcggccgaggtacactgatttccgatcaaaagaatcatcatctttaccttgacttttcagggaattactgaactttcttctcagaagatagggcacagccattgccttggcctcacttgaagggtctgcatttgggtcctctggtctcttgccaagtttcccagccactcgagggagaaatatcgggaggtttgacttccccgcgtactttgggagtcccctggtttctcaagaattgccgttgactctttctttggcttctgctggcacggtaaccagactccctacaactgcactctttgtctttgtcatggaagccgcgagcgtagaggttccgcgtgctctgccggactgtgagcaggtcactgggtcctttacacttgtgaattcgaagcttgccaagatgtatccccaatgcattgccacttctgccccggttgttcacaggct

SEQ ID NO: 1186 - DNA, 503 bp, Homo sapiens
  misc_feature 8, 20, 24, 26, 52, 124, 453, 467: n = A,T,C or G
tatcactncttagggccaantggnanctccccgcggtggcggccgaggtacncgggggtggacagacatgggagtgctgaatccccagagttagagtccacatcatgtctctctgaagaacagntaaagtgtcttctggatgaatgcatacttaaacaaaaatccatcattaaactttcttcagaaagaaaaaaggaagacattgaggacgtaacacctgtgttcccccagctttccaggtccatcatctctaaattgctaaatgaatcagaaacaaaggtccagaaaaactgaggtagaagatgccagatattgctttgagagtgaagaaatgttgaagctttcttaaaagggctactatctcactaaaagccctttgacctggggaccattaaccatggttcaaaaagcttctttgttccacttgaaagccaggaagaaaatattgaaaantgcccttttcaaantttttcccaaggggaccgttttatttatttaggtgg

SEQ ID NO: 1187 - DNA, 462 bp, Homo sapiens
  misc_feature 458: n = A,T,C or G
ctatcactacttagggcgaattggagctccaccgcggtggcagcggccgcccgggcaggtacacacactcacgcatgcacaggcacactcaccgggacacgcacacagttgtgctgtgcacacaggcatacacacacacaccctcacacgcacacacactcgctggatcactcacacacacacatccacgagaggcgcggcgcctctttggtcgtgcagccagcccctggcttgcttttgaaggctctgctaagtcgatggtcaggttgccaaagggccggtcatctcgcatcctccctcccttcggtgcctctggtctgatgtccagtgaggatcaaagccaggagagcgagatggaagttttcctgctgcaacgcttaagctccggttgaacacaaggcttggactccccgcgtcctcggccgctcttagaaactagtggaatcccccggggctgnagga

SEQ ID NO: 1188 - DNA, 492 bp, Homo sapiens
  misc_feature 426: n = A,T,C or G
gcccggccgcgaatcgactactatagggcgaattggagctccaccgcggtggcggccgcccgggcaggtacgcgggggtagatggaaggaagaacttgtgtgcttagacctgacgctgggaggagatgctgccacctaggttacttgtaggaccctatacggcaacctcctttgccaggaactatttataaacatcctgcaggaaaatgagtctatatgtcagaatacacatttcccaccttgcccaacagtagaaaaacataagaagagaaaaacattaaaaaatgacaaggaagttaatggaagtcagcaatgtgatggtgtttggaggtggagccttcagaaggtaattaatgcccttgtaagaagaggccagagagcttgcgcaccttcttcctgccatgtgaggagccaaggaagccggcntgtctgcaacctgcaagagggacccttactagaagctagccatactggcattcctcatcttggctt

SEQ ID NO: 1189 - DNA, 465 bp, Homo sapiens
ggccgctaatacgactcctatagggcgaattggagctccccgcggtggcggccgaggtacgtaatagtatcaggcattggcttagacactgaggataagagctctatatacttgtgaacttggtgaaagttgagaaggatggagaaagagatagaatgaatataaaaatatgagtagagaattgctttaatttgaatagcctcattgttttagtgctctgaatagaaatagaaaaaaatggttagtatttactggaattgctatttttaggtcattcagagttaaggacaaatttcaattgtcacacataaaaggtcttatttacataaacaattttacagggcttgtacaaatacaagaaaccaaaagccctaactgctgtttctcatggggttaaatctgtctcttcaatctatcaaatatttggctttagaatcctaacagtctttagctatcattcaaagt

SEQ ID NO: 1190 - DNA, 460 bp, Homo sapiens
  misc_feature 1, 20: n = A,T,C or G
nccctatcatacttagggcnaattggagctccccgcggtggcggccgcccgggcaggtacatggagggctgatttatcacatacgtgggttctgtagggcccactgtgggacttgagtatgcattgggtttttgtatactcaggcgttctggaactatcctccatgtataccaaaggatggttatttctacaaaagcaggaggtaaagcccaatgcacagcttgcagattcccctcaggcgagagacagaggttaagggtagatggcagatgacctaagtggcttgttttaggaggccactcccagggccacagctttcatgtgtttgccaccagggtagaaggtcttgctgacaagggcaatgactactaacagccccagcttgcatggaaacagaaaagggcatattgcttgtggccaccagggctcaggctctatccctcagcaagctttgggatcc

SEQ ID NO: 1191 - DNA, 455 bp, Homo sapiens
  misc_feature 2, 3: n = A,T,C or G
cnnaacactacttagggcgaattggagctccccgcggtggcggccgaggacgcgggagtttttcagaatcaggcctgctttgtccctaaatgctttcttatttccccagagcccttattggatttaagccccatatcatatctcacatacctgagacagacataccacagtgaaccctgcatgtccttgtaagttctttttccgtgcctagaagttgcagaagaccaaggaaccttggaagtgacttactcttttgcttcataaagttgctttaaaacagcctttattttaattattaacaaggtatgtcacacatttttaaattttaaggttaatttagtcattaattctgtcaaacaagtgttctttggaagctagttgtcttcaatgtcttttacttggagttacttggaagtttgcttaaactttattcacttggagtagaacttcctagt

SEQ ID NO: 1192 - DNA, 470 bp, Homo sapiens
  misc_feature 2, 3, 4, 5, 9, 395: n = A,T,C or G
gnnnngttnggccgcgtatacgactcctatagggcgaattggagctccccgcggtggcggccgaggtacgcggggaacttgtgtgcttagacctgacgctgggaggagatgctgccacctaggttacttgtaggaccctatacggcaacctcctttgccaggaactatttataaacatcctgcaggaaaatgcagtgaagtagaagagacagggaatatcccagaaggttatgcaaaacatcaagagaagatgagaggagtctatatgtcagaatacacatttcccaccttgcccaacagtagaaaaacataagaagagaaaaacattaaaaaatgacaaggaagttaatggaagtcagcaatgtgattggtgtttgggaggtggagccttcagnaaggtaattaatgcccttgtaagaagaggccagagagcttgcgcaccttcttcctgccatgtgaggagccaagaa

SEQ ID NO: 1193 - DNA, 460 bp, Homo sapiens
  misc_feature 1, 2, 6, 7, 16, 33, 206, 446: n = A,T,C or G
nnggtnncgctctctncttagggcgaattgganctccccgcggtggcggccgcccgggcaggtaccatgattagttaaatataagactccgtaatttttacaattttaacaataattttatttcttcaagcttgttagtttgggattgtattaaaactacagtgtgtgacttagaaaatgataatgctgctttatggaaaatggantaataggtgggtaagacttcattgcaaaaattgtgtaataccatcagtgttaggaacccagttgaagtctagaagacagatgttagtatcttagactaggttggtatttgaatagatattggtaatatcagtagaatttaataatacattagaaagaaagaaatcagagaagattcttttattttcacttgatacttgtgttgttactttcaatgagataaagaaggacaggcaaagganaaagttcaggggca

SEQ ID NO: 1194 - DNA, 465 bp, Homo sapiens
  misc_feature 4, 465: n = A,T,C or G
gggnggcccgtatcgactccttagggcgaattggagctccccgcggtggcggccgaggtacgcggggattatcttagtgtaaatgattttttgtaaaataatttagttgttagatacatgaacagatttttgcaaagaaaacaaattgcatggcactgtatcctctcaggacattttgagataagatgtgaaaatgatactcattggaaccaaaaaaagattgaaaataatttttgtagaaaatataattaatttattctactatggtgtgtatggtgtgtgtgtgtgtatatatatatatatatatatactgaaataaaattatgagtaattaactttatgacaggtaacactaataaagtgcagtggcatgttcctgaaatcccagcattttgggggattgaggtggggaagggattactttggaggccagggagtttgggactagcctgggccaacatggcn

SEQ ID NO: 1195 - DNA, 497 bp, Homo sapiens
  misc_feature 5, 326, 330, 342, 359, 380, 394, 406, 414, 416, 418, 424,483, 496: n = A,T,C or G
gcccnaatcactacttagggcgaattggagctccccgcggtggcggccgaggtacactgagatgattattccctctttttttaaaatttgaagtttcctttgattccccttttcttttacaaaatggagtcatgacacgatccccgtgtcccgtgttgagaactgaaaggtttctgtagctttcctttgacatgaaatttcaaaaatatactactctgtttcactctggcctgtaattgttgcactctggcctttaattgttgcaactgattagacatttttccttccagcattatggtagactcgatgccctgaccaagcacccnttancatgctcaagtnattattcttaagtctanaattggtagaagttccttaangttaagccttccanaaaggaaaagtngaaaatanantnttttangaaagaattttggaggaaacccaacagaatttttgggtatcagccaaaggcccatgtgnaagaatggagcana

SEQ ID NO: 1196 - DNA, 474 bp, Homo sapiens
  misc_feature 340: n = A,T,C or G
ggggccgtatcgactcctatagggcgaattggagctccaccgcggtggcggccgaggtactttttcactttttttttttttttttttgcatttgagctaagattttaacaatcctgtgaaaataggtaatatagtcacgtatttgttgaatacattatttcaaagaaccacaaacacacagaaaaaatatttaaaaagtccatggtggggggaaatgatccagaaacaacagctcttctacttccagccctaaccgtctgggatgctagatggttgtgggcaaaccgtggaaaaagataagcttctgtttttcaagattttattttgttagagagtgcanaaaatctaagtgatgtctctgtttttgccttctagcaattaatatatgacagcagtctttgtgatttattttaactttctgcaagacctttggctcacagaactgcagggtatggtgagaaaccaactacggat

SEQ ID NO: 1197 - DNA, 504 bp, Homo sapiens
  misc_feature 444, 457: n = A,T,C or G
ctatacgactactatagggcgaattggagctccaccgcggtggcggccgaggtactcttggttttttaagacaaagagcaaatcctcccctgccaggattgacttttggctcttttttttcaaacctcactgctttttggtttagttgtcataaaatgccaagcaccatgaacagggctccatgaaggggctcagaggtaggagggctgtgattaggagaaggcttggactgatgggcaatttgagtgctcagaattagagtgagggggtgggggtgctgcagggacagatgctggggaaagacaccctgaagggcaaaggggagcaacaaatgggctgcaagtaccttgccccgggccggccgcttcttagaaactagtgggatcccccgggcttgcaaggaaattcgatatcaagcttatcgaatacccgtccgaaccttcngagggggggggcnccgggtacccaagcttttttgtttcccttttaagtggaggggttaat

SEQ ID NO: 1198 - DNA, 493 bp, Homo sapiens
  misc_feature 2, 56, 75, 99, 122, 162, 234, 239, 254, 392, 409, 410, 415,426, 428, 441, 449, 451, 461, 464, 480, 484, 487, 493: n = A,T,C or G
gngcctatcactacttagggcgaattggagctccccgcggtggcggccgaggtacncggggatgctgccacctangttacttgtaggaccctatacggnaacctcctttgccaggaactatntataaacatcctgcaggaaaatgagtcaaggaagcttttnttttgagctatttacagcttttagcaattgagtaaagtatactcctgtgaacaaaatttggaacatatttgnttctntctaactgatttctncagaatttggaactagttcagtgaagtagaagagacagggatatcccagaaggttatgcaaaacatcaagagaagatgagaggagtctatatgtcagaatacacatttcccaccttgcccaacagtagaaaaacatangaagagaaaaacattannaaatnacaagggatgntnatggaagtcagcnatgtgatngngtttggaggnggngcctttaaaaagttantaanggncccttn

SEQ ID NO: 1199 - DNA, 500 bp, Homo sapiens
  misc_feature 2, 3, 4, 5, 11, 62, 84, 124, 130, 165, 202, 228, 267, 270,338, 350, 497: n = A,T,C or G
gnnnngcccgnatcgactacttagggcgaattggagctccccgcggtggcggccgaggtacncgggggcagtgggaagctcgcngcagctggggaggagccaaagcctcggcagctcacctaanccgcanggagatacacccaactgggagatgaggaaacagcnacccagagaggagaactaacccacacaggatcatttnccgaaggagcacggctgaagaaccanacctggactttcttaggacaaacttactgcagcttgaanganccaaccatggatttgaggcgtgtgaaggaatatttctcctggctctactatcaataccaaatcattanctgctgtgctgntttagagccctgggagcgatctatgtttaacaccatcttactaaccattattgctatggtggtatacactgcctatgtctttattccaatccacattcgcctggcttgggaatttttctcaaaaatatgtggatatcacaataaccnccc

SEQ ID NO: 1200 - DNA, 406 bp, Homo sapiens
  misc_feature 365, 366, 369, 371, 377, 383, 384, 385, 386, 388: n = A,T,C or G
gagcgcgcgtaataccgactcactatagggcgaattggagctccaccgcggtggcggccgaggtacgcgggagaatttgttgcattgagttattaaagtagattatacacatttagcatggttagaaactagatgttaccactgagtgttttctccttaataagttagtttaagaggctggggataatttcacggtaaaatggcagcttaaccccagtttcaaacattgaaacttgaaaattttcctttttgaaaaattacatatacacctggcactctctatctgtgggtttcacatcccaggagtcaaccaacctcagaaacaaccaatcgtggattgaaaatactttgggggggaaaaaatnnaananaaaaanaaaaannnnanggtacctgcccgggcggc

SEQ ID NO: 1201 - DNA, 416 bp, Homo sapiens
gagcgcgcgtaataccgactcactatagggcgaattggagctccaccgcggtggcggccgcccgggcaggtacgcgggagaacttgtgtgcttagacctgacgctgggaggagatgctgccacctaggttacttgtaggaccctatacggcaacctcctttgccaggaactatttataaacatcctgcaggaaaatgagtcaaggaagcttttcttttgagctatttacagcttttagcaattgagtaaagtatactcctgtgaacaaaatttggaacatatttgtttctctctaactgatttctccagaatttggaactagttagtctatatgtcagaatacacatttcccaccttgcccaacagtagaaaaacataagaagagaaaaacattaaaaaatgacaaggaagttaat

SEQ ID NO: 1202 - DNA, 407 bp, Homo sapiens
gagcgcgcgtaataccgactcactatagggcgaattggagctccaccgcggtggcggccgaggtacgcggggcagtgggaagctcgcagcagctggggaggagccaaagcctcggcgctcacctaagccgcagggagatacacccaactgggagatgaggaaacagcaacccagagaggagaactaacccacacaggatcatttcgcgaaggagcaaggctgaagaaccagacctggactttcttagtgctcattcctgggccctcgatcactgcatgtttgttacatggtccagtttgctgcttcctggaagagcatctcctgactgtgatgcctttgagaataaagtctttccgaagccattaatattcagaaggagccacatggacaaacttactgcagcttgt

SEQ ID NO: 1203 - DNA, 401 bp, Homo sapiens
  misc_feature 106, 109, 126, 128, 135, 168, 264, 275, 345: n = A,T,C or G
gagcgcgccgtaataccgactcactatagggcgaattggagctccaccgcggtggcggccgcccgggcaggtactttttttttttttttttttttttttttttttnaangactgactgtgctccananagtgganaaaaatgaattgggagctgaggaggaatggtanatggaggctaattacaggatattccaagatgcttgaaaatcaacatccacatgatgagatgacctgggtatcttgggtttcttgtgtgactggcanaaattcatatntagaatataagggggttaatattggcattctctagggtggtggaagtgtctgttgtatcgtgtggggaanaaatcaccttgacaggaaaacatggagctcaacacatcacttattcagtcacaaat

SEQ ID NO: 1204 - DNA, 407 bp, Homo sapiens
gagcgcgcgtaatacgactcactatagggcgaattggagctccaccgcggtggcccgcccgggcaggtactattctctctcccagatcaaattttctccggtggctaaaaagttgtttgtggtaactgcagtgagtgctatacctgtaatttttctggctcatcactttaaaagaaaacgtggaaagaagaaaggaaaaatattaccatgggaaccagagcacctcatacttgaatacactaaaagagcagcatcagacaaaggttcaagttgttccagtagcagacagaatttgacattatctttaagttctaccaaagacaaaggatctcaagtttgtaactatgctaatggaggacttttcagtaaatattcaggttctgcacagagtttggcctctgtccaga

SEQ ID NO: 1205 - DNA, 494 bp, Homo sapiens
  misc_feature 2, 3, 4, 5, 7, 9, 10, 11, 19, 44, 45: n = A,T,C or G
gnnnngngnnnttccgctntacttctactatagggcgaattggnnctccccgcggtggccggccgcccgggcagctacgcgggataagaggccagaggaagagcgcttcgagcttcttcaaggaacttagagaagagcggcattgtgctccttctgggacccccacaggaccagagatccttgctgctgcagttcctccctcttccctaaagaacaatagggaacaagtagaagtggtagaatttcacagcaataaaaaaagaaaattgacgccagatcataacaagaacacaaaggctaatcctagtgttttggagagagatgtggatacacaagaatttaacctagaaaaagctcgtttagaagtgcaccggtttggtatcacgggttatggaaaaggaaaggagagaatcctggaacagggaacgtgccattatgctgggcgctaagcctcctaaaaagagttatgtgaattacaaggttttacaggagca

SEQ ID NO: 1206 - DNA, 902 bp, Homo sapiens
  misc_feature 3, 8, 66, 74, 77, 103, 236, 273, 321, 375, 383, 385, 447,457, 474, 588, 590, 610, 611, 624, 641, 645, 647, 654, 661,676, 682, 687, 690, 704, 724, 729, 733, 753, 758, 766, 779,785, 799, 801, 804, 815, 833, 836, 837, 857, 861, 865: n = A,T,C or G
  misc_feature 869, 875, 883, 895, 899, 900: n = A,T,C or G
cgncactnctatagggcgaattggagctccccgcggtggcggccgaggtactttgttctttttttntttttttnttnttggagcagctaaaatctaggatggngttaagtttcttcattttgtcaattatatataaaaaattagaaacaacatgaatctgcatttcttggatgagatagttaataacaaactatttctcaatatttgtatactaaaaactagtgaaggtgttatgngttccagtatcttatctcttatttgaacatgggtttntgaaaggagcctatataataatataaatggtatgtagtaaatgaggcnctgtcttggctgggactgctataaaaaaattaccatagaccattgactaaaccnccaacatntncttttcacagttctggaagttggaaagccaagatgaggatgccagtatggctagcttctagngagggtcctnttgcaggttgcaaacanccggcttcttggctcctcacatggcaggaagaaggtgcccaagctctctggcctcttcttacaagggcattaattaccttctgaaggctccacctccaaaccccatcacattgntnacttccattaacttccctgnnatttttaaatggntttcccttctaaagggnttancnacctggngggcaanggggggaaaatgtgnatttcntgacntantagacccccttcancttctcctggatggtttggnataancctnctggggatttccccggcttnttatnctccactnctttttccctgcngggaangtttaaaaaataantnccnggcaaaaaganggtgcccgcttaagggtnccnnaagtaaccctaggggggganggantttnttcncccctnaacctttngccggggggttnaacnncg

SEQ ID NO: 1207 - DNA, 939 bp, Homo sapiens
  misc_feature 91, 335, 355, 382, 397, 407, 488, 538, 546, 564, 565, 578,592, 704, 709, 719, 724, 746, 759, 798, 803, 821, 827, 834,835, 852, 871, 880, 884, 892, 897, 906, 908, 910, 912, 918,929, 933, 937: n = A,T,C or G
cgacactactatagggcgaattggagctccccgcggtggcggcccgaggtacgtggggaggccatctggctgctgctgctgctgccagctnccagacggaagctgacattcgctattgatgttccagcattgattgagctcctgcctcgtctgcatcaagcatggtcctcgcagcttcacgcagttagagtccacatcacgtctctctgaagaacagttaaagtgttttctggatgaatgcatacttaaacaaaaatccatcattaaactttcttcacaaagaaaaaaggaagacattgaggacgtaacacctgtgttcccccagctttccaggnccatcatctctaaattgctnaatgaatcccaaaacaaaatggtccanaaaaactggaggtangaagatgcanatagtgcttgagaagtgaagaatgtgaagctttctaaaggctactttctcactaaagccttgactggacataacatgtcanaagctcttgtcacttgaagcagagaatatgaaatgccttcattttccaangaccgttnttattagtgacacaaaannactatttttatgntcgaagacttcttnccattgggagactgaaaaagggccctccttcttaaatgatccacttggatgggatcaatggagagcctttcatcaaaaaaaccaacatctggaaactcagtttctcccaganaaatncaattgcctnatgangccaggatactaaaagatgctncttaaagaaatgntaaaagaacccttatccaagggcctttgttggggggtgnctttntcaaaaaaagttgggtantgaaantaaaatnnaaatttctttattgaantatttgaaattcaatggantgcccttgnaganaccttttntttantggattttngnantngggagntcgctctttgngganttanat

SEQ ID NO: 1208 - DNA, 896 bp, Homo sapiens
  misc_feature 385, 627, 631, 674, 754, 765, 780, 781, 782, 786, 793, 833,862, 867, 870, 872, 880, 889, 894, 895: n = A,T,C or G
acgcgcgtatacgactcactatagggcgaattggagctccaccgcggtgggcggcccgaggtacaattgtgtcatattcatgcacaacttcattttagtctctatttgacttgatttctttagtggatttgggctttttggccaataagataaatacctgcaagggacatcacataaaattcgatcatagaagaggatctctttcctgccgtccacatctatctggagcctgggtatgctggaggcatcatggttgaccacccccgcgtacaatggaacaaggagataagcagtgaaaggccaagggaatgtctggagttaggacttcaggtgattcacaacttggctgccactcacccgagactgcccaagcccagatttcttncttctataagaatattgattcttgcaaataagatgaacctaaatgtggtccaggagccagcatcttctacatggtacctgcccgggcggccgctctagaactagtggatcccccgggctgcaggaattcgatatcaagcttatcgataccgcgacctcgagggggggcccggtcccagcttttgttccctttagtgaggggttaattgcgcccttggcgtaatcatgggcataagctggttnctgnggtgaaaatggtattccgctcacaaattccacacaacataccnacccgggagcataaaagtgtaaagcctggggtgcctaatgagtgagctaactcacatttaattgcgttgccctcacttgncccctttccantccgggaaacctgtnnngccnactgganttaatgaatcggccaaccccccggggagaagcggtttgcntatttgggcgcttttccctttcttggttnaatgnctngntgggcctngggcgttcnggttnng

SEQ ID NO: 1209 - DNA, 482 bp, Homo sapiens
  misc_feature 2, 3, 6, 11, 54, 66, 380: n = A,T,C or G
gnnagncccgnatcatacttagggcgaattggagctccccgcggtggcgggccngggtccgcgggnagggagaatgctgccacctaggctacttgtaggaccctatacggcaacctcctttgccaggaactatttataaacatcctgcaggaaaatgagtctatatgtcagaatacacatttcccaccttgcccaacagtagaaaaacataagaagagaaaaacattaaaaaatgacaaggaagttaatggaagtcagcaatgtgatggtgtttggaggtggagccttcagaaggtaattaatgcccttgtaagaagaggccagagagcttgcgcaccttcttcctgccatgtgaggagccaagaagccggccgctctanaactagtggatcccccgggctgcaggaattcgatatcaagcttatcgataccgtcgacctcgagggggggcccggtacccagcttttgttccctttagtgag

SEQ ID NO: 1210 - DNA, 486 bp, Homo sapiens
  misc_feature 2, 3, 4, 5, 7, 8, 21, 458: n = A,T,C or G
gnnnngnncccgtatcaactnctatagggcgaattggagctccccgcggtggcggcccgagggtacgcggggggacaaggggcttgagcgttctgtggagagagtgcgaggtcaggccatgaacttgggagatggtttaaagcttgaaactgaattactggatggaaaaaccaagctaatattgtctccatatgaacataaatcaaaaatttctgtgaagatgggaaataaggccaagattgcaaaatgtcctttaagaacaaaaactgggcacattctaaaatcaacacaagatacttgtattgggagtgaaaaacttttgcaaaagaagccagttggttcagaaacatcacaggcaaaagaaagagatttcacctgcaactcctaatatgcagaagactagaaacaccgtaaatacatctctagtaggtaaacagaagcctcacaaaaaacacatnacagctgaaaacatgaagagcagtttgg

SEQ ID NO: 1211 - DNA, 476 bp, Homo sapiens
  misc_feature 3, 41, 55, 61, 71, 80, 466: n = A,T,C or G
agnccctatcatacttagggcgaattggagctccccgcggnggcggccgcccggncgggtncccggggganatgctgccncctaggttacttgtaggaccctatacggcaacctcctttgccaggaactatttataaacatcctgcaggaaaatgtcagagatgggaagaaacaagaactttgacatgcttggtgttcttgcccaagctttgaagaagtttacaaagtctatatgtcagaatacacatttcccaccttgcccaacagtagaaaaacataagaagagaaaaacattaaaaaatgacaaggaagttaatggaagtcagcaatgtggtggtgtttggaggtggagccttcagaaggtaattaatgcccttgtaagaagaggccagagagcttgcgcaccttcttcctgccatgtgaggagccaagaagccggctgtctgcaacctgcaagaggaccctnactagaagct

SEQ ID NO: 1212 - DNA, 490 bp, Homo sapiens
  misc_feature 3, 9, 14, 15, 23, 375, 428, 446, 478, 486, 488: n = A,T,C or G
ggnccctancactnncttagggnattggagctccccgcggtggcggccgaggtacaccagagtccaaagacgtaaacgtgccttcagcagggaagttcggaggtcttggattctgatggtaatattcttttcataaaaaggaaataagtaatatttttgtcggcaagatcacagtccctagctatgccttaaatatcatctcagctgaattctgtgttccactccacagccttctttgcaacactggaaggttaacggatttgaagtaaatgaattgtaactgtaatttcaacctaattagaattggtttaaaatgccagtttggaccgtgaacaggctagccaagaacaagtattgggaggtccatgtaatatngaagagagttgatatttggcccaacttcctgatactttaaaaacagagaagtnaaacaaaatatgaggatntcttttggccagcaagtcccttcttgcctgtntggtctgngnta

SEQ ID NO: 1213 - DNA, 484 bp, Homo sapiens
  misc_feature 3, 13, 39, 44, 47, 50, 56, 65, 73, 78, 85, 102: n = A,T,C or G
agnccctatcacncttagggcgaattggagctcccccgnggggncgnccngggacnacccttggntttccagngggcntcaacanatttttttttttttaanaaaatgaattcactgaggtttagaagatgttaaaatacttgcccaagttcctgcttgcccagatgtgcctttgggaatgtcatcttctttctcaagcctccttacagggttgtagtgaagatggaaggggataaggcaggtgaagcaattggaatatattaagtgctcaattaataaggacctgtcattttttttctcaagttgaggataggacctgccctctggtgtctgggaaagaaactgtgggtccagcttacctaaggagaaggggataaaagcttcattctttttcagtgccccattggcatccagaaagtggtcaggattgaaggcgtctggtttttcaaagtagtgtgggtcacggagagcagtgctcaggatg

SEQ ID NO: 1214 - DNA, 489 bp, Homo sapiens
  misc_feature 2, 3, 6, 12, 15, 18, 24, 27, 29, 32, 34, 37, 45, 396: n = A,T,C or G
gnnggncccgancanctncttggngantngancnccncccggggnggcggccgcccgggcaggtacacacaaagacaaacctgaacttaatttcaaggaaaacttaaacccatgcacaaataattggtgagccttcatttccctgacttcaagtttccatgtgaggactcatgctctctccactttcttcttgggaggagggaagatttacctaatgggtaaatttgggcaaagcacattgagtgtgcttgtttggctctgagtctctttgcaaacatgtgtctgcccacagtgacatgagtttgcgttgactgtcatgtctgcaggaagctgcctgctcctgtggccatgtcaagcaattctttctttcaactgcaactgtgtgtaagagcttantctgagaagaaatgttcagaagctcactgtggctgcacatctgagccatgtcttcccattagttggcatgagtcagcaataaagcgggtatgt

SEQ ID NO: 1215 - DNA, 474 bp, Homo sapiens
  misc_feature 3, 4, 5, 36, 53, 61, 208, 213, 220, 224, 228, 235, 332, 346,351, 409: n = A,T,C or G
cgnnncactactatagggcgaatgggagctccccgnggtggcggccgcccggncaggtacncggggtaattgacattgtggacttcctggggtagtcctgagtaaaaagcacttaagcacctgtggtacatcaaagagtctctttgagagttctgcaaagattcaagtgtgtatacctgagtctatatatcaaaaagtaatggagatnaaatngaagaangtangaangagcctnctaagaagccatctgccttcaagcctgccattgaaatgcaaaactcttgttccaaataaagcctttgaattgaagaatgaacaaacattgagagcanatccgatgttcccnccagnaatccaaacaaaaggactattgaagaaaattcttgggattctgagagtctctgtcgangactgtttcacaggaagggatggtgtgtttacccaaggctacacatcaaaaagaaaaaaaaaaaa

SEQ ID NO: 1216 - DNA, 484 bp, Homo sapiens
  misc_feature 2, 3, 4, 117, 214, 224, 226, 228, 240, 267, 374, 413, 415,462: n = A,T,C or G
gnnncgaccgaatacactactatagggcgaattggagctccccgcggtggcggccgaggtacttttttttttttttttttgtttttcactgtggtagggtggagcttaattgggcanacctgtcctcagggaccctggtggtgcatgtcaagcaaggctggctgtggtagtcaatgggccaggtgataaccaggtctctggtggtatgtcaaanggggggccanangngcttggacttgngaaccatgttactggaggaggtgaaantaccttttcagtggaaagcctccataggcaggaagctagggacacaaactttgctaatgctttagccccaaaggctacaacccagcacagcagcagttatgagcagngaaatttacccttgaggtaccttgcccgggcggcccggntntaaaactagtgggatcccccgggcttgcaggaaattcgatatcaagncttatcggatacccgtcaacct

SEQ ID NO: 1217 - DNA, 538 bp, Homo sapiens
  misc_feature 3, 10, 217, 224, 278, 320, 333, 343, 373, 376, 402, 436,463, 482, 483, 503: n = A,T,C or G
cgncacactnctatagggcgaattggagctccccgcggtggcggccgaggtacgcgggagaattggaaactataaaaaagtcactgcagatttgttaaaaaaaaaaagccaaatataaatttgaaaacttgaaaaaccaaacagtgaaaattaagaactccaaatgtgttagttatctattgctgtgtaacatactgctcaaacttgacttaacatnacctttnattatctcaagttttttggttgggtcaggaaatccaaagccttgggccctaagntggggttctctggcttttaggcttgcaaatcaaaaggcattnggtcggggggtangggtctcctntgggaggctgaagctgggggaaaggggatnctncttcagattttatgttaagttgctangcagggttctttggaccttggagggaccctcaanttagccttccctgggcttgttgggatngaaaaggcattttcttttnnagttccctttgtccccaatnggggaccctttcttccctttttaagggaacaaggg

SEQ ID NO: 1218 - DNA, 596 bp, Homo sapiens
  misc_feature 2, 241, 293, 297, 352, 366, 367, 382, 394, 395, 403, 413,422, 423, 426, 433, 436, 440, 443, 453, 454, 479, 490, 499,502, 516, 518, 521, 525, 527, 530, 538, 539, 544, 545, 550,556, 568, 569, 575, 581, 584, 585, 592, 593: n = A,T,C or G
gnatcactacttagggcgaattggagctccccgcggtggcggccgaggtaccacacacacacaggcacacgcaggcacacacgcagacacacacacacataaacacacagagttcactagtccgagttactgattttcttaggattctcaaagtgacaacaccggaaacaaggtaattcatgttaaaacacaaggggttatattcagttaagagaatggggatccccgaaagtaaacccgngggaattttggaatccaagttttcgaaagaagcttaaaaaaaaggaaaattngggngttttcaaccatttcaaccctttcttggaattcccttaaagaaaaataccagganggtttcaaaaattnnggaaaaaccattttnccgggttttttnnggggattncccaaaaagntttggaaanncantttttgnggnaatnaanggccctttanntttttttttaaaaaaaaaaaagganttttttggganaaaatttanctngggggcctttggtnantancccngngcntttttttnnaaaannctttnaatttnccccggggtttnngggggntttaanccnnaaaaaannaag

SEQ ID NO: 1219 - DNA, 471 bp, Homo sapiens
cgtatcactacttagggcgaattggagctccccgcggtggcggcgaaaataacgtcaattttctcaggctactgaattaggtgacagaatttaaatttaaatacaaagtcacgtggctttagcacccaaattcttaactaaagttctgtgcaggataagacttatgacactgggattatttgtgctccctttatgcatctgtgttaacccacacatattaccagccctgtagttaataggttaataaagaattaactgctgcataaaatattcaagagaggaggggcttactccacaactggatccttgagtctcaccttctctacatctcccagaccctcggtgtccagcagaactaggatgtggcctggcttcttggggtggggcacacaccacatccagattcctttaagtgtgaagactgcaccgtggagcccagagagaagcctgcaagggagagaggagaccagc

SEQ ID NO: 1220 - DNA, 468 bp, Homo sapiens
  misc_feature 227, 365: n = A,T,C or G
cgccgctatacgactactatagggcgaattggagctccaccgcggtggcggccgaggtacgcggggaaacacttcttacctcagagctgagctgggcatgagtagatgctcagtaagtggtgcacagggttggtccctatggtggaggccccctaacaccgcccaacccccctccatgttctcacagctccacgcactgagcacgggcatgaaggccatgatgtcanaaattctgcacccagggagctgagatgtgccgcagggcctgtggcggacatggctactcaaagctgagtggcctgccatcactggtcaccaaattgtcggcctcctgtacctgcccgggcggccgctctagaactagntggatcccccgggctgcagggaattcgatatcaaagcttatcgatacccgtcgacctcgaggggggggcccggtacccaagcttttgttccctttagtgaggg

SEQ ID NO: 1221 - DNA, 467 bp, Homo sapiens
  misc_feature 5, 7, 14, 116, 200, 230, 243, 245, 252, 294, 312, 340, 349,355, 446, 448, 452, 462: n = A,T,C or G
ttccncnctctctnctatagggcgaattggagctccccgcggtggcggccgcccgggcaggtacttttttttttttttttttttttttttttttgacatgaactaatttaatcctnttaacaaatttacaaggaacatattcccctcacttcattatgtaaataataaaacaaaagcctagaagggttagtaacttgcanatcatatagtcactttgcagcaggtctganatttgggtcccananaggcagntccagccaccatgcaaccgaatcctgcgcagcacagttcggngtcattcaacaagacggnatccatgttgattaaggaatcttagctnttaaaaggntctacnaattacattttttccacccaagcctatgatcactcagttggctgtgtaaggtagtttgataggagctcgccattatttttctgattcaaananagtnttttcaagcnctact

SEQ ID NO: 1222 - DNA, 469 bp, Homo sapiens
  misc_feature 5, 12: n = A,T,C or G
gcccnatcactncttagggcgaattggagctccccgcggtggcggccgaggtactaaaaaaaaaagaagtgtttatttgaaattcaaatataatttgacatcatcccttattatcatttgcttaatctagtaatcctaactaggaagaaagcaaaaaaaaaggcttctgtatattcatattagatgctaaaatgtattcaaattagatgctaaaattcatgcacttaccttgcagaaggctcactctctcaggacctacaaactggcaactctcacgccaaatttacctcactgatatattttatttgctaagcaaaatattttaatttcaattagttaccatcattaaaatgaatagagtagacataaaaaaatgatttcatattctggcttaaaaaaatttgccagcctgggtaacatagcaaggatcctgtctctacaaagaaaaaaatgttagccaggcctggtg

SEQ ID NO: 1223 - DNA, 472 bp, Homo sapiens
ggcgccgaatacgactactatagggcgaattggagctccccgcggtggcggccgaggtacagtaggagtgcccagactcggggagaggcaagctggcgcgtctccaaggtgcttgtcactcaccactagaacgtggtcctttaccactagacaagatctcctggtttgacaatgcaggtgacacagctgaaactttatctcaacacggcctgaagaataccactgtctaaatatgaggtgctaaaatactatgacctactctaatattctctcccaactctgtccatcctcgtgactggcacccatgctggcccaaatgatgacaacctcctgttctaagtgcacaagccgcacatttaataaacctttcacccagttccttcactggtgttcatctctcggcttcacttacaaccactccctgtggcttttgcagtgaagcctcttagcccaaaactcttccactccccaa

SEQ ID NO: 1224 - DNA, 462 bp, Homo sapiens
  misc_feature 9, 445, 446, 448, 449, 462: n = A,T,C or G
tatcgactnctatagggcgaattggagctccccgcggtggcggccgcccgggcaggtacatgaaggagggcactagggggagttaagaatttgtgagttaggtagccaagattgttgaggttggaagaatgaggaaagaaaggggatctgtggcaaaaatatgctattggatccacagttctagtttaaggacatgtctagtcccttttccagcccccagttaattacaatcccctgctgcccaaatggagagggaggttgttcaccagtagagggagccaggggctgggtgtctcaatagaaactgatctggtcccagaaggggcctttagatttaagtttttcggatcgaaggcagagcaaagtgtcccttacaaccaatggctaaaatgtatgccattgtagtagatcacattgttagttttcttttcaaaaaaaaaatatnnanntataagtaccttn

SEQ ID NO: 1225 - DNA, 461 bp, Homo sapiens
ccctatcactacttagggcgaattggagctccccgcggtggcggccgaggtacgcgggggacaggccatctcgctataggaaaggaaagtggaacagcattcatcctcaacatttttacgaagacaaaatgaagactggagtagaagactgatcagtgcaggtgtagcataaaagtgtaatcctggaagatgtggtgtgagaagcatcatcagcatcatgctattacaatcccaaaccatgggggtttctcacagctttacaccaaagggcatcactatccctcaaagagagaaacctggacacatgtacctgcccgggcggccgctctagaactagtggatcccccgggctgcaggaattcgatatcaagcttatcgataccgtcgacctcgagggggggcccggtacccagcttttgttccctttagtgagggttaattgcgcgcttggcgtaatcatg

SEQ ID NO: 1226 - DNA, 910 bp, Homo sapiens
  misc_feature 2, 4, 561, 608, 646, 669, 672, 679, 693, 695, 700, 722, 724,730, 731, 743, 747, 758, 767, 777, 779, 780, 789, 792, 797,801, 821, 824, 832, 833, 836, 837, 850, 858, 865, 872, 874,876, 880, 883, 891, 894, 895, 897, 903: n = A,T,C or G
angngaccgcgcgtaatacgactcactatagggcgaattgggagctcccccgcggtggcggcccgcccgggcaggtacttttttttttttttttttttggacaaagaaacgtgttttaaaaaataacacaaagtccataatttcaatgaaagtaagtgtcaagctcttaccaggctggtcctctggtccagttatagctagtatatctgcttcaatactatcatcttctggtaaaggtctagaagacacaggcatactttttaatccagaaattaagaaagaatttttttttgaagttcaatctattaaacatacagcttatagaaataattatttggaaaatggaataaagcagtgttgttgtttttgagacagggtcttgctgtctgtcacctaggctggaatacaatggcacaatcatggctcactgcagccttaactcctgggctcaagagatcctcccgagtatctaagactaccaggtgccgtgcccgacgcttggctaattttagtacctcggccgctctaaaactaagtggatcccccgggctgcaggaattngatatcaagcttatcgataccgtctacctcgagggggggcccggganccaccttttgttccctttaatgagggttaattgccccnctggcgtaatcatgggcatagcnggntccctgngtgaaaattgttantncgctnaccaattccacacaacaaaacnanccgggnncctaaaaagggnaaanctgggggggcntaatgaggngactaacctncnntaattgcgntgncctancagnccgctttccatcgggaaacntgnctggcccnntcnntaattgaaacggncacccccnggggagngggcggntncntatngcncctttccnttnntnttaacnacctcct

SEQ ID NO: 1227 - DNA, 895 bp, Homo sapiens
  misc_feature 568, 578, 594, 600, 615, 652, 660, 672, 684, 693, 698, 707,714, 718, 743, 748, 750, 751, 752, 753, 757, 761, 764, 776,780, 788, 789, 790, 793, 798, 801, 802, 803, 807, 811, 812,818, 824, 825, 829, 840, 848, 849, 850, 851, 852, 855: n = A,T,C or G
  misc_feature 859, 860, 866, 868, 871, 872, 873, 874, 878, 880, 881, 883,884, 885, 888, 889, 891, 892: n = A,T,C or G
ccgatacgactcactatagggcgaattggagctcccccgcggtggcggccgcccgggcaggtacttttttttttttttttttttggacaaagaaacgtgttttaaaaaataacacaaagtccataatttcaatgaaagtaagtgtcaagctcttaccaggctggtcctctggtccagttatagctagtatatctgcttcaatactatcatcttctggtaaaggtctagaagacacaggcatactttttaatccagaaattaagaaagaatttttttttgaagttcaatctattaaacatacagcttatagaaataattatttggaaaatggaataaagcagtgttgttgtttttgagacagggtcttgctgtctgtcacctaggctggaatacaatggcacaatcatggctcactgcagccttaactcctgggctcaagagatcctcccgagtatctaagactacaggtgcgtgccacgacgcttggctaatttttagtacctcggccgctctagaactagtggatcccccgggctgcaggaattcgatatcaagcttatcgatccgncgacctcganggggggcccggtcccnctttgntcccttagtgagggntaattgcgcccttggcgtaatcatgggtcatagctgntcccgggngaaaatggtatnccgtcacaattncccacaacnatacnagccgggancctaaangggnaaacctgggggcctaaggggggagnctacntnnnntaantggngtngggctcaactgnccgntttccaannnggnaaccngtnnngccnctgnnttaaangaatcnnccancccccgggganaggcggtnnnnnttngggnncttttncnttnnnntaangnntnnnggnncnnggg

SEQ ID NO: 1228 - DNA, 432 bp, Homo sapiens
  misc_feature 422, 423, 429, 432: n = A,T,C or G
gggcgaattggagctccccgcggtggcggccgcccgggcaggtacgcgggggccacctaggttacttgtaggaccctatacggcaacctcctttgccaggaactatttataaacatcctgcaggaaaatgagtctatatgtcagaatacacatttcccaccttgcccaacagtagaaaaacataagaagagaaaaacattaaaaaatgacaaggaagttaatggaagtcagcaatgtgatggtgtttggaggtggagccttcagaaggtaattaatgcccttgtaagaagaggccagagagcttgcgcaccttcttcctgccatgtgaggagccaagaagccggctgttctgcaacctgcaagaggaccctcactagaagctagccatactggcatcctcatcttggctttccaacttccannaactgngan

SEQ ID NO: 1229 - DNA, 458 bp, Homo sapiens
  misc_feature 2, 3, 4, 5, 6, 7: n = A,T,C or G
gnnnnnngcacgccgtatcgactactatagggcgaattggagctccccgcggtggcggccgaggtaccctgctgaaagattatttctaacaggcttgtagagaaacgtcggttcatgtaaattagaaattatggggccactttgccattcttcacacctgcaatgaacaggtgtttatctgcagttctgacttatctcttgaactccatttgcatgttatagtgggatgcagctgatgccctgtccagatcttcttcaggccactacatctatatatgcattcatattccagtggctgtgagtgttggctgttggttgacagaggagctgcatccttctggaggaaactgaactcagctgatgaaagccaccctggtcctgggaggtgaagcatcttccaaatgacagcctgcagtcaatgactgatgaatatgacttcattgcctcatgacagggac

SEQ ID NO: 1230 - DNA, 900 bp, Homo sapiens
  misc_feature 3, 10, 12, 55, 539, 546, 616, 628, 654, 665, 715, 730, 731,752, 764, 790, 830, 876, 888: n = A,T,C or G
agncgccgtnancgactactatagggcgaattggagctccccgcggtgggcggcncgcccgggcaggtacttacagtttgactttgagtcagctcagcattctaaatcaaacgcaaacagcagaatcatatggcatagacacttagcaaatccaatgccttccaggcatctgtttcctgttgatgaaatcctccctatggagagcaaactggttcatatcttcagatagtgtcattcaaccccttggtagctttctgggctactaaatatcacaccgtctggtgggacatttcacccaagtcgtgaaggtccgcagcttcactcctgagccagcgagaccacgaacccaccagaaggaagaaactccgaacacatccgaacatcagaaggaagaaactccggacacaccgccgcctttaagaactgtaacactcaccgcgagggtccgcggcttcattcttcaagtcagtgagaccgagaacccaccaattcggacacaatatagtccaaggatgtcaaaaatcgtgattgcaagtaanaagtctngtaggaaaagcaatgaatgaaaggccaagaacaatggaagaagatttctttacaaagtggcttaattggnaaaatggctgantcaaataacagcaattaccgagttcngaatagtggcntttttgactcaatctccgggtttgttacaccccggcttgccattgggttnggcattttataaccnncctccggtcattataagtttntggtttgggganaatatttgcttcttgggattggattnatgggccatggggaaaaattgccggtttacaaggggtaanatgggtcccgggtccttggccgtttaaaactagggatccccggctnaggaattgaatnaacctattgtcc

SEQ ID NO: 1231 - DNA, 906 bp, Homo sapiens
  misc_feature 1, 5, 405, 448, 468, 473, 493, 494, 498, 515, 523, 530, 544,547, 551, 555, 561, 562, 565, 568, 571, 576, 580, 581, 587,588, 594, 597, 598, 606, 608, 609, 610, 612, 615, 616, 618,621, 623, 624, 627, 628, 630, 632, 636, 637, 641: n = A,T,C or G
  misc_feature 642, 647, 648, 649, 650, 651, 652, 654, 655, 656, 657, 658,659, 660, 661, 662, 665, 666, 668, 672, 673, 676, 677, 678,679, 680, 682, 684, 685, 688, 689, 691, 692, 693, 695, 698,699, 701, 702, 703, 704, 709, 710, 711, 712, 713, 714: n = A,T,C or G
  misc_feature 716, 717, 718, 719, 720, 721, 723, 724, 725, 727, 728, 731,732, 734, 736, 737, 738, 740, 742, 743, 744, 745, 746, 747,748, 749, 753, 754, 757, 758, 759, 760, 761, 762, 763, 764,765, 766, 767, 768, 769, 770, 774, 775, 776, 777, 778: n = A,T,C or G
  misc_feature 779, 780, 782, 783, 784, 785, 786, 787, 789, 790, 791, 792,793, 795, 796, 797, 798, 799, 801, 802, 803, 804, 807, 808,810, 812, 813, 814, 815, 816, 817, 818, 820, 821, 822, 823,824, 825, 826, 828, 830, 831, 832, 833, 834, 835, 836: n = A,T,C or G
  misc_feature 837, 839, 840, 841, 844, 845, 846, 848, 849, 850, 851, 852,853, 854, 855, 856, 858, 859, 860, 861, 863, 865, 867, 868,869, 870, 871, 872, 873, 874, 875, 876, 877, 878, 882, 883,885, 886, 887, 890, 891, 894, 895, 896, 897, 899, 900: n = A,T,C or G
  misc_feature 902, 904: n = A,T,C or G
ncggncgctcctatagggcgaattggagcctccaccgcggtggcggcccgaggtaccatgattagttaaatataagactccgtaatttttacaattttaacaataattttatttcttcaagcttgttagtttgggattgtattaaaactacagtgtgtgacttagaaaatgataatgctgctttatggaaaatggattataggtgggtaagacttcattgcaaaaattgtgtaataccatcagtgttaggaacccagttgaagtctagaagacagatgttagtatcttagactaggttggtatttgaatagatattggtaatatcagtagaatttaataatacattagaaagaaagaaatcagagaagattcttttattttcacttgatacttgtgttgttcttncaatgagataagaaggcaggcaaaggagaaaagttcaggggcnggggatgagaagaaaacaanaattntatgttggacatgctaagtnnaacncctgcttaactctattngcttctgnggaagcngagctgaccttgangtncttntganaatgcnnttnggnggnagccntgcnnggaggnntctctnggnngcctgggngnnngntgnnanggnannggnngngngctnngggnnttgtnnnnnntnnnnnnnnnccnngntggnnccnnnnntntnnttnngnnncntgnncnnnncctcnnnnnntnnnnnntnnngnnggnngngnnngntnnnnnnnncttnngtnnnnnnnnnnnnnnggcnnnnnnntnnnnnntnnnnngnnnnntnnnnggnngngnnnnnnntnnnnnnntnannnnnnnntnnnggnnngnnnnnnnnntnnnntnantnnnnnnnnnnnngttnngnnngtnnttnnnntnntngncc

SEQ ID NO: 1232 - DNA, 935 bp, Homo sapiens
  misc_feature 528, 634, 639, 671, 693, 695, 703, 723, 743, 748, 757, 774,794, 807, 822, 835, 850, 872, 901, 906, 916, 917, 929, 934: n = A,T,C or G
agggcgcgcgtaatacgactcactatagggcgaattggagctccccgcggtggcggcccgcccgggcaggtaccctctctgttcccctccctccacccttcccctccttttctgtttttaagataaagtgttgatttggaattcagcaactgcaagtccatttgaaagaggtcagttttgttagaggcctggatagagcaatatgttgtaaccaaatcacacgtgaacattctgtggctgaacataagaaattgtgcattattaacgttgtgcttcaaggtggaatgctgaaagcacttggaaagtagttgccagagaagagctcactgaaaacattattagctttatatatccacttgtagaatctctgtacagtgatacatccctccctttcatcttgatcataaatataagacttaaaggaggcagagtgaacgtgcttaggaagcccactgagagctctcagaaaggcgcttaatacctttcttagtaagttgaaagtaggttgatcttcaagttttaatccanaagacagattgctgcttcttcctggcttgaattcaagttatttcaagccggcaaccaggaactagactgaatgcaatccttccacatcccccgcgtccttgggcgntttanaactagtggatcccccgggctggaggaattcnatttcaagcttatcgataccgncnacctcgangggggggcccgggacccaanttttggttcccttaagtgangggtnaatggcccncttggcgtaaacatggncataactggtttccgggggnaaatggtatccgnttacaatttcccacnacataccaacccnggagccataaaggtnaaagcctggggggcctaatganggggctaccccaattaatgggttgggccnctggncccttttcanntgggaaaccgtntgccnt

SEQ ID NO: 1233 - DNA, 935 bp, Homo sapiens
  misc_feature 209, 685, 691, 698, 714, 729, 733, 745, 757, 783, 784, 790,796, 800, 846, 848, 864, 870, 878, 882, 883, 895, 911, 920,924, 928, 932: n = A,T,C or G
tcactactatagggcgaattggagctcccccgcggtggccggcccgcccgggcaggtactatagctgtaaggagaagctgagaaatgatacccaggagcagtaggctttacgtcttcagcctaaaacctaaaaaaaaaaaagaaaaaaaaatttaaaacagctattaaactgaaagcatctgtaaaaaaaaaaaaataaaaaaaaaaanggtcctgagcacccaagtcagctgtgcactgaggattatgaggactgcaggctgtagtcattcttccccctgagtcgtcagccttgtcccacacagcaaggtacctcggccgctctagaactagtggatcccccgggctgcaggaattcgatatcaagcttatcgataccgtcgacctcgagggggggcccggtacccagcttttgttccctttagtgagggttaattgcgcgcttggcgtaatcatggtcatagctgtttcctgtgtgaaattgttatccgctcacaattccacacaacatacgagccgggagcataaagtgtaaagcctggggtgcctaatgagtgagctaactcacattaattgcgttgcgctcactgcccgctttccaagtcgggaaacctgtcgtgccacttgcatttaatgaatcgggccaaccccccggggagaggccggtttgcgtattgggcgcttnttccgnttcctgnttacttgactcgttgngctcggtcgttcggntgcnggcaaagcggtntaagttcacttnaaaggcgggaattccggttttcccannaatcangggatnaccncaggaaagaacatttgagcaaaaggccagcaaaaggcccggaaccntnaaaaaggcccgggtgnttggcntttttccntagnnccgcccccctgncagcttaaaaaaattngcgctcaanttanaggngggnaat

SEQ ID NO: 1234 - DNA, 737 bp, Homo sapiens
  misc_feature 8, 384, 684, 704: n = A,T,C or G
gatagccntgacccgcgtaatacgactcactatagggcgaattggagctccaccgcggtggcggccgaggtacgcgggggacgctgggaggagatgctgccacctaggctacttgtaggaccctatacggcaacctcctttgccaggaactatttataaacatcctgcaggaaaatgagtcaaggaagcttttcttttgagctatttacagcttttagcaattgagtaaagtatactcctgtgaacaaaatttggaacatatttgtttctctctaactgatttctccagaatttggaactagttgtagctgagaccaatgatgctgacctccctcaaaagctgcatttctgaatttctgaaggcaaactgtctgcctatattgnacctgcccgggcggccgctctagaactagtggatcccccgggctgcaggaattcgatatcaagcttatcgataccgtcgacctcgagggggggcccggtacccagcttttgttccctttagtgagggttaattgcgcgcttggcgtaatcatggtcatagctgtttcctgtgtgaaattgttatccgctcacaattccacacaacatacgagcccgggagcataaagtgtaaaagcctgggggtgcctaatgagtgagctaactcacattaaattgcgttgcgctcactggcccgttttncaagtcggggaaacctggtncgtgcccagctggcattaatgaaatcgggccct

SEQ ID NO: 1235 - DNA, 729 bp, Homo sapiens
  misc_feature 1, 2, 5, 7, 8, 9, 626, 674, 696, 705, 728, 729: n = A,T,C or G
nnagncnnngcgccgtaatacgactcactatagggcgaattggagctccaccgcggtggcggccgaggtacgcgggggacaggccatctcgctataggaaaggaaagtggaacagcattcatcctcaacatttttacgaagacaaaatgaagactggagtagaagactgatcagtgcaggtgtagcataaaagtgtaatcctggaagatgtggtgtgagaagcatcatcagcatcatgctattacaatcccaaaccatgggggtttctcacagctttacaccaaagggcatcactatccctcaaagagagaaacctggacacatgtacctgcccgggcggccgctctagaactagtggatcccccgggctgcaggaattcgatatcaagcttatcgataccgtcgacctcgagggggggcccggtacccagcttttgttccctttagtgagggttaattgcgcgcttggcgtaatcatggtcatagctgtttcctgtgtgaaattgttatcccgctcacaattccacacaacatacgaagccgggagcataaaagtgtaaagcctggggtgcctaatgagtgagctaacttcacattaattgcgttgcgcttcactggccgctttncagtcgggaaacctgtcgtgccaactgcattaatgaatcggcaacccncggggagaggccgtttgcgtantgggcgctntttcgctttcttgcttaattgann

SEQ ID NO: 1236 - DNA, 719 bp, Homo sapiens
  misc_feature 1, 2, 658: n = A,T,C or G
nnagcgcgtaatacgactactatagggcgaattggagctccaccgcggtggcggccgaggtacgcggggagtgtcctccaggaccctggcccctcatgcctccgtgcttgcgcgtgtgccatttcctctctccagaggacctttcctgcctaggactcatgattgtcccctccctgtgttgcctagtttcctggtattaaggagaatcaactctctggataaacgtgccttctcctgccacggcatgcacccacacatacgagcctcccgggtacctgcccgggcggccgctctagaactagtggatcccccgggctgcaggaattcgatatcaagcttatcgataccgtcgacctcgagggggggcccggtacccagcttttgttccctttagtgagggttaattgcgcgcttggcgtaatcatggtcatagctgtttcctgtgtgaaattgttatccgctcacaattccacacaacatacgagccgggagcataaagtgtaaagcctggggtgcctaatgagtgagctaactcacattaattgcgttgcgctcactgcccgctttccagtcgggaaacctgtcgtgccagctgcattaatgaatcggccaacgcgcggggaagaggcggtttgcgtattgggcgctcttccgcttnctcgctcactgactcgctgcgctcggtcgttcggctgcgcgagcggtattaagcttactca

SEQ ID NO: 1237 - DNA, 886 bp, Homo sapiens
  misc_feature 4, 5, 8, 13, 36, 590, 617, 621, 639, 655, 678, 690, 694,704, 710, 713, 715, 719, 732, 733, 741, 749, 755, 756, 758,763, 767, 769, 778, 779, 788, 801, 802, 807, 823, 830, 831,832, 833, 835, 837, 842, 844, 850, 852, 854, 857, 861: n = A,T,C or G
  misc_feature 862, 863, 865, 869, 871, 872, 877, 880, 881, 883, 884: n = A,T,C or G
acgnncgngcgtntacgactcactatagggcgaatnggagctcccccgcggtggcggcccgcccgggcaggtaccatgattagttaaatataagactccgtaatttttacaattttaacaataattttatttcttcaagcttgttagtttgggattgtattaaaactacagtgtgtgacttagaaaatgataatgctgctttatggaaaatggattataggtgggtaagacttcattgcaaaaattgtgtaataccatcagtgttaggaacccagttgaagtctagaagacagatgttagtatcttagactaggttggtatttgaatagatattggtaatatcagtagaatttaataatacattagaaagaaagaaatcagagaagattcttttattttcacttgatacttgtgttgttactttcaatgagataagaaggacaggcaaaggagaaagttcaggggcaggggatgagaagaaaacaagaattttatgttggacatgctaaagttaaacacctgcttaactcaaattggcttctgtggaagcagaggctgcatgaggttgcttatgaaaatgcttttttgangaagccattgcaggaggaatctcttangaanccagggaagaaggaaganaagggaaagttttgancaagggtatgggttcagctggcnttgagcctcacngggncccaggaggngcttanaancntganctatccccaaaannggtcctgnctggagcnatgaanncnttttntcantnatttgctgnngctgcattnggaaaaagccttnncctcnggacccggggggtttnatcactnnnntnanttccncnaaaggngnanttntttnnnancaananncaaanttnnannct

SEQ ID NO: 1238 - DNA, 874 bp, Homo sapiens
  misc_feature 2, 5, 616, 633, 693, 704, 727, 735, 750, 751, 755, 764, 766,771, 774, 781, 786, 788, 789, 790, 791, 801, 802, 803, 808,809, 812, 822, 823, 824, 828, 830, 837, 843, 846, 848, 850,869, 870, 871, 872, 873, 874: n = A,T,C or G
angcncgtgacgcgcgtaatacgactactataggggcgaattggagctccaccgcggtggcggcccgaggtacgcgggggagaagaaacggcggagacctgagaccgggaggctgaggctgtaggctgttatccttgacatctgcagcagcccttccaagctgtggagaccaggtcatctggaatgcccatttatgtcaatggaagaaagaaaaaggggtctcctcccatcctcaccactgcattctcccaccaaccctgctcctgtcccacttcccacaactcagttgttgacaatttaacagtgggtttctggaaacagtgctgcctccttgatggtctaactaactaccagagttattctaacagcgggaatttcaagccagcaaaccagacatacataggaggcacagcaaaagacccaaggtgaggggcttccctcaccttcacccttgttctcacgtggaggtggcgcatgtctatgagacacagtacctgcccgggcggcccgctctagaactagtggatcccccgggctgcaggaattcgatatcaagcttatcgataccgtcgacctcgagggggggcccggtacccaagcttttgttcccttttantgagggttaattgcgcncttggcgtaatcatgggcatagctgtttcctgtgtgaaattggtattcgcttacaattcncacaacatacnagccggagcataaagtgtaaaanctgggggncctaatgagtgagcnnactnacattattncnttgcnctnatgcccnctttnannnnggaaaactgnnngccanntcnttaatgaatnnncaancnccggganaggcgnttncntnttggcgttttccctttttnnnnnn

SEQ ID NO: 1239 - DNA, 879 bp, Homo sapiens
  misc_feature 1, 3, 5, 6, 632, 667, 689, 692, 700, 743, 750, 755, 756,764, 770, 776, 778, 785, 802, 803, 809, 812, 815, 818, 829,831, 835, 838, 839, 841, 844, 846, 847, 849, 850, 852, 856,858, 859, 860, 861, 862, 865, 871, 872, 874, 876, 878: n = A,T,C or G
  misc_feature 879: n = A,T,C or G
ngncnnggcgcgcgtaatacgactcctataggggcgaattgggagctccaccgcggtggcggcccgaggtaccatgattagttaaatataagactccgtaatttttacaattttaacaataattttatttcttcaagcttgttagtttgggattgtattaaaactacagtgtgtgacttagaaaatgataatgctgctttatggaaaatggattataggtgggtaagacttcattgtaaaaattgtgtaataccatcagtgttaggaacccagttgaagtctagaagacagatgatagtatcttagactaggttggtatttgaatagatattggtaatatcagtagaatttaataatacattagaaagaaagaaatcagagaagattcttttattttcacttgatacttgtgttgttactttcaatgagataagaaagacaggcaaaggagaacgttcaggggcaggggatgagaagaaaacaagaattttatgttggacatgctaagttaaacagctgcttaactcagattggcttctgtggaagcagaggctgacatgaggttgcttatgaaaatgcttttttgaggaagccattgcaggaggaatctctaaaggaagccagggaagaangaaagagaagggaaagtttgtgagcaagggttggnttcagctggcattgagcctcancangacccccngagggagcttaaaaacctgactatccccaagtagggcctgtcntgaggcntgaanncatattcntcagcnttggcngnaggctgncatttggaaaaagcttnncctccnggnccnggngggttttattnanctgngtnnanttncnncnngngggngnnnnntcntttggnnancnann

SEQ ID NO: 1240 - DNA, 672 bp, Homo sapiens
  misc_feature 5, 517, 583, 618, 622, 638, 643, 650, 668: n = A,T,C or G
gagcnccccgtaataccgactcactatagggcgaattggagctccaccgcggtggcggccgaggtacgtggggaggccatctggctgctgctgctgctgccagcttccagacggaagctgagatttgctattgatgttccagcattgattgagctcctgcctcgtctgcatcaggcatggtcctcgcagcttcacgcagttagagtccacatcacgtctctctgaagaacagttaaagtgttttctggatgaatgcatacttaaacaaaaatccatcattaaactttcttcagaaagaaaaaaggaagacattgaggacgtaacacctgtgttcccccagctttccaggtccatcatctctaaattgctaaatgaatcagaaacaaaggtccagaaaactgaggtagaagatgcagatatgcttgagagtgaagaatgtgaagcttctaaaggctactatctcactaaagccttgactggacataacatgtcagaagctcttgtcactgaagcaganaatatgaaatgccttcaattttccaaggacgttattattagtgacacaaaagactattttatgtcnaagactcttgccattgggagactgaaaaggccctncttnttagatgatccactgnatggnatcaagngtgagcctttcatcaaanacca

SEQ ID NO: 1241 - DNA, 662 bp, Homo sapiens
  misc_feature 5, 426, 540, 598, 614, 624: n = A,T,C or G
gagcnccgccgtaataccgactcactatagggcgaattggagctccaccgcggtggcggccgaggtacttttttttttttttttttttttttggtttcttccttccttctgtcttttcttccttccttctttttcttttcttccttccttctttttcttttcttccttccttctttttctttttttttctggagtaaccagtgtgacataagatctgtttgtgttcccccattttacaaaagaaaatttaagtctgcaacttcccctaggcatctgcagcagagagtggatttgtcaacatgcaaagctgctgacctgcccgggcggccgctcgaagcgtggtcgcggccgaggtacgcgggagtctcggtctccaaaaagggatactactagggaaagcagaagatctgaatcactgtccccaanaagagaaacttctagagagaacaaaagatctcagccaagagtgaaagattcttccccagggagaaaaatcccaggtcccagagcagagaacgagaaagtgatagagatgggcanaggagagagagagaaaggagaaccagaaagtggtctaggtccagatctcattctaagnccccctcaagatgtanaacaaaaagnaagagttcatcatttggtagaatggcaaaaatagttct

SEQ ID NO: 1242 - DNA, 693 bp, Homo sapiens
  misc_feature 7, 492, 501, 556, 582, 591, 602, 645, 663, 688: n = A,T,C or G
gagcgcngcgtaataccgactcactatagggcgaattggagctccaccgcggtggcggccgcccgggcaggtaccgcgggggcagtgggaagctcgcagcagctggggaggagccaaagcctcggcgctcacctaagccgcagggagatacacccaactgggagatgaggaaacagcaacccagagaggagaactaacccacacaggatcatttcgcgaaggagcaaggctgaagaaccagacctggactttcttaggacaaacttactgcagcttgaaggagccaaccatggatttgaggcgtgtgaaggaatatttctcctggctctactatcaataccaaatcattagctgctgtgctgttttagagccctgggagcgatctatgtttaacaccatcttactaaccattattgctatggtggtatacactgcctatgtctttattccaatccacattcgcctggcttgggaatttttttcaaaaatatnttggatatnacagtaccttcggccgctctagaactagtggatcccccgggctgcaaggaattcnatatcaagcttattcgatacccgtcnaccttcgangggggggcccngtacccagctttttgttccctttaggtgagggttaattgcgcncttggcgtaattaatggnataagctgtttcctgtgtgaaattnttatc

SEQ ID NO: 1243 - DNA, 672 bp, Homo sapiens
  misc_feature 560, 614, 646, 655: n = A,T,C or G
gagcgcgcgtaataccgactcactatagggcgaattggagctccaccgcggtggcggccgcccgggcaggtacgcggggaacttgtgtgcttagacctgacgctgggaggagatgctgccacctaggttacttgtaggaccctatacggcaacctcctttgccaggaactatttataaacatcctgcaggaaaatgcagtgaagtagaagagacagggatatcccagaaggttatgcaaaacatcaagagaagatgagaggagtctatatgtcagaatacacatttcccaccttgcccaacagtagaaaaacataagaagagaaaaacattaaaaaatgacaaggaagttaatggaagtcagcaatgtgatggtgtttggaggtggagccttcagaaggtaattaatgcccttgtaagaagaggccagagagcttgcgcaccttcttcctgccatgtgaggagccaagaagccggctgtctgcaacctgcaagaggaccctcactagaagctagccatactggcatcctcatcttggccttccacttccagaactgtganaagtattttgtttgtggtttagtcaatggtctatggtaatttttttatagcagncccagccaagacagtgcctcatttactacatnccatttatnttatttatataggctcc

SEQ ID NO: 1244 - DNA, 782 bp, Homo sapiens
  misc_feature 1, 3, 4, 9, 12, 13, 16, 22, 26, 28, 35, 37, 41, 42, 43, 44,45, 48, 62, 65, 69, 82, 88, 89, 97, 103, 108, 112, 113,114, 115, 123, 124, 126, 127, 344, 399, 407, 435, 457, 460,472, 479, 500, 526, 531, 567, 591, 595, 600, 617, 690: n = A,T,C or G
  misc_feature 732, 758: n = A,T,C or G
ncnntatcnatnnttntaaatntgtntnttttatntntatnnnnnttngtattttctatganatntatntattgaatatttntatatnnatatattnatctanatatnttcnnnntttgggtnnanncctatacgatcatatagggcgaattggagctccaccgcggtggcggccgaggtacgcgggcaaagcccataaaaataaaaaattataacaaaccctgagaaccaaaatgaacgaaaatctgttcgcttcattcattgcccccacaatcctaggcctacccgccgcagtacctgcccgggcggccgctctagaactagtggatcccccgggctgtagngaattcgaatatcaagccttatcgatacccgttcgaccttcgaggggggggggcnccggtacnccagctttttgttcccttttagttgagnggttaaattgcgcgccttgggncgntaattcattggntcaatangcttggtttacctggtggtgnaaaatttggttattcccgcttcacanatttnccaacaaccaaccaataactgaggcccgggggaagncattaaaaagttggttaaaaagancctnggggngttggcccttaaattgnaaggttggaagccctaaaccttcaccaattttaaatttggcggttttgccggccttcaaccttggcgcccggncttttttcccaagtttccggggggaaaaaccccttgttccgnatggccccaaggccttggccaatttnaaattggaaaattcccgggccccg

SEQ ID NO: 1245 - DNA, 768 bp, Homo sapiens
  misc_feature 6, 11, 15, 21, 24, 27, 30, 31, 34, 36, 37, 45, 57, 62, 64,71, 72, 76, 77, 83, 84, 85, 94, 95, 96, 97, 110, 111, 117,120, 124, 126, 129, 130, 133, 135, 244, 263, 266, 268, 272,281, 332, 345, 369, 386, 387, 390, 391, 396, 399, 406: n = A,T,C or G
  misc_feature 450, 456, 460, 471, 482, 498, 505, 507, 524, 532, 534, 540,553, 557, 561, 586, 590, 592, 597, 607, 608, 613, 616, 625,637, 641, 642, 662, 682, 694, 741, 743, 745, 761, 762, 763: n = A,T,C or G
tcatantaatncctnatgttnctnttnatnnttntnnactttttntctattacactntattntnattattnntttnnattttnnntgatatatnnnntctaatttttttnntttagnttnaggnantcnnttncnatcactatagggcgaattggagctccaccgcggtggcggccgaggtacgcggggcccgccgatatctctgccgggtgactagctgcttcctttctctctcgcgcgcggngtggtggcagcaggcgcanccnancctntaaatgcanaacgacgccggcgagttcgtggacctgtacgtgccgcggaaattgctccgnttagcaaatttcncaatcatcgggtgccaaaggaacncaccgctattctcattnncannattgnaancgttggncacgaagtgtttgtacaaagggttcaaccaagggccagggtttntaaatngggncacaaggtttntaaaaaaaccntttaattggcctaatncctaacngngggggctcaattattcnggtcaagngnaattgngggggttggaaanttcnaatngaattggaattttcccccaattttncttncnccggnaatttggggnncccanagnggacccctnaattgggcccanttcnngtaccttcaaaaaagtaaanccttttttttttgtaccttnggggaagtaagnaaaattccaacccaaggtaattgggttggggaaaaattaattttttngntncccattaaaaaaattnnnagaag

SEQ ID NO: 1246 - DNA, 905 bp, Homo sapiens
  misc_feature 1, 2, 4, 389, 392, 394, 396, 397, 399, 400, 401, 402, 403,532, 590, 601, 604, 630, 674, 687, 746, 752, 765, 778, 808,830, 839, 869, 874: n = A,T,C or G
nngntccgtatacgactcactatagggcgaattggagctccccgcggtggcggcccgaggtactggagattcatatatgcaaatattctcatgcaagaagttccacagtaacaacagcaaaaagaaaaaattagttgtccagccagtgctggaggaaaatgtttctggggaagatgactcagtcattttgtggcgagacaccctttggtaactcccactgaccagtcttgggagccttcctggaatgatcgtgggctgagcggagatgttttttgcaaaatgaaactgaagctgaaagaaaggagaattcgagtgaaccaagaagaaatccaaagacctggggaaggaggacttaagatgaaagtgaagcaagagaaaaataattaaanaanananntnnnnngtacctgcccgggccggccgctctagaactagtggatcccccgggctgcaggaattcgatatcaagcttatcgataccgtcgaccctcgagggggggcccggtacccaaccttttgttcccttttagtngaggggttaaattgcgccccttggccgtaatcatgggtcatagctggttcctgtgtgnaaaatgttatncgnttccaaattccacacaacatacgaanccgggagcataaagtgtaaaagcctgggggtgcctaatgaagtnagccttaacttcncattaaattgcggttggccttcactggcccgcttttccaattcgggaaaaccctgtcgngccaanctgcatttaatgnaatcggcccaacnccccggggagaaggccggtttgcggttttngggcgccttttccctttccttngctcaatgnactccctgggcttcggtccgttccggttgnggggnaccggtttaagcttccttaaaaggcgggaat

SEQ ID NO: 1247 - DNA, 870 bp, Homo sapiens
  misc_feature 6, 7, 507, 741, 782, 795, 814, 827, 828, 840, 841, 849, 857,861, 864, 868, 869: n = A,T,C or G
ttttcnntttaaacgactactatagggcttttggagctccccgcggtggcggccgaggtacacaaccaccctcatgcctcctacccccgaggttcctagagctaggctctcctgaggcaatgctttccttctcaattcatattcttccaggaggggcaccaacgttttttaaaatgatgttggcgacgaggacggtaaattttctagatgactgaaggctgactttcccctttctgtgactctctaggcaacaccgtgacaggagagacgactcccttttctcctcttgtgaccacttctgaatctgtgacccgaaatcacagccagtagctttgtggtctcctgggtctcagcttccgacaccgtgtcgggattccgggtggaatatgagctgagtgaggagggagatgaaccacagtacctgcccgggcggccgctctagaactagtggatcccccgggctgcaggaattcgatatcaagcttatcgatacccgtcgacctcganggggggcccggtacccaacttttgttccctttagtgaggggttaaattgcgcccttggcgtaatcatggtcatagctgtttcctgtgtgaaattgttatccgctcacaattccacacaacatacgacccgggagcataaagtgtaaagccctggggtgccctaatgagtgagctaactcacatttaattgcgttgcgctcactggcccgcttttcaagtcgggaaaacctgtcntgccacttgcattaaatgaatcggcccaacccccggggaanaggccggtttgcntattggggcgctttttccnttttcttggcttnnttgactccttgnnctcggtcnttcggttncggnaanccgnnt

SEQ ID NO: 1248 - DNA, 475 bp, Homo sapiens
  misc_feature 5, 429: n = A,T,C or G
gggcnaattggagctccaccgcggtggcggccgcccgggcaggtaccatataggtccaaacccaaaactgatttttgttttatgaagtagaaatggttgcatgggctcttggctagaaccatctttggcccattgaaaatcaagtttctgagactgaaaaggaaacacacagtgacaccattttgatgaggaagagaagaattctgaaggagccagaatatatttgctgaattttgacactgaagaagaaataaacattgaaaaaacaaagcaaaacaacagcaacaacaaaaaactaaacccatttaggtttccactacagatgcaagaaaaaagtgcccttgcacgttttttctgtctgagtgtgtcagccaaggttgcatgggggaattcaggatgtataaaaacatagacagagagaagaagatnattttgcacctcagaaataaccttgtgaacagctgagtagcctgtt

SEQ ID NO: 1249 - DNA, 1076 bp, Homo sapiens
  misc_feature 3, 4, 8, 9, 10, 12, 14, 15, 16, 17, 18, 20, 21, 22, 23, 24,25, 26, 27, 28, 29, 30, 31, 32, 33, 34, 36, 37, 39, 40,41, 42, 43, 44, 46, 47, 49, 50, 51, 52, 53, 55, 56, 57,61, 63, 64, 65, 67, 68, 69, 70, 73, 74, 75, 77, 78, 79,80: n = A,T,C or G
  misc_feature 82, 87, 89, 93, 94, 95, 96, 98, 99, 101, 102, 103, 104, 105,106, 107, 108, 109, 110, 111, 112, 113, 114, 115, 116, 117,119, 120, 131, 232, 254, 257, 263, 278, 288, 289, 291, 304,314, 356, 443, 485, 522, 601, 682, 725, 759, 766: n = A,T,C or G
  misc_feature 794, 800, 812, 815, 819, 820, 827, 833, 837, 838, 842, 843,844, 845, 846, 849, 850, 851, 853, 854, 855, 856, 858, 866,868, 871, 873, 874, 880, 882, 884, 887, 894, 902, 908, 909,912, 914, 915, 920, 922, 946, 950, 951, 953, 954, 956: n = A,T,C or G
  misc_feature 958, 961, 962, 963, 967, 971, 978, 982, 990, 995, 1001, 1003,1005, 1006, 1008, 1020, 1022, 1034, 1040, 1042, 1043, 1045,1047, 1051, 1055, 1061, 1062, 1064, 1069, 1070, 1072, 1073,1074: n = A,T,C or G
tcnncatnnntntnnnnntnnnnnnnnnnnnnnntnntnnnnnnanncnnnnntnnnattncnnnannnncannnannnntnttatntnatcnnnntnntnnnnnnnnnnnnnnnnntnntggctatacgntcatatagggcgaattggactccaccgcggtggcggccgatgtactttttttttttttttttttttgtacgggatgggtttttgccattgttgtgccagcntgggtcttgaactccgggggcntgnaggccngcctcccaccaacanaattaacttnntnagagcagcaagtncccatatggnaacacagtcaccactcccaggaattaagaatgtgggacagtnggacatctttggggggccattattcagcctgaccctgactcaaggtctggaccaacaaagaaaaaatgggcagcccagcactttttncctcctttcctctcctttcatcccatttttttacattcagtnagaagattgtcagaacaccaattaaaaaaagaaagcnaagattgggggctggggggactgacagagggtgcatttgcatgccaagaaaatgtgctttctaaaatcaaggggctgtnggattaggggccagttggaccaagaagaaccctggtagaaagtgcattctggggaagttgcaagattgtcattgcccctancctcttgttaccggtatctggaaaagccaaagttaagtggganacaggggacacaaacccttgccttttagcacaanaagaaantgctcccaaaacaaaatgaacccgcccngaacangggttacccttnccnggtnntctttgntttccnaatnntctnnnnnacnnnannnntntcattttntnatnannttatcntntntantcttctntattatgnaaaacnntantnntatcntnctttatctatataaatctaataancctnngnnangnaannnagcnttanatattgngagnataacttncttcnaccatntntnnanaatgaactatanantcttctatatcntacatntnntntntggnttantatttnntntactnntnnngt

SEQ ID NO: 1250 - DNA, 879 bp, Homo sapiens
  misc_feature 1, 8, 10, 14, 42, 389, 526, 561, 572, 668, 692, 719, 725,751, 760, 790, 794, 798, 807, 815, 819, 820, 826, 830, 833,840, 869, 870, 876, 877: n = A,T,C or G
ngttgatncnctcntatagggcgaattggagctccccgcggnggcggccgaggtacagattgtgtccactggaaaggtaaatgattgcttttttatattgcatcaaacttggaacatcaaggcatccaaaacactaagaattctatcatcacaaaaataattcgtctttctaggttatgaagagataattatttgtctggtaagcatttttataaacccactcattttatatttagaaaaatcctaaatgtgtggtgactgctttgtaagtgaactttcatatactataaactagttgtgagataacattctggtagctcagttaataaaacaatttcagaattaaagaaattttctatgcaaggtttacttctcaagatgaacagtangactttgtagttttatttccactaagtgaaaaaagaactgtgtttttaaactgtaggagaatttaataaatcagcaagggtattttagctaatagaataaaagtgcaacagaagaatttgattagtctatgaaaggntctcttaaaattctatcggaaataatcttcatgcnagagatttcanggtttggattagccagtgggaataaagaaatgggcattggttccctataattgggctggttttataacttttgtaatattacctttttctggctgnggttttatacttatcccatatgcntggatggggaaaaaattttaatttggnagcccncttttcccatgtaattagtatttggntcataaagnaacttaatggtccaaaaatttggctttggngggnggcntgtaataangataaacntccnncccttntaanggngaccccnaatttccaaaaagggcaaaacattttttnngttttnntg

SEQ ID NO: 1251 - DNA, 473 bp, Homo sapiens
  misc_feature 2, 3, 18, 178, 431: n = A,T,C or G
gnnagggccctaacactncttagggcgaattggagctccccgcggtggcggccgcccgggcaggtacttttttttttttttttttttttttttggagtaacatcctcagacaagtagatagacaagcctccagcaaacaatgggaggaagaatgccatgattcctccttaaattgtanaagctctctggcctctgctgtgcataatctgcctacccatcaaatcacaaaatttgtttgtttatataatatcatcctttctcacagcttttatcagcagagttcttaagttctcaagggaactgtctatttgaggaactataaggattggtcaaatatgctggaatactgcaaaggctaaaaaatgagattctttataagactatgaatccagtgaactaaatattaggcaagacaacattgttttatccanatggctaatttgcatgactccgtttaacacttgatttttttc

SEQ ID NO: 1252 - DNA, 456 bp, Homo sapiens
  misc_feature 228, 239, 351, 425: n = A,T,C or G
ctactatagggcgaattggagctccccgcggtggcggccgaggtacgcgggggtagatggaaggaagaacttgtgtgcttagacctgacgctgggaggagatgctgccacctaggttacttgtaggaccctatacggcaacctcctttgccaggaactatttataaacatcctgcaggaaaatgagtctatatgtcagaatacacatttcccaccttgcccaacagtngaaaaacatangaagagaaaaacattaaaaaatgacaaggaagttaatggaagtcagcaatgtgatggtgtttggaggtggagccttcagaaggtaattaatgcccttgtaagaagaggccanagagcttgcgcaccttcttcctgccatgtgaggagccaagaagccggctgtctgcaacctgcatgaggaccctnactagaagctagccatactggcatcctcatc

SEQ ID NO: 1253 - DNA, 488 bp, Homo sapiens
  misc_feature 2, 3, 4, 8, 9, 10: n = A,T,C or G
gnnnaggnnnggcgcgtatcgactactatagggcgaattggagctccaccgcggtggcggccgaggtaccacacacacacaggcacacgcaggcacacacgcagacacacacacatataaacacacagagttcactagtccgagttactgattttcttaggattctcaaagtgacaacaccggaaacaaggtaattcatgttaaaacacaagggttatatcagtaaagaagatgggatccccgaagtaaaccgtggaatttgaatcaagcttcgaagagctaaaaaaagaaattggagtttcaacattcaccttcttgaatccttaagaaatacagaagttcaaaatagaaaacattacagtttcaggatacaaaagtagaaacatctgagattaagcctacatttttaaaaaaagatattgaaaattactgtgcttgtaataccagcttttcaaacatcaataccagtattggcattacctagatca

SEQ ID NO: 1254 - DNA, 879 bp, Homo sapiens
  misc_feature 342, 383, 393, 447, 470, 479, 482, 504, 511, 522, 527, 540,542, 549, 560, 570, 571, 586, 619, 638, 650, 669, 689, 693,709, 714, 726, 731, 733, 737, 744, 748, 769, 770, 781, 793,801, 814, 821, 827, 831, 834, 838, 844, 846, 859, 872: n = A,T,C or G
  misc_feature 875, 876: n = A,T,C or G
tataggggcgaattggagctccacccgcggtggcggcccgaggtaccgcgggggccgccgtgtgccatttcctctctccagaggacctttcctgcctaggactcatgattgtcccctccctgctgttgcctagtttcctggtattaaggagaatcaactctctggataaacgtgccttctcctgccacggcatgcacccacacatgcgagcctcccgggtacctgcccgggcggccgctcgacagctgcattaatgaatcggccaacgccccggggagaggcggtttgcgtattgggcgctcttccgttcctcgttactgactcgctgcgctcggtcgttcngctgcggcgaagccggtatcagcttcactcaaaggccggtnataccggtantccacagaaatcagggggataacccaaggaaagaacattgtgaaccaaaagggnccgcaaaagggccaaggaacccntaaaaaggnccnggttgctggcgttttttcatangcttccnccccctggccnagccntaacaaaaaattncnctcaaantaaaagggggngaaaccccanngggacttttaaaaanacccaggcgtttccccccgggaagctcccttgnggcgcttttcttgtttccnaaccttgccggnttaccggatacccggtccncttttttcccttttgggaanaggnggggcctttttttttncctancccctgagggantttananttcngggggangggngttccctccaaaatgggctgnngggacaaaaancccccctttaanccaacccngggggctttattngggaaanattggnttgnggnccancccggnanaaaaaaatttttngccctgggggagnccnnggg

SEQ ID NO: 1255 - DNA, 480 bp, Homo sapiens
  misc_feature 2, 3, 4, 13, 18, 480: n = A,T,C or G
gnnnaggcccgancgctncttagggcgaattggagctccccgcggtggcggccgcccgggcaggtacgcggggtccctgaattccatctgactctaattttatgagaattgcagaactctgatggcaataaatatatgtattatgaaaaaataaagttgtaatttctgatgactctaagtccctttctttggttaataataaaatgcctttgtatatattggatgttggaagagttcaaattatttgatgtccgccaacaaaattctcagagggcaaaaatctggaagacttttggaaacacactctgatcaactcttctctgccgacagtcattttgcttgaatttcagccaaaaatattatggcattttggatgctttattcaagggctattacctcaaacttttttcttctcagaaatcccagggattttcacaagggataccttgttatatatggggaaaacaagcaaggtttatn

SEQ ID NO: 1256 - DNA, 461 bp, Homo sapiens
  misc_feature 424: n = A,T,C or G
tacttagggcgaattggagctccccgcggtggccggccgcccgggcaggtactttactcacccttcctctgacagaaaaggatgaagtcaagggcctggtagaggcaccactaagaaaggcatctgaaaggaccaaagagagtgaccagcaagcattttttgcaaggctgaggagctgacagcttccatgaaaggctggaccacccagtggttgaaaagcatcatctgggttaccttgtgctgccataaaacacaccacagacttggtgacttaaaccacagatatttatcttctcacaatcctggaggctggaagtctgcaatcacggtgccagcatggtcaggttctggtgagggcctctttccttctcactgtgtgctctttcttgtgcatgggagagagaagagagccattgaaccaagnccctcttactgtccctcttaagaaggggcactaaatc

SEQ ID NO: 1257 - DNA, 457 bp, Homo sapiens
  misc_feature 313, 385: n = A,T,C or G
actacttagggcgaattggagctccccgcggtggcggccgaggtacggggggaggagttagggcttaggaagaaggaaatgcacaacttgggacctgagttaggccttcatcgtcgcggactcagtagacagaggccataggtgcagctgtgatggtagaggtggaagactgatttgcattttcaccaggtgagacctggttactcaattggttggatgagggaaagagatgatagccaggggcggcataaaacggcaatgagctcagtaaacaacccccttcccgtgatcttcgtggcttcccgcccagacntgtgaccaatatagcaaggagcagtctttaaggcgacaccggcagagaggcagaaaaagatgggcccttacncggttagttaagaaaaaaaagaggacctgttgcctgtccctctagctttgaacctacaaagtgggaggggga

SEQ ID NO: 1258 - DNA, 450 bp, Homo sapiens
  misc_feature 421: n = A,T,C or G
tagggcgaattggagctccccgcggtggccggccgcccgggcaggtacacgtccctagaagcacatagctccagcaacaaagctaatctgagagtaatacccaagatgcctcctaccttgcaaatttcaaggaatttctcactggtgtatttcataggatgctcagtgaaagtagcataaggaacttcagtggaccatggggttccagcggggacagaagagactgctcctccggactcccccagtagatcctaaggccttctccttgtctcttgtccagggacatcccagggaaggtgaacttgcccaggcagatgcgatagacagcgctcagaggaatccgctgcagctgcacacaactcagcatgatggaagtcgtatttgcaggatcaaggagagtcttgtctgtggaccagtaagnaaattctctccttctcattgttccagtgg

SEQ ID NO: 1259 - DNA, 493 bp, Homo sapiens
  misc_feature 2, 3, 4, 9, 10, 23, 306, 412, 417, 435, 472, 493: n = A,T,C or G
gnnnaggtnncgactatcgactncttagggcgaattggagctccccgcggtggcggccgaggtactagacggggctgtaatctggtaactgtatgtattttagttcttcagtccctgggaaggagacaggagaaggtgggagggaggaaggggccagctgaaatggaaacagatccctgatccggggcggtcagtggaacccttcttggtgtgcgagagcctgtgcatttcaagaggcagcaaaaaagtaaaaaaaaaaaaaaaaattgatctttgtttagattaacaggacccctgactatgaanaaggaaggcatccagaccagaaaccgaaaaaatgtctagccaaatccaaaaagtgcaaaaaaagttgcattgactcactggagggactttccccaagaaacagctngtttnaacccggcccgctcttanaactagttgggatcccccgggctggcaagggaaattncgaatatcaaagcctttttcn

SEQ ID NO: 1260 - DNA, 479 bp, Homo sapiens
  misc_feature 2, 3, 4, 253, 403, 417, 422, 478: n = A,T,C or G
gnnnaggggacgccgaatacgactactatagggcgaattggagctccccgcggtggcggccgaggtaccatttaatcctcacccctgactgtcagtagactgccatggaaaccccaaggatgcctgtcctgttggacatgtggtcagagactggctccaaagatatctcccaaagagcaaaagccaccatcttcctgttggtgcccagacacaggtgcatgagctccaaggactccttcctaggccacctctntgctgcctgatctaaactcacctcatttctgggagctggtctgagagtctgccttggagatgtgttggatgggaactaggggtttgtaggctccattgtgagcaatactgatgggaaaatgaccccaactggtatggatattttttgcantaaaagccccctgnaaatnctggacatgctcaggggtcaagagccattgaacccactggtctttgaacaaaaccnc

SEQ ID NO: 1261 - DNA, 488 bp, Homo sapiens
  misc_feature 2, 3, 454, 459: n = A,T,C or G
gnnagatcctatcattacttagggcgaattggagctccccgcggtggcggccgaggtacaatcaaccaacaagtcattattaccctcactgtcaacccaacacaggcatgctcataaggaaaggttaaaaaaaagtaaaaggaactcggcaaatcttaccccgcctgtttaccaaaaacatcacctctagcatcaccagtattagaggcaccgcctgcccaggtggacaacatgtttaacggcccgctctagaaactagtggatcccccgggctgcaggaattcgatatcaagcttatcgataccgtcgacctcgagggggggcccggtacccagcttttgttccctttagtgagggttaattgcgccgcttggcgtaatcatgggtcataagctgtttcctgtgtgaaattggttatcccgctcaccaattcccacaacaacattacggagcncgggnaggcataaaagtgtaaaagcctgggggtg

SEQ ID NO: 1262 - DNA, 490 bp, Homo sapiens
  misc_feature 2, 3, 4, 5, 11: n = A,T,C or G
gnnnnggcccnatcactacttagggcgaattggagctccccgcggtggcggccgaggtacttcaaatttggagcatcatttgaaatcattttctgattctaagctataactgaaatacaaatataacattaagacaccccaaagaagacattaaggatacacttgtcgttcttaagtgtgtttcactaaaaataataacaaaaaacttttaatttttaaaaatggttctagcttttaaaaacctgcagtaaatactttacaagtggctagacaccttccctggtggtttagtttatacaagcaggaaactttctctcctactctttctctctctctttcttgttttctttaaaccaactgacgtaatgccaaactttgctttaaaagaacagacaggaagtaattggtagcttttaacttttaataatgttctgggattgggttttagtggccaaaatgccatttaaaaaaaaaaaaagttcaagtaaga

SEQ ID NO: 1263 - DNA, 490 bp, Homo sapiens
  misc_feature 2, 3, 4, 6, 10, 16, 24: n = A,T,C or G
gnnngnggcncgccgnatcgactnctatagggcgaattggagctccaccgcggtggcggccgaggtaccatgattagttaaatataagactccgtaatttttacaattttaacaataattttatttcttcaagcttgttagtttgggattgtattaaaactacagtgtgtgacttagaaaatgataatgctgctttatggaaaatggattataggtgggtaagacttcattgccaaaaaattgtgtaataccatcagtgttaggaacccagttgaagtctagaagacagatgatagtatcttagactaggttggtatttgaatagatattggtaatatcagtagaatcttaataatacattagaaagaaagaaatcagagaagattcttttattttcacttgatacttgtgttgttactttcaatgagataagaaagacaggccaaaggaggaacgttcaggggcaggggatgaggaagaaaacaaggaa

SEQ ID NO: 1264 - DNA, 859 bp, Homo sapiens
  misc_feature 2, 3, 10, 12, 15, 16, 23, 27, 33, 35, 37, 39, 40, 41, 43,44, 45, 49, 50, 52, 53, 55, 59, 74, 83, 88, 91, 92, 96,98, 110, 112, 114, 119, 122, 141, 288, 339, 342, 365, 378,388, 404, 412, 414, 416, 438, 478, 480, 485, 496, 501, 532: n = A,T,C or G
  misc_feature 538, 543, 558, 571, 586, 588, 595, 617, 622, 646, 648, 659,673, 682, 687, 706, 710, 720, 736, 737, 750, 790, 804, 822: n = A,T,C or G
cnnactttgngnttnntttactngctntcaagnancnannnannntggnngnntnctanttttttgttgcaatnatatagctnggacnagnnaatnantattgttttttntntntgggngantccgatacgactcatatanggcgaattggagctccaccgcggtggcggccgaggtacgcgggcatccttaggagacctgagtcctcaagaaaaccctcttctggaagtagttgctccttcagaacgttttacagaaaacactaatgtaaaagacacaactaatgtnaaagacacaaaagagatgtgttcaaagacacattttctgaaaacacaaaanctnacaaattcaatcctccctggagnggcaagtttttcnggcctggggnaaccttggcaatttcnaaaacttntnangaaaccccataaccttggtttnaaaaaccaaaaaaccttggaaggaaccaaataatatttgngnggaanattaaccaaanccaanaattggttgggggggcccaattttggaaccnttttgngttcnccccccttgggaagnccccccaaaaaanagggcctttttcaananttttaancccccccaattttgggccttcnttccnggtttccccccccaagggggtttngnaattccaaggnccttttggtaaaanaatttttcnaaggnccttaaaaccccggaaggncaangccttaaccnggggttctcccccttnnatttccccccccnaaaccggaagggggattggttggaaggaaaaaagggtttncaattgggtccttncaattgggtttaattccntgggggaacccctttgggaaaaaaattgggggaaatt

SEQ ID NO: 1265 - DNA, 496 bp, Homo sapiens
  misc_feature 2, 3, 4, 6: n = A,T,C or G
gnnngngccctatcactacttagggcgaattggagctccccgcggtggcggccgcccgggcaggtactcatttaattagggttgcagaggagatggaaaaacaagctgtttgattatgaaggcaacacttctgtcagtagaattgctttggattgtaaatatgtttacttcagaggaaatcagtcagagtggatggctcagcaaaacccatcacaactgcggaaaaaaggaagtgactggctagaggtaaggaaatagattttctctaagttaactggcctacgtgtgaatcgaaccctgcaccctggcctcattagcaccaacactgtgaagaacagctgtggcagagaaagtgccacggccccaccccatcaccagattcagtagaaaggcccttggaatttcctacaagggttcagttctgaacagctccacttcaaatcagtatagaatcctcacagtgactctgtgaggggaggtaaaatgtcactgctcc

SEQ ID NO: 1266 - DNA, 503 bp, Homo sapiens
  misc_feature 453: n = A,T,C or G
actacttagggcgaattggagctccccgcggtggcggccgcccgggcaggtacatgtgtccaggtttctctctttgagggatagtgatgccctttggtgtaaagctgtgagaaacccccatggtttgggattgtaatagcatgatgctgatgatgctggaagaggcatcaaaactcagttacttcccaaggtttgacttacagacataaacttcccagggaccatactttgtaggaacttaagaaggtatttgccattattccaaggctggttgtccttcagaaacaaaacatggggatcagtggagcattggaaagtgggcatgctgggcacagttcatccattgtggtcaagaagcatgtcactgggagagtacctcggccgctctagaactagtggatcccccgggctgcaggaattcgatatcaagcttatcgataccgtccgacctcnagggggggcccggtacccagctttttgttcccctttagtgagggttaatt

SEQ ID NO: 1267 - DNA, 694 bp, Homo sapiens
  misc_feature 3, 6, 7, 10, 11, 12, 13, 16, 19, 21, 23, 25, 26, 28, 31,32, 33, 34, 36, 38, 39, 40, 44, 46, 49, 70, 73, 74, 75,78, 90, 120, 138, 277, 307, 422, 498, 518, 524, 538, 560,592, 599, 613, 644, 657, 693, 694: n = A,T,C or G
ttnatnnatnnnnttnttnantntnnanttnnnnantnnnagtnangcnctatcactactatagggcgantannnggngaatcggagctncaccgcggtggcggcacgaccgggcaggtncttcatctctctgacctnattcgcatggcattcatggctgcaactgatcaatagcaaccatgctgcgaatggctgggcttccagggcgcttgaagacattatcaagaagtttgcgtctgtgcctgagccagaatttccaggtcatgcgatactggangcagtatcaaggctaatgtggggaagctgntctaagaccaagccttttcacaagatacaccatcagatataataagcgaaagctttgccaggtatgtagtacctcggccgcttctagaactagtggattcccccggggcttgcanggaaatttccgaataatttcaaaagctttaattcggaatacccggtccgaacccttcggaggggggggggggggcnccccggggtaacccccaagncttttntttggttttccccnttttttaaggtggaaggggggnttttaaattttggccgccggcttttggggccngttaaantcaatttggggttncaattaaggccttggttttccccttggtggnttgaaaaaaattngttttaattctccggcttccaccaaattttcccacnn

SEQ ID NO: 1268 - DNA, 605 bp, Homo sapiens
  misc_feature 2, 3, 4, 273, 329, 369, 415, 451, 453, 468, 499, 508, 572,583, 605: n = A,T,C or G
gnnntccctaactctactatagggcgaattggagctccccgcggtggcggccgaggtacacggcctggctacctgtgggttgtttggatctatcggaacctcattggaagtgtgcacttctttttcatcctcaccctcattgtgctaatcatcacctatctttactggcagatcacagagggaaggaagattatgataaggctgctccatgagcagatcattaatgagggcaaagataaaatgttcctgatagaaaaattgatcaagctgcangatatgggagaagaaagcaaaccccagctcacttgttctggaaagggagagaggtnggagcaacaaggctttttgcatttggggggaaccatgatnggccagtcctttgactttgcgatcctaaaaagaatcaagtttcaangaaagggtaaatccccaaggggccctggattgaacntntttttttgggtaaancccaggaccaccccaaattcaaaaattaaanggggggaangggaagaattgaaaaaaattgggaaatggaatttttctttccccattgcccaacccttgttggnccctttttaanggaaaccttgcccccaagaaan

SEQ ID NO: 1269 - DNA, 670 bp, Homo sapiens
cgcgtaatacgactcactatagggcgaattggagctccaccgcggtggcggccgaggtacgcgggggtgtgcttagacctgacgctgggaggagatgctgccacctaggttacttgtaggaccctatacggcaacctcctttgccaggaactatttataaacatcctgcaggaaaatgagtctatatgtcagaatacacatttcccaccttgcccaacagtagaaaaacataagaagagaaaaacattaaaaaatgacaaggaagttaatggaagtcagcaatgtgatggtgtttggaggtggagccttcagaaggtaattaatgcccttgtaagaagaggccagagagcttgcgcaccttcttcctgccatgtgaggagccaagaagccggctgtctgcaacctgcaagaggaccctcactagaagctagccatactggcatcctcatcttggctttccaacttccagaactgtgagaagtatatgtttgtggtttagtcaatggtctatggtaatttttttatagcagtcccagccaagacagtgcctcatttactacataccatttatattattatataggctcctttcagaaacccatgttcaaataagagataagatactgaaacacataacacctttcgctagtttttagtatacaaatattga

SEQ ID NO: 1270 - DNA, 862 bp, Homo sapiens
  misc_feature 1, 563, 583, 598, 651, 660, 662, 713, 760, 765, 767, 771,780, 781, 795, 797, 823, 849, 861: n = A,T,C or G
ngcgtatcactactatagggcgaattggagctccccgcggtggcggccgaggtacaacatggggctgttcatccttcgtcttgctgaagatggtcctgccaccaaagatggcagaattcatgttggtgaccagattgttgaaatcaatggggaacctacacaaggaatcacacatctcgagcaattgagctcattcaggctggtggaaataaagttcttcttcttttgaggccaggaactggcttgatacctgaccatggtgattgggatattaataatccttcgtcttcaaatgtgatttatgatgaacagtcaccattacccccatcttcacattttgcttccatatttgaagagtctcacgtgccagtaattgaagaatctttgagagttcagatatgtgaaaaggcagaagaattaaaggacattgtgcctgaaaagaaaagcactttaaatgaaaatcagcctgagataaagcatcagtctcttctccagaaaaatgtgagtaaagagggatccacccagcagtcatgggcacagtaacaagaaaaatctattaaaantagaaaaatggtgttacacnaagaggtagatcggntagtcccaaaaagccagccagtcacattcagagggaacatttggataagattnctagtcctntnaaaaataaccccaaaagaagacccagagatcaatccctcaccccagcaaangggaaaataaaagttgtcaggtcaacaccagggcaggctctggacangatcngntccngaaaaagcnnaggtcggtcggccngncccaaaaaagccgcaaaaaattgganggaagccaagcttcttcaatgcttgnggccaaattttna

SEQ ID NO: 1271 - DNA, 883 bp, Homo sapiens
  misc_feature 24, 48, 49, 488, 562, 590, 599, 613, 620, 637, 641, 656,662, 695, 706, 707, 726, 731, 735, 745, 748, 755, 762, 770,779, 780, 781, 805, 815, 830, 832, 835, 840, 844, 847, 850,860, 866, 875: n = A,T,C or G
attaccgcctatacgactactccngggcgaattggagctccccgcggnngcggccgatggcctcttctaggcagatccgtctacaactggtaacagcaaccatatcgagtttctctttatcacaataccacgaggcttatcatcattgccatgcctttagtaacatcacttttttaaatgggcattttcacaatgtaatctgcaacctacatataacatgcactctttattgaaggccgtacctgcccgggcggccgctcgagagacacattacctgaatgagcaggtgaaagccatcaaagaattgggtgaccacgtgaccaacttgcgcaagatgggagcgcccgaatctggcttggcggaatatctctttgacaagcacaccctgggagacagtgataatgaaagctaagcctcgggctaatttccccatagcccgtggggtgacttccctggtcaccaaggcagtgcatgcatgttggggtttnctttacctttttctattaagttggaccctcgggccgctctagaactagtggatcccccggctggaaggaattcnaatattcaagcttattcgattccggtcnaccttcganggggggggccccgnacccaancttttggttccctttantgangggtaaattggcccncttggncgtaaacaagggccaaaacctgtttcctggggngaaaaatggtnntccgttacaaattcccaanaacantacnaacccggganctnaaaaggntaaaacntggggggngcctaattnnngagcctaactccaaattaaatggngttggcctancggcccgttttcaantnggnaaacntgtnggncancttcattaantgaatnggcccaccncccgggga

SEQ ID NO: 1272 - DNA, 670 bp, Homo sapiens
  misc_feature 4: n = A,T,C or G
agcnccgccgtaatacgactcactatagggcgaattggagctccaccgcggtggcggccgcccgggcaggtacgcggggggggggggattcttgatccatgcacagcgatgtgagctgaggtgcaggcaccagacctaggaattcctagaaaaatagtcaggaagcatttagacacatcaaatgttaaacgagtcctgattatgatgataatgatgatgattttggtggttgcaatagcaaagccttaagtatgaaggagacgtgccagctggaaatacaggtagacaatgaacaactgaatttagaggacgaagacattgaaagcattgatgccaccaaattgagccgtttcattgagatcaacagcctccacatggtgacagagtacctcggccgctctagaactagtggatcccccgggctgcaggaattcgatatcaagcttatcgataccgtcgacctcgagggggggcccggtacccagcttttgttccctttagtgagggttaattgcgcgcttggcgtaatcatggtcatagctgtttcctgtgtgaaattgttatccgctcacaattccacacaacatacgagccgggagcataaagtgtaaagcctggggtgcctaatgagtgagctaactcacattaattgcgttgcgctcactgcccg

SEQ ID NO: 1273 - DNA, 811 bp, Homo sapiens
  misc_feature 5, 613, 657, 664, 668, 675, 695, 701, 734, 754, 762, 763,765, 782, 793, 800: n = A,T,C or G
agcgnatcgactcactatagggcgaattggagctccccgcggtggcggccgcccgggcaggtacacacaaagacaaacctgaacttaatttcaaggaaaacttaaacccatgcacaaataattggtgagccttcatttccctgacttcaagtttccatgtgaggactcatgctctctccactttcttcttgggaggagggaagatttacctaatgggtaaatttgggcaaagcacattgagtgtgcttgtttggctctgagtctctttgcaaacatgtgtctgcccacagtgacatgagtttgcgttgactgtcatgcctgcaggaagctgcctgctcctgtgaccatgtcaagcaattctttctttcaactgcaactgtgtgtaagagcttagtctgagaagaaatgttcagaagctcactgtggctgcacatctgagccatgtcttcccattagttgtcatgagtcagcaataaagcgggtatgttgatgtctatcaatctaattcctatgttctgaactcagggaaagaaataggagaatcatttgcagcctacctaccacagccccaccaagatggctacataatacttgtaaaaatggttcctacttncttgactttgtaactttatattcttcaacacaacccccatgttnacaatangaanggctggnaaaaaactgaaatcagcccngccggnggctcaccctgtaatcccgcctttgggaggccnaggcagccaacaccaggccngagatcgnnancatcctggctaaacaangaaacccgctntactatnaaaaaaaaaat

SEQ ID NO: 1274 - DNA, 839 bp, Homo sapiens
  misc_feature 439, 470, 596, 607, 614, 625, 659, 666, 693, 740, 746, 768,782, 787, 804, 810, 817, 824, 830, 839: n = A,T,C or G
tagcgtatcgactactatagggcgaattggagctccccgcggtggcggccgcccgggcaggtacacacaaagacaaacctgaacttaatttcaaggaaaacttaaacccatgcacaaataattggtgagccttcatttccctgacttcaagtttccatgtgaggactcatgctctctccactttcttcttgggaggagggaagatttacctaatgggtaaatttgggcaaagcacattgagtgtgcttgtttggctctgagtctctttgcaaacatgtgtctgcccacagtgacatgagtttgcgttgactgtcatgcctgcaggaagctgcctgctcctgtgaccatgtcaagcaattctttctttcaactgcaactgtgtgtaagagcttagtctgagaagaaatgttcagaagctcactgtggctgcacatctganccatgtcttcccattagttgtcatgagtcancaataaagcgggtatgttgatgtctatcaatctaattcctatgttctgaactcagggaaagaaataggagaatcatttgcagcctaccttaccacagccccaccaagatggctacataatacttgnaaaaatgtttnctacttncttgactttgnaactttatattctttaacaccaacccccatgttnacaatangaaggactggaagaaactggaaatcangccccggcgccggtggcttacgcctgtaattcccgcccttttgggangcccgnggcacggcaaaatcacgaaggncaggagaaacgaanaacantcctggcttaacacaantgaaanccccgtntttcttntaaatnaaaaaaacn

SEQ ID NO: 1275 - DNA, 819 bp, Homo sapiens
  misc_feature 1, 559, 625, 627, 652, 665, 672, 674, 676, 686, 707, 710,711, 713, 714, 726, 738, 744, 754, 778, 792, 793, 807, 808: n = A,T,C or G
nactactatagggcgaattggagctccaccgcggtggcggcccgcccgggcaggtacccgggaggctcgcatgtgtgggtgcatgccgtggcaggagaaggcttccgaagagccatgcatgcgtcctctggctgctccaggtgtaaaaaatgccagggaggggacaatgatgagtcctaggcaggaaaggtcctctggagagaggaaatggcacacgcgcaagcacggaggcatgaggggccagggtcctggaggacactgggccgggacagatcagactccccccgcgtacctcggccgctctagaactagtggatcccccgggctgcaggaattcgatatcaagcttatcgataccgtcgacctcgagggggggcccggtacccagcttttgttccctttagtgagggttaattgcgcgcttggcgtaatcatggtcatagctgtttcctgtgtgaaattgttatccgctcacaattccacacaacatacgaaccgggagcataaaagtgtaaagcctggggtgcctaatgagtgagctaacttacattaattgcgntgcgctcactggccgcttttcagtcgggaaacctgtcctgccacttgcttaatgaatcggccaacncnccgggaaaagccggtttgcgtattnggcgctttttcgntttcttngntnacttgactcncttggcttcggtcgttccggnttnngnnaaccggtattancttacttcaaangggggnaatccgggtnttcccagaattcaggggattaccnccggaaaaaaactnnggaccaaaagggcnnccaaagggcct

SEQ ID NO: 1276 - DNA, 872 bp, Homo sapiens
  misc_feature 3, 4, 5, 252, 261, 501, 510, 517, 519, 544, 559, 569, 597,625, 646, 650, 658, 676, 682, 691, 698, 715, 725, 736, 750,785, 796, 801, 806, 816, 828, 840, 855, 858, 862: n = A,T,C or G
atnnncgtatacgactactatagggcgaattggagctccaccgcggtggcggccgaggtacgcgggtttcctcaacatggctgcgcccttgtcagtggaggtggagttcgggtgagtcacagagctggggcgccgtggggatggattgaagtcgtcgggcccagaattcctttctttgccgtggggcctgacacggccgctctagaactagtggatcccccgggctgcaggaattcgatatcaagcttatcnataccgtcnacctcgagggggggcccggtacccagcttttgttccctttagtgagggttaattgcgcgcttggcgtaatcatggtcatagctgtttcctgtgtgaaattgttatccgctcacaattccacacaacatacgagccgggagcataaagtgtaaagcctggggtgcctaatgagtgaactaactcacattaattgcgttgcgctcactgcccgctttccagtcgggaaacctgtcgtgccanctgcattantgaatcngncaacccgcggggaaaagcccgtttncgtattgggcccctnttccgctttncttcgctcacttacttcgcttgggctcngtccgttcggcttccggcgaagccggtntcaagcttcactcaaaaggcnggtnataccggntattccacaagaaattangggggntaaccccanggaaaanaacatgtgaacccaaanggccatcaanaaaggccaagnaacccgtaaaaaanggccccggttgcttggcgttttttccataaggctnccccccccctnacaancattnacaaaaaatngacgcttaaatnagaggggggganacccgcccggctttnaanaaancaagcgtttt

SEQ ID NO: 1277 - DNA, 890 bp, Homo sapiens
  misc_feature 5, 8, 21, 62, 247, 483, 489, 507, 631, 692, 694, 695, 708,727, 732, 734, 750, 789, 790, 806, 808, 809, 810, 814, 818,820, 823, 829, 845, 859, 867, 869, 872, 873: n = A,T,C or G
atgcnctnatccacctaatangactactatagggcgaattggagctccccgcggtggcggcncgcccgggcaggtacgcggggggggggggattcttgatccatgcacagcgatgtgagctgaggtgcaggcaccagacctaggaattcctagaaaaatagtcaggaagcatttagacacatcaaatgttaaacgagtcctgattatgatgataatgatgatgattttggtggttgcaatagcaaanccttaagtatgaaggagacgtgccagctggaaatacaggtagacaatgaacaactgaatttagaggacgaagacattgaaagcattgatgccaccaaattgagccgtttcattgagatcaacagcctccacatggtgacagagtacctcggccgctctagaactagtggatcccccgggctgcaggaattcgatatcaagcttatcgataccgtcgacctcgagggggggcccggnacccancttttgttccctttaatnagggttaattgcgcgcttggcgtaatcatggtcatagctgtttccttgtgtgaaattgttattccgctcacaattccacacaacattaccagccgggagcataaagtgtaaaagcctgggggtncctaaatgaagtgaacctaactcacattaattgcgttgcgctcactggcccgcttttccantnnggaaaacctgttngtgccacttgcattaattnaattngnccaaccccccgggganaaggcggttttgcgtattgggccctttttccgctttctnncttcaattgacttcgntnnncttnggtncnttntgcttnggcaaccggattaacnttattaaaaggggntaaacggntntcnnaaattaaggggatacct

SEQ ID NO: 1278 - DNA, 839 bp, Homo sapiens
  misc_feature 152, 432, 449, 452, 462, 468, 485, 503, 525, 533, 569, 572,594, 603, 609, 624, 641, 650, 651, 669, 676, 684, 740, 743,753, 756, 763, 765, 771, 772, 784, 800, 803, 814, 815, 835,837, 838, 839: n = A,T,C or G
gcgcctaatcgactactatagggcgaattggagctccccgcggtggcggccgaggtacttttttttttttttttttttttggggagaagatcatgcatttcctaggacaggactaatacatttagctgtggctattatcaaagagcaccaanaccttaggtggggcaaccagactggctatggggctcgatgtaagccagacccatgacccataaactatttcaggtaggaagtaagcaatactataacttggactcgagggggagcaaaagggcacccctcaatggtgatggctgcccacttggtctcaacactgtaaaacttgggacttgctgccaagctccaccaggcagggggcagaggacactgagtctcctccaactgaatcaggagtggctcaagagctgacactggcctaagcttgcagcaaanggcccctacgtacctgnccnggcgggccgntctaanactaagtggatcccccnggctgcaagaattcgatntcaaagcttatcgatacccgcnaccttganggggggcccggtacccaactttttgttccctttaanganggttaattgcccccttggcgtnatcatgggnaaatanccgtttccctggggnaaattgtatcccgctcncaattcccnnaaaaataccaaccggganccttaanttttaaancccgggggggccaaatgagggggcctactcccatttaattgggttggcccaactgnccnttttcaatanggnaaacctntnggcccnntgattaatgaantcgccccccccccggnaanagggggtttgnntttgggggcttttccttttntnnn

SEQ ID NO: 1279 - DNA, 867 bp, Homo sapiens
  misc_feature 11, 100, 101, 203, 219, 226, 229, 400, 604, 605, 608, 631,640, 653, 669, 725, 735, 738, 741, 745, 746, 760, 775, 794,804, 819, 822, 835, 854, 856: n = A,T,C or G
agccgtgaacnactactatagggcgaattggagctccccgcggtggcggccgaggtacttcttttttttttttttttttttttggggggattacacaatnnaaaagccccaaggatattcatcaattctattcttttctctttatgactatttccttctttatcctaaattgtcaaaaatcatcaaggggcattctgatacanaagcactctgatacanaaacacncanttaacatgaaaattaacggttaacaaaaaaggaaagttacagaggataaaataccttttagccttgacccattttacttctttcttgggcatacagatacatgctaatatccataccttgctaaatataaaaatacctgagagtagctggatggagcccaattttgtatanacagcctgttagtttctccatctctatatgcattggcatataaaaagtaagagaaaactaaacaagttctttttaaatgtaacttcctttttgaaaatatgcatataagactatgcattttaattttcatgaatactgaccttctgtaaatgcaaatacccattttctacattacaatattacccaagggggaaaaaaaaaacnnccnccaaaaaggaaattactgtgtangagtaaacncggaataaaacantcccattttggaccanttccccagggctttaaggatggcttttaaaattctacctttaaaatacttttattncttttacaanttnatnaaanngggggaaaaattgnatcgcaatttcctanttaaaaaaaattaccttcnttattggganccggccttggttttnaanggacgttctttanccagtgggaaatttccaangnccccttttttt

SEQ ID NO: 1280 - DNA, 839 bp, Homo sapiens
  misc_feature 42, 74, 376, 451, 594, 600, 601, 622, 642, 664, 665, 668,686, 718, 730, 751, 753, 759, 784, 793, 794, 801, 831, 838: n = A,T,C or G
gactactatagggcgaattggagctccaccgcggtggcggcncgaggtactttttttttttttttttttttttngatgctattactgaataactctttctgagatggttgttgtatagtaaaccatgagtctggcatgtctaaaattgtcttcatttctttccataaatttgaatgttttgctgtgtaagtcattcaaagttgaagacaatgtcccatcttttgacagaaagggaaggaaggatatgtgctcagcctgccagtttgacccacttttgaaaagggctttgtggtctctaccaatgagaagtctggtgtcaatgtgattttcttaactttataggaattgtttgtttccctcttttctgaaaacttgngctttcatcaggctctaccagccttgatactctgtcactcactgggcatggtacctgcccgggcggccgctctanaactagtggatcccccgggctgcaggaattcgatatcaagcttatcgataccgtccacctcgagggggggcccggtacccagcttttgttccctttagtgaggggttaattgcgcgcttggcgtaatcatgggtcataactgnttcctnntgggaaattgttatccgcttncaattccacaccacattacnaacccggggagccataaagggnnaangcctgggggggcctaatnaggggagctaacccaccattaattgccgtggngctcactggccncctttccaatcgggaaacctntnctgccngcttgaattattgaatcggccaacnccccggggnngaggcgngtttgcggtttggggcccttttccctttcntgattang

SEQ ID NO: 1281 - DNA, 860 bp, Homo sapiens
  misc_feature 6, 473, 525, 553, 587, 624, 633, 669, 677, 701, 734, 737,739, 740, 743, 768, 790, 827, 840, 843, 855, 856, 858: n = A,T,C or G
tatacnactactatagggcgaattggagctccccgcggtggcggcccgcccgggcaggtactttactcacccttcctctgacagaaaaggatgaagtcaagggcctggtagaggcaccactaagaaaggcatctgaaaggaccaaagagagtgaccagcaagcattttttgcaaggctgaggagctgacagcttccatgaaaggctggaccacccagtggtgaaaagcatcatctgggttaccttgtgctgccataaaacacaccacagacttggtgacttaaaccacagatatttatcttctcacaatcctggaggctggaagtctgcaatcacggtgccagcatggtcaggttctggtgagggcctctttccttctcactgtgtgctctttcttgtgcatggagagagagagcatgaacaagccctctactgtccctcttagaagggcactaatcccataataaggcattncacccttctgacctcgggctaaccctagttaagtacctcggcccgctctaanaactaagtggatcccccgggcttgcaangaatttcgatatcaaagcttatcgatacccgtcnaacctctagggggggcccggtacccaactttttgttncctttagtngagggttaattggcgccctttggcgtaaatcatggncaataacntggtttccttgtggtggaaaatgnttattccccttcaccaatttcccaccaaccatnacnannccngggagccattaaaagtggtaaaaanctggggggccctaaatgagggnaacctaacctcacaatttaattgggggttgcgcttanttggccgcttttnaantcgggaaaactnncngg

SEQ ID NO: 1282 - DNA, 858 bp, Homo sapiens
  misc_feature 2, 4, 5, 6, 7, 8, 13, 566, 583, 613, 616, 676, 712, 721,759, 769, 801, 804: n = A,T,C or G
tngnnnnncgacncgcgtatacgactcactatagggcgaattggagctccccgcggtggcggccgcccgggcaggtacgcggggagaacaggcgatatcttcaccatgcgcacaatgaaatcaatactcagagaaggcagataattctccacgaagccagaaaactaataaatgaacaacttgggtgaaatgtcccaccagacggtgtgatatttagtagcccagaaagctgccaaggggttgaatgacactatctgaagatatgaaccagtttgctctccatagggaggatttcatcaacaggaaacagatgcctggaaggcattggatttgctaagtgtctatgccatatgattctgctgtttgcgtttgatttagaatgctgagctgactcaaagtcaaactatttcatatgttgaaatcctgactcccagcctgagggcattacgaggggctctgggaggtgattaggtcatgagggtggagccctcatgaatgggattagtgcccttataaaaagaggcatcagagagatcgtttgctccttctgccatgtgaagacacancaatggatgactatcanggtattaaagaaagaacacatgattttctnttnctgaagcatgggacccgatattatagcttacccttcagggcaggataatttgctcattgnggattaattggcttcagcagatgaaaaccttcttgnaaaccaatnggaaatcaagggagtcaagaattgaaccttaaatggcnttgggtttcnaataagcccttacaaatcaagccttggaaaanaanattgctggggagtgaattttaaatggggatgtaaagagggaacttttgaaaaag

SEQ ID NO: 1283 - DNA, 895 bp, Homo sapiens
  misc_feature 4, 6, 9, 242, 417, 476, 484, 536, 557, 585, 595, 600, 614,625, 637, 652, 660, 665, 691, 725, 726, 738, 750, 753, 755,763, 773, 778, 779, 782, 786, 789, 801, 808, 812, 815, 818,820, 821, 825, 828, 829, 833, 834, 840, 843, 849, 858: n = A,T,C or G
  misc_feature 861, 867, 871, 878, 890: n = A,T,C or G
atgncntanccacgtaatacgactcactatagggcgaattggagctccacccgcggtggcggcccgcccgggcaggtacgcgggggggatgagtcagggagagctagtgtggtagcagtttctagagctgttttcaaggaatggaaagaggagtggggaaaggatttaggatctatggggttggctaggtttccctttctgagtttatataatggtttcgagaataaatgttgaaggagcangagggtgtcttgttgagaagatttaaaggaggggctacaaagtagaaggtcatcaatatattgaataacgtgagaagcacaggggtggaaagaaagtaaatcatgagaaagagcttggctgaaggaatgagggctgtccctgaagcctcgtggcagtacctcggcccgctctaanaactaagtggatcccccgggctgcaggaatttcgatatcaaacttatccatacccgtcnacctcganggggggccccggtacccactttttgttcctttaatgaaggttaattgccccncttggccttaatcatgggcantacctgtttcctgggtggaaaatggtantcccgttacnaattncccaccacattccnaacccgggaanctttaaaatgtnaaagcctggggttgncttattanttaanctaaccttacctttaattgcctttcnctcacttgccccttttcaaatcggaaaaaccttnntcccaatttttnttaattaatccnccnancccccggngaaaaggcgntttgnntanttgnccncttttccctttnttcttcnattnatntcntnncctnggnntttnnggttcnggnaaccgntttcacttnacntaaagncggnaattccnttttccccaaantaagg

SEQ ID NO: 1284 - DNA, 878 bp, Homo sapiens
  misc_feature 2, 3, 4, 5, 6, 9, 14, 544, 667, 690, 693, 736, 739, 812,839, 864, 871: n = A,T,C or G
gnnnnnacncgtantcgactcactatagggcgaattggagctccccgcggtggcggcccgcccgggcaggtactgtgatatccacatatttttgagaaaaattcccaagccaggcgaatgtggattggaataaagacataggcagtgtataccaccatagcaataatggttaataagatggcgttaaacatagatcgctcccagggctctaaaacagcacagcagctaatgatttggtattgatagtagagccaggagaaatattccttcacacgcctcaaatccatggttggctccttcaagctgcagtaagtttgtcctaagaaagtccaggtctggttcttcagccttgctccttcgcgaaatgatcctgtgtgggttaagttctcctctctgggttgctgtttcctcatctcccagttgggtgtatctccctgcggcttaggtgagcgccgaggctttggctcctccccagctgctgcgagcttcccactgccccgcgtacctcggccgctctagaactagtggatcccccgggctgcangaatttcgatatcaagcttatcgataccgtcgaccttcgagggggggccccggtacccagcttttggtccctttaatgagggttaaatgccccgcttggccgtaaatcatggtcataacttgntttcctgggtgaaaattggtatncgnttcacaaattccccacaacattaccagcccggaagcataaagnggnaaaccctggggtgcctaatgagtgagctaacttcacattaattggggttgcgctcacttgccggtttccagtnggggaaacctgtcgtgccacttgattnaatgaatcggccaacccccgggganaggcggnttgcttt

SEQ ID NO: 1285 - DNA, 693 bp, Homo sapiens
  misc_feature 4, 9, 10, 15, 28, 35, 38, 41, 97, 104, 106, 109, 116, 215,455, 505, 522, 538, 540, 543, 548, 551, 552, 561, 584, 590,593, 596, 600, 605, 608, 611, 612, 613, 615, 621, 622, 623,628, 630, 631, 635, 636, 640, 641, 650, 652, 664, 666: n = A,T,C or G
  misc_feature 668, 669, 672, 674, 675, 676, 679, 683, 687, 689, 690, 693: n = A,T,C or G
ttantattnntttgnaaatttggcaaanactactnctntanggcgaattggagctccaccgcggtggcggccgcccgggcaggtactttttttttgnttttttnantcntttttanaacaaacacaaaaaagttttatttaaaaaaagagtttgacatttaaaagtttgaaataatattaaagtgacaccctgtttccttggaaacacaatgcanaaccacaaactctgagacttattatagcgaaagtattgtcattcagttcaatctaatggtatgaggttagctttgaaggccaaaagaaactagtttctaattcttattcttctccccactagacttgtggcctaggtaattttgtaatctttctgagtctgttttctcatcaggagcaggataattcctaagtaatagatcatatgtagaagtgaatatgatctcatggcagaggacatnaaccatagttaattattaagaatatatttacattgagctatccttttatntactttaaaaattgcanacaaacaacattttgncnaanaatanatnnattgttttnacattaaacattttttccatttntttccnagnaanaaantcacnacnctnnnantaaaannnattanannaagnncccnnttatttttnanacaaccttttcncnannacntnnnaanaggntttntnnaan

SEQ ID NO: 1286 - DNA, 992 bp, Homo sapiens
  misc_feature 25, 52, 67, 125, 127, 128, 135, 149, 163, 173, 177, 183,187, 210, 220, 233, 244, 258, 263, 280, 285, 299, 319, 321,339, 342, 355, 403, 463, 465, 477, 485, 533, 536, 550, 552,556, 558, 559, 631, 634, 642, 659, 665, 668, 679, 694: n = A,T,C or G
  misc_feature 713, 751, 753, 758, 790, 808, 809, 850, 882, 893, 899, 908,967, 984, 989: n = A,T,C or G
taagggtgtccgaagattttggggnaaggccttacccacctcgggccggggnttggggccggggtcncggggggaaggccaaccccccaaaaggggggttggcccgaaggggggccacccaaagntnnctttggntggggggccggccntggttggttggggncaaccccaantttncaaccnaggncaaaagggttcccaaattccttntgggggggtncattggttaaggntgggccaaagnccaaaggggaaagnccggnggcccggcccccttttnccttntggaaaaaattccnttcccaaccccttaaagttngnaacccaaaaccccaaacnggnaaaacccttttgnaaaggttgggttgggttggggggttcccccttttgggcctcccaaagngggaaattcccttccccctttccggttttgggccaaatttaaaaaaaaaaattggggttncnccaaggcccttnccgggttnttaaaaaaaaggggggaatttgggcccccccgggccgggattaaaccnccntttccggggggggncncccngnncgtttccttttaagggaaaaaccctttaaaggttttgggggggaaatttcccccccccccccgggggggggnccnttgggccnaaagggggggaaaaaantttttnccnggaaatttaantttccaaaaaagggncccttttaaatttcccggnaatttaaccccccggttttctggaaacccccctttctngnaaagngggggggggggggggggccccccccggggggnttttaacccccccaaagnncctttttttttgggttttttcccccccttttttttaaaagnttggggaaaggggggggtttttaaaaaaattnttgggcccggncccggncctttttgnggggcccgggtttaaaaaatttccaatttggggggttcaatttaaagggcccttgggtnttttccccctttgggtnggttngga

SEQ ID NO: 1287 - DNA, 499 bp, Homo sapiens
  misc_feature 2, 21, 350, 373, 379, 389, 392, 393, 406, 418, 428, 433,439, 442, 443, 444, 449, 462, 467, 472, 485, 486, 491, 492: n = A,T,C or G
gntcggttcaccctattactnctatagggcgaattggagctccccgcggtggcggccgaggtacgctggcagggccagtggcaggaagggagggacaagtggacagtggtgtgtctgaattgtagagtgttagattccaggtcattcccatctgctcaattccatcagccgcagagttcaagctgtcatctaagcccagggaggtgtaaggaacaggccacatctggttcttggaagtatatgcccaggcatttaaagcggatctttcctctttgggccatgggtggatttcctgctcaagcaaccttcatctcttaagcttgtgttgcttggaaattctgggacttttncattcaaagctgggggccccatnaaattnacttcggggnggnntttccttcccccnattgaacatttngaaaaacccnttttntttggnaannntttantttttgggggaanccggnaattngggcccaattttnnccttnntcccccg

SEQ ID NO: 1288 - DNA, 420 bp, Homo sapiens
  misc_feature 4, 392, 418: n = A,T,C or G
actnctatagggcgaattggagctccaccgcggtggcagcggccgcccgggcaggtacgcgggggttggagaccattgctctatagcaagaccagactttgcccttcctcctctcagcctactcaacgtgaatataatgaggatgaagacctttgtaatgaccttttcccacataatgaatagccattgggagacacacttctgaacaccaccactggaaaatcacacatgctgaaatgggagagttccctgacccccttgcaggatatgtgacaggagtgtggctcatctgttcagctggagtgcatactcaaaccccttatgagacaaggagtatgcagacaggaaggtgcagggaactggggaagcaaaatataaactagttaattttngatctcccaagagttaaaggccgggntt

SEQ ID NO: 1289 - DNA, 407 bp, Homo sapiens
  misc_feature 259, 261, 314, 320, 378: n = A,T,C or G
tatagggcgaattggagctccccgcggtggcggccgaggtactttttttttttttttttttttttttttgtagagatggagtcttgctgttttgcccaggttgttttcgaactcctgacctcaagcaatccttctgtctctgcctcccagagtgctgggataacaaacataagccaccatgcccagccaatcctcagttattttctaatactagataatctaattgctcacttattacattatttttccaattaaaggngnaagatttagacattaaatttaagttataagtgtttccttgaacacctaattgnaactgnaactagaacaggggatcatttggtgactattggaaagtttcaggtggatttttaaatnatattttcaatctgtaaagtagttagcca

SEQ ID NO: 1290 - DNA, 710 bp, Homo sapiens
  misc_feature 2, 3, 4, 7, 10, 11, 12, 13, 17, 19, 21, 22, 23, 25, 31, 32,35, 41, 42, 45, 52, 61, 64, 65, 66, 69, 71, 73, 80, 83,90, 92, 94, 96, 100, 102, 105, 106, 107, 113, 120, 347,364, 399, 401, 408, 437, 468, 510, 529, 534, 561, 580, 601: n = A,T,C or G
  misc_feature 616, 623, 628, 630, 674, 698, 705, 708: n = A,T,C or G
tnnntantannnnatantnannntntatatnnatnaaatanntantttatangggtttaanttnnnttnantntattatnatntgatatncntnantttnanatnnnagtatngggttanatcttatacgactcactatagggcgaattggagctccaccgcggtggcggcccgtgtcctcagatctcaggctgctcagctccatgtaggctgtgtctgtagatgtgtcctcggtcatggtgactctgccctggaacttctgtgcgttgattgtttcaccatcttcaggatcaaaacctcccttccactcaagcccttttccagggagcctgtccgcacccagctgncatgggataaatttcangtgaggggtgttattcccggaaaacctttggcagngnaagaccnttcaacttggagggcccccaagggctttntttcacccttcaaggccccccaggaacttgntacccttcggggcccggcttccttaagtaaaccttaaggttnggggattccccccccccgnggggncccttgccaaagggggaaaatttttcngtaaattaatttccaaaangccctttttaattcccggaantaacccccggtttcnggaaacnccttntntaagggggggggggggggggccccccggggtttaccccccaaanccttttttttgggtttttcccccnttttttnaanag

SEQ ID NO: 1291 - DNA, 655 bp, Homo sapiens
  misc_feature 3, 4, 5, 6, 8, 11, 14, 18, 20, 23, 27, 35, 36, 37, 38, 41,42, 44, 48, 55, 61, 63, 65, 69, 73, 78, 79, 80, 81, 83,103, 107, 112, 113, 115, 118, 121, 122, 134, 136, 144, 146,330, 338, 347, 359, 374, 388, 414, 417, 424, 433, 442, 470: n = A,T,C or G
  misc_feature 480, 490, 535, 551, 569, 580, 594, 640: n = A,T,C or G
ttnnnntnctnaantttntnttncacncccatttnnnnttnntnaatnttttaanttaatncntntatntttnctttnnnntntattttcaaatttcttccantatnggtcnngntcnctnncgctcactatangncgaattgnanctccaccgcggtggcggccgaggtacgcggggaggattaacagaagcagattaacctcagaaatcctgtctggctggcagatttcaagtaaaaaaaaaaggtgggttggggggacccttttctttctagttgtctttaagggaaaattaattttactttttttttgttctggcccgaaattttntatggagnatatcctcntcaccttgtctntccacttttgaaacncggttaaaaggctncatcagcctggtccagcttctggaantgnagggagngggggaagnaagcccccntgggggtcttttctttttggaaaagggnaattcccgcnttggctttgnagggggcttgcccctccctcattgggtggtggccgttggttccgnttttcctttcttttcncttggacccgccatttcnttttggttggnattaattccaaggnagggggtttaaaacctttatttgtccaaaaaaaggcccaattttcncaaaggggcccgggg

SEQ ID NO: 1292 - DNA, 656 bp, Homo sapiens
  misc_feature 125, 255, 289, 330, 644, 647: n = A,T,C or G
ggagctccaccgcggtggcggccgaggtacttttttttttttttttttttttttgtttaattacatttatttcattgaataatggattgtcaacagtagttataaaatagtgcatggcttaatgngttaattatcataagtagaatccacaattaaagtttgatatttgctgaatactttctctgcaaggatataaaaattaatcatccacaacctaattaacttaaatttcaaattaaattcacatatgtgggngttttactatcttttgcttttcggtaatgttggngacattttagtaatgcattatgaacagttattatacaatgngaattaattgtgtaataactttagtgtcacatgtttaagaactatttagtttatacttctgtctcattctaaaaaatgatttatcttaattaggaattaaacttatataaatatatcatttatggaaaatataggttgttagaaggataggttttgcaagggaaaagacttcattaattccacatatatttatttagggccaattatatactagctgctttaataggcattagggactataggaaaatgttagacatagtttttgtccttagagaatttacaagctttcttggacaatagttagttagataggnaanaataaaatg

SEQ ID NO: 1293 - DNA, 398 bp, Homo sapiens
  misc_feature 368, 389: n = A,T,C or G
gggcgaattggagctccccgcggtggcggccgcccgggcaggtacgcgggggatgctgccacctaggttacttgtaggaccctatacggcaacctcctttgccaggaactatttataaacatcctgcaggaaaatgagtctatatgtcagaatacacatttcccaccttgcccaacagtagaaaaacataagaagagaaaaacattaaaaaatgacaaggaagttaatggaagtcagcaatgtgatggtgtttggaggtggagccttcagaaggtaattaatgcccttgtaagaagaggccagagagcttgcgcaccttcttcctgccatgtgaggagccaagaagccggcctgtctggcaacctggnaaagaggaccctttacttagnaagctagcc

SEQ ID NO: 1294 - DNA, 397 bp, Homo sapiens
tagggcgaattggagctccccgcggtggcggccgcccgggcaggtattattctttccttttgtgtatgtttgaaattttccattataaaaaggacaaaaaaaaaagagagagaaaactaaaaaagaaaaaatagtgttgcgcttgttagtaaaaccaatcttaaggccagttactaaaaagtaaactcctacaattttgaatagctatttgctaatacagtgatttgctgccttcttggggttagtttagcctgtccattccttatttaacttgctcccttccttcccttttaataaagtcctgcctaagctccaggctctattttccacctctcccctaagatttaggatttgttccgttttaaggtcagtggcccatatgtcttcctgttctcct

SEQ ID NO: 1295 - DNA, 399 bp, Homo sapiens
  misc_feature 7: n = A,T,C or G
tagggcnaattggagctccccgcggtggcggccgaggtaccctggactcatacctgaaagcagtgttcaaccttagcaaaatctccaaccagcgcatgaacaattttctacatcacaacgacctggttttcaaattcagctctcaaggccaaatcttttctaaatttaaccaagaacttcatcagttcacagagaaagtaatccaggaccggaaggagtctcttaaggataagctaaaacaagatactactcagaaaaggcgctgggattttctggacatacttttgagtgccaaaagcgaaaacaccaaagatttctctgaagcagatctccaggcttgaagtgaaaacgttcatgtttgcagggacatgacacccacattccagtgctatctcctgg

SEQ ID NO: 1296 - DNA, 769 bp, Homo sapiens
  misc_feature 3, 6, 8, 9, 12, 13, 15, 18, 20, 21, 22, 26, 30, 32, 34, 35,40, 45, 51, 53, 55, 59, 60, 62, 63, 64, 66, 68, 72, 76,79, 81, 85, 87, 93, 95, 102, 112, 120, 121, 124, 125, 234,242, 243, 264, 270, 308, 387, 391, 392, 397, 401, 406, 409: n = A,T,C or G
  misc_feature 415, 431, 433, 437, 447, 466, 487, 493, 508, 516, 522, 525,547, 557, 558, 560, 566, 571, 573, 575, 580, 581, 583, 602,609, 611, 613, 626, 634, 640, 644, 686, 701, 708, 710, 721,722, 729, 741, 760, 765: n = A,T,C or G
tcnttntnnaanntnatntnnngttngctnantnntaatntgatnttaaantngntaanncnnntnantttnttantantntttntnttcttnanttttttntagttgaggnaggttagnnccnntacgactcactatagggcgaattggagctccacccgcggtggcaggccgcccgggcaggtacccgttaacttccaattaactagttttgacaacattcaaaaaagagtnataaactnnggcttaattttaataatcaanaccctnctagccttactactaataattattacatttttgactanccacaacttcaaccggcctacataggaaaaaattccacccacttaacgaggtgccggcttttcgtaccccttattatcncccnngcccncggncggtnccncttttncttcccaataaaaaantnttcntttctttaanggtaagaccttaatttaancccttttccttttaattatantttttnggaatcccttaaggnaaaaaatnttggcnccncttccccttttttttaaccccnccctttaacnncnatttgnaaggncncnctttnncnaaaaaaccaaaatctttanaaccccntngnccccaaccttaanaattaagngttttnattngtgtcaaattccccctttccttttaatttttaaaaatttccnaattccaattttccntttaaancnccctttaaaannttccttnggggcccccttnattggaagttttggaaccntaccnaaag

SEQ ID NO: 1297 - DNA, 420 bp, Homo sapiens
actacttagggcgaattggagctccccgcggtggcggccgaggtacgcggggctctcactgctcccaaaaatggcggacgcattcggagatgagctgttcagcgtgttcgagggcgactcgaccactgcggcgggaaccaaaaagacaaggaaaaggacaaggggaaatggaaggggcctccagggtctgcagacaaggcagggtaaggaagaagttccagttgttgcttttattttttttctcggtggggaggaagaaaacactactctcttaggaagagcaccgagaaagtgaagtgtacctgcccgggcggccgctctagaactagtggatcccccgggctgcaggaattcgatatcaagcttatcgatacccgtcgacctcgagggggggcccggtacccagcttttgtttccctt

SEQ ID NO: 1298 - DNA, 438 bp, Homo sapiens
  misc_feature 1, 2, 6, 7, 8, 17, 22, 104, 148, 151, 194, 214, 252, 267,291, 315, 341, 354, 356, 405, 410, 434, 435: n = A,T,C or G
nnaggnnnggcccgtancactnctatagggcgaattggagctccccgcggtggccggccgcccgggcaggtactttttttttttttttttttttttttcctttnaatgctgttcactgctacccatttagtcaacttggaccaccctntanaggggcttcaactgttattttcaatacattgtcacagggacanaggagggtgttagggaactntgtgactaaagagttttccataaatgggtggacctcantttacaagcattaanttattgggccaggagggggaacanatcatgattaggagagtggaaaanaaagatgacaaatcactttaagtcanacaaacctttttntntacctcggccgctttaaaactagtggatcccccgggctgcaggaattcnatatnaagcttatcgataccgtcgacctnnagg

SEQ ID NO: 1299 - DNA, 924 bp, Homo sapiens
  misc_feature 20, 24, 28, 33, 35, 47, 51, 57, 59, 67, 78, 89, 102, 116,139, 149, 207, 235, 252, 255, 270, 272, 275, 303, 312, 327,329, 335, 354, 366, 374, 389, 413, 437, 456, 459, 469, 480,487, 500, 504, 508, 515, 525, 546, 575, 612, 620, 627: n = A,T,C or G
  misc_feature 630, 655, 679, 687, 728, 760, 784, 791, 799, 816, 823, 826,840, 841, 857, 867, 870, 874, 905, 906, 907, 922: n = A,T,C or G
gggtccggaaaatttggggnaagncttncccancncggtccgagatngtgncggtgncnccgtaagnggtttacccgnccggggggggnggaaaaccatatngttggttggtcctnttagggaaccccttggtacccgncttggggggnaagggggaaaggaattggccatgggccccaacgccttaagggtggtttaaccattgtnggtgatgggggaacccccctttaattanccgggggcaaaaacacntanactttttttgtctcnanggngcaaaccttaaattttctaaatttaaanaaccaattnctccttgccatgggnanaaaaantgggaagctaccttaaatnatttggttccanggcaaaantaacccaaccaattnttttccaccccaacccctttttgnccccccaaaaaccaaggttaatgnaaaaaaaaaaccaatttanatnggaaaaaggnaaaggaaaaanaacatanccacttttataanaaanaaanatttggnaacccaaaanggtgggaaaaaggatttaaanatttggggggaaaaaggcccaaaaattgngttggaaattgggggttggtttttttagggggaaggngggttggnggcaagnccncctttttcaaaggaaaaaggggttnataaattttaaaaaattggccccncccttttnggttataaaggaaaaagggaaagggggcccccaagaaaagnaaggcccttttgggccggccaacccccttttnctttttccccttgggccccatttngtttggnaagggggnaaggcccccaaaaaggnaaaaagnccnccgggggcctttgnnttcctttggcccaaancccctttggnccntaanggaaggggggacccccctttcaaccctttannngaaaaaagtccttangg

SEQ ID NO: 1300 - DNA, 405 bp, Homo sapiens
cgctaatacgactactatagggcgaattggagctccccgcggtggcggccgcccgggcaggtactttactcacccttcctctgacagaaaaggatgaagtcaagggcctggtagaggcaccactaagaaaggcatctgaaaggaccaaagagagtgaccagcaagcattttttgcaaggctgaggagctgacagcttccatgaaaggctggaccacccagtggtgaaaagcatcatctgggttaccttgtgctgccataaaacacaccacagacttggtgacttaaaccacagatatttatcttctcacaatcctggaggctgggaagtctgcaatcaccgggtgcccagccatgggtcaggttctgggtgagggccctctttccttctcacctgtgtgctcttt

SEQ ID NO: 1301 - DNA, 409 bp, Homo sapiens
  misc_feature 3, 5, 231, 290, 351, 357, 399: n = A,T,C or G
tcncnctcctatagggcgaattggagctccccgcggtggcggccgaggtacttttttttttttttttttttttttattctttgggcagctaaaatctaggatggtgttaagtttcttcattttgtcaattatatataaaaaattagaaacaacatgaatctgcatttcttggatgagatagttaataacaaactatttctcaatatttgtatactaaaaactagtgaaggngttatgtgtttcagtatcttatctcttatttgaacatgggtttctgaaaggagcctatntaataatataaatggtatgtagtaaatgagggcactgtcttggctgggactggctattaanaaaaanattaccattaggaccattggacctaaaccaccaaaacatatncttctcacag

SEQ ID NO: 1302 - DNA, 385 bp, Homo sapiens
  misc_feature 41, 44, 272, 298, 306, 314, 317, 336, 363, 366: n = A,T,C or G
ggcgaattggagctccccgcggtggcggccgaggtactttnttnttttttttttttttttttttgcttttcttcttctttccctttcaggcatctcctcgttttattttctgtaactcacagagtgctgcaaaataatgttagggctttgcagtttattccttgcgatttaactgcataaatataaaaagtgcctgagcaataatgcacgttgggttattcaataacacaaggaatgtaaagccgatttcatatctccttgaatcaggaacnttaattaatcatatgatgagaatgcnacgttttntttaccanggncaaggaggctgccaagaanctttctgaggtttaataattgcacccnctntggaggggagggaaaaatt

SEQ ID NO: 1303 - DNA, 431 bp, Homo sapiens
  misc_feature 2, 7, 8, 9, 12, 18, 20, 25, 160, 298, 310, 373, 383, 397: n = A,T,C or G
gnaaggnnnttnccgcgnancactnctatagggcgaattggagctccccgcggtggcggccgcccgggcaggtactttttttttttttttttttttttttgggcaataccagctttcaccctgtcctctgcactgcttagccttggctctgctgagttgngcaacacattctgagagatgccatacaatgctccaggcaaacttatagaaaaacaggaatgagtgattttatacgggatgtgtttcagctgtccaattcaaaataaatcacgtccagctgcattctttcctaatttgngacccaaactgnttgcactttatacattaatgaattatttttttaaaaaaggaaattagcctctatcatggaaanacagtggctntctaacccctttgngggtcctttctccctttaaaaaggcaattgttac

SEQ ID NO: 1304 - DNA, 421 bp, Homo sapiens
  misc_feature 4, 421: n = A,T,C or G
cgcnaatacgactcctatagggcgaattggagctccccgcggtggcggccgaggtacatagttcacattttttggaagaattccacaaaagaagaagaaaaggaaatctaatctaaaaatactattttggaggggatagcagattgaaaatgagaattttgaaagtttcaataccagtggggaaagcatttgctagagtttagaaggacagcatatggtacaccagatcacgagacatcgtttcatacttcccaaatagttttatattttagctttgaaggtcagttaccagagccaaacttgttcttaacaagcagaattttatgtccattcaaagagtctcttacacctttctgggcctattcacttgcagagaggagtcgaaactgtaaccaggctcttcatatcgtgcattcatatn

SEQ ID NO: 1305 - DNA, 429 bp, Homo sapiens
  misc_feature 4, 5, 7, 11, 13, 24, 63, 68, 238, 262, 286, 304, 311, 313,387, 398, 402, 425: n = A,T,C or G
aggnntncccncncactactatanggcgaattggagctccccgcggtggcggccgaggtactnttttntttttttttttttttttttttactactttcttctttcttattttctcattggcctcaggtcttggaatatcttgaattcaaactaataattcacctccttctcagcactctcaatatagtcttttgccaacacctgatgagacatataacttatgaccattgcacttctntttttttccatggtttgcatttangaggtaattttcttcagctattanagcatatccttcctcatnattttananaaatacttggtcaaatgaccttttaaataaaagatggttcttaccttctaattttccacttattttatccattnctttttgatgngtanccttgggtaaacacacatccttntgtg

SEQ ID NO: 1306 - DNA, 437 bp, Homo sapiens
  misc_feature 4, 72, 148, 206, 247, 272, 313, 382: n = A,T,C or G
actnctatagggcgaattggagctccccgcggtggcggccgaggtacttttttttttttttttttttttttncaaatgtgacaggcatttattttaacagagaggaaggggaagacaaaatatcataaaatgtgtgggttttccccanatgactctgttgaaaaaaccaggaaatgcagagcggggggacaaatggaggagagatnttaactagaacattgctgactcaaggccgtccagcttcagngggagttctgattaggccccatgtntgcctgatgccacctgcaacatgggctccgcatgtgccaanacactgaaaactgtttgccgacacttggtgtatttgtcaagtgatcttacttttcaagggtatttatgngctaatcttttattattggatttgcttctacaaatatgtttttaccataagacaa

SEQ ID NO: 1307 - DNA, 415 bp, Homo sapiens
  misc_feature 2: n = A,T,C or G
tntacactactatagggcgaattggagctccccgcggtggcggccgaggtacgcggggacgctgggaggagatgctgccacctaggttacttgtaggaccctatacggcaacctcctttgccaggaactatttataaacatcctgcaggaaaatgagtctatatgtcagaatacacatttcccaccttgcccaacagtagaaaaacataagaagagaaaaacattaaaaaatgacaaggaagttaatggaagtcagcaatgtgatggtgtttggaggtggagccttcagaaggtaattaatgcccttgtaagaagaggccagagagcttgcgcaccttcttcctgccatgtgaggagccaagaagccggctgtctgcaacctgcaaggaggaccctcactagaagctaagcccat

SEQ ID NO: 1308 - DNA, 431 bp, Homo sapiens
  misc_feature 1, 3, 4, 5, 6, 7, 9, 12: n = A,T,C or G
ngnnnnncnaancactactatagggcgaattggagctccccgcggtggcggccgcccgggcaggtacgcgggggcagtgggaagctcgcagcagctggggaggagccaaagcctcggcgctcacctaagccgcagggagatacacccaactgggagatgaggaaacagcaacccagagaggagaactaacccacacaggatcatttcgcgaaggagcaaggctgaagaaccagacctggactttcttaggacaaacttactgcagcttgaaggagccaaccatggatttgaggcgtgtgaaggaatatttctcctggctctactatcaataccaaatcattagctgctgtggcttgttttagaagccctgggagccgatctatgtttaacacccatctttactaaaccattattgctatgggtgggtatac

SEQ ID NO: 1309 - DNA, 979 bp, Homo sapiens
  misc_feature 6, 12, 24, 33, 43, 45, 67, 79, 103, 104, 108, 154, 172, 180,188, 197, 217, 229, 242, 251, 265, 272, 274, 327, 335, 357,369, 384, 387, 397, 401, 416, 434, 436, 441, 449, 470, 481,513, 533, 534, 549, 582, 584, 591, 594, 611, 613: n = A,T,C or G
  misc_feature 614, 615, 616, 617, 620, 625, 626, 629, 642, 644, 653, 656,667, 669, 670, 676, 678, 684, 691, 693, 696, 699, 700, 705,709, 719, 725, 734, 743, 750, 771, 787, 788, 803, 834, 851,852, 853, 859, 860, 865, 875, 898, 902, 908, 915, 916: n = A,T,C or G
  misc_feature 918, 959, 968: n = A,T,C or G
gggtcnggaaantttggggtaagnctttctcanctccgtccgngnttgggtcagggtctccgtctcnccgggggtccangggtttacccgtccgggggggggnnaccncttggtacccgccttggggggtaggggtaagtaatggccttggtcnccacccctttaaggggtntaaccttntgggttanggggaaccnccccttaattacccggggcnaaggctccttcncctttttggggcnccaaggggnaaaaccttaaattntttattnanaaaccaatttcccctgggccaagggggaaaaaaaatttggccaagggtggganaaggttanggtaaaagggaaggtaaccaangggggggtaatnaattcctcccaaagnaanaagggggttnttantttggcccaaaatantacccaaatttctaatangngaagnaaaaaggnaatttggaaagggaagggggnaaggttccttnaatttaattgggtttccaagggaaaaattaanccaacccaaattttttttcnnccccaaacccccctntttgggccccccccaaaaacccaagggttgaangntaaaaanaanaaaaaccccaatttttntnnnnnacnacaannacnatataatatcatnanaagaataanatnattatcacatnannacaatnangagaanaataatnanaangannggggntttntccccctttngggggnccccccggnctttttccntttaaanagaaaaaaccctttaaggggnggtggggggggaattnnccccccccccccccnggggggggccctttggtcccaaagggggggnaaaaaattttttcccgnnnaatttnntttcnaaaaaagggnccttttttattttccggggaatntaancccccnggttttnngngaaacccccctttctttaaaggggggggggggggggggggncccccccgngggtttttcct

SEQ ID NO: 1310 - DNA, 979 bp, Homo sapiens
  misc_feature 55, 61, 67, 73, 85, 91, 116, 120, 121, 128, 136, 145, 151,158, 162, 175, 192, 194, 200, 204, 210, 218, 222, 243, 301,326, 340, 352, 354, 364, 367, 374, 389, 391, 392, 397, 400,402, 407, 414, 415, 421, 423, 436, 437, 445, 450, 453: n = A,T,C or G
  misc_feature 462, 469, 473, 475, 493, 517, 523, 538, 551, 554, 561, 567,572, 576, 578, 595, 621, 624, 630, 634, 637, 638, 639, 651,667, 670, 674, 717, 722, 745, 768, 776, 788, 796, 804, 841,852, 870, 875, 878, 883, 894, 908, 930, 939, 941, 963: n = A,T,C or G
  misc_feature 970, 977: n = A,T,C or G
tatttaagggggtccgaaaaatttggggtaagtctttctccacctccgtcggggntggggnccgggngtccgncttgcttttgcnccggcntgtgcccttgcggggcttgcaaccntggnnacattcnggcttggncgtctttcnggggtntctgttntacngagaccttgggcngtggtccgtaagtccgngnttattncaangacatncaaacctncaanataggggggccgggggctaanaattaaccggggggttttaatttctccaaccaaagggaaaattccaaagggggggggnaatttaaaaacccggccaaaggggnaaaaaaaggaaaanccaattgggttngnaaaggccaanaanaaaaggngggcccccaaggccnannataanaangngggcnccaatgnngtaaanancccccgggtttannaaaaaaanaaagnggncccccgccngggtttntggncntttggggtcccggttttnttttttttccccaaattaaaagangggccntttctcccggtctcnccgctcctccttnggnaaccggnaaaggncccantttncnaatccaaaaaaaaaaanaaattcggggaaacccgggcctttcnaanaaaggnttcnaannngtgaaagggggnttgggggggcccgggnaanaaanaaccccccccggtaaccccaagggggggaaacctttaaatttnataanaaaggggaaattaaaccccaaanggggggcccgggtttttttttcncccccccnctttgggggggnaaaaaagnccctttcncccccctttccgggttggggcccggccctttctttcnccctttggttnttccccgggaaccccccntttgngcnccggncttttttaccncccgggggtaattnacccccttggtttccccggggnccttttttncnttcccccctttttcgggggggnaaaaagnccgggtngg

SEQ ID NO: 1311 - DNA, 952 bp, Homo sapiens
  misc_feature 3, 206, 211, 251, 288, 323, 342, 355, 396, 412, 418, 420,425, 427, 457, 459, 460, 462, 471, 476, 481, 485, 486, 488,501, 503, 506, 507, 514, 516, 524, 528, 533, 536, 537, 543,544, 550, 551, 558, 567, 568, 570, 572, 575, 576, 583: n = A,T,C or G
  misc_feature 592, 600, 607, 611, 614, 618, 623, 625, 626, 635, 637, 639,643, 646, 651, 657, 659, 660, 664, 667, 670, 672, 674, 676,677, 682, 683, 685, 687, 689, 695, 697, 701, 702, 708, 709,712, 713, 716, 724, 733, 737, 738, 743, 745, 746, 748: n = A,T,C or G
  misc_feature 752, 771, 780, 781, 784, 786, 791, 793, 794, 796, 806, 815,817, 818, 821, 823, 824, 825, 846, 850, 851, 852, 853, 861,862, 864, 869, 873, 877, 886, 887, 888, 900, 904, 909, 911,912, 914, 920, 923, 925, 929, 932, 934, 935, 939, 940: n = A,T,C or G
  misc_feature 941, 942, 943, 944: n = A,T,C or G
tancggcgtatacgactactatagggcgaattggagctccccgcggtggcggccgaggtactcagagtgcacaatgtaagaagtcactcactcttgggcatgcgctagttcagggttggcagcgacagtgagtgccttcttacattttgcaccctggataccttccttgcctcaccctagactggcccagatgtctagtctacagntcacncttatcacttgcaatttctatttcaatgactacacttttnacttccaaggtttctatattttaatccctatctattnttaagaattctttgttccccttccctcttttactnatttgatgattcaagaatncttatttaacatntaatatttgcaccattaatgtcttggttcttcatgaattgngacttccacaagattnattggngncttgntngactattactcaatgccaaaaaaattttcntnntntgccttaanaaatnattcnttcnnancttaccttgtttngngannggaattntnaatttgtnttgntatcntanntggtanntttttnntcttgtnaaaaatttnntntngannttatttnagaaattanattctatnacctctnttanaanctgnatttntnngattattgntnanattnttntttantcctcntnnattnaanaanantntnnttgannantnantggttntnattnngctttnnaannttncattttanttgttgttntatnnttacntnnanttangttttttcctcatataaantatttcttnnatnanctttntnnanttaattagtntctaaaatnanntantnnncgcttttttatataattgtantttnnnnatatcaanntntaatntaanatantgctttgannnataagttttctntccntatgntnntncttttntgngnaganatntnnctcnnnnnnattctgcc

SEQ ID NO: 1312 - DNA, 853 bp, Homo sapiens
  misc_feature 262, 285, 304, 563, 667, 670, 713, 755, 764, 768, 780, 793,794, 804, 808, 815, 820, 821, 832, 838, 846: n = A,T,C or G
gactactatagggcgaattggagctccccgcggtggcggcccgaggtactttttttttttttttttttttttttaactgcaacaacctaacaggaaaactaatcagagatcatgaggagagtggtatatcagtcagggactaatcaggaacataatccacttgagaatttaaaatagagagggcttaggctggggagttggtgacagcataatgggaaatctacaaagcaaacaggaatagggagacaacccagagcccatntaggctggcagagtcatcatctntaggctggaaggtcaaaanaaggtggtgttagtggagccaggagatgcacagtctcccaggggaagctggagctagggtgtacctgcccgggcggccgctctagaactagtggatcccccgggctgcaggaattcgatatcaagcttatcgataccgtcgacctcgagggggggcccggtacccagcttttgttccctttagtgagggttaattgcgcccttggcgtaatcatggtcatagctgtttcctgtgtgaaattgttatccgctcacaattncacacaacataccagccgggagcataaagtgtaaagcctggggtgcctaatgagtgagctaactcacattaattgcgttgccttactggccccttttccagtcnggnaaacctggtcgggcccgcttgcattaaatgaaatcggccaacncccccgggaaaaggccggtttgcgtattggggccctttttcngctttcctngttnacttgacttccntggccttcgggcnnttcgggttgngggnagcggtnttaannttacttaaaanggcggngaattacngttattt

SEQ ID NO: 1313 - DNA, 859 bp, Homo sapiens
  misc_feature 52, 63, 66, 68, 73, 74, 107, 387, 402, 404, 435, 449, 461,466, 498, 521, 531, 532, 535, 536, 539, 558, 560, 571, 586,594, 602, 611, 615, 619, 633, 637, 651, 660, 666, 669, 678,682, 687, 689, 693, 700, 706, 707, 708, 710, 714, 729: n = A,T,C or G
  misc_feature 730, 740, 747, 753, 757, 764, 767, 776, 779, 781, 790, 791,795, 805, 812, 814, 823, 825, 827, 831, 837, 848, 849, 852,853: n = A,T,C or G
tacgactcctatagggcgaattggagctccccggcgtggcgttccctttagngagggttcatngcncncgganngcattattttgattttatatctgagtatgtttntagccagaagaggagaagaaagaggttaaaaagcaaaaacagaatttatagatgcacgatattcttctgaacaagagaaagaaactggtaggaaaatttattttaaaaagtgttgaagggaaagaatcaagaccacagatccagatccggagattattttgctaaagaatagcaattgtgaggcatgaggtgggaggggggaagaagctatgaacttaattttgaggtttctgaataaggaaacttgagtgaattcacttcagatgcatttggaatgttngcactccagaagatnanattgtgtgtgctctggagagtattggaaganggaggtattactanatttggcgactnccacngtgactcattactctttctctgttactttcanggattcatagagatatgttttgntgatattatnnatnnaantgagataaaattttgcatntnaaatccctttnggcttttttttgganaaatttcntgctttanaaaaatctngttngaangccttgggcccggnggcntcatgccctgtaantcccaacantttttnggnggccaaggncggncaagntncttnggggtcnagctgnnncnagancatgccctgtcctannttgggagaanaccccancttctncttnaaaatanccnaaatttaantancngggccttgnngccnatgccctttnaaaccantntaatcaagnangnttcnggccangaaaaattggnnttnnaaccct

SEQ ID NO: 1314 - DNA, 870 bp, Homo sapiens
  misc_feature 77, 103, 108, 152, 173, 188, 197, 206, 210, 212, 262, 275,295, 307, 332, 350, 360, 362, 376, 398, 412, 414, 422, 431,476, 482, 513, 517, 549, 552, 555, 588, 590, 607, 610, 617,641, 665, 670, 683, 694, 696, 697, 703, 714, 715, 721: n = A,T,C or G
  misc_feature 726, 730, 745, 765, 766, 769, 770, 771, 793, 796, 802, 804,814, 824, 838: n = A,T,C or G
gactactatagggcgaattggagctccaccgcggtggcggccgaggtactttttttttttttttttttttttttttnattttttttttttttttttttttttncaaanttctttcttttttaatttaaattgagttcatttatttgaaacanactgggccaatgtccacaaanaattcccggtcagcnccaccgatntccaaaggngcantntcaaggaagggcaggcgtgatggcttatttgttttgtattcaatgattgnctttcccccccgngtacctgcccgggcggccgntttaaaactagnggatcccccgggctgcaggaattcnatatcaagcttatcgatnccgccacctngngggggggcccggtncccaacttttgttccctttagngagggttaattgcncncttggcgnaatcatggncatagctgtttcctgtgtgaaattgttatccgctccaattcacanaacatnccaacccgggagcataaaagttaaaaccctngggngcccaatgagtgagctaacccacattaattgngtnggncccacctgccccttttccaattcgggaaacctntngtgcccactgcatttantgnaattggnccaacccccccgggaaaaggcggntttccttttgggcccttcttccgnttttnttcccccccaccncccttgccttngnncttttnggtcggggggnnagcggnttttnaccncccccacaggggggntatttcgggtttttcccccnnttnnngggggatacccccggaaaaaanttntccccncncccccaaatngtttgtaccntaaaaggccctttnccggggttttttaaaaggccccccccccccct

SEQ ID NO: 1315 - DNA, 855 bp, Homo sapiens
  misc_feature 560, 569, 576, 593, 601, 649, 667, 672, 693, 697, 711, 721,724, 753, 773, 774, 776, 811, 820, 825, 830, 835, 839, 845,848, 853: n = A,T,C or G
tcactatagggcgaattggagctccccgcggtggcggccgaggtacgcgggggatgtgggaggattgcattcagtctagttcctggttgccggctgaaataacctgaattcaagccaggaagaagcagcaatctgtcttctggattaaaactgaagatcaacctactttcaacttactaagaaaggtattaagcgcctttctgagagctctcagtgggcttcctaagcacgttcactctgcctcctttaagtcttatatttatgatcaagatgaaagggagggatgtatcactgcacagagattctacaagtggatatataaagctaataatgttttcagtgagctcttctctggcaactactttccaagtgctttcagcattccaccttgaagcacaacgttaataatgcacaatttcttatgttcagccacagaatgttcacgtgtgatttggttacaacatattgctctatccaggcctctaacaaaactgacctctttcaaatggacttgcagttgctgaattccaaatcaacactttatcttaaaaacagaaaangaagggaanggtgganggaggggaacaagaaanggtcctgnccgggcgggcggtctagaactagtggatcccccggctgcaggaattcnatttcaagcttatcgatnccgcnacctcgagggggggcccgganccanctttgttcctttangagggtaatngcnccctggcgtaatcatgggcatactggttnctgggggaaattggtatccnntncaattcccccaaacttacgaacccggggccataangttaagccnggggnggctnatgantganctactnccnttaantg

SEQ ID NO: 1316 - DNA, 862 bp, Homo sapiens
  misc_feature 2, 4, 441, 534, 540, 542, 592, 637, 685, 708, 724, 727, 742,746, 756, 759, 765, 772, 775, 783, 795, 812, 827, 832, 848,861: n = A,T,C or G
cntntacgactcactatagggcgaattggagctccccgcggtggcggcccgcccgggcaggtacttttttttttttttttttttttccttaataagtgaggccaagtgctgtgtgtaactgtggggtgggcaaaattaggattcctgaatcacttcactttttgttgcctttctcttgggagaatggttaccattgcagagaagcatagttaaaattgcttttgtgtttcataaacgaattcatacttagatgtcattgaccaacaactaaatagtatatcagagatgaaaggcatcctagggatgaccaaatcaagctcttcattactcaaaggagaaaaaaatccagaaagtggatgacatatgttgaactagtgatggaagtagaacagggtagtgtattttctgcctcttaattcttcattttttacactaaaccanatattaggtatatgactaggaagatcgtgaggtaaggagcaaagggtttggctccaaactcatcatgtagtcatcctcctccaagctcttganagcttntntcacatgttaattcaaaggcagtaacaaaaaaattaatgctcctgaaggnttctcaattttatcatctggaaagtggagtgaacctttgcaaatnccttttaaaaaggctgaccttggactgcactaggtatattcattgctntactcaccattaaaagtaaatcnccattttaattgaatnttnaaaacctaatttggnaaanaaagcccccnacncaaaanaaaaccnctngttggttnattaccctaaancctaaacaaacaaatgnatttcctttattttnaaaanatcttttgaccaaaanccctttcctgttnt

SEQ ID NO: 1317 - DNA, 860 bp, Homo sapiens
  misc_feature 104, 226, 318, 331, 353, 361, 405, 572, 581, 582, 603, 620,630, 653, 667, 671, 673, 690, 695, 697, 700, 715, 717, 741,776, 781, 798, 799, 808, 844, 850: n = A,T,C or G
tatagggcgaattggagctccacccgcggtggcggccgaggtacgcgggggagtctgatctgtcccggcccagtgtcctccaggaccctggcccctcatgcctncgtgcttgcgcgtgtgccatttcctctctccagaggacctttcctgcctaggactcatcattgtcccctccctggcattttttacacctggagcagccagaggacgcatgcatggctcttcngaagccttctcctgccacggcatgcacccacacatgcgagcctcccgggtacctgcccgggcggacgctctagaactagtggatcccccggnctgcaggaattcnatatcaagcttatcgataccgncgacctcnaagggggggcccggtacccagcttttgttccctttagtgagggntaattgcgcgctaggcgtaatcatggtcatagctggtcctgtgtgaaattgttatcccgtcacaattccacacaacatacgagccgggagcataaagtgtaaagcctggggtgcctaatgaagtgagctaactcacattaattgcgttgcgcttaatgcccgctttncaattcggnnaacctgtcgtgccaactgcantaatgaattggccaacncgccggggangaggccggttggcgtattgggcnctctttcgcttccntggntnattacttgttgggctcnggtcntnggntgggggggagccggntntagctcacttaaaggcggtaaatncggtattcccaggaatatggggttacgcaggaaanacatntgagcaaatggccacannaaggccagnaaccttaaaaggccgggttttggcgtttttccatangctccnccccctacag

SEQ ID NO: 1318 - DNA, 848 bp, Homo sapiens
  misc_feature 1, 5, 15, 19, 482, 605, 622, 640, 647, 656, 667, 675, 687,692, 726, 739, 748, 773, 783, 795, 807, 808, 809, 810, 811,813, 814, 815, 816, 817, 818, 820, 821, 822, 823, 824, 825,826, 827, 828, 829, 831, 832, 836, 847: n = A,T,C or G
nactnactatagggngctncccgcggtggcggccgccgggcaggtacgcgggggaacttgtgtgcttagacctgacgctgggaggagatgctgccacctaggttacttgtaggaccctatacggcaacctcctttgccaggaactatttataaacatcctgcaggaaaatgagtctatatgtcagaatacacatttcccaccttgcccaacagtagaaaaacataagaagagaaaaacattaaaaaatgacaaggaagttaatggaagcaatgtgatggtgtttggaggtggagccttcagaaggtaattaatgcccttgtaagaagaggccagagagcttgcgcaccttcttcctgccatgtgaggagccaagaagccggctgtctgcaacctgcaagaggaccctcactagaagctagccatactggcatcctcatcttggctttccaacttccagaactgtgagaaagtatatgtttgnggtttagtcaatggtctatggtaatttttttatagcagccccagcccaagacagggccttatttactacataccatttatattatttatataggctcctttcagaaacccatgttcaaattanaagattagattccttgnaacccattaacacccttnacctagntttttagtntacaaaaattngaaaaatnagttgggtattnaactntcttaatcccaaaaaatgccaaattcatggtggntctaaaatttttntatataaantggcaaaatggaagaacttttaccncccttccttnaattttacctgncccaagggcccnnnnnannnnnnannnnnnnnnntnnggtnccttcggcctnt

SEQ ID NO: 1319 - DNA, 838 bp, Homo sapiens
  misc_feature 614, 690, 694, 696, 755, 763, 783, 785, 811, 818: n = A,T,C or G
gactcctatagggcgaattggagctccccgcggtggcggccgcccgggcaggtaccacacacacacaggcacacgcaggcacacacgcagacacacacacacataaacacacagagttcactagtccgagttactgattttcttaggattctcaaagtgacaacaccggaaacaaggtaattcatgttaaaacacaagggttatatcagtaagagatgggatccccgaagtaaaccgtggaatttgaatcaagtttcgaagagctaaaaaaagaaattggagtttcaacattcaccttcttgaatccttaagaaatacagaagttcaaaatagaaaacattacagtttcaggatacaaaagtagaaacatctgagattaagcctacatttttaaaaaaagatattgaaaattactgtgcttgtaataccagcttttcaaacatcaataccagtattggcattacctagatcaaatcttttcatcaaagttgaaaaaaataaagcattggggatagaaggaccatcaaaatgtccaatattgaaatattggtctttgcatagttccattaaaaaatttacctgctctcaatggttggtcattcttcaatttcaanggctttatttggaacagacttttgcattttcaatggcaggcttaatgggggtgggagccaaatggattaataaagnatgntntacttcacaaaatacattgtttataaagcattcaaaatggaaatcatggaacttaattncctcgaangccgatggcttttcggggangnttttaaaaagccaaattggatttttntcattcntaagttaaatttgacaggcc

SEQ ID NO: 1320 - DNA, 847 bp, Homo sapiens
  misc_feature 499, 506, 646, 651, 659, 676, 684, 685, 686, 690, 694, 702,737, 747, 752, 806, 810, 813, 816, 817, 822, 832: n = A,T,C or G
gactcctatagggcgaattggagctccccgcggtggcggccgaggtacttttttttttttttttttttttgatgtgtagccttgggtaaacacacatccttctgtgaaacagtctcacagagactctcagaatcccaagaattttcttcaacgttcttttgttttgattctgaagggaacatctgatctataaaaggttaatcacagatacattcatgagaacatttctccactatacattttaaaaacatatacaaatctactttcattcacgaatctgtggttcctcctctgtagcccgtatattctttttgttgattacaatgactacttcctatagtcaatccgttagaattgaaatctgaaaagtctgaaaattaacattatttcattagaatgcacaaaaatataaatttgactaacttctatgaattatttcttcacaaagcagtcacatactcttctactctgaaacaaggtatatcctatatttcctgtncattcanaaaactttaattacctaccatctctcatttctttggaaatttttatttgggtagtattacttacggtggtttgactcaacaatctcttcttacacaggtcttcaaaaaaaagatggatttatcaatggaattaagaatgnttaanaaatattnactttttggaggtcagnccaactannntttnccancccttttncattttaatttgctttggacagtggtttggggggnggtttgcctngggtntaaagctttagggaagaaaagccttaaaaaactttttttgggttttaaattaanaacnggnttnnttttnaaaaggcccncttttttccctatgg

SEQ ID NO: 1321 - DNA, 878 bp, Homo sapiens
  misc_feature 3, 73, 74, 77, 81, 96, 116, 138, 146, 192, 200, 359, 366,383, 394, 424, 450, 457, 481, 562, 568, 593, 594, 611, 665,687, 689, 699, 701, 707, 709, 710, 721, 727, 731, 740, 756,757, 775, 781, 788, 789, 798, 804, 805, 826, 827, 830: n = A,T,C or G
  misc_feature 833, 836, 846, 854, 862, 863: n = A,T,C or G
ctnctatagggcgaattggagctccaccgcggtggcggccgaggtactttttttttttttttttttttttttnncgnaaanaccacaaaccacctntgaagccaagaaaaagacgngattagagggaaacacatcagnacctttantcctccactgactttggaaaaacaacaaaatgccagcttccaccanatcatttnttcttaattaaaagttagccagattcttttggagcactcaattttctggtcaggtcaacaaaaaagtaataaacatcacacacacctccctcccctgtcttcctagccccattcctggagttatgcaacccttgggggcggcatacacttcagctattngctctgngttcataattagattgnctagacagganatgttgctggagcaataggaaaatattttncaagatgttccgcagaaccacacttntaacagngattaggacacactgacagacgcnaagccagcatgaattggcccgggccacgagccggtttcacccagaacagaagcccttttcaagcctctcatttcagggaanaggggngccaaattaaaagcttttgaggggnntgggagcaccaactttnttggcctttgggatccgaaaaagcaaggggtgaaattattagaatgattgtctnggaatggcccttctttcttccntncacctgggtngncccttnanncaaaaagggangggcanaatnggtagttgncttgcttttcaaccannaattttttttcaaaaagngatggngttaagnnggccaaaanaaaaanncgtttcctcggggacccgggnnttnttnaancttgggcttntccctttntttttgcnnaatggcaaattttaa

SEQ ID NO: 1322 - DNA, 871 bp, Homo sapiens
  misc_feature 463, 549, 550, 565, 570, 579, 582, 593, 604, 607, 608, 609,615, 616, 631, 632, 633, 634, 635, 641, 650, 669, 674, 683,688, 691, 694, 697, 701, 704, 707, 708, 712, 718, 726, 728,734, 736, 739, 761, 767, 769, 775, 779, 782, 786, 789: n = A,T,C or G
  misc_feature 791, 798, 799, 803, 811, 812, 822, 826, 829, 834, 835, 837,838, 839, 842, 844, 847, 852, 854, 855, 856, 860, 861, 862,863, 866, 867, 870: n = A,T,C or G
gctcctatagggcgaattggagctccccgcggtggcggccgaggtacatttcttctaattgatcatatctgcttattttcctctggattaaggatcaaggagatagtatattagatgatttgataaatttccaatgctttgcaaagtagttgaacaactttttctttgtgatgctaggtggcactactagtcaagacttggtatttcatagctggctttcttattctgaaggttgtaaaaagacatatgaagtaatatttaacattgaaaacatgataatcaatttgattatctatgaattgtcctaaacgttcagagtaaagtttcctttaaagttaaaatctttcaagtgaaggaaattataaagtcacatgtaaacaccaaaataagaggaatagagcaataggatatttttggctttataattcaatttaaaaattaaggtgcatttatttttttggcngctggccataaagcttcaatgtccagtaagcagttgctatctatgattcatgaagatcatggggggttcccaaccccactgctgtnnttactggcaagcaantattnaaaacccgnttnactcttggggngcccaaaattnacnnntttatnnttttgctttccccannnnnccggcnccttctgtnctggcattccttccttggncttantaagggggnttggnggnatngcnactnccngcnngaancagatngagccccncntcctgngnccntattcctgcaacggggggtcanggggancnctcccnattnaancttnggngnttttccnntggnggggggcnnaagtgcgccncccnacnggctnntnnntcngnggngaaangnnnttcnnnnggnntcnc

SEQ ID NO: 1323 - DNA, 847 bp, Homo sapiens
  misc_feature 435, 473, 513, 529, 545, 551, 559, 567, 568, 572, 577, 578,598, 612, 614, 620, 628, 638, 650, 654, 660, 664, 676, 677,684, 685, 686, 713, 717, 720, 723, 726, 735, 737, 744, 746,747, 749, 750, 754, 756, 757, 760, 761, 763, 767, 769: n = A,T,C or G
  misc_feature 770, 771, 776, 781, 786, 792, 793, 796, 797, 801, 802, 805,806, 812, 820, 827, 828, 832, 835, 837, 839, 843, 847: n = A,T,C or G
tacgactcactatagggcgaattggagctcccccgcggtggcggcccgcccgggcaggtacttttttttttttttttttttgatgctattactgaataactctttctgagatggttgttgtatagtaaaccatgagtctggcatgtctaaaattgtcttcatttctttccataaatttgaatgttttgctgtgtaagtcattcaaagttgaagacaatgtcccatcttttgacagaaagggaaggaaggatatgtgctcagcctgccagtttgacccacttttgaaaagggctttgtggtctctaccaatgagaagtctggtgtcaatgtgattttcttaactttataggaattgtttgtttccctcttttctgaaaacttgtgctttcatcaggctctaccagccttgatactctgtcactcactgggcatggnatttgcaccatcctttcatccttaaggctgctaactgncttcacattgggggaaattatctttactatttccccaaanttaaaaaccataagcntggggagacaaaacancctaangtcaaaanctcccatnnttanctatnngaaccaaaggcaaatccccngtcctcgggcggtntnaaaacnagggggancccccggccngcaggaaattcngtanttaaancttntcgaaacccggnnacccccnnngggggggcccggtccccaacctttttncccnttnaanganggggtaaangnccccctngnngnnaaanannggnnanaagngnnnccctnggggnaaaangggaanncgnnccannccnncaaaanaccacccngggaccnnaaanggnananccgngggn

SEQ ID NO: 1324 - DNA, 861 bp, Homo sapiens
  misc_feature 481, 556, 606, 634, 652, 656, 680, 711, 721, 726, 737, 767,778, 797, 799, 802, 811, 817, 820, 821, 824, 825, 836, 839,843, 846, 857, 858, 861: n = A,T,C or G
ctatagggcgaattggagctccacccgcggtggcggccgaggtactagacggggctgtaatctggtaactgtatgtattttagttcttcagtccctgggaaggagacaggagaaggtgggagggaggaaggggccagctgaaatggaaacagatccctgatccggggcggcagtggaacccttcttggtgtgcgagagcctgtgcatttcagaggcagcaaaaaagtaaaaaaaaaaaaaattgatctttgtttagattaacagacccctgactatgaagaaggaaggcatccagaccagaaaccgaaaaatgtctagcaaatccaaaaagtgcaaaaaagtgcatgactcactggaggacttccccaagaacagctcgtttaacccggccggctctagaactagtggatcccccgggctgcaggaattcgatatcaagcttatcgataccgtcgacctcgagggggggcccggtacccancttttgttccctttagtgagggttaattgcgccttggcgtaatcatggtcatagctgtttcctgtgtgaaattgntatccgctcacaattccacacaacatccgagccgggagcataaaagtgtnaaaccctgggggtgcctaatgaagtgangctaactcacattaattngcgnttgcgcttactgcccgcttttccngtcgggaaaaccctgtctgtgcccaacttgnatttattgantcggnccacccccccngggaaaggccggtttgcgtattggggcccnttttccctttncttcgcttacttgactccntnggncttcggtcnttccgnttnnggnnaagccgggttnaancttnccntaaaaggcggnnatn

SEQ ID NO: 1325 - DNA, 855 bp, Homo sapiens
  misc_feature 504, 630, 657, 659, 701, 711, 781, 787, 817, 838, 842, 850: n = A,T,C or G
gactcctatagggcgaattggagctccccgcggtggcggcccgaggtacctgaggatctgaaactttggcgaccaaaagtcctgatttgcgtgaggcacaccagttcacactagttgtctaggtttaataattaataatgcttctttttcattctcaaaagagccctgatttagacaataaattatatggtcaccctacctatagccagatatttctgcaccaaatgcctcgattttggtgggtggctttaattaaggaagaatgctttaagttttatgacataactctgttgttcttgtcaggaagtgatatgtataaaactattaattcatcagattatatataaggagatagggtgcacttaaaattgctaggaagttgagatctctagttgtttaagttggaagtaattgaagtaacagttggacaagctgtcatgatggacatagtagaagtgccttttaattaaaaacaatgattacaaaacaaaatgcagctaccgnttcagagttccttaattgatagtatgtgtaacgatggctggtgtctaaaattatctgagatgttggcaagggtgaaaatcattcctctcttctggacataacataccctaaaattaaaatccctanctagataaatatgagattggtgacagngnaactaattcaagggcctattttcatttcacccgctcccctantccagtcctnaacctaagggtcttatcccgtattgactctgaaacaatcatggtaatgatggtattggtcctggcgagcnggccgncccggcaggtccccccacaaagctaatctnaatcttgggctagaaaaaccntctnttactttncccct

SEQ ID NO: 1326 - DNA, 823 bp, Homo sapiens
  misc_feature 485, 581, 652, 662, 708, 722, 776, 797, 814, 821: n = A,T,C or G
ggcgaattggagctccccgcggtggcggccgcccgggcaggtacaccatccccaaggacacggaagtatttctcatcctgagcactgctctccgtgacccacactactttgaaaaaccagacgccttcaatcctgaccactttctggatgccaatggggcactgaaaaagaatgaagcttttatccccttctccttaggtaagctggacccacagtttctttcccagacaccagagggcaggtcctatcctcaacttgagaaaaaaaatgacaggtccttattaattgagcacttaatatattccaattgcttcacctgccttatccccttccatcttcactacaaccctgtaaggaggcttgagaaagaagattacattcccaaaggcacatctgggcaagcaggaacttgggcaagtattttaacatctctaaacctcagtgaattcattttcttaaaaagaaaaaaatctgttgagcaccgntgtaagcccagtgctgtacctcggccgctctagaactaagtggatcccccgggctgcaggaattcgatatcaagcttatcgatcccgtcgacctcnagggggggcccggtacccagcttttggtccctttagtgaagggttaattgcgcgcttggcgtaatcatggncataagctgnttccctggggtgaaaatggtatccgctcacaatttccacacaacantccgacccggggcnttaaagggtaaagcctggggggctaatgagggggctaacctacattaattgcgnttgccttcactggccgctttncagtccgggaaacctgntgtgccnct

SEQ ID NO: 1327 - DNA, 874 bp, Homo sapiens
  misc_feature 2, 424, 435, 545, 583, 616, 622, 628, 639, 648, 656, 661,662, 664, 674, 682, 688, 689, 699, 726, 728, 729, 732, 754,755, 759, 760, 766, 767, 771, 773, 774, 779, 783, 784, 789,791, 792, 793, 795, 799, 802, 806, 807, 811, 834, 840: n = A,T,C or G
  misc_feature 844, 845, 856, 857, 866: n = A,T,C or G
cnactcactatagggcgaattggagctccccgcggtggcggccgaggtactttttttttttttttttttttgctgatattgagccatagagccaagaagattgctaattttgaagtgtgcttggtcgggctttctactgatgatgttgctattgattcaaacagtcacaagtctttaggatcatttttagagcaatggcaagagtagggctgaaatgaaaatcagtctgagataatgaacactcctgctcagagatcattatgggctgagctgtgctgggaaggcactgagccttggggggctaacacttgcctcagtggagttagcactcagtaaccaggcaatcacctcgatccaaggctttcaactctcgtggaatatctgtcagtttgtcagttcagcaaataacaagtgttttgtttgnttcttttttgntttcccccggaacatggacttttaaaacagcttaattaaaaactatggcactttttcctgttgttcagtttggaggcaaagaccactgggtagttggtgagaagcttatnaaaacagcttgctttctcctgaggggggaaggctaacntccatgggggtatgggacctgccgggccggccnttctanactagngggaacccccnggctggcanggaattcnatttnnanccttattganacccgtcnaacctnnaggggggggncccggaccccaccttttggtccctttnanngangggtaaattgcccccctggggnnaatnntgggcnnaagngnntcccngggnnaattngnnntnccgntcncaanntccnacacattccaacccgggagcctnaagggnaaannccggggggccnnaatgagggnctaccccc

SEQ ID NO: 1328 - DNA, 865 bp, Homo sapiens
  misc_feature 1, 5, 6, 7, 8, 10, 11, 26, 30, 33, 42, 45, 52, 57, 79, 544,694, 707, 768, 802, 826, 845, 862, 864: n = A,T,C or G
ngttnnnncnnttttactcactatangagngantaggagctncancgcagcnggcangccgcccgggcaggtacgcggnggaggagatgctgccacctaggttacttgtaggaccctatacggcaacctcctttgccaggaactatttataaacatcctgcaggaaaatgagtctatatgtcagaatacacatttccaccttgcccaacagtagaaaaacataagaagagaaaaacattaaaaaatgacaaggaagttaatggaagtcagcaatgtgatggtgtttggaggtggagccttcagaaggtaattaatgcccttgtaagaagaggccagagagcttgcgcaccttcttcctgccatgtgaggagccaagaagccggctgtctgcaacctgcaagaggaccctcactagaagctagccatactggcatcctcatcttggctttccaacttccagaactgtgagaagtatatgtttgtgggttaagtcaatggtctatggtaatttttttatagcagtcccagccaaagacagtgcctnatttactacataccatttatattattatataggctcctttcagaaacccatgttcaaataaagagataaggatactgaaacacataacacctttcactagtttttagtatacaaatattggagaaataggttggtattaactatctcatncaagaaatgccanattcatggtggttctaattttttatatattaattgacaaaatgaaaaaaacttaacccatnctagattttagctgcccaaggaatgaaaagaatnaaaaaaaaattttttgaaaacccncaaggggatatgggatctnatttatgggtaaaaaanant

SEQ ID NO: 1329 - DNA, 843 bp, Homo sapiens
  misc_feature 3, 646, 714, 742, 762, 769, 782, 789, 792, 817: n = A,T,C or G
ttnacgactcctatagggcgaattggagctccccgcggtggcggcccgaggtacaggaagaagttccttgtgctatttctcacaatttttctttaagtttgaaactatttcaaaatgaagttatataactacatgaattgtgagttaaaatgcaagcaagatcttcatgcctgtaatcccagcactttgggaggctgaggcaggaggactgtttgagcctaggagtttgagaacagcctgggcaacatagtgagaccctcatctctacaaaaaatttaaaaaattagccaggcatggtggctcgtgactatagtcccagctactcaggaaatggaggtaggatgatcccttgagcccaagaggtgaaggctgcagcaagctgtgatcacatcactatattccagcctggatgatagagtgaaaccctgtctcaaaaacaaataaagcctaagggaatatgcagattaatggaagagaaggctattttgtgcagacaggaaacagatgaaagacaatttgacttttaaaactatgagtaaggctcatgcctataatcccagcactttgggagggcaaggtgtgaggactgcttgagcccaagagttcgagaccagccctggcaaaacagtgagaccctatttctatnaaacatttaaaatattaaccaggtgtggtaatgtgcacctgtgatccccagcgactcggaaccctganggggggaagaatgcttgagccctggganggcaaaggcttgcaatgggnccgaatnatgccacttgtantcttggnctnggggacaaaaccaagaccccttgtnttaaaagaaaaaaagaaaaaaagcct

SEQ ID NO: 1330 - DNA, 880 bp, Homo sapiens
  misc_feature 1, 6, 25, 612, 616, 621, 629, 631, 634, 635, 636, 648, 650,651, 656, 657, 658, 659, 661, 662, 674, 681, 683, 687, 688,689, 690, 691, 700, 701, 705, 706, 707, 710, 713, 716, 718,720, 721, 722, 723, 726, 731, 733, 736, 737, 739, 744: n = A,T,C or G
  misc_feature 745, 746, 747, 748, 749, 751, 754, 755, 759, 760, 761, 764,765, 766, 767, 768, 771, 772, 773, 784, 785, 790, 793, 795,797, 802, 803, 804, 806, 809, 810, 811, 814, 815, 816, 822,823, 824, 825, 826, 827, 828, 829, 830, 832, 833, 834: n = A,T,C or G
  misc_feature 835, 836, 837, 838, 839, 840, 841, 842, 843, 844, 845, 846,847, 848, 849, 852, 853, 854, 855, 856, 857, 859, 860, 861,862, 864, 866, 867, 868, 869, 871, 872, 873, 874, 875, 876,878, 879, 880: n = A,T,C or G
ngcgcnactcactatagggcgaatnggagctccacccgcggtggcggccgcccgggcaggtacacatgtccaaggtcaggtcctgggtggtaaaggtaaatacaaattggaagggcactgtgtgagccaaaatgagtcagattagtcatgattcatttccagtttgggttttgggtggtcttggagaatgttgtaagcactgcttcattgataggttgattgagccagactttactcagcagcctggaaaaggagagatgggctctgggttctacctttgctcactggtaagttgctaagatttcagccttgccctcaaaccctgaagtagtccttcattcacacagtgggatcactcgaaaatgtcagatggggaagtccataggttgttactttaaagaaaatagaaaaaatgctggaaaaggtttcttcaattttaatacccatgaaggcccatgttttagctttcctccgatgggcaaaccatacactaacttgggccttgtaatcaacaagcaaggctaaaagctctctaagtgcttgctgtttaaactattttgtgttggaagaagagttggaaaagaggcagtgtggaggtgaggggagaaagtncctncctcnatcatttncnatnnntggaaatttaangnnaaatnnnngnntatccttaattntaaatantnctgnnnnngccattggnncctnnnccnttntanantnnnnganccccngnctnnangaatnnnnnntnaanntatnnnccnnnnnctnnnggggggcccgnncccanttntntnccttnnngnggnnnatnnnccctgnnnnnnnnngnnnnnnnnnnnnnnnnnnaannnnnntnnnntnannnncnnnnnntnnn

SEQ ID NO: 1331 - DNA, 897 bp, Homo sapiens
  misc_feature 4, 9, 637, 666, 697, 737, 778, 815, 826, 827, 828, 829, 830,831, 833, 834, 835, 836, 837, 838, 839, 840, 841, 842, 843,844, 845, 846, 856, 866, 870, 881, 893: n = A,T,C or G
cttnttttntttttactatagggcgaattggagctccccgcggtggcggcccgaggtacgcgggaaggagatgctgccacctaggttacttgtaggaccctatacggcaacctcctttgccaggaactatttataaacatcctgcaggaaaatgcagtgaagtagaagagacagggatatcccagaaggttatgcaaaacatcaagagaagatgagaggagtctatatgtcagaatacacatttcccaccttgcccaacagtagaaaaacataagaagagaaaaacattaaaaaatgacaaggaagttaatggaagtcagcaatgtgatggtgtttggaggtggagccttcagaaggtaattaatgcccttgtaagaagaggccagagagcttgtgcaccttcttcctgccatgtgaggagccaagaagccggctgtctgcaacctgcaagaggaccctcactagaagctagccatactggcatcctcatcttggctttccaacttccagaactgtgagaagtatatgtttgtggtttagtcaatgggtctatggtaatttttttatagcagtcccagccaaagacagtgcctcatttactacataccatttatattattatataggctcctttcanaaacccatgttcaaataagagataagatnctgaaacacataccccttcactaggttttantatacaaatattgagaaatagttggtataactatcttatncaagaaatgccaaattcatggtggttctaaatttttattcnttaatggccaaatgaagaaacttaacaccattctaantttactgcccnnnnnnannnnnnnnnnnnnnggtcctgccnggcggccggntttnaactaggggtnccccggctggangaat

SEQ ID NO: 1332 - DNA, 902 bp, Homo sapiens
  misc_feature 6, 577, 683, 713, 715, 734, 754, 761, 775, 798, 802, 824,835, 855, 866, 871, 874, 882, 883, 895: n = A,T,C or G
tgggtntcgactactatagggcgaattggagctccccgcggtggcggcccgaggtacttgcaagaaacctcaggacttgagtaacagcaacatggttcttctgagctatgaaggggcccagatttaagggctatttttgacaccctaaatgtgctgagacaagtcattaaggtggtcctgccaggacacagccatctaaagcagcaatctgcttcttgccagaaaatctcgtgcctctgcagagccttttccagaatgaaccacaccatgctgaggaaaggagaaagagaccacctactgcatttctgtcactcgctgaaaaggacactctgtcagaaaatcttctagcaaacttcaaagggcaaaatcaccccttgttactgataaagcccagagagcttcagcagctaacattccctggacagggcacagcaaggatttgaacctaggtcaagtctggccagaacacccacaagctttccttaactcagtgtgctatctccccacgactaggtcactactgctttataatcacctttgtagccaccagtggattttgctcatcagtatttttcangcaattgatactttagatattcagctgcaagacgtatgcagttttcattgacatcttttggagaaactgacaaacctggacttgacttaatgcctttggaaccttncaagaaggtatataacttctagataggaangntgggccttcatgatgtcangaatgttgcattcttatttncccatanataaacccattgtncccaaagtcaaggagtcaggcanaggnccttgcctggggcttttagganaagcaacaagnctggactttgttttcaacanggttttgatanggggnggnatgaccanntccttaaaaaanaaacttt

SEQ ID NO: 1333 - DNA, 902 bp, Homo sapiens
  misc_feature 1, 20, 27, 29, 50, 51, 149, 152, 153, 155, 156, 292, 297,562, 585, 594, 620, 675, 699, 702, 725, 731, 738, 740, 747,755, 777, 783, 795, 802, 809, 817, 819, 822, 835, 840, 848,853, 861, 864, 865, 871, 881, 883, 888, 899, 900: n = A,T,C or G
ngctatcgctactctactcntataggncnaattgcagctccccgccgtgnnggccgaggtacatattcttacttcttgtgtaggaggcaaaaggtatctgcagggctctgggcttgctaaccaaaccgttaatcgcttagaaacagcanganntnnactagtgagatgtttatcacatacctggacacgagttgactttctgtgagacatcattctggaatgaaagccaaaatctctctgctattcagttgaggctgaaaaaacaatcacatcagaattagtaaggcccatnacaangagagagaaatgaaaacaagccagtattcaatggggctagggggaaaattacctgggcttcaggaattcaggagagttggggttttgagaaggtaaaaaagtgggccaagtgcggtggctcaagcttgtaatcccagcactttggaacgccaaggcaggtggatcacgagctcaagagattgagaccagcctggccaacatggtgaaaccctgtctctactaaaaacacaaaaattagcccgggcgtggtggcgggcgcctgtantcccagctactcccgaatgaaanaatattggnctaaaaaaggtcctcggccgctctanaactagtggatcccccgggctgcaggaattcgatatcaagcttattcgatcccgncaccctcgagggggggccccggtnccnaccttttgttcccttttagggangggttnaatggcncncttggcntaaatcangggccataactgtttccttggntgaaanttggtattccgntcccaanttccccnaacttacnanccnggggcctaaaagntaaancctggggncctantggggganctnnctccanttattgggtngngctanttcccctttcnngg

SEQ ID NO: 1334 - DNA, 1010 bp, Homo sapiens
  misc_feature 20, 35, 193, 203, 215, 216, 218, 220, 231, 239, 242, 247,250, 253, 268, 278, 279, 283, 296, 300, 301, 308, 314, 319,325, 338, 356, 362, 384, 393, 395, 397, 401, 403, 405, 416,425, 426, 428, 429, 433, 434, 437, 438, 440, 444, 446: n = A,T,C or G
  misc_feature 447, 451, 454, 456, 459, 468, 475, 481, 496, 497, 498, 501,504, 506, 514, 520, 524, 528, 535, 536, 541, 547, 550, 552,555, 556, 565, 571, 573, 574, 577, 580, 585, 601, 602, 610,611, 612, 619, 623, 632, 633, 646, 652, 657, 662, 666: n = A,T,C or G
  misc_feature 672, 673, 681, 682, 687, 688, 693, 695, 696, 701, 704, 709,710, 711, 712, 715, 716, 721, 724, 732, 736, 741, 745, 749,761, 762, 763, 776, 777, 781, 782, 788, 792, 799, 802, 819,821, 823, 825, 831, 837, 839, 843, 847, 850, 852, 857: n = A,T,C or G
  misc_feature 859, 865, 874, 882, 885, 886, 892, 893, 894, 898, 899, 906,909, 915, 920, 921, 923, 926, 928, 932, 938, 940, 942, 943,946, 949, 950, 951, 954, 978, 979, 984, 985, 988, 994, 1000,1006, 1010: n = A,T,C or G
gtgcgtatatactactatanggcgaataggagctncccgcggtggcggcccgaggtacgcgggtttcctcaacatggctgcgcccttgtcagtggaggtggagttcgggtgagtcacagagctggggcgccgtggggatggattgaagtcgtctggcccagaattcctttccttctgcgtggggctgacacgncccgctctanaactagtagganncncngggctgcaggnatttcaanatnaagantantantcaagttacctcganggggggcccnnttcncatctttttgttncctnnaatgaanccaaangctgnactgtncagtttttttcangaattggggactaaaaantgtganattgttatcccgtttcaatttnccacaaccntncnagcncngnatgcattaaantgaaaaaanntnngggnnccnnantgangnntccncanancanattttattngattttnggggtnctttgccgccttacnnnaanagnanagcctttnttaaantggnagcntttaatnnaatcngtcaantgntnggnnggagaatgncaggtntnnttntangtacntctcttatcatttttnnttagtcannngacttangcantcacttagnnatcatttctgttncgtgtntaccngtatnatanattgtnntgttaganntcggnntattntnngccanatncacannnnatnnttagntantaatcttntagnatatnaaantaantttattttaaannncacatatttatgnncccnnttaacnttantaaatgnctnaaaatgccctcgctccntntntntatcantttttntncctnttgnaananagtancnatgatnttgtacttnttattacntanntagtannnacanncctaatnagnaaattntaagnnanaanantggngtatanantnnaancannntancgccttcactcctatttccatctnnataanntcncgcgantaatcntatagnaccn

SEQ ID NO: 1335 - DNA, 878 bp, Homo sapiens
  misc_feature 546, 572, 649, 682, 688, 708, 735, 751, 760, 764, 765, 769,776, 778, 781, 789, 791, 792, 796, 798, 801, 802, 804, 809,817, 819, 823, 826, 836, 858, 874, 877, 878: n = A,T,C or G
tagggcgaattggagctccccgcggtggcggccgaggtactaaacaaaactaaaaataaaaagtcaaaaattggagatgaaatgtatgttttgaaacacattattttggatcttaaaagatttccatgatattttttgaaggtgtaatattaaaatgatgtctcttttttctgtctcattccaaagaaccataaaaaagcaaattaaaacagtgatgaaacaaaacgcttacaggtttgtatctcagtgcatctctgtaggatccaaacaaagcagcctgtgctctaagaaaggccctagctactccatcacccgtagctgtagactgcttcttcaagtttatttttcaaggcccccgcgtacctgcccgggcggccgctctagaactagtggatcccccgggctgcaggaattcgatatcaagcttatcgatccgtcgacctcgagggggggcccggtacccagcttttgttccctttagtgagggttaattgcgcgcttggcgtaatcatggtcatagcttgtttcctgtgtgaaattgttatnccgtcacaattccacaccaacatacnagcccgggagccataaagtgtaaaggcctggggtgcctaatgagtgagcttaacctcacattaattgcgttgggctnctggccgcttttcccagccgggaaaacctgtcntgccancttgcatttaattgaatcgnccaaccgcgccggggagaggggggttngcgtaatggggcgctntttcccttncctnntcanttaactnanttngcttcggncnnttcngntcnngnaagcngtattaantnattnaangcgggaatcnggttttcacagaatcacggggnatacccaggaaagacnttnn

SEQ ID NO: 1336 - DNA, 785 bp, Homo sapiens
  misc_feature 2, 3, 4, 6, 8, 9, 10, 13, 14, 19, 20, 24, 26, 27, 28, 33,34, 36, 38, 39, 46, 55, 59, 71, 73, 74, 75, 76, 79, 80,85, 87, 92, 97, 99, 105, 106, 107, 108, 114, 117, 121, 122,127, 269, 393, 398, 415, 452, 503, 518, 522, 527, 529, 533: n = A,T,C or G
  misc_feature 542, 547, 554, 556, 558, 561, 567, 568, 577, 585, 587, 590,594, 600, 607, 609, 637, 641, 651, 655, 657, 687, 694, 699,711, 714, 722, 733, 766, 768, 784: n = A,T,C or G
tnnnantnnnttnntatanntctntnnnatggnnancnnatttttnccatcttcnatgnattatatttttntnnnnttnncattncnctttnatttntntatagnnnnggtgantcngtanngactnctatagggcgaattggagctccaccgcggagggcggccgcccgggcaggtacgcgggagaaaccgtctgaactatcctacccgccatcatcctagtcctcatcgccctcccatccctaccgcatcctttacataacagactnaggtcaactatccctcccttacccattcaaaatcaaattggcacacccaaatgggtacctggaatctaatttatttctaaaaatattttccccacctgccaagcctttggtaatgaagtggttntttcntggattgccaaaattantgggttggaaataaggttgggccggaactcttcattnttaaaaccttggggggccttaaaaaattaattcctctttttggaaccaagnccttttttttttaantacntgggncncctncctttctcnaaagngtaattntntnttnttaagnnttccttacntttttaangnccntttnctttgnttggggncnccaaatttgtttctttggggtaaggggnaaancctttgtaangggnanttgggggaattttttaaaggcctttggccnttccttnggggntggccctaggcnttncccaaaangtttttggttnttggattgggggggggtggcctttcttttttgncnttaaccccttttccgnt

SEQ ID NO: 1337 - DNA, 473 bp, Homo sapiens
  misc_feature 116, 189, 212, 257, 285, 294, 298, 318, 327, 337, 345, 353,361, 367, 377, 379, 380, 381, 388, 389, 393, 397, 398, 400,403, 404, 405, 407, 415, 421, 422, 430, 433, 434, 438, 446,449, 450, 454, 457, 462: n = A,T,C or G
ggagctccccgcggtggcggccgcccgggcaggtacgcgggggcggcttcttagctttacgatggcaacaagtatggcggctgctagtggtagatttgaaagtgcgaagagtatcnaagagcggaaagaacagacccggaatgccagggccgaggtgttgcgccaggctaaagccaattttgaaaaaanaagaaaggcgtaaagaacttaancgacttcggggtgaggatacatggatgctacctgatgtgaatganagaattgaacagttctcacaggaacacntctgtgaanaaanaagaaagaaaaaaatgaccnagcttttcnaaaaaaagcnatggaaanggaaaaangaaaaaanaaaaangaggctttgnannnccccttnntagntctnnanttnnnanaaatatangatganngttccccnttnngggnccggcttnttnnaaanctnaggtngggaataccct

SEQ ID NO: 1338 - DNA, 862 bp, Homo sapiens
  misc_feature 534, 535, 536, 537, 538, 539, 540, 541, 542, 543, 544, 545,546, 547, 548, 549, 550, 551, 552, 553, 577, 610, 633, 634,636, 643, 653, 665, 689, 691, 714, 715, 722, 731, 741, 746,748, 750, 755, 757, 760, 764, 769, 782, 785, 786, 795: n = A,T,C or G
  misc_feature 802, 811, 812, 815, 820, 822, 825, 842, 843, 848, 850, 853,854, 857, 858: n = A,T,C or G
tatagggcgaattggagctcccccgcggtggcggcccgaggtacttacctacacaagttttactatcttggaatgttctagaattccagttaataaggtgaaagtgataaacatggctccatttagttgttatctctaaatgatttagagaagtgtttgccaaattataatgtgcatatgaatcacccggagatgttgttaaaattcaggttctgattcaaaaggcctagggtggggtctgagattctgtgttactaacaagttgctaactgaggctgatgttgctggttcccagatcacactttgtttagtaaggataagggcaggtttccaatcttggctgcaattagaatcacttgggaaaattaaaaacatctatatctgggtcccatcctaccccccagagatttgtctttaattaaagtggaatgtggccgggtatcaggattttaaagaagctctccagctgattttggccgttcagctcaccgtttgaacatgactgagtagagaatggaccctggaagatgaaannnnnnnnnnnnnnnnnnnngtacctgccgggcggccgctctanaactaagtggatccccccggctgcaggaattcnatatcaagccttatcgatacccnncnaccctcnaggggggggncccggtccccancttttgttccctttatgaggggtnantgcccccttggcgaatcatgggnntagctgnttcccgggngaaaatggtntcccntncnaattncnccnaacnatccnacccgggaggctnaanngtaaaaccntgggggnccctaatgnnggngctancnccntttattgcgttgcgctnncgccncnttnnatnngggg

SEQ ID NO: 1339 - DNA, 452 bp, Homo sapiens
  misc_feature 373, 376, 391, 394, 396, 397, 401, 404, 405, 407, 409, 420,424, 431, 443, 445, 446, 451, 452: n = A,T,C or G
ctatagggcgaattggagctccaccgcggtggcggccgaggtactctcccagtgacatgcttcttgaccacaatggatgaactgtgcccagcatgcccactttccaatgctccactgatccccatgttttgtttctgaaggacaaccagccttggaataatggcaaataccttcttaagttcctacaaagtatggtccctgggaagtttatgtctgtaagtcaaaccttgggaagtaactgagttttgatgcctcttccagcatcatcagcatcatgctattacaatcccaaaccatgggggtttctcacagctttacaccaaagggcatcactatccctcaaagagagaaacctggacactttacctttggnccntaaattatttaaatnaantnntttnatnnananctctgttatanttantattttnttataaattttnannaattnn

SEQ ID NO: 1340 - DNA, 906 bp, Homo sapiens
  misc_feature 2, 6, 63, 85, 264, 293, 295, 349, 395, 407, 432, 482, 529,534, 546, 550, 641, 644, 649, 650, 654, 665, 682, 695, 697,711, 713, 715, 734, 739, 741, 763, 769, 771, 779, 780, 782,793, 795, 804, 808, 812, 819, 823, 824, 844, 845, 855: n = A,T,C or G
  misc_feature 857, 862, 864, 877, 882, 890, 902: n = A,T,C or G
angcgnatcgactcactatagggcgaattggagctccccgcggtggcggcccgaggtactttntttttttttttttttttttttnactgcaacaacctaacaggaaaactaatcagagatcatgaggagagtggtatatcagtcagggactaatcaggaacataatccacttgagaatttaaaatagagagggcttaggctggggagttggtgacagcataatgggaaatctacaaagcaaacaggaatagggagacaacccanagcccatctaggctggcagagtcatcatntntaggctggaaggtcaaaaaaaggtggtgttagtggagccaggaggtgcacagtntcccaggggaagctggagctagggtgtacctgcccgggcggcccgntctaaaactagnggatcccccgggctgcaggaattcnatatcaagcttatcgataccgtcgacctcgagggggggcccggtacccancttttgttccctttagtgagggttaattgcgccctttggccgtaatnatggncatagctgtttnctgngtgaaattgttattccctcacaatttccacaacaacaatacgagcccgggagccattaaaagtgtaaagcctgggggtgccctaattgagngangctannctcnccattaattgncgttgccgctcactggncccttttccaagncngggaaaacctgttngngnccaccctgcaattaaatanaatcngnccacccccggggaagaggcggnttgcgnanttgggcgnntnttcccctttcntngtttactgnactncttnacccttnggcnnttggattgcggggaagcggnnttaccttcantnaaagngngtaaataccggtnattcncaaaaatngggggtaaaccncgat

SEQ ID NO: 1341 - DNA, 868 bp, Homo sapiens
  misc_feature 60, 401, 613, 644, 662, 712, 713, 730, 734, 746, 754, 763,775, 778, 792, 793, 795, 806, 820, 834, 835, 846, 851, 864,865, 866, 868: n = A,T,C or G
gggcgaattggagctccaccgcggtggcggccgcccgggcaggtacatgtgtccttcttntcagtttggtttgtttggttttgaaaaagtaggttttttttttagtatgtgatgagcttattcttaagtgaattaataaatactttttagtatctgttttaattctaacagtatgagtgttggtagttatattccaaataaacaaaaactcttagagtcctcagtaatttttaagactgtaaaggggtcctgaaaatgattaaatgtttgagaataactgcctcagaacattgttcttcaaccctaatcaaacccagcacggcatttatataaaaaatgattttataatgcccatttgctaatcctgaaataaaaatacataggtaataagaatgacttanccaatttcaaaaatatcaatggagggaatactagtgtttggagacctaactatacaggagaaataaaaggaaagtcattttttataacattatgcatgcatgtataaagcactcagatctgatgacattgggagacacggtggcatagccagatccttacacctgtttgtggactcaccatgaatacagcaagtggccaaagcaaacccccncgctataactgataggaatttcattggcttnggtgatggtcatttctanaatggtaagaaaatcttggtaaggttaaatgaaccaaataaaattgcccnncagttaccccggtagtngctntctggaaggtcnatgcctcnaactatccnaaaatctttccnacnttccaaatttttanncngaattcattcntgtgtccagtgacnaggattttaattgnnctggtggtttncttanttaaaatcgaaannncn

SEQ ID NO: 1342 - DNA, 892 bp, Homo sapiens
  misc_feature 9, 13, 14, 602, 619, 630, 659, 746, 750, 762, 763, 809, 810,812, 815, 822, 827, 828, 830, 849, 856, 866, 889, 890, 891: n = A,T,C or G
tatgccgtntcgnntacgactcactatagggcgaattggagctccccgcggtggcggcccgaggtacgccacaaggcatttaatgcccacagtaacagggctgtttgacagtggcagaagaggacgggactaaagttactttgtgctgagagggggaaagaagcacaaagtttggtctgttgcgtaattgaatttttaacactcttatccacaacaaacactttttcgtgtcctgctgtgtaaaagacatcagatatattacagattttcaaacaggcaggtatcaacatttacattgtaattcaatagacgctactactacaaaggagctttattcttccaacttaatatggttgctgcgggaacactgcaggatgaaactgactttttttgtggtaatgtttctcctggttgggaacaacgcaaattagcaaaggcgtaatttataaccgctgctaccaaagagtgaagtatttgtggaagttctgactggaatctaactcgtacctgcccgggcggccgctctagaactagtggatcccccgggctgcaggaattcgatatcaagcttatcgataccgtcgaccttgagggggggcccngtacccaacttttggtncctttagtganggttaattgccgctttggccgtaatcatngacatagctgtttccctgtgtgaaaattgttatccgctccaatttcacacaacattccagcccgggagccataaagtgtaaagcctngggngccctaatgagnngactaacctcacatttattgcgttgcgctcactggccggttttcanntnggnaaacctnttcgnncncgcttggattaatgaatcngccaacncgccgggganaggcgggttgcgtaattgggccnnnt

SEQ ID NO: 1343 - DNA, 891 bp, Homo sapiens
  misc_feature 3, 6, 73, 90, 95, 100, 259, 260, 321, 410, 414, 435, 521,546, 623, 653, 675, 679, 688, 691, 703, 726, 738, 746, 760,773, 781, 783, 795, 809, 811, 824, 830, 832, 844, 856, 885: n = A,T,C or G
gtnccnctatcgactcactatagggcgaattggagctccccgcggtggccggcccgcccgggcaggtactttnttttttttttttttttntgctnggggnctttttcccctaggatttctccaatgaacacaaaatgcttttgtaaaaaagaaaacatgataaaacacattgaaaaaaaagtaaaagtaggtgaaaatgtcaatgaaattctggtttgtagaaccatcaaaacttggaaaagtttaataagaccaccannaagaagaagaagggcaagtttccaaactgatttcacagggccaggagggcaggccactganataggtaaaccatggaagcacaatcagtcccatctcatggatattctacctggggcttttactttgcgtggctcaaaagcatctgagtnttanaccaacagaaagataactccngaagaaagatgtaatagtgtcatatttgtgtaattgattgatctaaaacttggttgatgaaaaatccctgggacaacagcaagaanagttgcgttccaaccccccgaagtnctgctgctttctgaactgcaagtatcatatctcttgcttttgattttaaacttaattggtaaatatctgccaaaatnttaaaatgcttgaaagccagttactttatntaaaaagtaccttgggccggtnttanaactatgtnggntcccccggctgnaaggaattcgatatccaaccttnttgattcccgcnaacttgangggggggcccggtncccacttttggtncctttagngngggtaaattgcncccttggcgtaatntnggcataactgttnctgggngnaaatgtttttcnctcccaatttcncacaaattccaaccggggccttaagggtnaagcct

SEQ ID NO: 1344 - DNA, 401 bp, Homo sapiens
gtttgcgcgtaatacgactcactattgggcgaattggagctccaccgcggtggcggccgaggtactctttctagttattaaaaagaaaagttaactgtaaaacagcctcaggcaggtccttccggagctatccagaagaagccattgttatcataggagatggcagctccatgggtgttattgcccctgaagaccttccagtgggacaagatgtggaggtggaagacagtgacactgatgatcctcaccctgtgtaagcttaggctactgtgtgtatttgtgtcttagtttttaacaaaaaggtttaaaaataaaaaaaaaaaaaaaaaaaaaaaaaaaaaaaagtacctgcccgggcggccgctctagaactagtggatcccccgggctgcaggaattcg

SEQ ID NO: 1345 - DNA, 535 bp, Homo sapiens
  misc_feature 3, 5, 22, 148, 306, 332, 335, 336, 340, 342, 368, 372, 427,445, 448, 454, 461, 469, 474, 491, 495, 498, 504, 534, 535: n = A,T,C or G
agngnccccctcactactatanggcgaattggagctccccgcggtggcggccgaggtacgcgggggacaccctagatcccaagatctccaaggatttggtggcatacccactccagcacacagaagcatgaggttcatgactctcctnttcctgacagctctggcaggagcccttgtctgtgcctatgatccaaaagcccgcttttgcccaagatcggggaacccctttgccattgaagcatcatccagcttaaaaaggaaaatgccaggttgaaagaccccaatggtttagcccataacagggcnccccaaaagcccaagggaaggccaanaanntccnancccttttttggggaaaaaaagggccnttanaaccggatccaaaaaaaaaagccttttgggggggggacttccggaaaaaacttanggaaaaaaggaatgccanttntgaaanaattttnaaaaaaanccttnggggttaaaagggaaancccngtncctttngaccttttaaaaaaaaactttccctttgann

SEQ ID NO: 1346 - DNA, 402 bp, Homo sapiens
agcgcgcgtaatacgactcactatagggcgaattggagctccaccgcggtggcggccgaggtacgcgggaagaagggtcagctcagggtgttgccatgggaatgaaattcatattgcctaaccgatttgatatgaatgtgtgttctcgatttgtgaagtccttaaatgaagaagatagtaaaaatattcaagatcaggttaactctgacctggaggtggcatctgtcctatttaaagctgaatgcaatatccatacatctccttctccgggaattcaagtaaggcatgtctacaccccctctacaacaaagcatttctcacccataaaacagtcaaccactttaaccaacaaacacagaggaaatgaggtctctaccacacctctgttagcaaattctttgt

SEQ ID NO: 1347 - DNA, 470 bp, Homo sapiens
  misc_feature 2, 3, 4, 5, 6, 8, 9, 12, 408: n = A,T,C or G
gnnnnngnnggncgcgtctcactactatagggcgaattggagctccaccgcggtggcggccgaggtacgcggggaggccatctcgctataggaaaggaaagtggaacagcattcatcctcaacattttacgaagacaaaatgaagactggagtagaagactgatcagtgcagcatcatcagcatcatgctattacaatcccaaaccatgggggtttctcacagctttacaccaaagggcatcactatccctcaaagagagaaacctggacacatgtacctgcccgggcggccgctctagaactagtggatcccccgggctgcaggaattcgatatcaagcttatcgataccgtcgacctcgagggggggcccggtacccagcttttgtttccctttaatgaagggttnaattgcgccccttgggcgtaaatcattggggcataagcctggttttccctgtgtggaaaatt

SEQ ID NO: 1348 - DNA, 397 bp, Homo sapiens
  misc_feature 6, 157, 164, 171, 173, 176, 179, 185, 192, 193, 195, 205,207, 213, 222, 225, 240, 244, 265, 269, 273, 286, 288, 289,290, 291, 293, 298, 303, 305, 310, 312, 316, 321, 333, 342,345, 354, 364, 365, 370, 375, 376, 380, 394, 396: n = A,T,C or G
ggagcnccgccgtaatacgactcactatagggcgaattggagctccaccgcggtggcggccgcccgggcaggtacttttttttttttttttttttttgttttttttttttttttttttttttttttttttttttttttttaaaaaaaaaaaaaaatnaaatttntgaaaangnggnaantggaantggtaanntnaaaccaaaantntggaantaaaaaaanttnaaaaaaaattaaaanttgngaattgaaaaaaaaaaaaaantttnaaangaaaaggaggccnannnntnaaaancaaananaaaangntganccaanaaaaacctttanttaaaaaanttnaaaaacaantaaaaaaaannaaaanttttnnaaanggggggggtaattnang

SEQ ID NO: 1349 - DNA, 440 bp, Homo sapiens
  misc_feature 394, 409, 418, 420, 438, 440: n = A,T,C or G
cctatcgactcctatagggcgaattggagctccccgcggtggcggccgaggtacgcggggagagctctttgtggcttgggtggtcagcaagaattttttaagcagagatactcttgattgggttggataaataaaagagcaaggaggacattgtaggaggggaattgctcccagcagagcctagaagcagagagattttccagggttcccaggagaagagattgaataagtgcagtgggccatgtggtgacacatcttgagtgtccagctggagaactggaagtgcatatcataacaggggtggaaaactcaagaggttgatagggaatggttgaggttgcaatgaggggacccggtgggggactttgaccagttggagcaagagtctttccanatgaaagggagcacntgccttcananacttttggccaacctgtngn

SEQ ID NO: 1350 - DNA, 708 bp, Homo sapiens
  misc_feature 1, 2, 5, 14, 17, 20, 25, 28, 39, 44, 46, 54, 58, 59, 63,64, 66, 83, 87, 88, 94, 96, 98, 105, 112, 306, 327, 340,348, 361, 367, 411, 445, 460, 470, 477, 479, 486, 502, 510,516, 517, 526, 528, 533, 542, 545, 549, 561, 567, 568, 583: n = A,T,C or G
  misc_feature 616, 621, 627, 658, 669, 673, 678, 693, 695, 696, 700, 702,704, 705: n = A,T,C or G
nnttnatccaattnatnttnatttnttntaattgatganttttntntaattatntatnnttgnntnatttatttttctctttntgtnntttctntnanatttagnttgggtncattcgctcactatagggcgaattggagctccaccgcggtggcgttaacgcatttactaaacgcagacgaaaatggaaagattaattgggagtggtaggatgaaacaatttggagaagatagaagtttgaagtggaaaactggaagacagaagtacctcggccgctctagaactagtggatcccccgggctgcnaggaaatttcgatattcaagncttatctgatacncgtcgacnctctgaagggggnggggcnccggtacccagacttttgttccctttagtggaggggtttatatnagccgccgctttggacgttatatcatgggtacantagcttgtattacantggtggtganaattgtntnatcacgnttcaccaatttctcancacaaacnattacnnaagtcccgntnagtcnattaaaaanttngttnaaagacctgggnggttgnncttaaatggaagatngaggccttaaacctttcaactattttaaatttngccgntattgncggccttacaccttggcctccccggactttntttcaccaggntccntgggngaaaaaaccctttgntnnccantngnnccc

SEQ ID NO: 1351 - DNA, 556 bp, Homo sapiens
  misc_feature 22, 25, 44, 46, 48, 49, 69, 98, 102, 139, 228, 229, 278,284, 295, 315, 332, 343, 346, 367, 379, 384, 446, 458, 460,461, 464, 466, 481, 492, 493, 507, 511, 512, 518, 536, 540,550, 555: n = A,T,C or G
gcccccgttcgacgcaattctnaanatccggcgaatttttctcncnanngcggcggccgtgtggcgcanggaggaccccttacagtaaccacagcgtntttnaatccgaaagggaaaagaccccgcgtaccttggccgntctagaactagtggatcccccgggctgcaggaattcgatatcaagcttatcgataccgtctacctctaggggggggcccggttccctanntatttgtttccctttagtgaggggttaaattgcgcgcttggcgtaatanatggtncataagcatgnattcctgtcgtgaaattgtnatccgcttaacaatttncacacaaacanacngagcctgggagcataaaaagntgataaagcctnggggngcactaatgagttgagctaaacttcacaattaaatttgctgtttgcgcttcaccttgctccngcttttttcaananncgngngaaaaacacttgttngtggccccatnnttgccattttaaantgannattctngtctcaaaccgcccggcngggnagaaggaagngaccng

SEQ ID NO: 1352 - DNA, 847 bp, Homo sapiens
  misc_feature 2, 3, 5, 6, 8, 9, 22, 25, 29, 32, 36, 37, 39, 42, 43, 44,45, 46, 51, 52, 60, 62, 66, 67, 68, 70, 73, 74, 77, 81,89, 92, 93, 95, 98, 99, 101, 106, 110, 114, 117, 118, 121,124, 136, 138, 147, 148, 166, 303, 356, 357, 365, 389, 390: n = A,T,C or G
  misc_feature 410, 411, 413, 419, 432, 434, 437, 442, 444, 452, 463, 475,481, 482, 490, 496, 506, 512, 528, 532, 534, 546, 566, 581,589, 593, 599, 626, 634, 640, 665, 676, 677, 706, 708, 711,724, 725, 733, 737, 743, 757, 759, 760, 764, 774, 776: n = A,T,C or G
  misc_feature 790, 796, 797, 802, 811, 820, 822, 828, 830, 841: n = A,T,C or G
cnngnntnngatgtatttattnatntatntanttcnngnttnnnnngaatnnattacttngntcgnnngnatnnatntatnaatatatntanntntanntnatatntacnaatntanntanctntagatctcggtntngccccttanncgactcactatagggctnattggagctccaccgcggatggctggccgcccgggcaggtactctttcctggatttaccatttatacaaagaaaattcttacccagctggaagaggaggaacaaaactttttactatcagggcacaggcaaaaaatncatttgtgcaagagagacatataagcaaacatgcatttacagtgtagaggaannggggaccncagtattttttttctcctgggaanncttacatttttaattaaatnncnccttgnaaaattttgtagnantanttaanangccttccnttgattttcanatgcaattcaanacctcnngccaatgnaatatncaaaacaacntttcanggtatgttggggaatngtcncnacgattatgtanaagtaaaaaagtggctccangtaaaaaattggccntaaaaaanctantggtcncattataacccttttttaagaaagggnttaattangtgatnttccttttaagggggaaccctttgncccctaacaannaaccaaggtaaaggccttgggggaccaananagntaacccaaaactnntgcagatnaaanataatntcttaatttctttngnncccntaaaataaancnaaaaaaagggcccncttaannccatnttttggganggaaacatnanaaaaancnaagcgcctatnttatgg

SEQ ID NO: 1353 - DNA, 845 bp, Homo sapiens
  misc_feature 1, 3, 4, 5, 9, 10, 13, 24, 25, 26, 28, 32, 36, 38, 41, 42,49, 65, 66, 68, 69, 78, 80, 88, 96, 97, 100, 105, 108, 110,127, 193, 208, 262, 304, 305, 319, 367, 370, 376, 379, 405,407, 412, 421, 428, 437, 439, 444, 446, 449, 455, 456: n = A,T,C or G
  misc_feature 465, 480, 488, 496, 503, 510, 531, 533, 536, 557, 562, 566,570, 577, 589, 596, 597, 612, 615, 619, 623, 625, 630, 631,669, 686, 688, 700, 718, 731, 736, 744, 753, 758, 761, 763,770, 781, 784, 785, 793, 802, 806, 810, 812, 815, 829: n = A,T,C or G
  misc_feature 832, 837, 841: n = A,T,C or G
ncnnntttnntantgtaatatatnnntntatntttntnttnnatctatnttttatacatatatcnntnntatatatantnctttatantttttttnnttnatttnggntnggccctataatcctatnggcgaattggactccaccgcggtggcggccgcccgggcaggtaccttaaaaaaaaaacatcagttntgggacataacaaantaaatactatggagaaatggtatctggacaggaacagaaatgtccacaactgcnagggattttcttttacacttggccacagagtcgttaattganncctaccactccttnaaatattggggattctcttaattaaggtttccccctaaaaaagtttcnctnaaaggnatngatttatcatttgttatagattaggntnccccnattagttanttaacanacttggaanantggcnanganttattnnttttttaantcaagggtcaaaacntctagcgngtttattnatttagnatagtcnttaaagggattataaaaattngnacnatttcataccatttttattgnttggncctnaacntcgaaancataccaatttntgtatgnnaaaaaacctgatccnttncttnaccnancctgnntattatttcaaagacctctttctttattcaaccggatnttggggcccctatcatngntaccccatggcnttattctatttaagatantaccccatgttcnttatnttggatgnaaccataanaatcnccnanatataantgaataattanatnngaaggggnaattttttnaganaaancnaangggaaactttgtcnttnttttntccncccc

SEQ ID NO: 1354 - DNA, 840 bp, Homo sapiens
  misc_feature 1, 2, 3, 6, 7, 9, 12, 13, 19, 27, 34, 37, 42, 48, 49, 53,58, 60, 66, 76, 82, 95, 103, 104, 105, 108, 112, 121, 122,123, 126, 130, 139, 149, 154, 225, 240, 256, 276, 303, 304,309, 322, 324, 328, 329, 330, 336, 337, 338, 340, 341: n = A,T,C or G
  misc_feature 347, 359, 373, 378, 382, 396, 414, 418, 426, 428, 434, 436,455, 458, 465, 467, 469, 483, 496, 503, 506, 515, 516, 521,540, 549, 553, 555, 557, 559, 561, 565, 571, 579, 585, 600,605, 609, 616, 620, 624, 625, 636, 647, 653, 661, 666: n = A,T,C or G
  misc_feature 669, 675, 679, 689, 706, 717, 728, 733, 743, 764, 769, 770,772, 783, 788, 795, 797, 807, 809, 811, 814, 825, 834, 836: n = A,T,C or G
nnnganncnttnnttttanaaattatnaatatanagnatttnatctannattncatananatgttntatttatatntgtatntatacttaatcantttaaatnnntanagtntgggttgtnnnctntacnatcatatanggcgaattgnagctncatcgatggatggctggccgcccgggcaggtacctttctttggaatgggtttggttcgaccgtcatacttnttcaaggtgatatanacgctgcccgacgttncggcactttctggaaaagtntggtcagctccgtcaggaacatgctcnnttctncaacaacaccatncncggnnngacccnnngnntactcntgggccgctttntagaaaacatacgntgtgnattnccaccggggcctgncaaggaaaattacgtatnattntaaaggcntntattcngnattaccccgatacgtaacnctnctgaagngngnggggggccacacgnggtatctcccaanacattanttntggatttcnnccctntttaagttcggaagggggnttttaaaantttngncngncngacnttttgngaccgttnaaaatntcaattgggggttcncaatnacgncctttgntatntacnncatcggtgggntggaaaaaaantattgnttttaatnacacnggntttccnaacnaaaattattncccaactaaccaaaacntatttaacccntaaaggcctcnggggngggaaggacnaattaaaaaaagtttggttanaaaanngnccccttggggnggggnttggccncnttaaaatggnangnttnggaagttcctnaaaacattncnaacg

SEQ ID NO: 1355 - DNA, 472 bp, Homo sapiens
  misc_feature 13, 16, 428: n = A,T,C or G
tttggccctaacnctnctatagggcgaattggagctccccgcggtggcggccgaggtacgcgggattgacccaaaacctggatgtcctatctgtgtgttccagtagtgccctattttaaatgtgtcatgatatctattactttgtgtgaaaattacctgtttgttttttcaggttatataatagtataacactgccaaggagcggattatctcatcttcatcctgtaattccagtgtttgtcacgtggttgttgaataaatgaataaagaatgagaaaaccagaagctctgatacataatcataatgataattatttcaatgcacaactacgggtggtgctgaactagaatctatattttctgaaactggctcctctaggatctactaatgatttaaatctaaaagatgaagttagtaaagcatcagnaaaaaaaaggtaaaacaaaattgctcctgtggagatgattggca

SEQ ID NO: 1356 - DNA, 831 bp, Homo sapiens
  misc_feature 1, 2, 3, 6, 9, 12, 19, 22, 27, 28, 30, 31, 36, 40, 44, 45,52, 54, 56, 62, 67, 69, 74, 85, 91, 97, 102, 104, 105, 106,109, 112, 119, 259, 268, 304, 305, 307, 337, 354, 360, 384,413, 415, 426, 429, 435, 439, 458, 479, 491, 494, 500: n = A,T,C or G
  misc_feature 520, 523, 529, 544, 548, 550, 562, 563, 577, 585, 587, 589,596, 603, 605, 608, 612, 621, 636, 643, 654, 655, 664, 667,669, 680, 681, 685, 688, 691, 714, 719, 720, 724, 731, 734,738, 744, 764, 771, 772, 789, 792, 793, 795, 798, 808: n = A,T,C or G
  misc_feature 816, 828: n = A,T,C or G
nnncanatnttnatttaantanatatnnannatttnatantgtnnctatcantntnttatanttaanantaatntattgattttnttattnattatntatantnnnagntancgtcccnctatctcactatagggcgaattggagctccaccgcggtggcggccgaggtacgcgggggcaaacgccgggagtagccgaaggggactgccgggaacaggaatttcttcacatggctcctggagaagtgaccatcacagtntcgcctcanccgttcctttgaacatcgcaatttcaaacctgtatnngnatcatcggaagtgaaattttgggaccaaanatggtaaaaagggaaantttatncgtaattttcatatagagtcaagnattgtcccttataaatgggaactcaaacncntgcctcactcnacnccattncagntaacatgtattaaatattnattggagtagacaacctaaanatgaatttaatnatncaattntatatggtctacccaataanatnttccanagacgtaaccaatanagtngnaaaacctattgnntcggtttagaaagnctattgtngngntaaaagnaattggnanctngaanaaaggtaanctttcccctcgtccnttggganaaaatgtaaanngtacccagntcnanacgttctttgnnaaanagntcnaaggtccattggtggaataatancggcnnccanggtttgnaanatanctttgncaatataatgtgggccaaantattacnntctccgtggctgggagnagnnanagntaatcttaanttatgtgncaacaccttganccg

SEQ ID NO: 1357 - DNA, 780 bp, Homo sapiens
  misc_feature 3, 5, 6, 11, 17, 23, 28, 31, 40, 42, 46, 51, 54, 56, 59,60, 82, 91, 92, 101, 109, 115, 192, 233, 303, 322, 338,362, 367, 373, 400, 422, 430, 441, 445, 447, 453, 461, 471,482, 489, 507, 511, 514, 545, 547, 552, 555, 564, 589, 598: n = A,T,C or G
  misc_feature 607, 608, 610, 614, 619, 624, 635, 637, 643, 659, 664, 678,681, 683, 684, 703, 704, 709, 715, 722, 724, 734, 752, 761,763: n = A,T,C or G
tananntatantttcantattantaacnctnttttctttntnttantatanttnanttnntttatttattgtataatttcanattcttttnnatatacagnttggttcnaccctntactatacctatagggcgaattggagctccaccgcggtggcggccgcccgggcaggtacccgggcgtgtgaggtgtnagtctgcccctacttgggggtgcctcccagttaggctactngagggtctgggacccacttgaggaggcagttctgtccgttctcagatctccagcttgcgtgctgggtgcntggggagaaaccactactntccccgccgttacctnaggcccgcttcttaagaaacctanttggnattccncctcgggtcttgtcatggtaatttccnattattcaaaaggctatattcngtataacnccgtgctgacncttngnaggggngggggggncactccgggntacccccaagnctttttntggtttcccacttttaanttgnagnggggtttaaaattagtcgaccgccctttggncngttanaantcaattggngttcaataaaggcctggattttccnttgttggtnggaaaaaanntngttntattntccgncattcaaccanantttttntcaaccaccaaaaccnattanccgtaaggcctccnggngnnaagtccaattaaaaaaatnnttggntaaaanaaggccncntggggggggntttgggcccccttaaaanttggaaggntnggaaaggcccttaaaat

SEQ ID NO: 1358 - DNA, 775 bp, Homo sapiens
  misc_feature 1, 2, 5, 6, 13, 14, 23, 27, 29, 33, 38, 39, 40, 41, 42, 43,48, 55, 62, 68, 71, 76, 80, 82, 84, 85, 87, 90, 92, 99,103, 107, 108, 112, 119, 131, 135, 159, 188, 191, 316, 330,331, 349, 370, 376, 385, 391, 395, 419, 436, 453, 457: n = A,T,C or G
  misc_feature 462, 467, 482, 511, 531, 533, 542, 557, 563, 579, 583, 595,598, 604, 631, 639, 640, 654, 663, 668, 672, 674, 683, 685,686, 697, 698, 700, 703, 711, 712, 725, 733, 737, 755, 757,759, 761, 771: n = A,T,C or G
nnatnntaaatcnnattaaaaanatantnaatnaactnnnnnntatantttatcnttatacnattatnatntaatngaanangnngntananatcatantacnacannagantcggtcncgcaattctccnatcnggcgaattgttgctccaccgcggnggcggccgcccgggcaggtacgcgggganttntctactggcgaaacctgtatccgggcccaacctgaaaacatcccagccaagaactggtataggagctccaaggacaagaaacacgtctggctaggagaaactatcaatgctggcagccaggttangaatataaatgtannaaggggagtagactttcncaaggggaaaaatggcttacnccaaancttgccttncatagncgcnctgctgggccaacttatgccctcntcagaaaacaatcaacncttactcacatgcaaangaancgggncattnggcaattaacaatgnggattggatggtagtacttgggcaaaacncatgaaaaaaaaagggcctngnacaaatatncttaaccaagggggnccttcncttaaataggaattgntatnggaaaaccattnggnttggcnttggaaggggggccaaaacccaaggcnaagtgggnnttccacctttttanccaaccctnggtgntccntnttgggtaangnnaaatgggggcnntnggncttccctnnaaaaaaaaaaggnaccaaaanaatnggaaaaataggggggggnanananggaaccaaanttcg

SEQ ID NO: 1359 - DNA, 417 bp, Homo sapiens
  misc_feature 5, 105, 172, 357, 391, 417: n = A,T,C or G
gagcnccccgtaatacgactcactatagggcgaattggagctccaccgcggtggcggccgaggtacttttttttttttttttttttttttttctaaaagcaaggngatctgtgatattttcgtccttttgtatgattctctacttcttattcaagacctgtgattaagttgngtgtatattgtctgtaaaatgaaacaaaagtaggtcctaaacattgtaagaatatggtatactaaaaagctttgaaaccaaaagaaaatttaaaaaaacaacaacaacaacaatgtagagtacctcatacctaacagacactatagaaaagctgatatttttttccgttgaagttaggacattanatcatttttcacaaaaatagattccttaaataanacatgttgtctaacaggtatttacan

SEQ ID NO: 1360 - DNA, 407 bp, Homo sapiens
gtaataccgacctcactatagggccgaattggagctccaccgcggtggcggccgcccgggcaggtacaaacaggtgctatcataattacctctgggcaacaggcaaaaatcaagattgtccttagtaaaccaggattcataccaggtcatctgatgtttagtatagcactcacccgactctgccttacattgcttatttaaaatgtctgcctccccttctaggttttataaaagttcttggctcacagtaactcttagtataagtttctgaaataaacactttgttatcacttttgaattgatggcttacatttttgttttggcatttaacttcacatttgtgcattcatgtgtatgcatttcaactcatctgcaagcttatatccctcaaagtttgctgctgggct

SEQ ID NO: 1361 - DNA, 412 bp, Homo sapiens
  misc_feature 5, 301: n = A,T,C or G
gagcnccccgtaatacgacctcactatagggcgaattggagctccaccgcggtggcggccgaggtacttttttttttttttttttttttttttacatgtatcaatttatttacttttggttttgctcatttttactgaaaatatgattatctatgtggtgtcattatttttcatctcaaataacttcatttttacatagtgtagtccagctggaaacgtttatttcatgtttatcttttaaatgatattttcactggatacagaaacctgtcttctgcctcgctcacgctgggagctgtanactggagctgttcctattcggccatcttggctcctccccactaatgctgttcttctagacatgtttgaaataggggcattgctataatgaatggctagcaagtaggacaac

SEQ ID NO: 1362 - DNA, 439 bp, Homo sapiens
  misc_feature 5, 32, 34, 62, 132, 166, 222, 224, 231, 234, 239, 245, 256,261, 274, 293, 325, 339, 354, 355, 359, 360, 363, 375, 378,379, 389, 397, 399, 401, 406, 415, 419, 422, 424, 425, 430,432: n = A,T,C or G
ggcgnattggagctccccgcggtggcggccgncngggcaggtactctacatacctgtatctnatttcatcctaacaatagccacacaagctagacataattatcccattttccaggagaaactgaagttcanagcatttagtaacttcctcaaatttatacacctnaataagtggtagagccagaatttggacccctgtctgtttcaaaacctttgtcccanancaccagnggncttcnattccngataaaattgnttgcngagaccacacctntggaatcaggatctccagnaatcaggggtttttgtttgttttgtggttgtngatgttgttgttgntgtttggatggtggnnaaannccnctggactttttnatnntaccattgcngtttttcncntnaaatnctcccttcntagngcntnntttcngngttccct

SEQ ID NO: 1363 - DNA, 454 bp, Homo sapiens
  misc_feature 4, 5, 6, 9, 36, 381, 388, 398, 451: n = A,T,C or G
gggnnnccncactactatagggcgaattggagctcnccgcggtggcggccgaggtacgcgggaggtgtgctgtgtgtgaggcgcctgccatggtgatggccgtgcacagccagaccattcagatcccaccgtgccccagcgggtggtcctcgctgtggatcggctactcttttgtgatgcacaccagcgctggtgcagaaggctctggccaagccctggcgtcccccggctcctgcccggaggagtttagaagtgcgccattcatcgagtgtcacggcccgctctagaactagtgggatcccccgggctgcaggaattccgatatcaagcttattcgatacccgtccgaccctcgagggggggggccccggtaccccagcnttttggntccctttaantgaaggggtttaaattttcccccctttgggccgttaatcattggtcataagcntgt

SEQ ID NO: 1364 - DNA, 447 bp, Homo sapiens
  misc_feature 4, 333: n = A,T,C or G
gttnggccgaaacactactatagggcgaattggagctccccgcggtggcggccgcccgggcaggtacgcggggagaggagatgctgccacctaggttacttgtaggaccctatacggcaacctcctttgccaggaactatttataaacatcctgcaggaaaatggtagctgagaccaatgatgctgacctccctcaaaagctgcatttctgaatttctgaaggcaaactgtctgcctatattgtacagcaaaataatttcctgtattaaaacgtttttattgctctaaaaaaaaaaaaaaaaaaaaaaaaaaaaagtacctcggccgctctanaactagtggatcccccgggctgcaggaattcgatatcaagcttatcgataccgtcgacctcgagggggggcccggtacccagcttttgttccctttagtggaggggttaattgc

SEQ ID NO: 1365 - DNA, 450 bp, Homo sapiens
  misc_feature 2, 3: n = A,T,C or G
gnnccctaacactacttagggcaattggagctccccgcggtggcggccgggggtaggatgggaagccgtggggcaagggaggttgcaggaagcccatccttcccctcctgcggcaggtacctcggccgctctagaactagtggatcccccgggctgcaggaattcgatatcaagcttatcgataccgtcgacctcgagggggggcccggtacccagcttttgttccctttagtgagggttaattgcgcgcttggcgtaatcatggtcatagctgtttcctgtgtgaaattgttatccgctcacaattccacacaacatacgagccgggagcataaagtgtaaagcctggggtgcctaatgagtgagctaactcacattaattgcgttgcgctcactgcccgctttccaagtcgggaaacctgtcgtgccagctgcattaatgaatcggcc

SEQ ID NO: 1366 - DNA, 450 bp, Homo sapiens
  misc_feature 1, 3, 380, 436, 450: n = A,T,C or G
ngncccgcccgatcgactacttagggcgaattggagctccccgcggtggcggccgcccgggcaggtaccctgcaggtaggcatttaaattggtgcaaccgctttggattgctgctttgtagtatctggtgcaactgaagatgaacatgccctgtgacacagcaaccgcacttctaggtcaataccctaattatattcttactgtggttcacaagaaggtatgtaagaggtcattgcctgagcactgtttagaataggggcaaactggaaatcctctaaatgtctgtcaatgaaggaatagataaattgtaatatgttcatataaaatactgcataaataagtgaaatttataaatgtacctcggccgctctagaactagntggatcccccgggctgcaggaattcgatatcaaagcttatcgaatacccgtccgancctgaagggggggn

SEQ ID NO: 1367 - DNA, 454 bp, Homo sapiens
  misc_feature 2, 3, 6, 7, 8, 9, 10, 14, 27: n = A,T,C or G
gnnggnnnnnggcngcgaatacgactnctatagggcgaattggagctccccgcggtggcggccgcccgggcaggtactgctggttcgggctgccataaaaagcaccacagacgacatggcttacaccacagaaactcatgttctcccaatcctggaagctgaaagtccaagatcaaagtgttgtctgggttggtttcttccaagacctctactgttggcttacagatgattgtattcagttcacatgatgttcttctatgagtgcctgtgtcgattttctgttcttataaagatatcagtcagattaaatgatggttcacccaaatgacttcatttcaccttaattacttctctaaaggctctatctccaaatacggtcacattgtgagtttctcaagggttaggacttcaacatgtattatttgagggagtggaacacaattcaaccccatta

SEQ ID NO: 1368 - DNA, 487 bp, Homo sapiens
  misc_feature 2, 6, 7, 11, 15, 174, 175, 185, 186, 187, 189, 190, 192,210, 211, 213, 216, 220, 222, 223, 225, 226, 227, 228, 229,323, 325, 326, 330, 332, 334, 335, 336, 337, 340, 377, 378,383, 385, 390, 392, 398, 400, 401, 402, 403, 422, 426: n = A,T,C or G
  misc_feature 436, 438, 440, 441, 442, 443, 445, 456, 471, 475, 477: n = A,T,C or G
gntagnncccnaccngaaacgactactatagggcgaattggagctccccgcggtggcggccgcccgggcaggtactttttttttttttttttttttttgttttttttttttttttttttttttttttttttttttttttttttttttttttttttttttttttttttttttttnntttttttttnnntnntnttttttttttttccccannanaancccntnntnnnnnaaaaaaagaacgtgaggacagggctcctgctgcgcaggcataaagcatccaagagtctgcacatacatgccacacactaaaaaaaaaaaaaaantnnagcncnannnnaantctggggggggggggaaaacttaaaaaaaaaaaaaannttttncnaaaananaaaaangnnnntaaaaaaaaaaaaaaaaangganttttttttcncnannnngngggcccctttnaaaaaaaaaaaaggngggnanccccccccgc

SEQ ID NO: 1369 - DNA, 539 bp, Homo sapiens
  misc_feature 2, 3, 4, 8, 14, 25, 113, 117, 118, 121, 123, 125, 127, 129,130, 134, 135, 142, 145, 152, 155, 156, 164, 167, 169, 189,190, 201, 202, 211, 238, 239, 270, 271, 292, 295, 302, 303,306, 314, 315, 321, 339, 346, 349, 359, 374, 388, 395: n = A,T,C or G
  misc_feature 396, 410, 414, 430, 432, 435, 439, 440, 442, 443, 447, 448,453, 473, 476, 480, 482, 486, 487, 493, 495, 500, 501, 510,530: n = A,T,C or G
gnnnaganggcgcngaatacgactnctatagggcaaattggagctccaccgcggtggcggccgcccgggcaggtactttttttttttttttttttttttttgttttttttttntttnnttnantnantnntttnnttaaatnatnaaggaanaannaaaaaaanaantnaaaaaaaaaaaaaaaaaaannaaaaaaaattnnaaaaaaaantaaaaaaaaaaaataaaaaaaaaaaannaaaaaaaaaaaaaaaaataaataaaaaaaanntaaaaaaaaaaaaaaaaaaanaantgaaatnnatnaaaaaaanntaatanaaaaaaaaaaacaaattnaaaaagntgngttaaaaatnttaaaaatatttttnaaaattaaaaaaancgaaaanncttttccaaaaaanaagnataaaaaaatccaaantnttnaaannannaaannggttntttaaaaaaaaaaaaaaaanagnaaanancccnnaaagancntcttnngggaaaaanttttataaaaaaataaaaanttaataaaa

SEQ ID NO: 1370 - DNA, 447 bp, Homo sapiens
  misc_feature 10, 308, 377, 417, 447: n = A,T,C or G
tcgatgcccnatacgactactatagggcgaattggagctccccgcggtggcggccgaggtacatcctggatggatgagaatgggcaccatattttttatgaatatatatttttcttttttttgttttctacagcaccaaagaaattcaaataggaaaaggagagttgagaattgggaatcaagaatcagccctgtttccatcttagccacaccaacttatatctttatgattttcaaagcttttgccatgtgattctgcccccacaaaggcatcggtatttcctaaatggtacctgcccggggcggcncgctcgaaataccgagcccggggagcattaaaagtgtaaaagccctggggggtgcccttaatggaggtngagcctaacctcacatttaaatttggcgttgcggctcacntgcccgcttttccaagttcggggaaacctn

SEQ ID NO: 1371 - DNA, 446 bp, Homo sapiens
  misc_feature 2, 3, 4, 7, 8, 428: n = A,T,C or G
gnnnagnnggccgctatacgactactatagggcgaattggagctccaccgcggtggcggccgaggtacgcgggactgttattctctccaaagcttacccagcaataggaactcccataccatttgataaaattttgtataacaggcaacagcattatgacccaaggactggaatctttacttgtcagataccaggaatatactatttttcataccacgtgcatgtgaaagggactcatgtttgggtaggcctgtataagaatggcacccctgtaatgtacacctatgatgaatacaccaaaggctacctgggatcaggccttcaggggagtgcccatcattcgatctcacaggaaaaatgacccagggtgtgggctccagctttcccaatgcccgagtcaaaatgggcctattacttcctcttggagntatggtcccacttcctct

SEQ ID NO: 1372 - DNA, 445 bp, Homo sapiens
  misc_feature 2, 4, 5, 11, 17, 20, 33, 35, 43, 149, 189, 194, 227, 230,259, 261, 273, 311, 313, 323, 332, 359, 364, 367, 392, 395,402, 409, 428: n = A,T,C or G
gngnnccctcnctactnctntagggcgaattgnanctccccgnggtggcggccgcccgggcaggtaccgttcctccagtgcccagagatgctctccgcaccaagccacagatgtggaggaggcaggtagggggtcaaagaggggtggtntcggttattcaggactttttttttttcttaaatatcctgngcttntttcaatcatttgaaggtaaaaccaggtcctgngantggtaaactgatttttggttcttatgaangnattattttctgngtaaatatttgttaacttggtgtccttgcagggtagancnatcagcgatngctttcttnttgccaccatggttgctcctggtcatntttanacnctaatgatatgtggacctattaaanatncttatcncctctgntaacgtatttgactatatnctggcatccaatacctt

SEQ ID NO: 1373 - DNA, 451 bp, Homo sapiens
  misc_feature 1, 4, 10, 390: n = A,T,C or G
ntgncgccanatacgactactatagggcgaattggagctccaccgcggtggcggccgaggtacgcgggtgggcagccggagaacaactacaagaccacgcctcccgtgctggactccgacggctccttcttcctctatagcaagctcaccgtggacaagagcaggtggcagcaggggaaccgtcttctcatgctccgtgatgcatgaggctctgcacaaccactacacgcagaagagcctctccctgtccccgggtaaatgagtgccgacggcccgctctagaactagtggatcccccgggcctgcaggaaattcgatatcaagccttattcgatacccgtcgacctcgagggggggggcccccgggtaccccaagcttttgttcccttntagtggaggggttaaattggcgccgcttgggccgtaaattcaatggtcattaagcttgttt

SEQ ID NO: 1374 - DNA, 446 bp, Homo sapiens
  misc_feature 4, 380, 441: n = A,T,C or G
ggcngctaaacactactatagggcgaattggagctccaccgcggtggcggcccggtacccagcttttgttccctttagtgagggttaattgcgcgcttggcgtaatcatggtcatagctgtttcctgtgtgaaattgttatccgctcacaattccacacaacatacgagccgggagcataaagtgtaaagcctggggtgcctaatgagtgagctaactcacattaattgcgttgcgctcactgcccgctttccagtcgggaaacctgtcgtgccagctgcattaatgaatcggccaacgcgccggggagaggcggtttgccgtattggggccgctcttcccgcttcctcggctcacttgactcgctgcgcctcggttcgnttcggctgccgggcgaaggcggtaattcagctcactcaaaagggcgggtaaattaccggtntatcc

SEQ ID NO: 1375 - DNA, 462 bp, Homo sapiens
  misc_feature 2, 3, 4, 6, 7, 8, 18, 24, 353: n = A,T,C or G
gnnnannngccaccacanatacantatagggcgaattggagctccccgcggtggcggccgaggtacgcgggataattaacaatttgtggaaattgaaaaagcataaactgtgttatttgattagtaatatgttcccttaaaattcattttgaggtgtatgttatacacacagtaaatttttgttcaggaatgacttgctcattctgtgtttttaaaaataggaaatgaggcatagtgagtcatcattacatcaattaaccaaaaaatatttcatcccctccgtcactgaaattatctacttcagccacctttcttattctccgtgttagggagggccacgtttatgggacttntttaattttccatgtgcccattatttgtcccacttacccgggcagttagcccaaaaggctaggcctgtttcagttcccacaggaaggagaccaggtggctctgcccatg

SEQ ID NO: 1376 - DNA, 443 bp, Homo sapiens
  misc_feature 8, 18: n = A,T,C or G
gcggcccntatacgactnctatagggcgaattggagctccccgcggtggcggccgaggtacgcgggggtgcgattcgcatattccgcgagatcatcaagccagcagagaaatccctccatgaaaagttaaaacaagataagcgctttagcaccttcctcagcctacttgaagctgcagacttgaaagagctcctgacacaacctggagactggacattatttgtgccaaccaatgatgcttttaagggaatgactagtgaagaaaaagaaattctgatacgggacaaaaaatgctcttcaaaaacatcattctttatcaccctgacaccagggagttttcattgggaaaagggattttggaaccctgggtggtttacctaacatttttaaaaggacccacacaagggaagccaaaaattcttttcttgaaaggaaggtaaaat

SEQ ID NO: 1377 - DNA, 451 bp, Homo sapiens
  misc_feature 2, 4, 6, 7, 386, 388, 445: n = A,T,C or G
antngnncgccataatacgactactatagggcgaattggagctccccgcggtggcggccgaggtacgaaagagagacaaaagggttctcttggaaacaagaagagtgactccagatgtggcctgaataattgccatgttaagttaatgcaaaagatcagaacagggctacatttgcacaggcagtttctctccgggccgtagttttcactgatgatcacctttcacagcattttccccaaccagcatttcacttagtcttctctatacccagcacctcccccggcacccccggcaagcccacttatcacttcccgactttccaacgtggcattcccgtggaggatcctgttccacattagggcgaaagcagggagaaacacctggngnagccagccagggatggggttttgggaaaggagccatgccctctgggaaaccaccagntttcct

SEQ ID NO: 1378 - DNA, 449 bp, Homo sapiens
  misc_feature 1, 3, 4, 5, 11, 12, 357, 375, 442: n = A,T,C or G
ngnnnaccccnnatacgactcactatagggcgaattggagctccaccgcggtggcggccgcccgggcaggtacgcgggagcagaaatgattgcactattgataaattccgaaggaaaaattgtccatcttgtcgtcttcggaaatgttatgaagcagggatgactctgggagcccggaagctgaagaaacttggtaatctgaaactacaggaggaaggagaggcttccagcaccaccagccccactgaggagacaacccagaagctgacagtgtcacacattgaaggctatgaatgtcagcccatctttctgaaatgtcctgggaaagcccatttgaagccaaggtgtaagatgtgntgcctggacaccgacaancaacccaggccccgacttcctttggcaggcctttggcttctctagccctcactggaactgggggagnagaagac

SEQ ID NO: 1379 - DNA, 453 bp, Homo sapiens
  misc_feature 3, 8, 22, 40, 188, 221, 256, 311, 324, 328, 342, 367, 370,391, 415, 416, 427, 449, 453: n = A,T,C or G
atnccacnacataatacaactnctatagggcgaattgganctccaccgcggtggcggccgcccgggcaggtacttttttttttttttttttttttttttgggtttctggtaacttcaaagctccctaagtcactaacctttcttcgcccctcctccactaaggggctgtcaggaagcatcaatttcanaaaatcttctttagacagaacatattgagtctntgcaacagcatctcccaccactgtctgatgctganttgctgtggacatgacgcccaactcactatacatcccgggacattcagtcacttnaggctcctcgggncggnggggcctgccctcncgatttcttccagcccgatggacanaanttgttcacttggccccttgtnatgtcggaaaagggcttgggacannggaccccgggnaacactgataggtcccgctgcntgtn

SEQ ID NO: 1380 - DNA, 458 bp, Homo sapiens
  misc_feature 2, 3, 4, 5, 6, 7, 11, 23, 24, 26, 29, 325, 428: n = A,T,C or G
gnnnnnngatnttgggagtcacnncntanggcgaattggagctccccgcggtggcggccgaggtactttaatagctcaaactcagagtcatcgtgctcccaattccaaagagattcctaaaagaggcaacttcggccgctctagaactagtggatcccccgggctgcaggaattcgatatcaagcttatcgataccgtcgacctcgagggggggcccggtacccagcttttgttccctttagtgagggttaattgcgcgcttggcgtaatcatggtcatagctgtttcctgtgtgaaattgttatccgctcacaattccacacanccataccgagcccggggaggcataaaagtggtaaaagcccttgggggtgccctaatggagtggagctaacctcaccatttaatttggcgtttggcgcctcacntgccccgctttccaagttcggggaaacctg

SEQ ID NO: 1381 - DNA, 450 bp, Homo sapiens
  misc_feature 2, 4, 354, 438: n = A,T,C or G
angncctaacactacttagggcgaattggagctccccgcggtggcggccgaggtacaagtggataccccagaatgaccttctaggtcatccaaaaaccagagcttttataactcatggtggagccaatggcatctatgaggcaatctaccatgggatccctatggtgggcattccattgttttttgatcaacctgataacattgctcacatgaaggccaagggagcagctgttagattggacttcaacacaatgtcgagtacctgcccgggcggcgcgctctagaactagtggggatcccccgggcctgcaggaaattccgatatcaaggcttatcgatacccgtccgaccctncgaggggggggccccgggtaccccagctttttgtttcccttttaagtggaggggtttaaattgccgccgccttggccgttaaancatgggtcatta

SEQ ID NO: 1382 - DNA, 447 bp, Homo sapiens
  misc_feature 2, 3, 4, 5, 6, 8, 397, 415, 431, 444: n = A,T,C or G
gnnnnngncgcgactatacactactatagggcgaattggagctccccgcggtggcggccgaggtacgcggggagtcttcactgctctgcgtcctgtgctgataaaggctcgccgctgtgaccctgttacctgcaagaacttggaggttcacagctaagacgccaggaccccctggaagcctagaaatgggaccactgacatttagggatgtgaaaatagaattctctctagaggaatggcaatgcttggacactgcgcagcggaatttatatagagatgtgatgttagagaactacagaaacctggtcttccttggtattgctgtctctaagcccaggacctggatcaccctggcctgggaggcaagggaaagggagcccctgggaatcctggaagnagacatggagatgggttngacaaaacccccagtntattggtgttctncat

SEQ ID NO: 1383 - DNA, 445 bp, Homo sapiens
  misc_feature 2: n = A,T,C or G
gncgccactatacgactactatagggcgaattggagctccccgcggtggcggccgaggtacccccagtgatgggacatggtcgcgctggcggtcggggcagggcaggaatcggcaccgatctggcggcggcggcttgggcgcctgcactgtgtgtccccgcgtacgcggggaattcagaaatcactacaagcagcattaagactgaagttggaatattctgttgaccataaaaccttgatatcattctgtgtatatagaatgtaaaaggaatattacagtgttaactgccatatatgtaatatacacaaactcaattagcattgtaaatggcccaaaatggcattcccccatgctttttctggtttttcaaaaaaaattggaaaaaaaccaaaatcaaactctttatccccaaacaggctgccctaatttttaagggagttctga

SEQ ID NO: 1384 - DNA, 436 bp, Homo sapiens
  misc_feature 175: n = A,T,C or G
gccctaacactacttagggcgaattggagctccccgcggtggcggccgaggtacgcgggaccagtcttgagaggtggccagccagactgcctgtccacatgcgtgtcagcacatacagccgcttcctggaagccgcctggaatgtcttcacggcagcgttttgctcacacagcangcttttgcacgccccaggcagccccgactgctgaaatccaacttgagctggctggtggtccctggatcctagagcccttcacttcgggttactccctctttcttgcctctatttcttagttggaagaaaataaactcacaaattattggtgcagtaattttttcccgggggaaaaggtaaaaggcctcagggaatgccccaccgcccttttctttccaaaggcctttgtctctggagaccctcttaaggttcttaaggatt

SEQ ID NO: 1385 - DNA, 425 bp, Homo sapiens
  misc_feature 1, 132, 139, 141, 145, 154, 168, 186, 188, 203, 217, 231,234, 244, 272, 287, 292, 338, 359, 377, 390, 396, 414: n = A,T,C or G
nccctaacactacttagggcaattggagctccccgcggtggcggccgaggtacttttttttttttttttttttttttttattttttttttttttttttttttttttctttgggcaacactttattgggaaanatttacncncggngacctgtcntaggccaagcgatnaaaaaagggccccaggancnctggggtcccgaggnggctcaaatggaanccatgggacggccnctntaaaactagnggatcccccgggctgcaggaattcgatntcaagcttatcgatncccgncgacctcgaggggggggccccggtacccagcttttgttccctttantgaggggtttaattgcccccntgggcgtaatcatgggtnattaggctggttntcctgngtggaaattgttattccnctcacaatttc

SEQ ID NO: 1386 - DNA, 443 bp, Homo sapiens
  misc_feature 1, 10, 344, 360, 388, 432: n = A,T,C or G
nggccctaancactacttagggcgaattggagctccccgcggtggcggccgtttgagaagccagcgctcacccacccggggtctctgtgcattgacctttgggtgctgacttggagaaaagcacaaacacgaccagtcccatcctggctcccgtggggcttcttctatctacgcattgtatcgactgcattagttggactaagatgatgactcagttaaaggaggagacaaatgctgactgtctaagcaagaatggcccaagctggcaagaaaaagcacacttgcatacatcccgcgtacctcggcccgctctagaactagtgggatcccccgggcctgcaggnaatttcgatatcaagncttattcggattacccgtccgacctcgnaggggggggggccccggtaccccaagctttttgttcccttttantggaggggtta

SEQ ID NO: 1387 - DNA, 448 bp, Homo sapiens
  misc_feature 1, 2, 4, 335, 344: n = A,T,C or G
nntnccctaacactactatagggcgaattggagctccaccgcggtggcggccgcccgggcaggtactgagtcaaggacgtctttaacgtcatggacggctcctttacccacgctttctagatcttcgactgcatcttttcctagttttccgagtccccccacagctttttttgctccgtctaggcctttttccagaaggctggatctctgcttccttggctttggtgcctgtctggctaaccctgggtcttcacctgcattttccttttgagctgctgatgcttcatggcaagggttcccccgatcctggggcaagccccgcgtaaccctcggcncgctctagnaacctaggtgggattcccccgggcctgcaagggaatttcggatatcaaagcttatcggatacccgtccgaccttcggagggggggggcccccggtaccccaaaa

SEQ ID NO: 1388 - DNA, 438 bp, Homo sapiens
  misc_feature 355: n = A,T,C or G
gggccctatcactacttagggcgaattggagctccccgcggtggcggccgcccgggcaggtacgcgggactcagaagcttggaccgcatcctagccgccgactcacacaaggcaggtgggtgaggaaatccagagttgccatggagaaaattccagtgtcagcattcttgctccttgtggccctctcctacactctggccagagataccacagtcaaacctggagccaaaaaggacacaaaggactctcgacccaaactgccccagaccctctccagaggttggggtgaccaactcatctggactcaggacatattgaaggaagctctatataaaatgccaagacaaggcaacanaacccttggatgaattatttcatcactttggaatgaagtgccccaccacagtcaagccttttaaaggaaaaggtggtttgctg

SEQ ID NO: 1389 - DNA, 446 bp, Homo sapiens
  misc_feature 1, 3, 5, 6, 7, 13, 90, 167, 190, 193, 330, 401: n = A,T,C or G
ntntnnnccctancactacttagggcgaattggagctccccgcggtggcggccgaggtactttttttttttttttttttttttttttatngcaaggactgaggctggagctccacttaagtggtttgatccaaactggaaaagcaacttccagcaaggaacatccanataaaccctttgcggaacaaaanagngggccccctcctgaccacaaagatggaacccgctctccttgatacaatccacgaatttacatcttttaatcggctgtccactcaggcctagggcgtagtcagaaaatgacaccctccacacattgtggtaaggcagnaaattaagcctcaaacccaccgggtgaccctatgtaggttcctggggttttgacctgggggagccaccttntcaaacttccttataccttcccgaccgaaaactcactgggagctt

SEQ ID NO: 1390 - DNA, 436 bp, Homo sapiens
  misc_feature 1, 4, 325, 326, 360, 407, 436: n = A,T,C or G
nagngccctaacactacttagggcgaattggagctccccgcggtggcggtcgttcggctgcggcgagcggtatcagctcactcaaaggcggtaatacggttatccacagaatcaggggataacgcaggaaagaacatgtgagcaaaaggccagcaaaaggccaggaaccgtaaaaaggccgcgttgctggcgtttttccataggctccgcccccctgacgagcatcacaaaaatcgacgctcaagtcagaggtggcgaaacccgacaggactataaagataccaggcgtttccccctggaagctccctcgtgcgctctcactgtnncccgaccctgcccgcttaccgggatacctggtcncgccctttctcccttcggggaaggcgtgggcgcctttcttcattaanctcaccgctgtagggtattctcagttcgn

SEQ ID NO: 1391 - DNA, 435 bp, Homo sapiens
  misc_feature 305, 322, 348, 431: n = A,T,C or G
gccctaacactacttagggcgaattggagctccccgcggtggcggccgaggtaccaccatgtgggactccaggcaccatctgttctccccagggacctgctgacttgaatgccagcccttactcctctgtgttgctttgggccacctggggctgcaccccctgccctttctctgccccatccctaccctagccttgctctcagccaccttgatagtcactgggctccctgtgacttctgaccctgacacccctcccttggattctgcctgggctggagtctagggcctggggctacatttggctntctgtacctgcccgggncggccgctcgacgggttatccacagnaatcaggggggataaccgccagggaaaggaacatggtgaagccaaaaagggccaggcaaaaagggccaagggaacccgtaaanaagg

SEQ ID NO: 1392 - DNA, 437 bp, Homo sapiens
  misc_feature 2, 4, 10, 282, 333, 408: n = A,T,C or G
tncnccgaancactactatagggcgaattggagctccccgcggtggcggccgcccgggcaggtactatgatccaaacaccaaaagctgtgcaagattctggtatggaggttgtggtggaaacgaaaacaaatttggatcacagaaagaatgtgaaaaggtttgcgctcctgtgctcgccaaacccggagtcatcagtgtgatgggaacctaagcgtgggtggccaacatcatatacctcttgaagaagaaggagtcagccatcgccaacttgtctctgtagnaagctccgggtgtagattcccttgcactgtatcattttcatgctttggatnttacacctcggaactcggggaggggaacaatcctgcctgcatggaccctattcaagttatgggtggctaatgtgntctggtgggaccctcgctctctgtctcca

SEQ ID NO: 1393 - DNA, 438 bp, Homo sapiens
  misc_feature 2, 3, 10, 140, 147, 173, 244, 262, 332, 379, 383, 396: n = A,T,C or G
tnnccctaancactacttagggcgaattggagctccccgcggtggcggccgcccgggcaggtactttttttttttttttttttttttttttctgcccaacgaaattatttattgctgtcaggaggcccaggaccctccanactgaanagtccatgggcccctgtgcatgtganagctacacagggaatcgctgtcaccttccaaggataagcagacagggccacacatgccatggccactcggngcacaggggccaggctgngcccagagacccaggcatccagcttgcattccaagttccttactgagagccccactgcttgatggcaagnctctaggcattgcttggggatttgggtgacttttgcctcattgaaanaaanaatgttctggggnggtctgtaaggggacaattggatcattcaagggaaggggccc

SEQ ID NO: 1394 - DNA, 435 bp, Homo sapiens
  misc_feature 2, 3, 9, 357, 387: n = A,T,C or G
gnnccctancactacttagggcgaattggagctccccgcggtggcggccgaggtactcagaagtgtcctggaatggggcccatgagatggttgtctgagagagagcttcttgtcctacattcggcgggtatggtcttggcctatgccttatgggggcggccgctctagaactagtggatcccccgggctgcaggaattcgatatcaagcttatcgataccgtcgacctcgagggggggcccggtacccagcttttgttccctttagtgagggttaattgcgcgcttggcgtaatcatggtcataggctgtttcctgtgtgaaaattgttatccgctcaccaattccacacaacattncgaagcccggggagccattaaaagtggtanaagccctggggggtgccctaatgaagtggagcctaactcacatttaaa

SEQ ID NO: 1395 - DNA, 438 bp, Homo sapiens
  misc_feature 2: n = A,T,C or G
tnccctaacactacttagggcgaattggagctccccgcggtggcggcctgacactgcagtgaagggcatgctaagtctaggcacaggtcctggcagcaggaaggagacagagcctctcccaggcacacatccgctctagaactagtggatcccccgggctgcaggaattcgatatcaagcttatcgataccgtcgacctcgagggggggcccggtacccagcttttgttccctttagtgagggttaattgcgcgcttggcgtaatcatggtcatagctgtttcctgtgtgaaattgttatcccgctcacaaattccacacaacataccgaagcccggggagccataaaagtggtaaaagccctggggggtgccctaatgaagtggagcctaacctcacatttaatttggcgttggcgcctcactgccccgctttccag

SEQ ID NO: 1396 - DNA, 439 bp, Homo sapiens
  misc_feature 337: n = A,T,C or G
gccctatcactacttagggcaattggagctccccgcggtggcggccgcccgggcaggtacaccaccaaagaccaataataaaaaagaaggttccagggagggcatgacctctgaaattccccatgatctttgggtgtttaaatcccattttcccttctgagtcattggtcatccttggtctcagtagatcaggcacgttagaactgtggcagaagagataagaatgaagcagccaaaattgagcctttgcttcttaggtaatgctgaaaagtttcacacttttacctctgcctgagtcccccgccgaatcattgcgttacctcggcccgctctaagnaactagtgggatccccccgggcctgcagggaatttccgatattcaaagctttattcggatacccgttcggaccttcgtagggggggggcccccgggtaccca

SEQ ID NO: 1397 - DNA, 442 bp, Homo sapiens
  misc_feature 2, 3, 9, 16, 229, 329, 346, 402, 438: n = A,T,C or G
tnnccacgnatcactnctatagggcgaattggagctccccgcggtggcggccgaggtacgcgggggggaaacatgcataagtgccaatcctttgaatgttccacggaaacactggtggacagattctagtgctgagaagaaacacgtttggtttggagagtccatggatggtggttttcagtttagctacggcaatcctgaacttcctgaagatgtccttgatgtgcanctggcattccttcgacttctctccagccgagcttcccagaacatcacatatcactgcaaaaatagccattgcatacatgggatcaggccagtggaaatgntaaaggaaggcccctgnaagctgatgggggtcaaaatggaaggtgaaattcaagggctggaagggaaaatagncaaaattcaccctacacaggttctgggagggatggnttgc

SEQ ID NO: 1398 - DNA, 452 bp, Homo sapiens
  misc_feature 1, 4, 5, 6, 8, 316, 349, 353, 365, 406, 417, 426, 427: n = A,T,C or G
ntannngnccctaacactactatagggcgaattggagctccccgcggtggcggccgaggtactttttttttttttttttttttttttttctaaacttctcttctcacttcatttcattcatttgatcttcaatcactgataccctttcttccagttgatcgaatcggctactgaggcttgtgcattcgtcacatagttctcgtgccttggttttcagctccatcaggtcctttaaggacttctctgcattggttattctagttagccattcatctaattttttttcaaggtttttaacttctttgccatgggttcnaacttcctcctttagcctcaaagtagtttgatncgtnctgaagcccttntttttctcaacttcacccaaaaggtcatttctccatcagcntttgtttctgnatgcctggnngaagggaagccttgccgtttccttt

SEQ ID NO: 1399 - DNA, 439 bp, Homo sapiens
  misc_feature 2, 3, 4, 5, 8, 9, 16, 369: n = A,T,C or G
gnnnnagnnacgccgnaacactactatagggcgaattggagctcaccgcggtggcggccgtgtcctcagatctcaggctgctcagctccatgtaggctgtgtctgtagatgtgtcctcggtcatggtgactctgccctggaacttctgtgcgttgattgtttcaccatcttcaggatcaaaacctcccttccactcaagcccttttccaggagcctgtcgcacccagtgcatggataattcagtgagggtgtatccggaaaccttgcaggagaccttcactgaggccccaggcttcttcacctcagccccagactgtacctcggccgctctagaactagttggatcccccgggctgaaggaattcaatntcaagccttatcgatacccgtccgaccttcgaggggggggcccgggtacccaacttttgtttccctttag

SEQ ID NO: 1400 - DNA, 441 bp, Homo sapiens
ggcgccgaatacgactactatagggcgaattggagctccaccgcggtggcggccgcccgggcaggtaccaaggcttagaggtcagactgaggaaacaaatgcttcacagagtcctcaacccatgaccatgagttctttaataagtaagtgtgtgtgtgtgtgtatgtaaaatatgtgaggccctctaacgcctcttttctacggtagaacaaagagaaacttcagtttttgccatcaatttattaaaataaacatgtatagcaggtttcaacaattgtcttgtagtttgtagtaaaaagacataagaaagagaaggtgtggtttgcagcaatccgtagttggtttctcaccataccctgcagttctgtgagccaaaggtcttgcagaaagttaaaataaatcacaaagactgcttgtcattatattaattgctaggaaagc

SEQ ID NO: 1401 - DNA, 949 bp, Homo sapiens
  misc_feature 53, 85, 149, 201, 274, 299, 345, 347, 362, 376, 386, 413,456, 461, 474, 531, 545, 559, 567, 607, 631, 654, 703, 717,760, 768, 796, 804, 829, 847, 862, 925, 928: n = A,T,C or G
cgcgtaatacgactcactatagggggcgaaattggggaagcctccacccgcgngtggggcgggcccgcccgggggccagggttanccaattggggtggggcccaaattggaattttggaatggggttaaaagggggaagggggaatccngttttgaaccctccggttctggtttaattggtaaaaaaagggaattgcccgntaagggggaattgggggaagggggccggaattggaagggaaccttaatggaattgaattgggccgggggttanggggaattaggtttccaagaaaccnggttttttcttaattttttcccttggaaggcccggttccttggaangnaattgtttaaggttnattttaaggttttnaagttttttnggtttggtggaaaggttggttttaaangggaaaaaaaaggggggccaattaaccaaagggggaacttaanggggnaaaaggcccaagnaattaaaaggggggaaaaaaaaattggaaattttaatttggaaagggggggcccggnttgggaattccaanttggaaaaaaaggnggtttggnaattaaaaaagggcccttcctttttccttaatttggaaantaaggggggggggggaaaaaaggnttaaaagcccggtttcctttttnggtttaaaggaaaacccccctttaaccctttttgggccgggccctttgncccaatttggtttnggccccccaattttttaaaaaagggaaatttaatttaatttangggggggnaaattttttttaaagggccccctttaanttaaaaanttttttttaaaaaaccctttttttnggaacccaaaaaaaaagnttttttaattttggnaaaaaaaattgggggggggtttttttttttccccaaaaatttaaccccctttttcccccccgngcnggtttaaccccttttccgggg

SEQ ID NO: 1402 - DNA, 437 bp, Homo sapiens
cttagggcgaattggagctccccgcggtggccggccgcccgggcaggtacctgtcctagcagtggcaatcttttggggtcccctaaaataaagaaaggcttatctccacactgtaatggtagtgattgtggatattcatctagcatggaagggagtgaaacaggttctcgggagggttcggatgttgcctgcactgaaggcatttgtaatcatgatgaacacggtgatgactcttgtgttcatcactgtgaagacaaagaggatgatggtgatagttgtgttgaatgttgggcaaattctgaagagaacgacacaaaaggaaaaaataaaaagaagaagaagaaaaacaagatactgaaatgtgatgaacatatccagaagcttggaagctgtattacagatccaggtaatcgagagacctcaggaaatacccatgc

SEQ ID NO: 1403 - DNA, 507 bp, Homo sapiens
  misc_feature 307, 324, 357, 371, 373, 384, 395, 403, 417, 420, 421, 423,428, 463, 476, 480, 482, 487: n = A,T,C or G
ccgtaatacgactcctatagggcgaattggagctccccgcggtggcggccgcccgggcaggtactgcggcgggtaggcctaggattgtgggggcaatgaatgaagcgaacagattttcgttcattttggttctcagggtttgttataattttttatttttatgggctttggtgagggaggtaggtggtaagtttgtgtttaatatttttagttgggtgatgaggaataagtgtaaggagtatggggggtaattatggtgggccataccggtaagtatttagttggggcatttcactgtaaaagaggntgttggttctcttaatntttaactttaaaaaggttaatgcctaaaattanccttacagtgcccncnttaccctcggncccgctttaanaacctaantgggatcccccccnggnntncatgnaaatttcccatattcaaagccttaattccgattanccggtcttaaccntttnanggggngggggccccccggttaacct

SEQ ID NO: 1404 - DNA, 466 bp, Homo sapiens
ctaacactacttagggcgaattggagctccccgcggtggcggccgaggtacgcggggatccttaaagaaggtgtggggtctttcccaacctgaggatttctgaaaggttcacaggttcaatatttaatgcttcagaaagcattgtgaggttcccaacactgtcagcaaaaaccttaggagaaaaacttaaaaatatatgaatacatgcgcaatacacagctacagacacacattctgttgacaagggaaaaccttcaaagcatgtttctttccctcaccacaacagaacatgcagtacctgcccgggcggccgctctagaactagtggatcccccgggctgcaggaattcgatatcaagcttatcgatacccgtcgaccttcgagggggggcccggtacccagctttttgttccctttagtgaggggttaattgcgcgcttggccgtaatcatgggtcattagctt

SEQ ID NO: 1405 - DNA, 609 bp, Homo sapiens
  misc_feature 71, 80, 110, 113, 118, 139, 156, 164, 180, 239, 259, 309,360, 371, 382, 389, 394, 400, 407, 447, 489, 506, 516, 524,526, 543, 552, 601: n = A,T,C or G
gtaatacgactcactataggggccgaattggagctccacccgcggtgggcggcccgagggtaccttggttngcttgggtngtagtggaaatgaaatgccttgatgaaatngcnttgcnccatttttgaaagagagaatnctcaaacgtgtcacttntgtttctngccaagcaactgtgantcctgacctgtgcacactttctgggttggggattatttctgggtttctacttcctgttngaagaatgttggcatggaanagtggtaagtttgaagaagatgagtgccgggggccttcatctaatccctnggaaaattggtctttttccccaccaattccccttggacaccaagaaattantggaagcccantacaagggaanttcttgnaaagnaaaatngggggtncttctttggcccacccttccccaagttaaaaaaggaattnatttttttttttttaaaaaaaaaaaaaaaggggtaaaaaatncttaaaaacctttgggnggcctttttnaatccttngnataattggaaaaaaaantaaccaggnaaccaggcccaaattaaggaaaaaaaaaaatttttaaaaaaaaaatttnaaaccttg

SEQ ID NO: 1406 - DNA, 489 bp, Homo sapiens
cgcgtaatacgactcactatagggcgaattggagctccccgcggtggccggccgcccgggcaggtactggatgtcaggtctgcgaaacttcttagattttgacctcagtccataaaccacactatcacctcggccatcatatgtgtctactgtggggacaactggagtgaaaatttcggttgctggcaggtcccgtgggaaaatcagtgaccagttcatcagattcatcagaatggtgagactcatcaagactggtgagaaatcatcagtggtcatctaccatcatcagaagtccgttccgaagtcaattgggaagtcctgggctgtccacatgggtccgtcatcatcttcatcatcccatatcatccattgtgggtcattggctttttcgttgggaccttacttggaaggggtctctttgtttaaagtcatttgggtttctttcaagaggacaccagcatttctgtgggggctagggagaattctgct

SEQ ID NO: 1407 - DNA, 466 bp, Homo sapiens
  misc_feature 3: n = A,T,C or G
ccnaaacactacttagggcgaattggagctccccgcggtggcggccgcccgggcaggtacttttttttttttttttttttttgggcttttatcctgtttgttgttctctgagcttcctgaatctgtggtttcgtgtcacatattaatttagaaaaatctcattcattattgctttgaatatttcttctattcctttctctctttcctctccttctggggttccactatgcatacttacatcttttatagttgtcccactgttcttggatattctgttccttttttattcagtctttttccctttgctttcatttttggaagtttctcttgaaatatactgaagctccagattctttcctcacccacatccagtctgctaatgaggcttcaacaccatgcttcatttttggtaaggtttcttgacttctagaatttttatttggattctttcttaagactttccatt

SEQ ID NO: 1408 - DNA, 433 bp, Homo sapiens
  misc_feature 2, 90, 108, 111, 212, 251, 279, 297, 320, 343, 351, 376,392, 410, 424, 430: n = A,T,C or G
cnatcactacttagggcgaattggagctccccgcggtggcggccgcccgggcaggtactttttttttttttttttttttttttttctcgnatcttataggccaggcgnggnggctcacgcctgtaatcccagcactttgggaggtcgagacaggcggatcacgaggtcaggaaatcgagaccatcctgaccaacatggtgaaaccccgtctntactaaaaatacaaaaaaattagccaggcgtggcggcanacacctgtagtcccagctacgcaactgngccacctcagagaagtanatttttaaacaaacccaattttntcttgctgttaacaacactgaanactagtancagaggagtgaaagtgtgggttaanagccttaaaaacttgngggaaaagggctcgatgnccagttggagagcnctttanttt

SEQ ID NO: 1409 - DNA, 428 bp, Homo sapiens
  misc_feature 4: n = A,T,C or G
ggcnattggagctccccgcggtggccggccgcccgggcaggtacagaagggccatgctgttattactcttacacaaggaggcagccctcgagccacagggtccagctgttggctataatagcctaccggtctctgatgatcaccatgtttctggaattcaagccaggaagaagcagcaatctgtcttctggattaaaactgaagatcaacctactttcaacttactaagaaaggggatcatggacattgaagcatatcttgaaagaattggctataagaagtctaggaacaaattggacttggaaacattaactgacattcttcaacaccagatccgagctgttccctttgagaaccttaacatccattgtggggatgccatggacttaggcttagaggccatttttgatcaagttgtgagaagaaat

SEQ ID NO: 1410 - DNA, 692 bp, Homo sapiens
  misc_feature 4, 5, 8, 12, 18, 20, 21, 23, 24, 26, 27, 30, 32, 33, 35,36, 41, 46, 47, 48, 52, 53, 68, 76, 77, 78, 81, 83, 93,107, 109, 111, 116, 121, 122, 126, 127, 129, 133, 268, 292,303, 364, 370, 375, 376, 388, 395, 399, 402, 417, 478, 493: n = A,T,C or G
  misc_feature 508, 516, 524, 530, 540, 550, 552, 556, 565, 571, 572, 576,584, 591, 595, 598, 600, 638, 640, 647, 650, 664, 666, 668,673, 684, 691: n = A,T,C or G
tttnnagntttnaaaaantnntnnannttntnnannttttnaattnnnaaannattttctttttgtanaatttttnnnttntnataaaattgntgttataattttanangnttggnttttnncccnnantacnactcactatagggcgaattggagctccaccgcggtggcggccgcccgggcaggtactttttttttgttttttttttgtttgtttttttgttttttgagatggaatttcgctcttgttgcccaggctggagtgcantggcgtgatctcagctcaccgtancctcctgcttnagccctcccaagtaagctgggattacacggtgccattgcacactcatgcctgggactaatngtatangtacnnttgtattaaatntttttgntatnttnttcctagaaggacgngtagttttcctccattgtatgaatcaggggcctgggttctccgaaattttcccaacccttnaaggttggattcacngcccaaccctcaagnccttcccncaagtagnttggcntgggggtatntaactagggncnttgnaacccaacncggtanncccncaaacttnattgccntggntgntntttttttcttttaaaaaataaaactttggtggcctttngnctttaantcnatacttggtacaangnangccantcttttaattncaacaanc

SEQ ID NO: 1411 - DNA, 437 bp, Homo sapiens
  misc_feature 9, 363, 380, 382, 429: n = A,T,C or G
ctatcactncttagggcgaattggagctccccgcggtggcggccgaggtacctgtgaattggacatctgttgtttgcagatgtaattaagatgggtcatacttaagtagtgtgggcctctaatccaatgtgactggagtcctactaagggagcagggtcagaggcagacatgggagaatgccatgtgatgacggaggctgagattgaagtgttgcaactgcaatccaaggaatgccaacatttggtggccaccatgacaaggtagaaggaggcaaggaaggctccaaccagtgtctcagaggaagcatggccctggtgacatgctgagtttacgcttccagcctccagagctataagaaggtnaaattgtctgttttctntnggttccctgttacagcagccttaaaaaaatcatttgcaaatattttnacctacaa

SEQ ID NO: 1412 - DNA, 410 bp, Homo sapiens
  misc_feature 5, 410: n = A,T,C or G
gagcnccccgtaatacgactcactatagggcgaattggagctccaccgcggtggcggccgaggtaccgcattcctacttcattgcccctgatgtaactggactcccaacaatacccgagagtagaaatcttacagaatattttgttgccgtggatgtgaacaacatgctgcagctgtatgccagtatgctgcatgaaaggcgcatcgtgattatctcgagcaaattaagcactttaactgcctgtatccatggatcagctgctcttctatacccaatgtattggcaacacatatacatcccagtgcttcctccacacctgctggactactgctgtgccccaatgccatacctgattggaatacactccagcctcatagagagagtgaaaaacaaatcattggaagatgtn

SEQ ID NO: 1413 - DNA, 854 bp, Homo sapiens
  misc_feature 564, 649, 653, 673, 679, 694, 702, 712, 719, 722, 733, 744,749, 760, 786, 798, 836, 849, 854: n = A,T,C or G
gactactatagggcgaatcggagctccccgcggtggcggccgcccgggcaggtacgcggggaatggggaaagacaatcattgaatacaaaacaaataagccatcacgcctgcccttccttgatattgcacctttggacatcggtggtgctgaccaggaattctttgtggacattggcccagtctgtttcaaataaatgaactcaatctaaattaaaaaagaaagaaatttgaaaaaactttctctttgccatttcttcttcttcttttttaactgaaagctgaatccttccatttcttctgcacatctacttgcttaaattgtgggcaaaagagaaaaagaaggattgatcagagcattgtgcaatacagtttcattaactccttccctcgctcccccaaaaatttgaattttttttcaacactcttacacctgttatggaaaatgtcaacctttgtaagaaaaccaaaataaaaattgaaaaataaaaaccataaacatttgcaccacttgtggcttttgaatatcttccacagagggaagtttaaaacccaaacttccaaanggttaaactacctcaaaacactttcccatgagtgtgatccacattggtaggtgctgacctaacagagatgaactgaggccctggnttgnttggtcataatacaaaaggngctaantaataggatttcaanacttgaanaatggtgatngggctanaanaattggagaanaaatcctctgnattgngtggatcgggngggggatttttaaaaaattggtttancattcatatttncatcttaattcccaattaaaagtttgcagaatatttgnccaaagtggcctnttttn

SEQ ID NO: 1414 - DNA, 878 bp, Homo sapiens
  misc_feature 5, 630, 637, 660, 662, 681, 694, 715, 718, 732, 736, 761,817, 818, 821, 827, 833, 834, 838, 858: n = A,T,C or G
agcgnaacgactactatagggcgaattggagctccccgcggtggcggcccgcccgggcaggtaccaactaacctcccgctctttatctccccaaccttcccactccccagcctctagtaaccattattctcctctacctgtgagttgattttgacctcccacataagagaatgtggcagtatttgtttttctgtgcctgggttatttcatttaacatactgtcctctggttccatccttgttgttgcaaacgacaggattttgttcttttttatgactgaataatattccatagccatatacataccatgttttctgtatccattcattcgttgattggcagtaaggttgattccatatcttggctgttgtgaatattactgcagtaaacataggaatacagatatcttttccatatactgatttcctttgttttggatatatacccagcagtgggcttgctggatcatatggcagctctgattttaggtttttaaggatgggttttttttttgcaatgagaataaaaattttccatgtataagaacagtgtctttgaactttgtttatatcctttgcccatttttctattgagttcttttttctttttgagacagggtttattgcccangctagantgccagggggcatgatcacaggntnactggactttgatctcccnggctcaaaggggncctcccatggtagccctcttnaanagctgggactaganggcncatggacatcatgcctggctaaatncctgggatatttgggggagatggagtcttctattttggttaagccgggcctccagnnccnggcatnaatggnntttntggccttgactttccaaagnggaccttgggccgtttaaat

SEQ ID NO: 1415 - DNA, 879 bp, Homo sapiens
  misc_feature 3, 4, 9, 671, 700, 824, 830, 839, 854, 874, 877, 878: n = A,T,C or G
ggnnacgcngtttacgactactatagggcgaattggagctccccgcggtggcggcccgcccgggcaggtacaatactttctgactgtccactaaaatgtcaaactatttcagactcctactcctccactgtcttagttgattttgtgctgctgttatagaatacctgaaactgggtaatttatagaaaacagagatttatttcttatagttctggagactggtcaaggggatggcatctggtgagaaccttcttgctacatcatctcatggaagaaggtggaagggcaagagggcacatatgcccaagaaaatgtgtgcacacacaagagaggtggagagagaaagagagagataaatagagagacgaaaagggggccaagctcatccttttattaggaatccattcccatgatctcccatgataacagcattaatccattataagtgcagagccctcataacctaatcactttttaaaagtcccacctctcaacaccattgcattgaggattaagtttccaacacataaactttgggaaatgcatacaaaccatagcactacctccactcacatcttggctcttcaatgtcaaggtatattggttggtaagggaatataaacacatgaagacatgtctctcctttcaatccaaagacttactggaattgngtcaagcttcttgtggtcagaaatgaggncttctctttatttttggcattcttatgatcccatgagcccaataacagtgagaagttaagaacctaacccccctccagtaaaagcccactgattggcctgctctcaaaaatgggtgggttcttntgcaanttttaactnggtccccccaggttngggaaatgccaaaaccttgnttnnt

SEQ ID NO: 1416 - DNA, 473 bp, Homo sapiens
  misc_feature 2, 4, 6, 7, 8, 12, 20, 21, 23, 25, 26, 27, 28, 29, 31, 35,49, 60, 62, 77, 128, 134, 175, 240, 250, 271, 280, 299,300, 303, 310, 333, 337, 359, 363, 370, 375, 376, 403, 405,411, 413, 414, 416, 418, 422, 423, 427, 428, 429, 434, 435: n = A,T,C or G
  misc_feature 438, 444, 446, 449, 451, 454, 456, 458, 460, 463, 465, 470,473: n = A,T,C or G
gnanannntaantaattaannanannnnntnatantgtacgcgcgttanacgactcactntnagggcgaattggaanctccaccgcggtggcggccgcccgggcaggtacgcgggcactgtaatgctnacttancattaaccttttaagttaaagattaagagaaccaacacctntttacagtagaaatgccccaactaaatactacacgtatggcccaccattaattacccccatactncttacactantcctgatcacccaactaaaantattaaganactaactaccacctacctnnctnaccaaancccataaaattaaaaaattatancaanccctaagaaccaataatgaacnaaanttttgtncgctnncatctcatttgcccccacaatccctangnctaccncnncncnagtnncctnnngcgcnnttnctaganantantngcntncnantcngntcatncan

SEQ ID NO: 1417 - DNA, 888 bp, Homo sapiens
  misc_feature 349, 517, 521, 558, 569, 583, 592, 593, 633, 635, 649, 658,672, 693, 705, 745, 778, 780, 781, 794, 811, 822, 836, 851,853, 871, 876, 887: n = A,T,C or G
ctcactatagggcgaattggagctccccgcggtggcggcccgcccgggcaggtacccttttcagactaattggaacttgagtcatggctgtcacactgaaataatttgttcattcaactgcagtgaaaatcaatatagatcaacatgcataaagttcagtaactattaaatgggagaagcaagcaaaagcaacaggaaaattaaatcaggatgctgaggggggaacagggattgctggccatgaattttaattgaatttttgacggggcaagctacgttacattatggcagcccccgtactttttttttttttttttttttttttcgagttttatgatttatttaactngtggaacaaaaataaaccagattaaccacaaccatgccttactttatcaaatgtataagaagtaaatatgaatcttatatgacaaaatgtttcattcattataacaaatttccaataatcctgtcaattatatttctaaattttccccccaaattctaagcagaggtntgtnaaattgggaagttaacttaatgccccccttaactttnttaaccaagcnttgagtgccaaganaattgaaanngttcaaaatctggcccaaaaatgttgatgttggaataaananaaattctctggctnccccccctntaaagttggccaanccctccttagagctaccttgnggagcaacccgnctcagattccttaaacatggggaccggccctcaaaggttnaattttaaagaaaaatcatgtccttgttaaccntnntttaacccctacntttttggcctaaagggnaaggggtttanccttttcaattttnaaaaccagcccgccnanttgggaattcttccaatncaaanccgggtttttnt

SEQ ID NO: 1418 - DNA, 907 bp, Homo sapiens
  misc_feature 498, 582, 680, 694, 698, 703, 722, 732, 739, 741, 768, 794,817, 824, 825, 837, 843, 879, 901: n = A,T,C or G
cggtatcactactatagggcgaattggagctccaccgcggtggcggcccgaggtacgcgggggggtggtgtggtccaaaggacaggctggatggcgggtgcatcggcgtgggcgtggtcagcatgtgtctgcaatgcctgtgggctctactacaagcttcacaatattaacagacccctgactatgaagaaggaaggcatccataccataaaccgaaaaatgtctagcaaatccaaaaagtgcaaaaaaagtgcatgactcactggaggacttccccaagaacagctcgtttaacccggccgctctagaactagtggatcccccgggctgcaggaattcgatatcaagcttatcgataccgtcgacctcgagggggggcccggtacccagcttttgttccctttagtgagggttaattgcgcgcttggcgtaatcatggtcatagctgtttcctgtgtgaaattgttatccgcttcacaattccacacaacatacganccgggagcataaagtgtaaagcctggggtgcctaatgagtgagctaactcacattaattgcgttgcgcctcactgcccgctttncagtcgggaaacctgtcgtgccaacttgcattaatgaattcggccaaccccgcggggagaggcggtttgcgtattgggcgcttctttccgtttccttncttacttgactcgnttgngcttnggccgttcggcttgcaggnaaaccgggantcagctnantcaaaagggcggtaaataccggttttncacaaaaattcaggggaataccccangaaagaacatgttgaagcaaaanggcccannaaaaaggccagnaaccgnaaaaaggcccggttgcttggcctttttccataaggntccgccccccttacgaagcttnaaaaat

SEQ ID NO: 1419 - DNA, 905 bp, Homo sapiens
  misc_feature 1, 15, 510, 560, 572, 621, 622, 632, 675, 708, 735, 768,781, 785, 789, 796, 825, 830, 844, 847, 863, 878, 880, 904: n = A,T,C or G
nagccgtatgacgcncgtatacgactcactatagggcgaattggagctcccccgcggtggcggcccgaggtacaaaaaacacaaggaatacaacccaatagaaaatagtcctgggaatgtggtcagaagcaaaggcctgagtgtctttctcaaccgtgcaaaagccgtgttcttcccgggaaaccaggaaaaggatccgctcccaaaaaccaagaatttaaaggagtttcttaaatttcgaccttgtttctgaagctcacttttcagtgccattgatgtgagatgtgctggagtggctattaacctttttttcctaaagattattgttaaatagatattgtggtttggggaagttgaattttttataggttaaatgtcattttagagatggggagagggattatactgcaggcagcttcagccatgttgtgaaactgataaaagcaacttagcaaggcttcttttcattattttttatgtttcacttataaagtcttaggtaactagtangatagaaacactgtgtcccgagagtaaggagagaagctactattgattanagcctaacccangttaactgcaagaagaggcggggatactttcagcttttcatgtaactgnntgccttaagnccatgtagtccagttctaaaaacatgttccaagcttactgaanccccctttaattcacactcatgaactcctggtnggacaatacaaggcccaaccctgtggnttgaatggccccccttcttgactcaaaaaaaanacttcctttcatnaatngggngggagtnttttggggaccaacctaattttgtttggnttgantgaaaggaagaaantcnaatattcaattttttncctgggccatttagntnggggctttttttttacccagcccng

SEQ ID NO: 1420 - DNA, 447 bp, Homo sapiens
  misc_feature 196, 206, 230, 299, 300, 310, 362, 365, 380, 386, 410, 413,433, 434: n = A,T,C or G
ggcgaattggagctccaccgcggtggcggccgaggtacttttttttttttttttttttgtttatgaagacttttattaaattacagtgtattacagattatatcataataataagcctttcatctttaggctaatatgatacaaaaacctacttggccacattacttcttgagtttctttttgggcagctttcttntttgaccatntgtaatccgcttcatagcattgancccgtgattctttgtgaaagtttggggccctttaagggatgctgagggagagctgctggattctgaaannaattttgctnggtaagaacctgcccgggccggccgctcttagaacttagttgggatcccccnggngctgcagggaattcnatatcnaagcttatcgaaacccgccgaccntcnaaggggggggggccccgggnnaccccaagctttt

SEQ ID NO: 1421 - DNA, 895 bp, Homo sapiens
  misc_feature 466, 605, 609, 610, 611, 612, 613, 615, 616, 617, 618, 619,620, 622, 623, 624, 625, 626, 627, 628, 630, 633, 634, 635,639, 656, 713, 715, 734, 735, 754, 758, 765, 771, 777, 778,790, 791, 793, 794, 796, 805, 806, 816, 825, 828, 833: n = A,T,C or G
  misc_feature 840, 855, 864, 872, 878, 879, 882, 889, 894: n = A,T,C or G
gaggcgtatacgactcactatagggcgaattggagctccccgcggtggcggcccgcccgggcaggtacgcgggggtcacctgcggtgggcgcactagaggtcttttgaactccttcggctaccgtcgccgcgttctcgctgtgcactcttattctgcgcctgcgcgcggctacagcacggttcgtttttcctttagtcaggaaggacgttggtgttgaggttggcatacgtatcaaggacagtaactaccatggctcccgaagttttgccaaaacctcggatgcgtggccttctggccaggcgtctgcgaaatcatatggctgtagcattcgtgctatccctgggggttgcagctttgtataagtttcgtgtggctgatcaaagaaagaaggcatacgcagatttctacagaaactatgatgtcatgaaagattttgaggagatgaggaaggctggtatctttcanagtgtaaagtaatcttggaatataaagaatttcttcaggttgaattacctaaaaagtttgtcactgacttgtgttcctgaactatgacacatgaatatgtgggctaaaaaaatagttcctcttgattaataaaccattnaccnnnnnannnnnnannnnnnnanaannnggtnccctcggcccgctttanaactaatggatcccccgggctggaggaaatttgatataaactttatcgataccgtcnancttgagggggggccccggnncccactttttttcctttantgangggtaantggccncttggnntaaaatgggcannanntngtttcctgnnggaaatggtnttccgtccnaanttccnacaaaancaacccgggagcatnaaggtaaancccggggngccaannggnacctacnccatnt

SEQ ID NO: 1422 - DNA, 478 bp, Homo sapiens
  misc_feature 343, 401, 427, 436, 440, 460, 466: n = A,T,C or G
ctatagggcgaattggagctccaccgcggtggcggccgaggtacagctgctatcttattggactacagtaaatattttttaaaaggacaccaatgaggggcaccatctggtgttaaccttaaccagaaagctggtttcctcctcctccccccccgcgtactttggcctctctgggatagaagttattcagcaggcacacaacagaggcagttccagatttcaactgctcatcagatggcgggaagatgaaagacagatggtgcagccacagttcgttttgatttccaccttggtcccttggccgaaacgtcctaggccaaatcgttggacctgcccgggcggncgcttttagaaactagttgggaatcccccgggcttgcaagggaaatttcgaatattcnaagccttaatccgataaccccgttcngaacccttngaanggggggggggccccgggtancccaancttttttggttt

SEQ ID NO: 1423 - DNA, 886 bp, Homo sapiens
  misc_feature 2, 10, 22, 67, 87, 90, 91, 92, 97, 267, 439, 448, 574, 590,598, 637, 664, 673, 681, 746, 766, 790, 796, 807, 828, 832,857, 864, 865, 869, 870, 871, 875, 883, 886: n = A,T,C or G
gngcgtatcnactcctataggncgaattggagctccccgcggtggcggccgcccggcaggtactttntttttttttttttttttttnttnnnggggngggttgagtcggagtctcactctgtcgcccaggctggagtgcagtggcacgatcttggctcactgcaacctccgcctcctgggttcaagtgatttctgcctcagcctcccaagtagctgggactacaggcaagcgccaccacgcccagctaatttctgtgtttttagtanagacagggtttcactatgttggccaggatggtctcgatctcttggcctcgtgatccacccgcctcagcctcccaaagtgctgggattacaggcatgagctaccacgcccggcctaatttttaactctttattccgtgtctttaaaacatccattcatctaatttttaactgnttattctgngtctctaaaggattcattcattcacctaatttttcaaataccgttctcaagtcctggttatagacaaggcagttattggaaagcacactatggcaggatttatggagtgtaccttggccgctctanaactagtggatccccnggctgganggaattcgatattaagcttatcgataccgccacctcgangggggggcccggacccaacttttgttncctttaagngaggggtnaatgccccccttggcgtaaataatgggcaaaagctggttcctgggggaaaatggttttccgttanaaattcccccaaaataccanccgggagcataaaatggaaagccntggggngcctaatgagngggctaacccacatttaatgnggtnggggctcctggccctttcaatcggnaaacgtnngccnnntgantaaagaantcn

SEQ ID NO: 1424 - DNA, 893 bp, Homo sapiens
  misc_feature 1, 485, 486, 487, 488, 489, 491, 495, 496, 497, 498, 499,500, 501, 502, 503, 504, 505, 598, 631, 643, 652, 655, 660,671, 689, 728, 741, 754, 762, 769, 775, 785, 809, 810, 826,836, 838, 847, 864, 873, 893: n = A,T,C or G
ngccgtaatacgactcactatagggcgaattggagctccccgcggtggcggccgaggtacgcggggagtgaaacttttaccaaagactgctgtctactctgagggctgctacctgtgaggcttcaactgcataaaaagacagcctttgtcaccaagtcttttttccccatctctcacccataacctgtcaccatgctcaagcctcaatttctttctataaaatataaaaactttgtcatttggctcttctttcagtctcatattcatagacctctcgtgtccatgtgcatattgataaatctgtatcccttttctcctgttaatctgtctattgtcaattcatttcagcagactcagacttcaacattcgggggaaaatttgaacttctctacagttttggtatctttggcaggattgtaagcaaatcactctgcccacacccgaggctgcagccagaaaccacggaaactgacagacaccagcnnnnnanaaannnnnnnnnnnaaagtacctgcccgggcggccgctcgacttgagcaggctactgaaccatgagccaaataaacctttttttctttataagttaccccgcctcangtatttcttgatgccaccccaaatggagtaagnaaaggaaccatntggaccctnggncggtntaaaactaagnggatccccccggctgcanggaattcgatattaagcttatcgatccgccaacctcganggggggcccggtnccaacttttggtncccttagngagggtnaatggncccctggggnaaacaagggcaaaagtggttcctnngggaaatggtttcccntacaaatccnancaaaatacnaacccggggcctaaaangtaaaaccngggggcctaagaagggaccn

SEQ ID NO: 1425 - DNA, 914 bp, Homo sapiens
  misc_feature 9, 11, 466, 593, 609, 642, 644, 658, 660, 691, 704, 724,726, 727, 734, 741, 798, 800, 803, 821, 827, 839, 849, 863,879, 890, 906: n = A,T,C or G
agcctaagncncgcgtatacgactcactatagggcgaattggagctccccgcggtggcggcccgaggtaccactataatctctaatacttactcagaattactgtgtatttacttaatttcttattatgtgccttattatgtgcttaagatacaataggttagagtttaatctaaatatcttgaaagctatattgtgggcttggtaagcattttgttttttctttctctgttttggtaaggatttaaaatttttttcattgcaattttaagtggttttcaataagtaatagtttttatcaaatttttggtgcttggtgcagagacggtgtggggaagggtgaatggttttgggaataattcagtgcacacctgtaggcctctttacattgtgactgataggggttattgcatatcaatttggggctgtagagtgcaatctcaagtttcatctttttcacccatcanaatttgtctcaggattacttggttttttctcagtcctcaagccgagaacttgcttttctttgttaatgtgactttcattactgagtacctgcccgggcggcccgctcgacgcttactgcccgctttncagtccggaaacctgnccgtgcccgctgcattaatgaatcggcccaccncnccgggaagaaggcngnttgcgtattgggcgccttttccgctttcttngctcactgactcncttgggcctcggtccgttcngnntgcggcnaaccggnattaaactcactcaaaggccgggaataccggttattccacagaaatcagggggatancncanggaaaaaaacattgtganccaaanggccaaccaaanggcccggaancctaaaaaggcccnggtgctggcgtttttncaaaggctccncccccctgaaaagcantaaaaaat

SEQ ID NO: 1426 - DNA, 915 bp, Homo sapiens
  misc_feature 13, 15, 29, 536, 559, 564, 592, 626, 651, 656, 685, 690,699, 710, 715, 722, 738, 739, 740, 744, 745, 746, 747, 748,749, 750, 751, 752, 753, 754, 755, 756, 757, 758, 759, 760,761, 762, 778, 791, 799, 800, 829, 830, 832, 839, 841: n = A,T,C or G
  misc_feature 850, 853, 859, 872, 873, 883, 895, 896: n = A,T,C or G
gagcgtatgcgantngtatacgactactntagggcgaattggagctccccgcggtggcggccgaggtacgcggggaggtccggagagacgcacagctaagatgtcaggacatcctggaagctgggaaaggtaaatcttgctactgctcactctttgggtccacgctgcttttaagagctgtaacactcaccgtgaagatctgcagcttcgctcctgaagccagcgacaccacgagcccaccagaaggaagaaactccgaacacatctgaacatcagaagggacagactccagacgcgccaccttaagagctgtaacactcactgcgagggtccgcggcttcattcttgaagtcagtgagaccaagaacccaccaattccagacacattttggcgacctagatgggacaatcgcctatcaccgagtggtgagaccatcgcctatagctgagcggcgagacaatcacctatcgccaagcaaatgagcaaacagttgtcttcaccaccccagacaagcagatgaatggtgaaaccgatncagccgagaaaagaagagaaganggacnttttgaaccccgagagggagttcaaccnaagggtggtccgaaaaggttggcccccccaccanggaagaatattcttccgtgccattncccgntttccagcttttggattccttcctttaanaaaancaccttccnccccttcaatnaaaanccctgcntttaaacctttttaannnaaannnnnnnnnnnnnnnnnnnggttcttggcccgggnggggcggtttttnaaaatagnnggatcccccggctgggggggaatttcganntnaagcttntngatacccgnganctttanggggggggccggnncccacttttnttccctttatgnnggttatttggccccttggg

SEQ ID NO: 1427 - DNA, 889 bp, Homo sapiens
  misc_feature 573, 576, 594, 617, 660, 662, 681, 719, 739, 747, 748, 759,781, 796, 823, 836, 843, 853, 861, 869, 873, 876, 879, 881,885: n = A,T,C or G
gagcccgtatacgactcctataggggcgaattggagctccaccgcggtggcggccgcccgggcaggtactcagggataataaaaatgcaaacaaagttttatgcacataatacccatcacagggttacttataacagcaagaattaggagaccaaaaaaaaggtagacaatataagaggaatggttgggaagtcataattggccatacaatggattttatgaagccattaataaggaagattttaatgtaatagaaaatacatgagataaattaagtaaaaaaagcgtgacacaaaattgcacgtaaaacctcacccatcttaaaaggatgcttaatgatacttttcactttatgctttcataatatctaaatgatctacaattaacctacatttattctctaatgagtcaaaaaggcttttttttttttttttttttgagacagagtcttgctctgtcatccaggctggagtgcagtggtgcgatctcggctcactgcaagctcagcctcccggggtcacgccattctcctacttcaacctcccaagtagctgctttgaacccgggaggcanaangttgcagtgagctgagancatgccactgcactgcactgcancctgggagacagattgggaccccctcttaaaaaaaaaagaaanangaaaaaaaaataggagctnttaaaacccgcaggggggaaacgtaaatatttaattanccgagtaatggaatagctancaaaagcnnttaaacgtgtnttactttgaccccaaaagttantttgcgggaatttgncctaggcaaaagaaatgtttccaaaantctattaaggganttcaacngtttttcctngcttaaanaagacctnggcngtntanancagngggg

SEQ ID NO: 1428 - DNA, 476 bp, Homo sapiens
taatacgactactatagggcgaattggagctccccgcggtggcggccgaggtacgcgggggtagatggaaggaagaacttgtgtgcttagacctgacgctgggaggagatgctgccacctaggttacttgtaggaccctatacggcaacctcctttgccaggaactatttataaacatcctgcaggaaaatgtcagcaatgtgatggtgtttggaggtggagccttcagaaggtaattaatgcccttgtaagaagaggccagagagcttgcgcaccttcttcctgccatgtgaggagccaagaagccggctgtctgcaaccggcaagaggaccctcactagaagctagccatactggcatcctcatcttggctttccaacttccagaactgtgagaagtatatgcttgtggtttaagtcaatggtctatggtaatttttttatagcagtcccagccaagacagtgcctcatttact

SEQ ID NO: 1429 - DNA, 483 bp, Homo sapiens
  misc_feature 2, 3, 4, 17, 34, 94, 142, 160, 204, 224, 232, 234, 265, 270,282, 293, 294, 309, 311, 316, 323, 325, 347, 355, 357, 359,382, 405, 449, 483: n = A,T,C or G
gnnngggagcacgcgtnagacctatttggaactncccgcggtggccggccgcccgggcaggtactttttttttttttttttttttttttttttngatgttattttattgggtcgtaaataaggagtaggtaaaacattttgngctttaataagtgaggcncagcttaaaagttttaaacagcaatataaaaatacagtactttntttttttttttttttttttnggaaacanancctggttcttgttgcccaggctggagtgcantggcncaattttggctnactgcaacatnngcctcccaggggcangngattntcatgtntnagcctttcaagtagctgggatnacagctgngntncaacactcccggctcatttttgnattttcagtaaagacggggtttnaccatgttggccaggctggtctaaaaactcctggccttaagggnatctgcctgcctaagcctcccaaagggctgggan

SEQ ID NO: 1430 - DNA, 467 bp, Homo sapiens
  misc_feature 2, 3, 7, 108, 114, 171, 172, 174, 175, 210, 283, 289, 290,307, 322, 383, 387, 402, 428: n = A,T,C or G
gnnccgnatcactacttagggcgaattggagctccccgcggtggcggccgaggtaccctgctgaaagattatttctaacaggcttgtagagaaacgtcggttcatgtnaattanaaattatggggccactttgccattcttcacacctgcaatgaacaggtgtttatctgnngnnctgacttatctcttgaactccatttgcatggtatngtgggatgcaagctgatgccctgtccagatcttcttcaggccactacatctatatatgcattcatattccagnggctgnnagtgttggctgttggtngacagaggagctgcntcctcctggaggaaactgaactcaactgatgaaagccacctggtcctggaggtgaagcatnttcnaaatgacagcctgcngtcaatgactgatgaatatgacttcnttgtctcatgacaggacctactttggggtatagatcatg

SEQ ID NO: 1431 - DNA, 465 bp, Homo sapiens
  misc_feature 2, 3, 4: n = A,T,C or G
gnnngccctatcgactacttagggcgaattggagctccccgcggtggcggccgtcacactcatttacccggggacagggagaggctcttctgcgtgtagtggttgtgcagagcctcatgcatcacggagcatgagaagcccgcgtacctcggccgctctagaactagtggatcccccgggctgcaggaattcgatatcaagcttatcgatacccgccgacctcgagggggggcccggtacccagcttttgttccctttagtgagggttaattgcgcgcttggcgtaatcatggtcatagctgtttcctgtgtgaaattgttatccgctcacaattccacacaacatacgagccgggagcataaagtgtaaagcctggggtgcctaatgagtgagctaactcacattaattgcgttgcgctcactgcccgctttccagtcgggaaacctgtcgtgccagctgcatt

SEQ ID NO: 1432 - DNA, 476 bp, Homo sapiens
  misc_feature 2, 7, 217: n = A,T,C or G
gnatcgnatcatacttagggcgaattggagctccccgcggtggcggccgaggtacaaattaatttaacacatcttttgataatctcatccttggtgttggaaaagacgggaaaatccaaaagtgtctattttgtgcccaaatgctcaagttaatactcgagggccttgatctctggcctcttgccatccctctccccattatttctgaagaaagtancccattttttgcagattccggagggatggggagccacggcccgctctagaactagtggatcccccgggctgcaggaattcgatatcaagcttatcgataccgtcgacctcgagggggggcccggtacccagcttttgttccctttagtgagggttaattgcgcgcttggcgtaatcatggtcatagctgtttcctgtgtgaaattgttatccgctcacaattccacacaacatacgagccgggagcataaagtgtaaag

SEQ ID NO: 1433 - DNA, 510 bp, Homo sapiens
  misc_feature 2, 7, 56, 70, 78, 79, 135, 141, 143, 165, 200, 207, 231,247, 248, 251, 256, 266, 274, 282, 285, 291, 297, 322, 347,367, 377, 383, 416, 432, 434, 452, 455, 456, 457, 459, 463,472, 474, 485, 489, 491, 500, 508: n = A,T,C or G
gnagcgnatcatacttagggcgaattggagctccccgcggtggcggccgaggtacnatatacaaagactntgagctgnntgcctccgatggtttccagtattggcccgttgtaaagctcattaaggccaactttnactttnantatgtgattctgcagaattaanttaaggaggcgctgatccatgctgagagtatcatnagaaaanggcattaatccacaaggtgccaancaaaagttgtaatttnnttncatcntggctctcangaagcaanatgccaangcnttaatntggggnacaccaaagaatccgttgaaagggnaggtttgcttgttttccagccagcntcaataactttgtttggcanggagtcaggnaattangacctgatcaatcaagtggatcacaccattatntgtcacaatatcctcnantgtacaccattttggatnccnnntnctgntatacctgncnccggcacatcntaantnaaattgtantttccttnca

SEQ ID NO: 1434 - DNA, 469 bp, Homo sapiens
  misc_feature 2, 3, 9, 214: n = A,T,C or G
gnnagcccnaacactacttagggcgaattggagctccccgcggtggcggccgaggtacgcgggcaccttgtggggcatgtttgtatttattgcttcatggccgactggaatcctgagtcctgggaagctggcactgcggggatcttgcccggtgtcctggtcctcttgcttccgtcgcggccgctctagaactagtggatcccccgggctgcanggaattcgatatcaagcttatcgataccgtcgacctcgagggggggcccggtacccagcttttgttccctttagtgagggttaattgcgcgcttggcgtaatcatggtcatagctgtttcctgtgtgaaattgttatccgctcacaattccacacaacatacgagccgggagcataaagtgtaaagcctggggtgcctaatgagtgagctaactcacattaattgcgttgcgctcactgcccgctttccaagtcg

SEQ ID NO: 1435 - DNA, 508 bp, Homo sapiens
  misc_feature 1, 8, 111, 138, 191, 211, 259, 302, 319, 321, 329, 338, 363,385, 391, 402, 412, 435, 448, 459, 483, 484, 487, 489: n = A,T,C or G
ntagcccnaacgctacttagggcgaattggagctccccgcggtggcggccgaggtacttttttttttttttttttttttttttttgggttttgattatttgtggtgctaanaagaagggaacatggttggaggcccantgagagaaacagtgctttgaatcaaagagcagaatgatagaaactgacttcanagcaacttcttggcagcagnatccaatttggaagttgaaggtcttgtcctggagccagatgctaaccnaaacacagcaaatgcttttcctaaggcacaatagtcttttcantgagctcaggaaccctntntatgccanatcctcgtntgaaccttcttgctccttctgtgcntgaagatgcccactccacagancccgcngtacctgcccnggccggccgntctagaactagtggatccccccnggctgcaaggaantctatattaancttaattcgataccgttcgacctnngangnggggggcccccgggtaccc

SEQ ID NO: 1436 - DNA, 491 bp, Homo sapiens
  misc_feature 13, 463, 471, 489: n = A,T,C or G
agccctatcactncttagggcgaattggagctccccgcggtggcggccggcgggaggctgacgagagccgggaggcgttagcgaaggaagagaaaaaccgaagacgaagccactacagcccccgcgtacctcggccgctctagaactagtggatcccccgggctgcaggaattcgatatcaagcttatcgataccgtcgacctcgagggggggcccggtacccagcttttgttccctttagtgagggttaattgcgcgcttggcgtaatcatggtcatagctgtttcctgtgtgaaattgttatccgctcacaattccacacaacatacgagccgggagcataaagtgtaaagcctggggtgcctaatgagtgagctaactcacattaattgcgttgcgctcactgcccgctttccagtcgggaaacctgtcgttgccagctgcattaatgaatcggccaacncccggggnagagggcggttttgcgtntt

SEQ ID NO: 1437 - DNA, 491 bp, Homo sapiens
  misc_feature 6, 217, 223, 250, 256, 285, 306, 312, 324, 338, 347, 406,476, 489: n = A,T,C or G
ggcccnatcgactactatagggcgaattggagctccccgcggtggcggccgaggtacttttttttttttttttttttttttttttcgggatgaaggtaaaccaacgtttattttttttccaaaacagagtcagtttgtgctggccatccaggaactcactaacactacccctcttagtttcatcattaatctgttactgaacttccacctccaaaanacttgnatccttttcttatttttggagaccgtnttgctntgtcacccaggctggagtgcagtggtgcnatcttggcttactacagcctnaacctntcgggctcaagngattctcctacctnagtctccanagtagttgggactacaggggtgcaccaccacgcccagctaatttctgaattctctgtanagatgggatcttgctattgtttcccaggctggtcttgaactcctggacttaagcgatctggcagggcctnggtctcccaaggntt

SEQ ID NO: 1438 - DNA, 501 bp, Homo sapiens
  misc_feature 2, 3, 4, 12: n = A,T,C or G
gnnncggcccgnatacgactactatagggcgaattggagctccccgcggtggcggccgaggtacgcggggactacttccactaagactataattactactgatggttatgatgatgtcccaaacacgccatcctaacaccggcttcttaccagtttgaaaacttttaaggcattgtttgacttctctttaatcctagatacattctgcttaaaagtccttcattattttctttaaaagcgtaacattattatttatcccacagttactacccttgctctttaccagttagcttgtgactgaattactgaagcattttcttagcggtttcctactttatactttctctttttgtaatatactcagtattcttctgccaaatgaatccctcccatctcttccctatgatatctaacttaagctctgacaatttgagtgtgggagtagttagcagtgattctggtgaggtaagcagggaccaagatcataaaggaccttaagtt

SEQ ID NO: 1439 - DNA, 510 bp, Homo sapiens
  misc_feature 2, 3, 6, 7: n = A,T,C or G
gnngtnncctatcgactacttagggcgaattggagctccccgcggtggcagcggccgcccgggcaggtacgcgggggccacctaggttacttgtaggaccctatacggcaacctcctttgccaggaactatttataaacatcctgcaggaaaatgagtctatatgtcagaatacacatttcccaccttgcccaacagtagaaaaacataagaagagaaaaacatttaaaaaatgacaagggaagttaatggaagtcagcaatgtgatggtgtttggaggtggagccttcagaaggtaattaatgcccttgtaagaagaggccagagagcttgcgcaccttcttcctgccatgtgaggagccaagaagccggctgtctgcaacctgcaagaggaccctcactagaagctagccatactggcatcctcatcttggctttccaacttccagaactgtgagaagcatatgtttgtggtttagtcaatggtctatggtaattttttttatagcag

SEQ ID NO: 1440 - DNA, 512 bp, Homo sapiens
  misc_feature 4, 5, 235: n = A,T,C or G
gganntatcactacttagggcgaattggagctccccgcggtggcggccgaggtacgcgggcttctcatgctccgtgatgcatgaggctctgcacaaccactacacgcagaagagcctctccctgtccccgggtaaatgagtgtgacggccgctctagaactagtggatcccccgggctgcaggaattcgatatcaagcttatcgataccgtcgacctcgaggggggggcccggtncccagcttttgttccctttagtgagggttaatttgcgcgcttggcgtaatcatggtcatagctgtttcctgtgtgaaattgttatccgctcacaattccacacaacatacgagccgggagcataaagtgtaaagcctggggtgcctaatgagtgagctaactcacattaattgcgttgcgctcactgcccgcttttccagtcggggaaacctgtcgtgccagctgcattaatgaatcggccaacgcgccggggagaggcggtttgcgtatttgggcc

SEQ ID NO: 1441 - DNA, 498 bp, Homo sapiens
  misc_feature 2, 3, 6, 147: n = A,T,C or G
gnnggnccctatcgactactatagggcgaattggagctccccgcggtggcggccgcccgggcaggtacgatgtctagtgatgagtttgctaatacaatgccagtcaggccacctacggtgaaaagaaagatgaatcctagggctcanagcactgcagcagatcatttcacccgcgtacagtttaggggatcctttctaatgacaggaaggcactgctttcctcaacactgtgatctgacctgtgacaagtctgtacctcggccgctctagaactagtggatcccccgggctgcaggaattcgatatcaagcttatcgataccgtcgacctcgagggggggcccggtacccagcttttgttccctttagtgagggttaattgcgcgcttggcgtaatcatggtcatagctgtttcctgtgtgaaattgttatccgctcacaattccacacaacatacgagccgggagcataaagtgtaaagcctggggtgcctaatgag

SEQ ID NO: 1442 - DNA, 470 bp, Homo sapiens
  misc_feature 2, 6, 219, 299, 400, 432: n = A,T,C or G
gngcgncctatcactactatagggcgaattggagctccccgcggtggcggccgcccgggcaggtacttttttttttttttttttttttttgggcagctaaaatctaggatggtgttaagtttcttcattttgtcaattatatataaaaaattagaaacaacatgaatctgcatttcttggatgagatagttaataacaaactatttctcaatatttgtntactaaaaaactagtgaaggtgttatgtgtttcagtatcttatctcttatttgaacatgggtttctgaaaggagcctatntaataatataaatggtatgtagtaaatgaggcactgtcttggctgggactgctataaaaaaattaccatagaccattgactaaaccacaaacatatgcttntcacagttctgggaagttggaaagccaagatnaggatgccagtatggctagcttctagtgagggtcctct

SEQ ID NO: 1443 - DNA, 474 bp, Homo sapiens
  misc_feature 2, 3, 10: n = A,T,C or G
gnngcgcccnatcactcctatagggcgaattggagctccccgcggtggcggccgcccgggcaggtacatgtagaaaatccagcaacgaagagccatggctcactgctaatcacataacacacacaggagtctatttatgcatggaatgtggcagattttttaacaagaagtcacaacttgttatacaccagagaactcatacaggagagaaacccctatcaatggcagtgagtgtggaaaagccttttcacagaagtcactgctcacggttcatcaaagaactcactcaggagaaaaaccgcatgggtgcagcgaatgtcagaaagcttttagtaggaagtcactcctcattttacatcagagaattcatactggagagaagccgtatggatgcagtggaatgtggaaaagccttcagtagggaagtcgcagcttaaaagacatcagataacgcacacaataggagaaacccta

SEQ ID NO: 1444 - DNA, 827 bp, Homo sapiens
  misc_feature 1, 3, 4, 5, 7, 10, 11, 13, 15, 23, 28, 35, 41, 44, 45, 47,48, 50, 53, 56, 59, 60, 61, 62, 63, 65, 67, 68, 70, 73,74, 88, 91, 92, 93, 94, 95, 96, 97, 99, 101, 102, 115, 124,144, 161, 180, 258, 295, 297, 300, 306, 315, 323, 326, 327: n = A,T,C or G
  misc_feature 337, 344, 378, 381, 385, 386, 396, 411, 415, 416, 419, 432,433, 435, 438, 441, 446, 454, 467, 469, 491, 492, 503, 504,513, 519, 534, 540, 544, 549, 551, 552, 553, 557, 566, 567,568, 576, 589, 590, 592, 617, 622, 641, 651, 656, 664: n = A,T,C or G
  misc_feature 666, 683, 696, 703, 720, 727, 729, 733, 734, 739, 741, 750,751, 752, 755, 761, 773, 778, 795, 805, 809, 815, 816, 824: n = A,T,C or G
ntnnncncannanantcttcttnttttnttttttntttttnttnnanncnttnatnatnnnnncnanntnttnntttttttttttttnttnnnnnnngngnncatattaatatanggcgaatgnagctccaccgcggtggcagnggccgcccgggcaggtncagaggacacacattgtanacaggcctgtgtcatgtttccttacagtcgttttttacagagaaaaggggcattgttttttcactgctttctcaacanttccttgtgaataaatgaaacatttcggaactccctngntgngcaaanagcccttcnacttttgnttnntttgccgggntagcccnggggaacccattgttggtttgggtggaaattcgntgntttnnccttggtcgngggggggccccaacntttnnacntttcaaaaaaatnngnacnaancaccntggggaangggggcacttagntntttcgcttatcccccttttaannccaacctttcnnctcttttcnacaccncaagtctccctcggnaccttntccnttatngnnncccnttccacctnnngcgccccnaaaactccaaggnnanccaaccgccttgcaaaaaacctttncttgnattccaaagttgctccccncttggtgtcnaattnttgcattngnctccaagaaaaagatanattctacctttcnatcaccnaaggtttttcgtttcanccccatnanttcnnttttncnccccccccnnnatnttcaanaaggggggggcnatgcnttttgacgccaagcccntttggtgttngacntccatnngacaccanggg

SEQ ID NO: 1445 - DNA, 464 bp, Homo sapiens
  misc_feature 2, 4, 6, 225: n = A,T,C or G
gngngncctatcactacttagggcgaattggagctccccgcggtggcggccgaggtacagaacaatgaggtttcccacagcggagtctccctgggctctgtttggctctcggtaaggcaggcctacaccttttcctctcctctatggagaggggaatatgcattaaggtgaaaagtcaccttccaaaagtgagaaagggattcgattgctgctttcaggactgtnggaattatttggaatgttttacaaatgcccgcgtacctgcccgggcggccgctctagaactagtggatcccccgggctgcaggaattcgatatcaagcttatcgataccgtcgacctcgagggggggcccggtacccagcttttgttccctttagtgagggttaattgcgcgcttggcgtaatcatggtcatagctgtttcctgtgtgaaattgttattccgctcacaattccacacaa

SEQ ID NO: 1446 - DNA, 474 bp, Homo sapiens
  misc_feature 2, 7, 34, 303, 353: n = A,T,C or G
gncgcgnaacatacttagggcgaattggagctcnccgcggtggcggccgaggtacgcggggtagatggaaggaagaacttgtgtgcttagacctgacgctgggaggagatgctgccacctaggttacttgtaggaccctatacggcaacctcccttgccaggaactatttataaacatcctgcaggaaaatgcagtgaagtaaaaagaagacagggacatcccagaaggttatgcaaaacatcaagagaagatgagaggagtctatatgtcagaatacacatttcccaccttgcccaacagtngaaaaaaaaaaaaaaaaaaaaaaaagtacctgcccgggcggccgctctanaactagtggatcccccgggctgcaggaattcgatatcaagcttatcgataccgtcgacctcgagggggggcccggtacccaagcttttgttccctttagtgagggttaattgcgcgcttgg

SEQ ID NO: 1447 - DNA, 468 bp, Homo sapiens
  misc_feature 2, 6, 34, 207, 209, 354, 361, 468: n = A,T,C or G
gngcgnaacatactatagggcgaattggagctcnccgcggtggcggccgaggtacgcggggtagatggaaggaagaacttgtgtgcttagacctgacgctgggaggagatgctgccacctaggttacttgtaggaccctatacggcaacctcccttgccaggaactatttataaacatcctgcaggaaaatgcagtgaaatagaaananaacaggggacatcccagaaggttatgcaaaacatcaagagaagatgagaggagtctatatgtcagaatacacatttcccaccttgcccaacagtagaaaaaaaaaaaaaaaaaaaaaaaagttcctgcccgggcggccgctctanaactagnggatcccccgggctgcaggaattcgatatcaagcttatcgatacccgtcgacctcgagggggggcccggtacccagcttttgttccctttagtgagggttaattgcn

SEQ ID NO: 1448 - DNA, 476 bp, Homo sapiens
  misc_feature 2, 7, 393, 434, 443, 450, 454, 455, 457, 459, 461, 464, 468,474, 475, 476: n = A,T,C or G
gngcggnacatacttagggcgaattggagctccccgcggtggcggccgaggtactggccctgggccaatgcgtcctcgctggagcctttgcctccttctactgggccttccacaagccccaggacatccctaccttccccttaatctctgccttcatccgcacactccgttaccacactgggtcattggcatttggagcccttatcctgacccttgtgcagatagcccgggtcatcttggagtatattgaccacaagctcagaggagtgcagaaccctgtagcccgctgcatcatgtgctgtttcaagtgctgcctctggtgtctggaaaaatttatcaagttcctaaaccgcaatgcatacatcatgatcgccatctacgggaagaatttcntgtggtcttaacccaaaatgcgttcatgcctacttatgccnaaaaatttntcagggngggnncntncntgnaaanaaaagnnn

SEQ ID NO: 1449 - DNA, 506 bp, Homo sapiens
  misc_feature 2, 11, 78, 128, 131, 135, 146, 152, 154, 159, 162, 167, 172,174, 189, 191, 211, 214, 216, 225, 228, 243, 249, 251, 263,272, 275, 277, 286, 297, 300, 301, 307, 309, 319, 324, 330,339, 346, 348, 350, 360, 363, 365, 371, 381, 392: n = A,T,C or G
  misc_feature 393, 400, 406, 410, 413, 425, 439, 457, 469, 470, 477, 480,493: n = A,T,C or G
gncgaggaacntacatagggcgaattggagctccccgcggtggcggccgaggtacttttttttttttttttttttttnggtttttttttttttttttttttttttttttttttttttttttttttttngcncggngtttttttaanggaaananagccnccnacctnaaaancnccccccccttgcccngnaccaaaaaaggaaaaggggnaancnaaacccccnctnggcccaggggggggnaggggntnaaaggaaaaccngggcccggnacncnggcgggggnggggggcatcngcnngaaaancngggcctccanccccnaacctngtggggganaaaaccngncnggggggcccnccnanaaccangggacccccngggaaaaaaannaatcccnagggcnaagnctnaaaaaaaaaacnggggaacccccccnagggggggggggcccccnggaccccccaanncttttgnggntccccccttaaangggggaggggggg

SEQ ID NO: 1450 - DNA, 483 bp, Homo sapiens
  misc_feature 2, 6, 312, 464: n = A,T,C or G
gngcgnaacatacttagggcgaattggagctccccgcggtggcggccgaggtactttttttttgtttttttttttgagatggagttttgcccttgttgtccaggctggattgcaatggcacgatcttagctcactgcaacctctgcctcccggcttcaagcgattctcctgcctcagcctcctgagtagctgggattacaggtgccccgccaccaccgaaccagctaagtttttgtattttttagtaagaagacgggatctcactgtgttagccaggatggtctcgatctcctgacctcgtgatccgcccgnctcggcctcccaaagtgctgggactacaggcgtgatccactgcgtccggacttagttttaatactatcattgaataattacatacaaaacctagattctctgtatattccagataaagacatctaagacccgggaagtttaaagttcaaagntggtgaaccagaaaaattt

SEQ ID NO: 1451 - DNA, 498 bp, Homo sapiens
  misc_feature 2, 6, 217, 241, 376, 382: n = A,T,C or G
gngcgnatcactccttagggcgaattggagctccccgcggtggcggccgaggtacgatatataacaatgaggtgctccatcaaccactttctgaagctcaaaggaaatccaaaagcctaaaaattaatctcaattatgcaggagatgctctaagagaaaatacattggtttcagaacatgcacaaagagaccaacgtgaaacaccagtggccaaatngaagggaagctggaacacatggtntcaaaaccgaacaagataatgtgaacaaacacactgaacagcaggagtctctagatcagaaattatttcaactacaaagcaaaaatatgtggcttcaacagcaattagttcatgcacataagaaagctggccacnaaaagncaggattaccattggtatttcatttttcttgggagagggaaaatgccaacatcatcttcctaaaaaggagaaaaaatgaggaggatatttttaattaccaataaccattttaaaaa

SEQ ID NO: 1452 - DNA, 453 bp, Homo sapiens
  misc_feature 4, 183, 188: n = A,T,C or G
ggcnattggagctccccgcggtggcggccgaggtacgcgggctttcccccagtgcaaaagactgttactttattattgtattcaaaattcattgtgtatattactacaaagacaaccccaaaccaatttttttcctgcgaagtttaatgatccacaagtgtatatatgaaattctcctccttncttgncccccctttctttcttccctctttcccctccagacattctagtttgtggagggttatttaaaaaaaacaaaaaaggaagatggtcaagtttgtaaaatatttgtttgtgctttttccccctccttacctgaccccctacgagtttacaggtctgtggcaatactcttaaccataagaattgaaatggtgaagaaacaagtatacactagaggctcttaaaagtattgaaagacaatactgctgttatatagcaagacataaacag

SEQ ID NO: 1453 - DNA, 468 bp, Homo sapiens
  misc_feature 2, 9, 38, 157, 166, 171, 172, 175, 179, 184, 188, 195, 196,198, 200, 202, 203, 222, 226, 228, 235, 255, 257, 259, 262,265, 267, 268, 272, 276, 277, 280, 282, 287, 288, 289, 291,292, 296, 303, 320, 321, 322, 330, 332, 336, 338, 340: n = A,T,C or G
  misc_feature 342, 346, 348, 352, 353, 356, 373, 383, 398, 402, 404, 409,416, 422, 433, 434, 435, 437, 439, 442, 445, 449, 451, 461,462: n = A,T,C or G
gngcgcccnaacactactatagggcgaattggagctcnccgcggtggcggccgaggtacttttttttttttttttttttttttttttcttttttttttttttttttttttttttttttttttttttttttttttttttttttttttttttttttttnggccccccncccannttnattnaaaangggnaaaaggnncntntnnaaaaaaaggggggggggcnaagncnaaaaaancccccaaaaacccaggggcntntnggnaanannagcnggcnnagngnggccnnnannggcnaaacccnaaaaaaaaccaggcccnnngggccttngnaaancnancnggtnanattnnggnaaagggcccttttcccncccaaacccnaaaaaccccaaaaangggntncccanaaaaaancccggnaaacccaaaannnantnganccngggnanaaaaaacccnnggcccc

SEQ ID NO: 1454 - DNA, 484 bp, Homo sapiens
  misc_feature 2, 3, 5, 7, 10: n = A,T,C or G
gnngngnccnatacactacttagggcgaattggagctccccgcggtggcggccgaggtactttttttttttttttttttttgctgggttatgcccgcctcttcacgggcaggtcaatttcactggttaaaagtaagagacagctgaaccctcgtggagccattcatacaggtccctaaggaacaagtgattatgctacctttgcacggttagggtacccgcggcccgctctagaactagtgggatcccccgggctgcaggaattcgatatcaagcttatcgataccgtcgacctcgagggggggcccggtacccagcttttgttccctttagtgagggttaattgcgcgcttggcgtaatcatggtcattagctgtttcctgtgtgaaattgttatccgctcacaattccacacaacatacgagccgggagcataaagtgtaaagcctggggtgcctaatgagtgagctaacttcacattaatt

SEQ ID NO: 1455 - DNA, 504 bp, Homo sapiens
  misc_feature 2, 3, 5, 7, 9, 69, 211, 224, 360, 405, 435, 454, 488, 493: n = A,T,C or G
gnngngnancactacttagggcgaattggagctccccgcggtggcggccgaggtacatattcattgtangacttcctgtggatgagcatgagctatcatgacctcttcttcttccaagactgcaggctgctgagaatcaaagtgggagggctcttgtgagtctgctcgtaaatagccttcagttcgatcatctgtatctactttctcctcnttttgttggaagnttgaggattcatactttggacaactgcttcttaatctccacatcatcatcattttcaggtttcttctgattctttttcttcttatctttaaattgtttgatcaatgtgaaggacatgtttcaacaaggaaaccatnaaatacaggcctcctagagctggttagacccttccacgtgggaantcaaaataggcacttttcttctatgttttngagaagacagaatgactgnaaaaaggtgggtcctcttttttcattttccattnggctnggtttccttca

SEQ ID NO: 1456 - DNA, 468 bp, Homo sapiens
  misc_feature 2, 7, 14: n = A,T,C or G
angcccnatcgctncttagggcgaattggagctccccgcggtggcggccgaggtaccactatgcctggctaatatttttatttttttatttttgtagagacagggtcttgttatgttgcccaggctgttctcaaactcctatcctcaagccatcctcccatctcagccactcaacttgctggaattaccagcggaagccactgtgcccagccccagactcccttttacctagtatatcatgtctaatttctaacaaaaaattaaaaaaacattgtaagaggaaaaaaagaaaccctaaaacaaacaagcaaacaaaaaacccaaaacaacaaaaagtttcaagaaacagagctagctgacagaactatattcagatatggcaggtatattagaattatcagattggtaattttaaacaactatgactaatatggtaagagtgataatgggaaaaaatagacaatttgc

SEQ ID NO: 1457 - DNA, 481 bp, Homo sapiens
  misc_feature 1, 2, 3, 5, 442: n = A,T,C or G
nnngncctatcgactacttagggcgaattggagctccaccgcggtggcggccgcccgggcaaggtacagtatatgtatttttttaagtgacctcctctccttccacagaccccacatgcccaaaggcctcgggacttcccaccaccttgctccacagatccagctaggcctgacctgtgcctcatcccgtgccgctcggtctctggctgatcccgaagggcttttgtctttcctctcgtcaagttcttttgggttgtgtttttttgttttttttaataactcaaaaaaaaataaaagacttggaggaagggtgcaagctcccaagtgcatctggggcacatgtttcttggaagggactgtctcgccgacactcgggattccctcttgcctgcatgttgaggctatgggtgaccgtggttagtgggacaggcagtgagcagtngaaagtgcctgagtgcccgaattggtgggggaaggcttt

SEQ ID NO: 1458 - DNA, 836 bp, Homo sapiens
  misc_feature 3, 4, 9, 11, 14, 17, 18, 20, 21, 22, 27, 30, 32, 35, 52,53, 61, 66, 80, 84, 87, 88, 89, 90, 91, 92, 100, 103, 292,316, 322, 339, 344, 351, 391, 424, 430, 447, 448, 459, 460,472, 479, 491, 492, 500, 501, 503, 509, 511, 512, 513: n = A,T,C or G
  misc_feature 515, 523, 538, 542, 573, 582, 604, 606, 607, 610, 616, 631,634, 635, 644, 655, 658, 674, 683, 686, 689, 693, 704, 711,715, 718, 723, 737, 739, 742, 758, 759, 763, 767, 768, 774,775, 785, 787, 788, 805, 807, 809, 814, 820, 829: n = A,T,C or G
ttnntttananttngtnngnnnttttnttntntantttttttgaatttttcnnaatttttnttttnctttttttaaaaanattnttnnnnnnttagttgngcncttattagataaattggagctccaccgcggtggcggccgcccgggcaggtacgcgggacagcggcttccttgatccttgccacccgcgactgaacaccgacagcagcagcctcaccatgaagttgctgatggtcctcatgctggcggccctctcccagcactgctacgcaggctctggctgccccttantggaagaaatggtgatttcccaangacganttcatattcccacaatnttggntcttaangaccttggaaattaaccaaaaaggaaaccttttccttttnaaaaggaaggtttccaattaaggaaccggaacnaaaatnggccccagccttacccnnaaattggcccnnattagggattgnaaaaatnttgcaaaagggnnaatttcgnntntattgngnnngngaaagccncaataaatccgggcntttntaaaaaaacccccttggaagacaaatttttngttgggggnaggggtttgcaaaaaaaaattngnncanaattanaaaatttaattttantgnntacgttcanaaggggccttntgnggagggggggggttgntttcggtanttnaantctnaaaaaaactcnaaaaggncccntanaaggntttttttttaaaantnacnttctttttttagggannattngttnnggtctnnaaaaaacccnannttttaaatttgggggananangtttnaaacanggttaaccncttggcc

SEQ ID NO: 1459 - DNA, 519 bp, Homo sapiens
  misc_feature 9, 52, 69, 70, 71, 76, 77, 93, 101, 109, 112, 128, 133, 156,195, 208, 215, 223, 231, 237, 240, 270, 274, 310, 326, 339,358, 363, 370, 373, 395, 417, 426, 440, 457, 479, 482, 483,497, 515: n = A,T,C or G
gctatcacnctatagggcgaattggagctccccgcggtggcggccgcccggncaggtacacaacaagcnnngtctnncataactgaaacagangattctgntttagaanaangcccatctgagcttangagcntagaaggaaaagaagaaaatatnaggagctttgtgcatcttctacaatgcctgcaatttcanagctttcatcatngctttangggaggantctcatantgaatnacnttaaacctttctcgtcccaagatcatcagnctanagtcggaaaagaaccacctgcctctgtagctggaangaggcaacccagaagnattttagccattnacttttttcttttaaaaangattntcagagnganggttagccattccagccgactnttaaaaaggggtaggaaattanagaaaatanggccccaatttacnaccaactggtaaatttngaaggcacaagtcatggggaanatnntttttagataagcntaagttgaagaaaaccanggcc

SEQ ID NO: 1460 - DNA, 481 bp, Homo sapiens
ctatcatcttagggcgaattggagctccccgcggtggcggccgaggtaccgagcatgaacatctgcagcctcttgcagaatcaccccagaaggggactgaatcatggtcctcttgataggtatgttcagcagagtttccagtcctgaggtgtatgaggccagctggagctcataatccttaattcccgcgtacctgcccgggcggccgctctagaactagtggatcccccgggctgcaggaattcgatatcaagcttatcgataccgtcgacctcgagggggggcccggtacccagcttttgttccctttagtgagggttaattgcgcgcttggcgtaatcatggtcatagctgtttcctgtgtgaaattgttatccgctcacaattccacacaacataccgagccgggagcataaagtgtaaagcctggggtgcctaatgagtgagctaactcacattaattgcgttgccgcttcactgc

SEQ ID NO: 1461 - DNA, 486 bp, Homo sapiens
gctatcactcttagggcgaattggagctccccgcggtggcggccgtggcccaccgtgcaaagcttccacttggtgcctgcgtgggaacgcaccacctgccgtggaacttcctcctgcggggcagaggaggggtcccccgcgtacctcggccgctctagaactagtggatcccccgggctgcaggaattcgatatcaagcttatcgataccgtcgacctcgagggggggcccggtacccagcttttgttccctttagtgagggttaattgcgcgcttggcgtaatcatggtcataagctgtttcctgtgtgaaattgttatccgctcacaattccacacaacatacgagccgggagcataaagtgtaaagcctgggggtgcctaatgagtgagctaactcacattaattgcgttgcgctcactgcccgctttccagtcgggaaaccttgtcgtgccagctgcattaatgaaatcggccaacgcgcgg

SEQ ID NO: 1462 - DNA, 474 bp, Homo sapiens
  misc_feature 2, 3, 4, 9, 14, 92, 383, 468: n = A,T,C or G
gnnntggcntttcnactcactatagggcttttggagctccccgcggtggcggccgaggtactggttggtcatttccttaaccaaggatcaangacaaaaggccagacagctcactgcactgccaggctgcacgtcggaagccgggctccgcgcgactgcccccgcgtacctgcccgggcggccgctctagaactagtggatcccccgggctgcaaggaattcgatatcaagcttatcgataccgtcgacctcgagggggggcccggtacccagcttttgttccctttagtgagggttaattgcgcgcttggcgtaatcatggtcatagctgtttcctgtgtgaaattgttatccgctcacaatttccacacaacatacgagcncgggagcataaagtgtaaagcctggggtgcctaatgagtgagctaactcacattaattgcgttgcgctcactgcccgctttccantgggga

SEQ ID NO: 1463 - DNA, 494 bp, Homo sapiens
  misc_feature 4, 305: n = A,T,C or G
tgcnatacatactatagggcgaattggagctccccgcggtggcggccgcccgggcaggtacagcaggggttgctttggtcattgctgtgttgaacagtgcacctcctttcttgactgtatgcacccattgttgatatgacctcgggttccctccacaaaagccacctgaagtgatctcttcttcaaatacatcaagagaaaccccttcctgcatttagtttttgccaagtcgaccatcgataaacttgcttaaaaagctggaggttaacggcagtttccaggaactgtttcatcaccgcttgagncggtgctttacaaaactctcctcacagaaagtgatgggctcaccaggtttgtatctcagtgcatctctgtaggatccaaacaaagcagcctgtgctctaagaaaggccctagctactccatcacccgtagctgtagactgcttcttcagtttatttttcaaggccgagaccacatcacttggtaggttg

SEQ ID NO: 1464 - DNA, 479 bp, Homo sapiens
  misc_feature 238, 371, 451, 459: n = A,T,C or G
gctaacatcttagggcgaattggagctccccgcggtggcggccgaggtacgcggggagggatttcggcctgagagcgggccgaggagattggcgacggtgtcgcccgtgttttcgttggcgggtgcctgggctggtgggaacagccgcccgaaggaagcaccatgatttcggccgctctagaactagtggatcccccgggctgcaagaatttatattcaaagcttatcgataccgtcnacctcgagggggggcccggtacccagcttttgttccctttagtgagggttaattgcgcgcttggcgtaatcatggtcatagctgtttcctgtgtgaaattgttatccgctcacaattccacacaacatacganccgggagcataaagtgtaaagcctggggtgcctaattgagtgagctaacttacattaattgcgtttgcgctcactgcccncttttcantcgggaaacctgtcgtgcca

SEQ ID NO: 1465 - DNA, 574 bp, Homo sapiens
  misc_feature 3, 70, 72, 78, 85, 87, 92, 95, 110, 264, 271, 280, 300, 301,319, 320, 322, 332, 338, 375, 387, 402, 403, 415, 418, 423,433, 447, 451, 453, 466, 467, 469, 488, 490, 517, 529, 530,534, 537, 541, 542, 545, 572, 574: n = A,T,C or G
gtnatacgactcactatagggcgaattggagctccaccgcggtggcggccgcccgggcagggtccccggnanttccanaattttncntggcntcnaaggtcctttgaggnagaaggctctggggcttctgcttgtccctttggagggtgtcttctgggtagagggatgggaaggaagggacccttaccccccggcccttcttcctgaccttgccaataaaaatttatggtcccaaggggaaaaaaaaaaaaaaaaaaataattngttcctnggccgtttnaaaactagttggatcccccnngcttgcaggaaattaaanntnaagcttattnataccnttcaaaccttggagggggggccccagtacccccaatnttttttgtttcnctttttaattgaagnngttaatctgccnccncttgngcattaatcnattggttcaattangccntntttttcccttgtnngnaaaaattttgttttttccnantttcacaaatttttcccaacaaccaanaattaccgtaanncccntgnaatnnaantaaaaaagttttttaaaagccccttgngn

SEQ ID NO: 1466 - DNA, 496 bp, Homo sapiens
  misc_feature 2, 4, 174, 325, 383: n = A,T,C or G
gntngggggccgcgtaatacactactatagggcgaattggagctccccgcggtggcggccgcccgggcaggtacttttttttttttttttttttttttttgtagggatggggtctcgatttgtctgcccaggctggtatcaaactcctgggctccagcgatcctcccgactcancctcctgagtagcttgggattacaggcacgtgcccacacacgtggcatcatacacccattttacaggtgaggaaattgtggttcaccgacagtaagtgacttgcctaggatcacacaggtagtaaatggtggagccagtagttaaaatcanatgagtccctaagtcttctgttctcccttacttgtgttctgttttttgaatccctaanagctttgtgcaatgcccctgtctgctggatgaaccaacaaacactgctttaaaactctaccaaaaagtgaatcccgcgtacctcggccgctctagaactagtggatcccccgg

SEQ ID NO: 1467 - DNA, 496 bp, Homo sapiens
  misc_feature 2, 3, 7, 8, 14: n = A,T,C or G
gnncggnncgccgnatcactactatagggcgaattggagctccccgcggtggcggccgcccgggcaggtacccgggaggctcgcatgtgtgggtgcatgccgtggcaggagaaggcacgtttatccagagagttgattctccttaataccaggaaactaggcaacagcagggaggggacaatcatgagtcctaggcaggaaaggtcctctggagagaggaaatggcacacgcgcccccgcgtacctcggccgctctagaactagtggatcccccgggctgcaggaattcgatatcaagcttatcgataccgtcgacctcgagggggggcccggtacccagcttttgttccctttagtgagggttaattgcgcgcttggcgtaatcatggtcataagctgtttcctgtgtgaaattgttatccgctcacaattccacacaacatacgagccgggagcataaagtgtaaagcctggggtgcctaatgagtgagctaac

SEQ ID NO: 1468 - DNA, 562 bp, Homo sapiens
  misc_feature 2, 3, 8, 9, 12, 13, 14, 81, 128, 141, 153, 170, 193, 204,235, 248, 275, 324, 328, 337, 339, 344, 347, 349, 361, 362,364, 372, 375, 377, 379, 380, 387, 388, 397, 398, 399, 404,406, 409, 414, 418, 420, 421, 422, 425, 428, 432, 436: n = A,T,C or G
  misc_feature 437, 440, 445, 447, 448, 449, 453, 454, 455, 459, 462, 464,465, 467, 469, 476, 480, 482, 483, 484, 489, 490, 491, 495,496, 498, 503, 508, 510, 516, 520, 521, 531, 533, 534, 535,539, 540, 541, 545, 549, 551, 552, 554, 558, 562: n = A,T,C or G
gnnatccnnacnnnctatagggcgaattggagctccccgcggtggcggccgaggtactttttttttttttttttttttttncctttttaaaaaagttatttatttattcttttttttttttttttggnaaggttgaatgcncttttggttttnggtcatgttcggttggncaaagataaaaactaagtttganagatgaatgcnaaggaaaaaaatatttttccaaagtcccatngtgaaaattgtcncccattttttgggcttttgagggggtncagttggggttgcttgtctgtttcccgggtttggggggaaagttggttngggngggaagggntnccctntcngngattggatggcnntntttcctgntancnannacatgtnnccctcccannnaaacnanccnacttntctntnnnttntgnggtnctcnnatncactncnnnactnnngatncananntngntcttctntcgntnnnactcnnnatanntntctcnatttnantggttntatnnatctatcatnannnctcnnnctgntcantnngncccnctan

SEQ ID NO: 1469 - DNA, 491 bp, Homo sapiens
  misc_feature 1, 180, 203, 217, 232, 252, 372, 468: n = A,T,C or G
natcactacttagggcgaattggagctccccgcggtggcggccgaggtacttttttttttttttttttttgccccgcagcttttattagccatcgttacagtctctcgtccacaaacactgcccagctcccttcccagggcactttactggaggcaagtgcaaaacactgtggtgctttntattcaaagaaacagaagatgtngctgtgggtggtanacgggacagcccagnttacccaccagttttacagnaaggatcccgcagtgagctttgatacagatatgaggatagatgacggtaaagggggaaaagagtttaaaattatcaagtttcctctttgaagtgtcttttcccaaggcactgtgaagaanactgctgctagcaattttctagggactaaacacaccgatgggaatataaatatttcaaacacaaacccctgttacattcttacaggttagtttcancacttaggtctcttcttagcttt

SEQ ID NO: 1470 - DNA, 811 bp, Homo sapiens
  misc_feature 8, 25, 27, 43, 64, 74, 97, 98, 106, 113, 117, 150, 155, 156,157, 167, 168, 184, 187, 195, 196, 212, 216, 226, 235, 241,257, 264, 275, 294, 299, 328, 333, 366, 397, 520, 559, 562,586, 617, 633, 650, 697, 712, 716, 802: n = A,T,C or G
ctatgggngacagatgtgaggcatncnaccccccggtggggcngggccccacggtaccccggtntcccttccanatgggcccaaaaaaaatatcttnntccccaanacaaaancccnaaaaattttgggaaaggaaaggggcaaaagggngcccnnnaaaaaacccnngaaagggcaatttttnggnaaagggcnnttttttttaaaaattncctngggaaccccnttgggaagnaaaaantggtttttacaggggnaaattgnattaaaccttnaaaaaattttccttaagtngggtnaaagaatcttggaagttacccttgccccnggggnccgggcccggcttccttaagaaaaccttaggtngggattcccccccgggggccttgcaaggggnaaatttccgaattaattcaaaaggcctttaattccgaattacccggttccgaacccttcagaaggggggggggggcccccccgggttacccccaagccttttttggtttccccttttttaagntgggaagggggttttaaaattttggccgcccgccttttnggnccggttaaaattccaattggggtncaattaaaggccttggtttttccccttggtnggttggaaaaaatttnggtttaattccccggcnttcaaccaaaatttttccccaccacccaaaaccaattacccgaaagnccccggggggaaagnccanttaaaaaaagggttggtttaaaaaaggccccttgggggggggttggccccttaaaattgggaaggttggaaggccttaaaccttcnaccaatttt

SEQ ID NO: 1471 - DNA, 499 bp, Homo sapiens
  misc_feature 6, 10, 13: n = A,T,C or G
gttagngggncgnatcactactatagggcgaattggagctccccgcggtggcggccgcccgggcaggtacgcggggggtccaggtttcagaaggtttgatgctatacattgtgtgaattttgaggttatgatggtggcccagagaaggttgggaggcattagtgtagtgttggagggatttgtgtctcacagagcatagatcgtattgtggaatttcattcttcacagaagctgtctccctctctgcccagggtgacattccatgggacgacaaggatttcaggatgttcttcctctggactgctctgttctggggtggagtcatgttttacttactgctcaagagatccgggagagaaatcacttggaaggactttgtcaataactatctttcaaaaggagtagtagacagattgggaagtcgtcaacaagcgtttttgttcgagtgacctttacaccaggaaaaactcctgttgatggggtaaatcattttattaat

SEQ ID NO: 1472 - DNA, 544 bp, Homo sapiens
  misc_feature 3, 5, 68, 98, 102, 106, 109, 111, 117, 127, 417: n = A,T,C or G
agngngcgcgcgtaatacgactcactataggggccgaattggaagctccacccgcggtggcggccganggactctggcgttggtaacaatggtttccnggancttnggntngtaacnactgcttccngggaacttctgcgttgtaaccactggcttcccgggactctgcgttgttaccactgctttccgggactctgcgttgttaccactgcttcccgggactctgcgttgttaaccactgcttcccgggactctgcgttgttaccactgcttcccgggactcttgcgttgttaccactgctttcccggggactctgcgttgttaccactgcttcccgggactctgcgtttgttaccactgctttcccgcgtactctgcgttggttaccactgctttcccgcggtaacctctggcgnttgttaaccatttgcttcccgcgttacctgccccgggcggccggctctaagaaactagtgggaatcccccggggcttgcagggaatttcgatattcaaggctttattcgataccccggtcggacctt

SEQ ID NO: 1473 - DNA, 497 bp, Homo sapiens
  misc_feature 2, 6, 7, 222, 354, 374, 383: n = A,T,C or G
gnaggnnccctatcgactccttagggcgaattggagctccccgcggtggcggccgcccgggcaggtacatccaaattgggctacgaaaagtggcaagtttgattgtagcatcatgtctttgagtgtcctattggactacagattagaggataataaagaacattcatttgaggtttcattgtttgcggaacttttcaacgaaatgcttcaaaagagattttnggtgtccgtatatacaaatcattactgtctcttcctgagaaagaggacaaaaaagaaaaggataaaaaaagcaaaaaagatgagagaaaagataaaaaaaaaaaaaaaaaaaaaaaaaagtccaccgttaanaagttgagcttttatcttanaggcagcanaaggttttggagccaaggaatgaaatgatgaggcgtccttcaggtaatgaacttcagcttgcagtgtgaaaggggcagggaagactggccagctgtcaaaaactggaacagtcc

SEQ ID NO: 1474 - DNA, 567 bp, Homo sapiens
  misc_feature 8, 9, 11, 13, 16, 132, 171, 192, 198, 203, 221, 224, 231,240, 261, 266, 275, 280, 286, 304, 319, 328, 330, 331, 333,335, 336, 344, 348, 355, 360, 363, 376, 388, 389, 390, 405,406, 410, 411, 416, 422, 425, 428, 434, 435, 436, 437: n = A,T,C or G
  misc_feature 454, 460, 462, 474, 480, 486, 488, 492, 497, 498, 500, 501,503, 513, 514, 520, 523, 525, 545, 554, 555, 556, 566: n = A,T,C or G
gtagcgcnnancnctnctatagggcgaattggagctccccgcggtggcggccgaggtacattttacaaaattaaagtcactttgtaggtatataaaaagttttaaaagttggtttattaatgagagtagtgnattacatttcttttcaagcagtaatttaaatattaaccngtttacttttttttaaaggcnatttanctttncagcctgggaccaacatnggngaaaccncgtattctnccaaaaattgaaaaattagcngggcnttggggggntcacncccggnagcgtgtttcttttgggngggggaaaccaatgngtctaaacngnncngnngggcaccngggntataccnacctntgngggcctttttccntaaaaaatcccnnnaaatttgggaccctnngccnngggcngggcgnttnttnaaaacnnnngtgggggtccccccccngggccngnacgggaaaattntcaatntttccnancccnttttnngnntncccccgggcnnaccccnttnangggggggggggccccccggnttcccccannnttttttttgnt

SEQ ID NO: 1475 - DNA, 492 bp, Homo sapiens
  misc_feature 7, 84, 143, 150, 152, 165, 176, 178, 179, 197, 210, 211,220, 244, 245, 247, 257, 282, 285, 287, 299, 300, 304, 312,327, 332, 333, 351, 365, 368, 379, 382, 391, 393, 398, 400,401, 415, 417, 419, 439, 445, 449, 454, 468, 479, 492: n = A,T,C or G
gtaggcnaacatacttagggcgaattggagctccccgcggtggcggccgaggtacttttttttttttttttttttttttttttnattttttttttttttttttttttttttttttttctttgggcaacactttattgggaaanatttacncncggggacctgtcntaggccaagcnannaaaaaagggccccagganccctggggtcccnnggggggctnaaaatggaacccatgggacggccnntntaaaactagnggatcccccgggctgcaggaattcnatntnaagcttatcgannccgncaacctcnagggggggcccggtncccannttttgttccctttagggngggttaattgcccnctnggcgtaatcanggncatagctgntncctgngnnaaattgttatccgntnanaattccacacaacatacganccgggngcanaaagngtaaagccgggggngcctaatgagngagctaactcacn

SEQ ID NO: 1476 - DNA, 861 bp, Homo sapiens
  misc_feature 3, 4, 6, 12, 13, 14, 16, 17, 18, 20, 23, 25, 28, 30, 33,34, 35, 37, 38, 41, 44, 48, 51, 53, 58, 62, 63, 64, 67,69, 79, 81, 82, 86, 95, 98, 100, 103, 104, 111, 127, 148,204, 221, 278, 279, 287, 306, 315, 320, 324, 331, 358, 360: n = A,T,C or G
  misc_feature 374, 381, 385, 401, 404, 405, 408, 414, 420, 436, 440, 445,449, 450, 455, 472, 481, 491, 492, 501, 502, 512, 516, 522,526, 535, 541, 546, 552, 554, 556, 560, 567, 573, 577, 597,605, 607, 619, 634, 636, 643, 646, 658, 662, 672, 673: n = A,T,C or G
  misc_feature 695, 696, 698, 700, 701, 703, 706, 707, 718, 721, 723, 726,741, 752, 756, 761, 763, 764, 765, 772, 773, 781, 783, 784,791, 795, 796, 815, 832, 857: n = A,T,C or G
aanncnactatnnnannngnaangntananaannnannaanaanttanacnanacaantaannntananaataactcantnnaaanatatttaanaananatnnaaagtgngggttaaaatcctttnggcgaatcggactccaccttnggtggcggccgaggtacatttccttgtagactctgttaatctcctgcagctcctgntttggtttctggagcanatgaatctcaatgaggagagtcctcgtcggttcccagcccctttatggaagctttannctcagaancgtcatactgaaacaggcntttttcaanaaggncccnaaaaaancacccggtttttccaagggtagggccnanaaaaaaagggcccnaactttncaanatgccttgaaatgccnaanngtnttcccntttttnaggggtcccccttctncctnggggntaannggccnaaaaaggccaaattaantcccctggnacttcttggnnggccaattnnggcccccccnggcnggtaancccnggcccccgngggccnaaggnccagcntncntaanaaaaccnaaagtngggnaatccccccccgggggcccntggcaagngnaaaatttatccnaattattcaaaaggncntttaaanccngaatacccccgncccnaaaccccttnngaaggggggggggggccccccnngntnnanccnnaaaacatcttnttngntantccccctatttaagngggaagggggnaaanaaatntnnncaccccnnctatgggncnnaattaanaacnnttgggcttccatttaaaantcataagggccttccanccgttggaaaccaaaaacttacgcngcag

SEQ ID NO: 1477 - DNA, 494 bp, Homo sapiens
  misc_feature 2, 13, 22: n = A,T,C or G
gnaggcggccctnatacgactnctatagggcgaattggagctccccgcggtggcggccgcccgggcaggtacactcctcatcatcactgttgcttgagcaccgaagaagagtggcccagccttttgggtgcagctgtaaggacgtgatgcagtttccgtggtcactctcaccaagaacttcaggggttacgacttcaagactatttcgtggtgaaactcctgaactttgaagtagttcttcttgctcttaaaatgggatagctgcctacttctaaagacttagttaagtcaaggtcatgcaaaattaagagatatccagaggacgttgaaatcaacattttggaacaatctggtgttaacctcattcgcatgagaaaacgtgtgtgaaagaatttcttatgtggacacccatcttctgtatacctgttagtgtcccaaataatgacatttccatcaaatcctgatgttactaagagtcttgtattaagtatcat

SEQ ID NO: 1478 - DNA, 472 bp, Homo sapiens
  misc_feature 2, 3, 6, 24, 29, 47, 48, 404: n = A,T,C or G
gnnagngatttcgactttattctnctatngggcgaattgttgctccnncgcggtggcggccgcccgggcaggtacgcgggaacataaattgatttctcactgttctgtgggctagattggcaaagatcaaggcattggcatgttttatgtcttatgaggcctgcttttgaccactaagatggcactttgaaagctgtgtcctcacatggcaggaggatggaaggggaagaatgggtgaatgcaatgtgaaacctctttaatatcattattcccattcaccagagtggagcccttcttacttacctcctaaaaatcctacctgttaatactataatattggtatataagttttaacatatgaattttggagaacatatttagaccataataaatattaatagttncaccagatgtaataaatatcaagcaatataattaaataaatttctacctcataagtaaaactacagga

SEQ ID NO: 1479 - DNA, 461 bp, Homo sapiens
  misc_feature 2, 3, 4, 14, 15, 16, 28, 45, 48, 78, 85, 98, 451: n = A,T,C or G
gnnnggattcgacnnnatttcgaattcnggcgaatttttctcctngcngcggcggccgaggtacgaacttttctccanaggatanttaggttgcaccnttgtatttgtaaaacaggagcaaatttggaccttgccgggccaaagtcgtgtcacgtggaacctcttaatctcagcatccggagctccaggaagggaaaatttcaagtcagatagaattctatatataccatttctttggaaccttcagccctcaagattccaacatcatgacctcagtttcaacacagttgtccttagtcctcatgtcactgcttttggtgctgcctgttgtggaagcagtagaagccggtgatgcaatcgcccttttgttaggtgtggttctcagcattacaggcatttgtgcctgcttgggggtatatgcacgaaaaagaaatggacagatgtgactttnaaaggcctac

SEQ ID NO: 1480 - DNA, 465 bp, Homo sapiens
  misc_feature 2, 3, 6, 7, 8, 462: n = A,T,C or G
gnnagnnnggcccgtatcactactatagggcgaattggagctccccgcggtggcggccgcccgggcaggtactgtgagccagcactccctgacctcagggtgtgtgaggagttggcactgtagagagaaaccaagactcttcctcaatgcctgccttattctgagcacccacccttagctctgataaggatcccgcgtaccgtggcctacaatgacacacaaatcccattaaataaattataaacaagggtcaattcaaatttgaagtaatgttttagtaaggagagattagaagacaacaggcatagcaaatgacataagctaccgattaactaatcggaacatgtaaaacagttacaaaaataaacgaactctcctcttgtcctacaatgaaagccctcatgtgcagtagagatgcagtttcatcaaagaacaaacatccttgcaaatggggtgtgaccncgg

SEQ ID NO: 1481 - DNA, 462 bp, Homo sapiens
  misc_feature 2, 3, 7, 21, 34, 106, 389, 393: n = A,T,C or G
gnnaggnttccgctaacactnctttagggcgaantggagctcctttgcggtggcggccgaggtacttgcacatccttttagttatctttttttatataagtaaagntcacacacataaattcacttgaatttgataatttggaacattggcaatgaatacagtgcctgttgaggcctgaaagagagaggaaatcaagaacagtgtgggagaagaaaggcaatccttcgttgaaaagcttttctcttaacaatccttagtgcctgaaaaataagccattttgataacaagagtataaaaagccttatgatctgcaaagtaaatcgtatctggtttaaatttcatcccaagtctcaggttatggctgaggagctatactaaggatctttgnagcncatttctttgaatttttataactaagacaagaaaatttttttatcagatctaggcagaaatactgatct

SEQ ID NO: 1482 - DNA, 465 bp, Homo sapiens
  misc_feature 3, 7, 9, 96, 173, 175, 176, 180, 185, 188, 189, 191, 192,193, 198, 199, 200, 205, 206, 207, 218, 224, 229, 233, 235,237, 245, 252, 253, 254, 265, 276, 280, 286, 290, 291, 310,311, 312, 314, 344, 348, 350, 351, 360, 369, 371, 372: n = A,T,C or G
  misc_feature 374, 406, 407, 408, 418, 425, 426, 431, 437, 440, 444, 450,463, 464: n = A,T,C or G
ganaggnanggccgaaacactactatagggcgaattggagctccccgcggtggcggccgaggtacttttttttttttttttttttttttttttttnctttttttttttttttttttttttttttttttttttttttttttttttttttttttttttttttttttttttttttnanngggnaaaanccnncnnnaatannntcccnnncaaaaaaaaanattaanaaaangggnananaaaaaaantacaaannnagaaaaactanaaaaaaaaaangggnaaaaanattnntttttttcccccaaaaaannntnttaggggccctaaattaaaaaaaaaaattnacananngaaaaatcnaaaaaaagnanngnaaaaaaaaaattaaaaaaaaaaaaccctaaannnaaacacccanaaaaagnnaaaanccccanaancccncgaatntataaaaaaaaannc

SEQ ID NO: 1483 - DNA, 525 bp, Homo sapiens
  misc_feature 46, 52, 75, 78, 79, 80, 85, 91, 100, 102, 107, 109, 114,123, 127, 136, 142, 149, 156, 159, 160, 162, 168, 169, 173,177, 195, 203, 207, 210, 211, 213, 219, 220, 224, 230, 251,261, 268, 277, 309, 327, 333, 337, 339, 355, 359, 364: n = A,T,C or G
  misc_feature 365, 380, 389, 399, 404, 408, 413, 416, 429, 434, 435, 438,440, 458, 473, 479, 490, 511, 519, 520, 522, 525: n = A,T,C or G
gcgtaatacgactcactatagggccgaaatggaacctccaaccgcngtggcnggcccgaaagtaacttttttttnttnnnaaaanaaaaanaaaaaacananagaananaaaanaaaaaaaanaaanaaaacaaanaaaaanaaaacanaaaaaancannanaaaaannaaanatanaaaaaaccaaaaaaaaanaaaaaaanaaanaannanaaaaannaaanaaaaanataaaaaaaaaaaaaaaaaanagaaaaaaancaaaaanaaaaaaaanaaaaaaaaaaaaaaaaaaaaaaaaaaaaaaanataaaaaaaaaaaaaaanaaaaanaaananaaacaaaaaaaaaaanaaanaaaannaaaaaaaaaataaanaaaaaaatnaaaaaatatntaaanaaanatatnaantaaaaaaaaaaanaaaannaananaaataaaaaaaacaaaanaaaaaacaataaaancaaaanatcaaaaaacnaataaaaaataacaaagaatntataaaannanaan

SEQ ID NO: 1484 - DNA, 1025 bp, Homo sapiens
  misc_feature 4, 82, 83, 84, 135, 141, 147, 159, 195, 216, 219, 221, 231,237, 246, 247, 254, 260, 277, 288, 289, 290, 292, 304, 306,311, 313, 316, 325, 326, 327, 329, 331, 333, 336, 338, 354,356, 363, 367, 371, 377, 379, 383, 388, 390, 393, 400: n = A,T,C or G
  misc_feature 404, 411, 417, 418, 419, 424, 426, 429, 437, 442, 447, 448,449, 451, 456, 461, 469, 470, 473, 474, 480, 485, 494, 495,496, 498, 506, 513, 515, 516, 520, 522, 529, 531, 536, 537,539, 541, 545, 546, 548, 549, 551, 552, 553, 558, 562: n = A,T,C or G
  misc_feature 563, 567, 573, 577, 582, 584, 590, 596, 600, 602, 603, 607,609, 611, 619, 623, 625, 627, 629, 632, 634, 635, 644, 646,663, 664, 667, 669, 671, 674, 681, 684, 686, 698, 705, 708,714, 715, 717, 719, 722, 725, 727, 736, 747, 749, 752: n = A,T,C or G
  misc_feature 753, 754, 757, 765, 779, 785, 791, 793, 794, 797, 800, 802,805, 808, 809, 810, 816, 818, 822, 824, 826, 827, 843, 847,849, 850, 851, 853, 855, 857, 861, 868, 872, 873, 880, 888,894, 897, 900, 907, 911, 919, 931, 936, 939, 943, 946: n = A,T,C or G
  misc_feature 949, 951, 952, 958, 964, 965, 970, 971, 974, 975, 976, 985,986, 992, 999, 1003, 1008, 1010, 1013, 1021, 1023: n = A,T,C or G
tagngcactactatagggcgaattggagctccccgcggtggcggccgccggcaggtactttttttttttttttttttttttnnngactgaatccagctttattaaagatactttccataaacaatcatggtattncaggcnggacanggtgcagacaantgtaaacagtatacaacaactttcaaactcccttcnaaatggactacctgaaaatcntanancctctataanacccantgaagtgannatcagangctctnaacagggaacagaaagngtgaagggtgnnnantggactattacnangatgntnaanacttaaccnnntnantnccngnctattatgattaatgncnaataatngccnaagntctcanangggnccttnantgnaaaattnacgngaagggngtagcnnnaaatntnccnctcacagntttgnggaannntnatagngttantttctttnncannagtggntcttntttgaaatnnngngtctcaanggcctgnanncagntnatttaananatagnnanancccnncnntnnnaacgngtgnnatcnggtcanacanatttngntgctcntacaantagngnnaaangntnattcgcgnttgngncnanttnanntggacctantngatatacccttacgttnnaantngnttngtggttnctnanatatgaccagcnaactatntgngatatnncntnagnggnantattatatngtaatgattangnagnnnccnattgatgntaaggctaaccacntatgtntactgngnncgnggncngtngtnnnggtttnanaatnangnnaaagcatgatgtgctngatntnnnantnanatantgactantacnncatcgtnagcggtgntcgatnctnttnttggatnattngtgtattnatcgatacaaantagcntangctntantantnntaaganggtganntatgnntannntctattatnngcgagngaagtanaganaatantntgngacaatanancg

SEQ ID NO: 1485 - DNA, 947 bp, Homo sapiens
  misc_feature 2, 6, 441, 640, 696, 705, 713, 718, 723, 736, 747, 756, 761,768, 771, 772, 774, 776, 779, 780, 781, 782, 784, 789, 790,805, 823, 824, 827, 831, 836, 838, 847, 848, 850, 854, 858,861, 863, 864, 866, 867, 869, 872, 874, 877, 881: n = A,T,C or G
  misc_feature 882, 885, 886, 891, 892, 893, 894, 900, 901, 905, 906, 913,922, 925, 937, 939, 942, 945, 946: n = A,T,C or G
tntggngcgtaatacgactcactataggggcgaattgggagctccaccgcggtggcggcccgaggtacatgaaaaaattcatactggagagaaaccctatgagaaccctaaccctaacgcttcagttgtcccagttctttcatgagcatgaaaggagtcacatagagaaaccccatgaaagtaagaaatttgggaaagccttcagtcctttctgtttctttcaactacgtgaaaggattcacggtggagaaagaccctgtaagataattggctttaaattacgagagacttgtgataggacagtaaaacctagagttggagttggatctctggattgtgttatgtcagtgttggtaggttaggaactagatttcccagaatccattccatttgtgattccatgatacaattcaccagtaacctatctttacatgagattcnggaagtaagttaagaaaggcattagtcatggtttggaagcaccatacagggagacagctgtgtgaatacaggctgtatggacacttgcttccatcccattttcctgcttctttgggttggcaatcaagagtatcctcaaaacgacttgactttaattttctcggagggggataggctttcacacagggtctccagaaanccccgcattggaatttccatccacactttggttttccttcagaccattattatgtntgtccctgncccgggcnggccnttctnagaactagtggancccccgggctngaggaattncgttntcaagcntanngntnccnnnnanccttnnggggggggcccgganccaacttttgttcctttnntgngggntaatngnccccttggnngnaacnaggncananntnntnccngntgnaatnnttnnccttnnnnttcccnnattnnccgggcnttagggtanccngggcctatgagngnctnctnnc

SEQ ID NO: 1486 - DNA, 803 bp, Homo sapiens
  misc_feature 3, 4, 9, 17, 18, 27, 28, 32, 34, 35, 37, 38, 39, 45, 47,48, 49, 50, 51, 52, 56, 65, 66, 75, 121, 129, 213, 250,251, 262, 290, 307, 310, 323, 334, 347, 365, 370, 374, 386,390, 417, 443, 454, 465, 468, 472, 514, 517, 521, 528, 546: n = A,T,C or G
  misc_feature 552, 555, 558, 560, 568, 569, 571, 577, 578, 581, 589, 597,598, 602, 603, 609, 610, 612, 615, 616, 617, 626, 633, 637,638, 639, 641, 644, 645, 647, 648, 653, 654, 659, 664, 665,667, 673, 674, 678, 685, 687, 688, 694, 695, 696, 698: n = A,T,C or G
  misc_feature 699, 704, 708, 711, 712, 716, 722, 723, 724, 728, 730, 735,738, 744, 745, 746, 748, 751, 755, 756, 757, 759, 761, 762,765, 778, 781, 783, 785, 786, 788, 789, 793, 796, 799, 800,801, 803: n = A,T,C or G
ccnnacttnatttattnnttcttaatnnaatntnnannntttttntnnnnnnaganggtattagnntgctacgcngccgcgcgcagtccgcctgactatactacctttagtaaataaaccnccctttcnggatgccactatctccgatggcactataccctctctaccttctataccactaaattaaaccaactcccctcctcctcccaagcnataaaataaaaatatacaaaccctgggccaaaatgannaaaatctgtcnttattattgccccacaatcctagcctcncgccgagacctcggcgntcnaaactaagtgatncccggctgagnatcgtataagctnatcgatccgcgcctcganggggnccgnacccaactttgntccnttagtgagggtaattgcgcgcttggcnaatcatggtataagctgatcctggtntgaaattgtanccgtcacaatncanacancatacgacccgcagataaagggataagctggggcgctaatantgnagcnaactaanattaattgcgtggtcttntgccgnttnaancnggaaaccnntnatgcanntgnataatagnattggcannctcnnggaagnngnttnnnatgtgcgtnttcgttntttnnntnatnntnngtcanngttgntgcgnnanagatannttantaaagcngnntacatnnntnnaatanaggntanntggnaaaatnnnaacnanagcanaanagcagnnncnaanaggnnntntnntgntttctatagtccnccntntnnannatgntanatnnntn

SEQ ID NO: 1487 - DNA, 480 bp, Homo sapiens
  misc_feature 1, 274, 302, 313, 327, 329, 331, 383, 385, 388, 394, 407,417: n = A,T,C or G
naatcactactatagggcgaattggagctccccgcggtggcggccgaggtactttttttttttttttttttttttttttttgcttccttgtctttggtttcattgttttttctttatcccatttccccctctagtggtctagaagtaataaatcctaatactgcgtttgtaatacttgctcttcacatatttgtatgcagccagtcacaagtggaatgtgactagaatccttgttactcaagaggctgaggttgaaggatcgcttgagctcaanaatttgagtccaacctgggcaacatggngaaaccccatntctaaaagaaaatncncncaaaactaagcttgattacttttatattttctccagaaacaaaaagaaatcncnctntgctgncatactcaccctncccacactgntccttcagcaacatataccattgtttttagttccgaatggttctactttccttatatctgtca

SEQ ID NO: 1488 - DNA, 492 bp, Homo sapiens
  misc_feature 5, 6, 10, 46, 217, 227, 239, 285, 305, 312, 357, 416: n = A,T,C or G
gtgcnncacnctactgactattgggcagctccccgctccccgcggnggcggccgcccgggcaggtactggcttccttgttaatcctttatccccttcaggtgttattcaaatgtcatcttctcaagaaggccttgtgtgattagtttattgaaattattccactcaactcctatgtctaacactattcaagtctcctttcctgcttcaattttcctnctgggcttcntaccaccatctnaacttgggaaaccatgtaatattgttgacattattttgggcttagnattaattttcaccccatttnagccatngtaaaacctccacgaaaggccttttattttactgcaagtattttnctgccaccctagaacagtatttgggttatataagcaaggtcactttaaaatattttgtntgaatggaagtgatgtaagaaggaagggttccaaaaaaagcccacttgggaagaatggtcatgggctttgacccgg

SEQ ID NO: 1489 - DNA, 473 bp, Homo sapiens
  misc_feature 43, 111, 303, 342, 345, 432, 434, 445, 446, 464: n = A,T,C or G
ctatagggcgaattggagctccccgcggtggcggccgcccggncaggtacagtggatttttcatttgcaaagacgttaagccctccaaatgtgcaaatcatgaagtcagtngttgttccagcaaggtttgcccagcggtaaaaaacaagataaaactaatgcactagctgaaaccaggtggggagaccatgtgtggtagtgcttgggggtggagggaaactatttctgaaatgaggacttaaagtataataccagcttcactgcctgttcacatgagaaaccaaagcttcaatttaactgcangcaataggagtttcacactgtcagcaccaactgtctaanatncaaaactagtatctaaatgtgtaggatcaaaaccaaaaatctggagggatctagttaaacttcaatatgcatgaccccagattcccntntaaaatatagnncaagtattttaatctttnccatagggc

SEQ ID NO: 1490 - DNA, 463 bp, Homo sapiens
  misc_feature 3, 4, 8, 21, 207, 209, 217, 218, 220, 273, 372, 377, 407,415: n = A,T,C or G
ggnncgancactcttagggcnaattggagctccccgcggtggcggccgcccgggcaggtaccttctttctggcagtgaatggtctgtattcctctagtgatgatgtgatcgaattaactccatcaaatttcaaccgagaagttattcagagtgatagtttgtggcttgtagaattctatgctccatggtgtggtcactgtcaaagantnaccccccnnanttggaaagaaaagccaggcaacctgcatttaaaagatgttgtcaaagttggtngcagttgatgcagataagcatcattccctaggaggtcagtatggtgttcagggatttcctaccattaagatttttggatccaacaagaaacaggaccangaagnattaccaaggttgggcaagaactggtgaanccattgtnagatgcctgcgcctgagtgcctctgcgccagcctcgtgaaggatccgc

SEQ ID NO: 1491 - DNA, 485 bp, Homo sapiens
  misc_feature 5: n = A,T,C or G
tatcnctactatagggcgaattggagctccccgcggtggcggccgcccgggcagggtacaatacaatctagatgacggtgcagactaagtcaagaactaaagttgtgcagtaacccgagttaaggcatgaatgcagacacacacatgcacacacacagcacccatgctatcaagacacaggattttttcagttgcctcatgagagggcaacctgggcttggcagttaatcagaactgctgagcattccagaaaatgccccccacgactttatgctaacagctgtgtgtatgttttaatcaaaaaattaaagaagaaaaaaaaaacctaaaaaacaaagaaaaaaacaaacaaaaaatcaccaaaaacctagaaaccccttaatctcttacaatggctcttgagcatggaactcatgtagcagcatcaatggctggctctttaacaatttggaaataaaagggttgttttactatgtatttctttg

SEQ ID NO: 1492 - DNA, 524 bp, Homo sapiens
  misc_feature 2, 4, 5, 8, 36, 43, 47, 98, 208, 212, 224, 227, 232, 246,251, 253, 256, 257, 260, 263, 280, 285, 288, 292, 319, 325,328, 332, 336, 339, 348, 367, 369, 375, 381, 385, 390, 392,401, 406, 418, 430, 431, 455, 491, 507, 521, 523: n = A,T,C or G
gngnntgncccatttgggaaaccggagctccctttnggtggcngccncccgtacgcgggatgtggcagtgagtggaggactgtggatgagtgaccccnttaaaagtaagatattgtcacataagctcttgagacagttaactcattatctgcagtttcttccattccacaataggctacttatttttaatgctgtatttacattgagnaaanacctcatgtttnaanttttnataaagaaaaaaantattnanctnnttntanttctaccagaaagggtnggacnatnttcnaaaaagggcaccgggtgaaattacctnatggtncanatgnaccngcnactgctttngcccatatgcccaaggganantaccanttgggntcanaaaananccatgaaantgggnggaaaaaaactnattcactttcannaaggataccttgggcccattcaantcaaagggtaccttgcccggggccggccgctctagnaactaagtggggatanccccgggctgcaangna

SEQ ID NO: 1493 - DNA, 787 bp, Homo sapiens
  misc_feature 7, 18, 21, 22, 24, 26, 29, 30, 31, 32, 35, 37, 40, 41, 42,43, 45, 47, 49, 57, 58, 63, 67, 76, 78, 80, 81, 87, 91,93, 94, 96, 133, 135, 144, 213, 235, 285, 287, 291, 293,297, 303, 310, 313, 314, 321, 327, 335, 337, 338, 346, 347: n = A,T,C or G
  misc_feature 351, 358, 367, 373, 398, 400, 402, 405, 409, 435, 459, 466,472, 474, 479, 484, 485, 486, 491, 492, 495, 499, 518, 520,522, 524, 528, 533, 556, 564, 572, 578, 584, 588, 594, 605,611, 616, 639, 645, 650, 654, 659, 663, 670, 680, 683: n = A,T,C or G
  misc_feature 686, 690, 697, 701, 702, 715, 724, 725, 734, 741, 747, 761,767, 774, 778, 786: n = A,T,C or G
tcttccnaactacacttntannancnttnnnntantnctnnnntntntnattttttnntattnaatnttttttatntntnnataatntaantnntnattggctcatatatagggcgaattggagctccccgcngnggctttgtntaatgataggaattattcctttaatttaaaaaatactttcaattttttaacagttttttccttacttgnccaatgggatgtaggaattcangaatggatcctgccattgctttggtgctggccattatcactaaactggtngncccnancttnacctgngcccccnaanntttttcnaatttnaaaaactngnnaacccttnnggtncggattnttaagaaanaccttnagatggggaattcccccccccgtgngncntgncaantggaaaaattttctcaaattatttcnataagcccttttaattttcgtaantaccccngatccncntaacnccttnnngaaannggngggnggggggtcccccccggggntnancntccncaagnccctttttttttggtttatcccncctttttnaaagtctnggaaangggggnatcntaaaantttttggcccnacccgnccttntggggcccgttaaattccaattnggggtntccanttanggccnttgnttttttncccttgggtnggntgnaaanaaaattnttgnntttaattcccccntcttttcannccaaatttntccccancaaccnaaactaattaaccntaatancccccgngggntaagtccnt

SEQ ID NO: 1494 - DNA, 583 bp, Homo sapiens
  misc_feature 197, 205, 211, 213, 218, 219, 225, 229, 252, 257, 259, 268,275, 276, 287, 311, 316, 328, 331, 336, 348, 366, 394, 396,410, 420, 421, 429, 430, 436, 438, 443, 445, 450, 454, 457,465, 476, 485, 488, 506, 514, 516, 519, 521, 535, 537: n = A,T,C or G
  misc_feature 548, 568, 583: n = A,T,C or G
gttgcgatcactcttagggcgaattggagctccccgcggtggcggccgaggtacgcggaacaatcaacagtttctgatgttccgagggacctggaagttgttgctgcgacccccaccagcctactgatcagctgggatgctcctgctgtcacagtgagatattacaggatcacttacggagaaacaggaggaaattngccctggncaaggnantttannttgggncccngggagcaaagttcttacagcttncccantnaagctgggncctttannaccttgggagntttgaatttattaccccattccancttgntggtaattggcntgntcaancttggcctcgtngggaaagaacaaggcccncccgccataggccatgcaaaggccccananttttcccaatatanatttaacccnnaaaaccannaaaatntntggancnaaaancccnatncccctatnaattggccaangttggaacncgnattgtttttccatggganccaaaacnantcnanttttagtttggttnanaaggttgggcnttgtccttttccaagggttncccccccttgttttn

SEQ ID NO: 1495 - DNA, 461 bp, Homo sapiens
  misc_feature 20, 201, 203, 214, 220, 221, 268, 277, 413: n = A,T,C or G
gttggatcactcttagggcnaattggagctccccgcggtggcggccgctctagaactatgtggatcccccgggctgcaggaattcgatatcaagcttatcgatacgtcgacctcgagggggggcccggtacccagcttttgttccctttagtgagggttaattgcgcgcttggcgtaatcatggtcatagctgtttcctgngngaaaaatggtnaatccnnttcacaatttccacaccaaccataccgaagccggggaagcataaaangtgtaaaangcctgggggtgcctaatgagtgagctaactcacattaattgcgttgcgctcactgcccgctttccagtcgggaaacctgtcgtgccagctgcattaatgaatcggccaacgcgcggggggagaagggcggttttgncgtattggggccgctcttcccgctttcctcgctcacttgactcgctgc

SEQ ID NO: 1496 - DNA, 516 bp, Homo sapiens
  misc_feature 6, 20, 32, 187, 213, 220, 224, 285, 304, 322, 439, 447, 466,470, 481, 486, 489, 501, 507, 512: n = A,T,C or G
tgcgancactactgagggcnaattggagctcnccgcggtggcggccgaggtacgcgggggcatgcaggcgtgcacgtttcccggctctccgcgcggccgctctagaactagtggatcccccgggctgcaggaattcgatatcaagcttatcgataccgtcgacctcgagggggggcccggtacccancttttgttccctttaatgaagggttnaatttgncccncttggccgttaattcatgggtcataagcttgttttcctgtgttgaaattggttatcccgcntcacaaatttccaacacanacattaccgaagcccggngaagcattaaaagtgtaaaaagccctgggggtgccttaaatggaagtggaagctaacttcacattaatttgcgtttgcgctcacttgcccgctttccagttcggggaaaaccctgtncgtgccangcttgcatttaatgaaatncggncccaaccgccnccggnggnagaaggccgggntttgcngttanttgg

SEQ ID NO: 1497 - DNA, 833 bp, Homo sapiens
  misc_feature 2, 6, 8, 10, 13, 15, 17, 18, 21, 22, 27, 28, 35, 38, 40,43, 44, 45, 46, 48, 52, 60, 64, 66, 69, 72, 80, 85, 86,87, 91, 93, 96, 99, 107, 109, 111, 114, 116, 176, 188, 267,281, 289, 295, 299, 311, 319, 330, 331, 341, 347, 368, 374: n = A,T,C or G
  misc_feature 377, 392, 413, 414, 422, 442, 449, 456, 462, 468, 496, 501,506, 519, 529, 545, 554, 555, 571, 581, 588, 595, 597, 599,600, 603, 607, 625, 626, 627, 631, 633, 641, 655, 661, 662,666, 669, 684, 693, 694, 695, 698, 699, 700, 705, 707: n = A,T,C or G
  misc_feature 713, 721, 730, 738, 747, 749, 751, 779, 784, 786, 792, 805,826, 827, 833: n = A,T,C or G
cnttancnanttncncnntcnntatannttgtacnttnanccnnnnantttnttcaactnaatntnatnctnttaataantcatnnngtananaanatncatcattngngntancntacttagggcgaattggagctccaccgcggtggccggccgcccgggcaggtacacttatngttgagagccangtctcccttatcattggtgaatgagaatgagctactgaaaacaaaaagagggtcttctacttcagcctgtacccctaanattttattatcagnaaagcagnagattnaccngtcctttacttnttttaccncccttttaatnngggtaaaaanaaaaanggtaaatgttttccccttatntaaaanaanatttccctttccccnggttttcctaacccccttggnnaaaaaacnttttttaatgggcctttttnttccctnggttttnacccantaaaantccaatggggccaatgggggggggcctnaatgnaaacnccttaaaaaaccntcaatttttntttgcaaaaatttcgngggcagggnnttggttttctgaaagnggggccttantaaaatnttttcantncnntgngccnttaatttttgggaaccannncaananttttggantaaaataattgggnttgggnnttcncanattttttctccatgnaaggatcannnacnnnttggnantaaacncataacantatcttctntggggtantcccccacnantnttatttccaaaaattggggggggggganggtgnanaatttnttttttatacctntcaaaattccaagggttttannggtggn

SEQ ID NO: 1498 - DNA, 467 bp, Homo sapiens
  misc_feature 7, 9, 11, 181, 194, 205, 210, 211, 212, 248, 251, 256, 257,258, 260, 281, 284, 285, 306, 310, 312, 324, 332, 340, 407,425: n = A,T,C or G
tgcttcntncnactacttagggcaattggagctccccgcggtggcggccgcccgggcaggtacgcggggggctgcatgctgtggaggagggtttcagaggagagaggtcggagagcagaggcctgagaagccagaggcaggtggagagagggtggaaagtgagcagcgggctgggctgganccgcacaccgctntcctcccatgntaaannngcccctttagaaaaatttcacaaagtcccccttccnaantaaannnanatatatattttataagttacnctnnggccgctctagaaactatggngggnantcccccggggcntgcagggnaatttcgntatcaagcttatcgataccgtcgacctcgaggggggggcccggtacccagcttttgttccctttaantgaaggggttaatatgcnccacttggccgtaaattcatggggtcatagctgtttcctgtt

SEQ ID NO: 1499 - DNA, 468 bp, Homo sapiens
  misc_feature 195, 197, 199, 202, 210, 226, 228, 247, 256, 260, 372, 393,397, 458, 468: n = A,T,C or G
tagggcaaattggagctccccgcggtggcggccgggcaaagcgatcggaacccgggaatgaaatcgtcccaggcgcggagtggagcgatattaacgtccatgttctcagctttgcgttcttcgcctccagaatctggcggcggcggcggcggcaaccgatcagctgagctgagttggagagttgacaacccccgngntnccntttggccngttcttagaaactaantnggatccccccgggctgcanggaatttcnatantcaagcttatccgatacccgttcgacctcgagggggggcccggtacccagcttttgtttccctttagtgagggttaattgcgcgcttggcagtaaatcattggtcataagantgattttcctgtgtgaaaaanttgnttaattccgccttcaccaaattcccaccaccaaccattactgaagccctggggaggcatanaaaaagttgn

SEQ ID NO: 1500 - DNA, 576 bp, Homo sapiens
  misc_feature 2, 7, 128, 192, 195, 200, 216, 222, 224, 226, 238, 241, 249,263, 266, 272, 278, 279, 281, 282, 286, 288, 289, 292, 300,304, 308, 315, 316, 323, 327, 333, 336, 341, 343, 359, 361,362, 368, 369, 377, 384, 398, 408, 409, 414, 420: n = A,T,C or G
  misc_feature 422, 423, 426, 427, 429, 434, 438, 441, 442, 450, 451, 454,457, 459, 463, 464, 473, 474, 478, 481, 486, 493, 499, 502,511, 519, 521, 525, 527, 538, 542, 543, 547, 551, 552, 555,557, 560, 565, 570, 573, 575, 576: n = A,T,C or G
gngcgancactactactgactatagggcgaattggagctccccgcggtggcggccgaggtacgcgggtgttcctttttgtccaaagtctatttttattccttgatatttttcttttttttttttttgnggatggggacttgtgaatttttctaaaggtgctatttaacatgggaggagagcgtgtgcggctncancccancccgctggtcactttncaaccntntntccacctgcccnctnggcctttnaaatgccctatggnttnttcccnaccttnntnntccntnntgnaaaaaccnttcnctcncacaagnntggcaancccncaatcnctnccccngncttccccccccataantnnttggtnncatgccgntcccttncttgtacccccccnggggtttttnnaatangaaccnannttnntncccanaaanccnncaaaaagnngcnagntntttnnccccccccnnaaanggngttgngggaatnggaatngcnacataaaanaaaacttncntggnanaccttgccccncggnntccngggnncantnttnatatnaaaanccnann

SEQ ID NO: 1501 - DNA, 469 bp, Homo sapiens
  misc_feature 6, 7, 25, 206, 209, 213, 214, 224, 258, 284, 355, 393, 401,429, 440, 465, 469: n = A,T,C or G
gtgcgnncactacttagggcaaatnggagctccccgcggtggcggccgtttgagaagccagcgctcacccacccggggtctctgtgcattgacctttgggtgctgacttggagaaaagcacaaacacgaccagtcccatcctggctcccgtggggcttcttctatctacgcattgtatcgactgcattagttggactaagaaggangcntcannttaaaagggnggagacaaaatgcctgaactggtctaaagccaangaaatgggccccaaagctgggcaagnaaaaagcaccactgcatacatagggatacagaagggcagagcttctgcctgcggatctgcaacattacatnttgtttttgcctgcaaactatcaagaaggatttcttgnttggccanggggagtctccacctgaaacaaaacaanaatggcaggtncaaaaagtcttggagtgatctattnccan

SEQ ID NO: 1502 - DNA, 518 bp, Homo sapiens
  misc_feature 10, 12, 66, 78, 163, 176, 189, 206, 208, 213, 221, 223, 224,228, 233, 248, 272, 285, 296, 305, 306, 309, 336, 343, 347,406, 418, 427, 433, 440, 450, 453, 460, 464, 476, 485, 493,496, 497: n = A,T,C or G
gtgcgtcttncnctactatagggcgaattggagctccccgcggtggcggccgtgggacctgcaatnactacgcaaacncttacagcttttggctcgccaccatagagaggagcgagatgttcaagaagcctacgccgtccaccttgaaggcaggggagctgcncacgcacgtcacnccgctgccaagtntgtatgagaagaacatntngaaanccctggantnnctanatgtnaacaacattggtgcntactttcttctttctttttttgtntaaccagcaaacnaaacccttaanaaattatanncgntgtgttaccctcggctcgacttctagnaacctangtgngatccccccggggtcttgcaggggaattccgattttcaaagcttatctgatacccgttngaccttcgaggnggggggccncggganacccagncttttttggnttnccctttnagtngaagggtttaantttgccgcnctttgggnagnntaaatcatggggttcaattag

SEQ ID NO: 1503 - DNA, 595 bp, Homo sapiens
  misc_feature 1, 3, 7, 79, 127, 128, 144, 187, 188, 197, 206, 215, 217,226, 229, 231, 254, 263, 264, 277, 281, 288, 291, 297, 299,300, 301, 318, 336, 346, 349, 352, 355, 360, 361, 364, 372,375, 376, 379, 383, 385, 387, 389, 390, 396, 398, 399: n = A,T,C or G
  misc_feature 410, 414, 415, 422, 428, 431, 434, 451, 452, 461, 466, 483,486, 490, 491, 498, 502, 507, 509, 514, 515, 518, 521, 526,535, 539, 545, 549, 561, 572, 579, 581, 582, 586, 589, 590: n = A,T,C or G
ntncgancactcttagggcaaattggagctcaccgcggtggcatgcggccgcccgggcatggtactcctgccaaggcangctcccaccgctatgggcacaaggaagttgtcgtcatctgcactgcanncttgagctgtagaatnctttccttgtgtcacatatgaaaggctgaacccttagatcaannggtatttanttttgaaanttccttccnancactgaaancangnctgctttcttttggttgccaccntattatacnnaatctttcccatngggngggccanttnccaagntnnncttgaagaatctgtatntttctggcaattggctanaaaaataccnganagnccnatttnnacncaaaaatnacnnttngcantnantnntttccnanntttaccctttncagnnatttttnatccanggnttnttttattttattttttnnaaataacgnatatntaccatattgaaccctnatntaanncctttanattnttttngnccttnntanttnggganttttttacnttcntaatanattntttttttgaaanatatcttttgnggagttnanntaantgnnttctt

SEQ ID NO: 1504 - DNA, 480 bp, Homo sapiens
  misc_feature 1, 2, 99, 101, 109, 118, 121, 124, 180, 181, 189, 203, 204,210, 211, 212, 214, 220, 269, 272, 290, 307, 346, 368, 395,411, 415, 445, 448, 449, 458, 461, 463, 469, 476: n = A,T,C or G
nntaggccctatcactacttagggcgaattggagctccccgcggtggcggccgaggtaccattggtggccaattgatttgatggtaagggagggatcgntnacctgatntgttatatnaangantcaacgggctgaacaaggaacatcagcatcctttatgaaatggatccccaacaatnncaagacanccgtctgttacatnncacctnnntnggcctnaaaaatggcagtcaccttcattggcaatagcacagccatccatgagctnttnaagcgcatctcggatcanttcactgccatgttccnccggaaggccttcctccactggtacctcggccgctctanaactattggatcccccgggctncaggtaattctatattcaagcttatcngataccgtccaccttntaangggggggcccccgtaacccaaactttttgnttnnctttaaatnaangngtttanatttgcnaccc

SEQ ID NO: 1505 - DNA, 459 bp, Homo sapiens
  misc_feature 2, 3, 4, 41, 195, 352, 378, 396: n = A,T,C or G
gnnnaggcccgtatcgactacttagggcgaattggagctcnccgcggtggcccgcccgggcaggtacgcggggtcccaaccaagccctccagcaaggattcagagtgcccctccggcctcgccatgaggctcttcccgtcgctcccggtcctggtggtggttctgtcgatcgtcttggaagggagtggttttcanagacatttcagaaagtgaaggagaaactcaagattgactcatgaggacctgaagggtgacatcccaggaggggcctctgaaatttcccacaccccagcgcctgtgctgaggactccctccatgtggccccaggtgccaccaataaaaatcctaccanaaaaaaaaaaaaaaaaaaaaaaaaangtacctcggccgctctanaactaggtgggatcccccgggctgcaggaattcgatatcaagcttatcgatacccgtcgacct

SEQ ID NO: 1506 - DNA, 457 bp, Homo sapiens
  misc_feature 2, 3, 4, 5, 11, 12, 20, 92, 132, 139, 144, 145, 153, 157,160, 163, 168, 173, 176, 204, 238, 240, 241, 250, 252, 260,270, 271, 278, 284, 293, 303, 307, 321, 322, 325, 327, 333,341, 343, 345, 349, 350, 365, 388, 389, 401, 403, 414: n = A,T,C or G
  misc_feature 415, 427, 436, 440, 442, 453: n = A,T,C or G
gnnnnggcccnnatcgactncttagggcgaattggagctccccgcggtggcggccgaggtactttttttttttttttttttttttttttttngcttttttttttttttttttttttttttttttttttttancaaaaanagggnngaagtttntttnttntanccccnttganacnttttgaaattggaattggtaaaaaaaanaaaacaaaaagcctttgaattgtttttgggggancnncaaaaaaananaagtttcntttttttttnncaaattntactgnttccaaacnttttggaaanaaanaactggaattttgnnggncncttgcnctggttgncnanattnnaacaagaggaacccnttttggggttaaattttttttgnngggatttcaaananagtttggtttnnaaaaagcaaacngggccaacntccncnccaaatttttngatc

SEQ ID NO: 1507 - DNA, 455 bp, Homo sapiens
  misc_feature 1, 3, 4: n = A,T,C or G
ngnncccgtatcactactatagggcgaattggagctccccgcggtggcggccgaggtacctgtgtcaggagtccccaagcccactcccaaaatagaaaattcactaaaaggagtcaaaggattcagcatacagtaatattaacaactaagatttattccagcaggatacaaagcaaaataagaaaggaaaagtcgcatggggcaaaatcaggtgaaagcttccaagagtcctctcccaatggagttacacaggatgtgcttaatacctccagcaaccagttgtgacaatacatgcaaagagtgcaaagtcttgtccacgacggatgttctttttttttttttttgagaaagccttgctctgtcacccaggctgggagtgtggcaccgatctgggtgaagagcaagactcccgtctcaaaaaaacaaaagaaaaggaaaagttccagtccttgtct

SEQ ID NO: 1508 - DNA, 455 bp, Homo sapiens
  misc_feature 2, 3, 4, 5, 157, 172, 194, 196, 209, 221, 231, 255, 264,295, 296, 298, 303, 306, 342, 344, 367, 382, 435, 438, 440,455: n = A,T,C or G
gnnnnggcccgaatcgactacttagggcgaattggagctccccgcggtggcggccgcccgggcaggtacttttttttttttttttttttttttttttttttacagatgctttcagtttaatagttgttttaaattttttttttttttttttttaggntttaggctgaaaacntaaagcctgctgctcctgggtntnatttctcagcttntccttacagctntagtacatanaatactcctttttttaagtctaantagcttcanaccaaatcggtctgacccaaaatacctgctnntntgganagngggatggggagaaggtaactagaaaatgcaagatcntntttaccccaacagcataaaaccnccctagctggggctntggctgggagggaaatgctagtcattttttccccatgcacaaatggtttatanctntngtgggccaatatggn

SEQ ID NO: 1509 - DNA, 454 bp, Homo sapiens
  misc_feature 4, 200, 201, 203, 206: n = A,T,C or G
ggcnattggagctccaccgcggtggccggccgcccgggcaggtacgcgggaagaagggacaaaactaagggtaagcgaactttggttctaggaatggcaagaccagcaagaagatcaccattgccaactgtagcctttacacaatgtcatagtagcccaaattcagtcagctattgaattaagtttattggcttcctttnncnagntaaaagaatgtatgaatgcttgtctttagaagataacatcatatggaggttctacaacttcttagacacaattgtcaagcttttagtaaaattatactagacattcaagagatgggattgaaaaccaagagaaagggcagacaatagaaatatactcacagatgattcaggcagtggagttaagaccaggacttgaaataacaatgataattgttcaagaaaatagaagacagggaaaaaaaaaaaaa

SEQ ID NO: 1510 - DNA, 481 bp, Homo sapiens
  misc_feature 2, 3, 8, 10, 15, 205, 210, 211, 222, 227, 228, 229, 274,332, 356, 375, 382, 402, 426, 433, 448, 452, 466, 468, 475: n = A,T,C or G
gnnacgcnancactnctatagggcgaattggagctccccgcggtggcggccgcccgggcaggtactttttttttttttttttttttttcaggaactgtataattttggatattgaactgttctacttttttttttaaatttttattccccctatctttgccttgttcttctaagtctgaaaattttttctttttttcttttcaangttgnngtctaaacttntaatnnnaggtttaaagacctgctaatatgtatttaatttccaggttttttnagttttctatttcttttcacataacgtttcttcttgcttcagtcatataatatcctgngtttctgaatattaatcttcattngttttgaacattttttttnttaccanatgaagaggctgattgattnggagttttcctggacagggatatncatgagncctttttttaaaaangaancatggatgtttatnangggggtnagcctt

SEQ ID NO: 1511 - DNA, 473 bp, Homo sapiens
  misc_feature 2, 3, 4, 5, 8, 9, 10, 11: n = A,T,C or G
gnnnnggnnnnttcggctatctactactatagggcgaattggagctccaccgcggtggcggccgaggtacgcgggagagttctgcctcgcttcccggcgcggtcgcagccctcagcccacttaggataatggcgacagctgaggtacattgtgatacaacttcttcacagatgaaggccagcagagacagcaacagctgcaagcccttgagaacgcgccggagcaatgggagccggcccatgaaaaagtaggcagcgaggccgctccgggggcctctggcggggcccgggtcctcctccgtagtggggctgtacctgcccgggcggccgctctagaactagtggatcccccgggctgcaggaattccgataatcaaagcttatcgatacccgtcgacctcgagggggggggccccggtacccagcttttgttccctttagtgagggttaattgcgccgcttggccgtaatcat

SEQ ID NO: 1512 - DNA, 466 bp, Homo sapiens
  misc_feature 2, 5, 466: n = A,T,C or G
gnagnccctatcgactactatagggcgaattggagctccaccgcggtggcggccgaggtacgcgggagagttctgcctcgcttcccggcgcggtcgcagccctcagcccacttaggataatggcgacagctgaggtacattgtgatacaacttcttcacagatgaaggccagcagagacagcaacagctgcaagcccttgagaacgcgccggagcaatgggaagcccggcccatgaaaaagtaggcagcgaggccgctccgggggcctctggcggggcccgggtcctcctccgtagtggggctgtacctgcccgggcggccgctctagaactagtggatcccccgggctgcaggaattcgatatcaagcttatcgataccgtcgacctcgagggggggcccggtacccagcttttgttccctttagtgagggttaattgcgccgcttggccgtaatcatggtcatn

SEQ ID NO: 1513 - DNA, 481 bp, Homo sapiens
  misc_feature 2, 3, 4, 5, 6, 9, 473: n = A,T,C or G
gnnnnnggnggccgcgtaatcgactactatagggcgaattggagctccccgcggtggcggccgcccgggcaggtacgcggggcagattcatgttgtttctaattttttatatataattgacaaaatgaagaaacttaacaccatcctagattttagctgcccaaagaatgaaaagaatgaaaaaaaaatctttgaaaacccacaagtgatatggatctaatttatggttaaatagatatagataacaaacagaatacgcctgtttaaaactgttaaaatgacattggttctaattatacttttatttaaattgaaagacaaggcatttatatggtatctctaaccatcacaacttttgtgtgacaaaaagaaattatcaccaaaatacacctccttaagtaagtgtctgatttcacacttccagaaaaagtgctctttctggtcaagccagcaagaattgagaaagattaagnaaagtgct

SEQ ID NO: 1514 - DNA, 496 bp, Homo sapiens
  misc_feature 2, 3, 8, 472: n = A,T,C or G
gnnacgcnatcactactatagggcgaattggagctccccgcggtggcggccgaggtacgcgggctcccaaaatcctggggttacagatgtgagctaccactcacggcccaaatcttcttgatcatatgtttaaatatattttttaatatttggagcatgagttgtcacttcttgtttgccttttttataaggaaatgttggagagttacatcattgctaatgtagaaatgttaagtgggaaaaatatacagtttggtaaaataaactagattctacatttatttgtgggtttttttcccctcctttctttccacagcacttttgatatcaagcaagtggcttcctttttgagatattaaaaaaaaaaagaaaaggaaaaaagtaaatgaagcccaactacctaaccctttcttatttgtatttgttttagtattgtgaagttgtgttaaatagtacctgcccgggcggccgntctagaactagtggatcccccggg

SEQ ID NO: 1515 - DNA, 500 bp, Homo sapiens
  misc_feature 2, 3, 13: n = A,T,C or G
gnnattcctatcnctactatagggcgaattggagctccccgcggtggcggccgaggtactgttcccttctgatttggtctagataccagaatccattctcttccgtcaaacggaagacacaaggcacctgaggctgatccttcccagaaattaactccagaggctgccacatctggtatgagcgtccaaacccagcatcgacaatgtagttcctgccatcaatggtcacctgcaggagaaggtgaatcatgccagtgctgtattttttggctggagtgctgtaaacataccctcccaacatcgtggtctcaaaaccaatagtggtcagagcccagtacagaagatgattgacctggagacaccatccaccccgatttcttctcacaacttgatcaaaaatggcctctaagcctaagtccatggcatccccacaatgggatgttaaggttctcaaagggaacagcttcggatctggtgttgaagaatgtcagttaatgttt

SEQ ID NO: 1516 - DNA, 504 bp, Homo sapiens
  misc_feature 2, 3, 117, 131, 172, 194, 196, 200, 210, 230, 231, 255, 259,264, 265, 269, 274, 282, 289, 306, 313, 323, 332, 360, 365,376, 381, 404, 411, 416, 419, 437, 444, 451, 452, 459, 468,474, 481, 499: n = A,T,C or G
gnntacgccctatcactacttagggcgaattggagctccccgcggtggcggccgaggtacttttttttttttttttttttttttttaattttttttttttttttttttttttttttncactcagaaggggnctttattcatacttgttgacatttcccatggggaatggttnaagggaggggcagggagggctnancggnaacccacggnttggttttccctccatcccnnggggaaaaaaaactctggtagggncatnctaannaaangtgancagggganccatcantatgtggggctgaaatncactggncagtgacttnaggcaaccngagtccttttgtcaggaaatgcaatttntaagnggaaaaaaaancaagncccaaagaaaaaaacaaagggcntacaaancaaantgntaatgtaaaaaaaggttntaaggcncccaccnntgaaaanccaggggtntggagnggccccnggccatgccctgtcccantgccc

SEQ ID NO: 1517 - DNA, 496 bp, Homo sapiens
  misc_feature 2, 3, 5: n = A,T,C or G
gnngngctatcactactatagggcgaattggagctccccgcggtggcggccgaggtactccgaaacaagtagaaaagtgctgtttgagggattttattaaatctttttttaatggaatgtggtacagttagctgtcactcagctgacaccatgatgtggcagcagagagggaaacctacaagtggtttgcctcattgcctttgccacatctgaagttctcagcagcactaccttagacttcatgagctaataggaaactttttatggtgtaaatgctgtaagactttgtacctgcccgggcggccgctctagaactagtggatcccccgggctgcaggaattcgatatcaagcttatcgataccgtcgacctcgagggggggcccggtacccagcttttgttccctttagtgagggttaattgcgcgcttggcgtaatcatggtcatagctgtttcctgtgtgaaattgttatccgctcacaattccacacaacat

SEQ ID NO: 1518 - DNA, 474 bp, Homo sapiens
  misc_feature 170, 230, 399, 406: n = A,T,C or G
gggcgaattggagctccccgcggtggcggccgcccgggcaggtacttttttttttttttttttttttttttagtagaagcagggttttgccatgttgccccttgccagaatcaattctaattataggaaaaaagtttctgagtaatcaaaattttgcacatatttctggnggatttcatagtttagcttaggaaacttgaactcttactgagttgggtctgcccatgtangatgcctggtgttggtgtgtgcgctctcttggttatagaataatccacccgaattcttctaccatccagctccattccatttgccctttccatagcctataaagaacaggcacaaaaagtcaccgtataattcaccagtcttgaagtaatcattacttaaaattaagcncaaagtntatgtaatccaaataaactcctgattttgaaaatgacagcaatgtagcttgtacagggcatttgtata

SEQ ID NO: 1519 - DNA, 493 bp, Homo sapiens
  misc_feature 2, 3, 10: n = A,T,C or G
gnnaggcccntatcgactactatagggcgaattggagctccccgcggtggcggccgaggtacttcctcacagttctcacatatggaaaggatacacactttgtagaaacaagaactttatgttatccaagttctaggatagccatgagctccaattatctcagagctctgagtcctctactcaatacccattgagatttatgtgttctgaggcttttgtcttctagctacttacttcattctccatgggtaacggtcattcatccacattaactaatttcctcactccaagctcttttctagagataatctccagtccctgtgcagaaactgtcattgcactttctgctgaaatggcagtttcttctcagcaaggtgagattatggaatccagaatcttttttcaggggtcacatgcccatttccccacttgcatgaatgtcgacactgcagccacagttttggccgtaaatgtgaatttggcaagtaaccac

SEQ ID NO: 1520 - DNA, 508 bp, Homo sapiens
  misc_feature 163, 396, 399, 417, 437, 467: n = A,T,C or G
ggagctccccgcggtggcggccgaggtactttttttttttttttttttgttgcttaaaacaacagccattttatttaatatctcatgattttgtggtcaggaatgtggacagagctcagctgggagattgttccactccatgtagcatcagaagacaggtctnttggtgatattcagctggagaataagttaatatgcagagttcaagatggttttcactcacattgacacctttggcagggatggctggagggctgggctcagccagatcagttaactggcgtgcctgcatatgcactctccaccatggtgggtctctagaattgactcaaattctaagaatttggcgattgtatcccgtcagtccaagcaagctggtttaccgggaaccacccnagnctgcaagggccagggcanccgtgcctgcaaggccgtancatattgtttgctgaacaccgactcccttncagatgttcaggaattttaaacaggcaaagtaaacagaggg

SEQ ID NO: 1521 - DNA, 495 bp, Homo sapiens
  misc_feature 8: n = A,T,C or G
gttgcggncatacttagggcgaattggagctccccgcggtggcggccgaggtacacttcagtctcaattctggaactctaagaaaaaacgttccagacttctacgcagctgccacctcggaggacgggagagcgggggacgaggaaagatcaggataagaccctaactcccacaaatgactccaggaaagggagaccaccactccccgagctttggagcgccgcgcgggacccgcgtacctgcccgggcggccgctctagaactagtggatcccccgggctgcaggaattcgatatcaagcttatcgataccgtcgacctcgagggggggcccggtacccagcttttgttccctttagtgagggttaattgcgcgcttggcgtaatcatggtcatagctgtttcctgtgtgaaattgttatccgctccaattccacacaacatacgagccgggagcataaagtgtaaagcctggggtgcctaatgagtgagctaa

SEQ ID NO: 1522 - DNA, 489 bp, Homo sapiens
  misc_feature 2, 18, 164, 227, 398, 432, 453: n = A,T,C or G
gngtagccttatcgactncttagggcgaattggagctccccgcggtggcggccgaggtactttttttttttttttttttttttttttgggaggctggagtgcagtggcgcaatctctgctaactgtaacctctgcttcccaggctcaaaggatcttcccacctntcctttgtttagctgggactacagtagggcaccaccatgtccagctaattttcgtttttttantaaagatgggggttttgccatgttcctcagactggtatcaaactcctggcctcaaatgatcttcctacttaggctggccaaagtgctgggattacaggcatgagccaccatgcctgaactttaaaaagcatttctactatatgtttttctttttgattaccaaaaaacttntattaaaaatcttttaaagttcattcagcagaanaaggaattagtcaactttaanacatgttatttaaaattagccacttggggaaacaaa

SEQ ID NO: 1523 - DNA, 492 bp, Homo sapiens
  misc_feature 2, 5, 6: n = A,T,C or G
gnagnnccctaatcgactactatagggcgaattggagctccccgcggtggcggccgcccgggcaggtacgcggggaaaacggagtccctgaaataacagatgcagccacagatcagggccctgcagaaagcccacccacttccccttcatcagcctctcggggtatgctgtctgccatcaccaatgtggttcaaaacacaggtaaaagtgtcttaactggaggccttgatgcgttggaattcatcggcaagaaaaccatgaatgtccttgcagaaagtgacccgggctttaagcggaccaagacgctcatggagagaactgtttccttgtctcagatgttaagggaagctaaggagaaggagaagcagagactggcacagcagctcacgatggagagaaccgcgcactacgggatgctgtttgatgaatatcaaggcttgtcacacctggaagccctggaaattctgtccaatgaaagccgaaagcaaggtt

SEQ ID NO: 1524 - DNA, 499 bp, Homo sapiens
  misc_feature 2, 3, 8, 9, 11, 14, 20, 109, 126, 128, 133, 137, 145, 188,223, 241, 246, 256, 272, 287, 298, 303, 332, 335, 389, 463,466, 469, 472, 474, 476, 479, 490, 492, 493: n = A,T,C or G
gnncgtgnngnccnggcacngactcactatagggcgaattggagctccaccgcggtggcggccgccggcaggtacttttttttttttttttttttttttttttttttgnttttttttttttgggananaccanattntaaggaanatcccctcggggggagctccatggtgtgcattttggctttcanggtataaagggggaaacaatagggaaagacttggngcaaaagggaaggaacanaaacngacagatganaaaaggaagatgacancattgcaagtgtttntttaaatcctngccangccaggctttgtttagctaccctggtctnttnctgcataccccaacccccgtttcctggggaatggggagcaaaaaacaggatcanagcatgatctgaaaaaaacactgaaccttctccctgctggaaccccaaacccaccccgggtaccttggccggtntanaantantngnaancccccgggccntnnaaagaa

SEQ ID NO: 1525 - DNA, 501 bp, Homo sapiens
  misc_feature 2, 3, 4, 7, 10, 222, 397, 425, 436, 447, 471, 476, 486, 496: n = A,T,C or G
gnnntgnccnttatacactactatagggcgaattggagctccccgcggtggcggccgaggtacgcgggatatacagaaatgaaatgacacttctgggaggcagtagaagcaggaagtcaatgaattgagtagagggtcccattccctcaggctgtcattgatcagtgacaatttataaaaacaaactgcaaagtctgtggcaagtggctgcctgcttcctanaaaggagcccatgaaaggttaaactctgtggtcggtatttgcaagcgccgggcgtggtggctcacgcctgtaatcctagcaccttgggaggccaaggcaggcggatcacccgaggtcaggagtttgaggatttgcaagcaaaaggtcctctcctgagtctttcccagatacccancagtgcagaggctagctgtggaaggttncaatgggaccngaatggattgnattccttgccttacttgtcaccantgaanatttccaaanaattgggccnttacc

SEQ ID NO: 1526 - DNA, 503 bp, Homo sapiens
  misc_feature 2, 12, 218, 222, 223, 231: n = A,T,C or G
gngagttcactncttagggcgaattggagctccccgcggtggcggccgaggtactaacaaatgcagtagccaacaagattaccatgcaatcattaaggagaaccaaagtaagagagccactcaaaccagattttgaacgctactaaaattaaagtagttctttgatgaatatgaatgagtagggaaaggattctttgtaatagtgatacctctggggntaannagaagggnggtatgtgagttttagtctacagattatggcaaattcagtgacaacaatcaaatggtctaagattgacagtggcacagttttactctgtgaaggtaatgttcaggacaaatttcaagaaaactagaaaaccattctttacagctgaaatctttccctaaccattgttatttccacttttaagtcctcaagagatgagaaaagggaggtaaggcttccttatacatttcctgcacaatgaaacatttttcctcctccaggcaaagattcaagc

SEQ ID NO: 1527 - DNA, 518 bp, Homo sapiens
  misc_feature 2, 3, 7, 8, 229, 241, 357, 468, 488: n = A,T,C or G
gnngagnncacacttagggcgaattggagctccccgcggtggcggccgcccgggcaggtacgcggggaggtatgagcgccgggacctgtgacagggctggtagcagcgcagaggaaaggcggcttttagccaggtatttcagtgtctgtagacaagatggaatcatctccatttaatagacggcaatggacctcactatcattgagggtaacaagccaaaaaaactttntcttgtcaacangaacaagtcatcggctattgtggaaatattctccaagtacctcggccgctctagaactagtggatcccccgggctgcaggaattcgatatcaagcttatcgataccgtcgacctcnagggggggcccggtacccagcttttgttccctttagttgagggttaattgcgcgcttggcgtaatcatggtcatagctgtttcctgtgtgaaattgttatcccgcttacanttccaccacaaacattaccnacccgggagccattaaaagtgttaaagcct

SEQ ID NO: 1528 - DNA, 499 bp, Homo sapiens
  misc_feature 2, 7, 30, 57, 211, 216, 244, 269, 406, 455, 457: n = A,T,C or G
gntagtnactctacttagggcgaattgganctccccgcggtggcggccgaggtacanagtgcttttctgtttagtttttactttttttgttttgtttttttaaagatgaaataaagacccagggggagaatgggtgttgtatggggaggcaagtgtggggggtccttctccacacccactttgtccatttgcaaatatattttggaaaacngctcnttttaattctgattgatcagccaaaacngtccctgcccgggcggccgctctanaactaagtggatcccccgggctgcaggaattcgatatcaagcttatcgataccgtcgacctcgagggggggcccggtacccagcttttgttccctttagtgagggttaattgcgcgcttggcgtaatcatggtcatngctgtttcctgtgtgaaattgttatccgctcacaattccacacaacatncnaagccgggagcataaagtgtaaagcctggggtgcctaatgaa

SEQ ID NO: 1529 - DNA, 488 bp, Homo sapiens
  misc_feature 2, 3, 5, 477: n = A,T,C or G
gnncngccctatcgactacttagggcgaattggagctccccgcggtggcggccgcccgggcaggtacgtgaaggtgagagaaaagctgccaagctgcattttagtcagttgggcaacagtgaaaattttcttttagaggtggaaaaaagcctctctctagtgacctgggtagtttgcacggtttggctggaaaccacagtccccccatctctgccagaaccccccatgtggccactgtcctcagacagctcctggagcttgtggataagcactggaatggctccggctccctcctcctcaacaagaagtttctcggaaagtttgaagcaaaaactggtcagagtgctggaggaaaacctcattttgtcagaaaaaattcaacagttggaggaaggtgctgccatctcaattgtgagtgggcaacagtcacatacttatgatgatcttctgcacaaaaaccaacagctgaccatgcangtggcttgcct

SEQ ID NO: 1530 - DNA, 510 bp, Homo sapiens
  misc_feature 2, 3, 5, 8, 11, 36, 90, 214, 232, 233, 234, 235, 236, 242,246, 249, 302, 322, 424: n = A,T,C or G
gnngngcnttnaatacggcgaattggttttccccgnggtggcggccgcccgggcaggtaccaaaggtgcaatttatgactccagaagganttcaaaacacatcggaatcatgacagcaagataaccccaagacagtcttttatcaagttttgacggtttatgctgggcactgccagactgaaccagagctggaacacaataatgttcgagcggnccgcccggccaggtactnnnnntttttntttnttntttggataatactgtttattgtccacggaccgagcgattgctcaagaatgatncaaagcatcagagacatgcncagtctgcttgtcaactttcaacaactcttgtgtgttcccagcaccggaaggcctcagacttcatattccagcataaacacagtgctcccctcccccaaaantccaaacggaaacaaaatcaacagagctttaaaattacggcagcaagtccaatatttcttaatacttatcaagcaaaagatttgaa

SEQ ID NO: 1531 - DNA, 859 bp, Homo sapiens
  misc_feature 2, 3, 4, 5, 6, 10, 11, 12, 123, 210, 219, 225, 237, 249,255, 264, 270, 278, 287, 301, 323, 328, 338, 339, 349, 363,377, 380, 381, 387, 395, 428, 429, 433, 466, 516, 526, 528,555, 563, 583, 629, 630, 633, 636, 641, 655, 670, 677: n = A,T,C or G
  misc_feature 684, 686, 701, 709, 713, 717, 718, 731, 744, 746, 750, 753,761, 767, 775, 785, 795, 800, 813, 817, 819, 821, 827, 837,841, 842, 851, 854: n = A,T,C or G
gnnnnngagnnnttcgcgcgtcaatacttacttcactatagggggccgaaattgggtagctccaccgcgggtggggcgggccgcccggggcaggggttacgcggggggggggaatttggggtngggccattaccccacttccaagcaacaaccaaggaaagccattgaagggttttcaatggaacttcttccttctttcccttggaacanggcttcttngggcangggaagcccctngggttcttggtnccttantggaatccnagaaangggcccgncttttttgncccccaaagggaantcggggggggaaaacccctttnggccnttgaaaaccnnttaaaccaancctttaaaaaaagnggggaaaaaatttnccnnggtttnaaaaaaanaccccaaaggggtttttaacccccaaaaccacnngggnaccccaaaaagacccccaaggggaaaagccacnaaagaaattctccaagcccctttttttgggggaaaaaaaaaaggggcccnttattaaacngnggagggccaaaaaaaaaaaaaaggccnttgttggngggggggggggaaccttttnggggaaaaaaaacctttttggggaaaaaaaaaggaaatttcccacnnttnctnaaaanaaatttcttttttnaaaaaaagggccggnttgtgtnggttttnanaaaaggggggggcancccccccnccantttnntccaattttttanaaaaaaaacaaantncctnttnttaaagtntcatanaaaacccnttcctttggngccccccttnttttntaaaaaaaatacnttangngnggttanttcccccccngggnntttttttancgnaaaaa

SEQ ID NO: 1532 - DNA, 504 bp, Homo sapiens
  misc_feature 2, 3, 7, 15: n = A,T,C or G
gnngagnccctatcnactacttagggcgaattggagctccccgcggtggcggccgaggtacctgcagaagccagggcagtctccacagctcctgatctacttggcttctaatcgggcccccggggtccctgacgggttcagtggcagtggatcaggcacagattttacactgaaaatcagcagagtggaggctgaggatgttggggtttattactgcatgcaaacctcttacaaacttgcgggattcggcggaggggaccaaggtggagatcaaacgaactgtggctgcaccatctgtcttcatcttcccgccatctgatgagcagttgaaatctggaactgcctctgttgtgtgcctgctgaataacttctatcccagagaggccaaagtacctgcccgggcggccgctctagaactagtggatcccccgggctgcaggaattcgatatcaagcttatcgataccgtcgacctcgagggggggcccggtacccagcttttgtt

SEQ ID NO: 1533 - DNA, 479 bp, Homo sapiens
  misc_feature 2, 3, 4, 7, 8, 13: n = A,T,C or G
gnnnggnnacctntaacactttttagggcgaattggagcttaccgcggtggcggccgaggtacgcggggacaccctagatcccaagatctccaaggatttggtggcatacccactccagcacacagaagcatgaggttcatgactctcctcttccgctctagaactagtggatcccccgggctgcaggaattcgatatcaagcttatcgataccgtcgacctcgagggggggcccggtacccagcttttgttccctttagtgagggttaattgcgcgcttggcgtaatcatggtcatagctgtttcctgtgtgaaattgttatccgctcacaattccacacaacatacgagccgggagcataaagtgtaaagcctggggtgcctaatgagtgagctaactcacattaattgcgttgcgctcactgcccgctttccagtcgggaaacctgtcgtgccagctgcattaatgaatcggccaa

SEQ ID NO: 1534 - DNA, 463 bp, Homo sapiens
  misc_feature 340, 364, 366, 420, 453, 455: n = A,T,C or G
atacgactcctatagggcgaattggagctccaccgcggtggcggccgaggtacttttttttttttttttttttttttttgttttataaccagtgcttttggtaactaacagaatgagaactcacttattacagtgaagatggcactgaaacaatacatgagggatctgcctccatgacccaatcacttcccattaggcctcacctccaaaattgggactcaaattacaacatgaggtttgaggggacagacattcaaattatagtaattacgaagtaaaatgagcaactgttttcttttgctatccaatcatgatggattggatatgtgtgatgaagganagggaggtatgaagaatgactttnanatgtgtaacttataaaactggatactattcactgagagaggaaacactgaaatngaccagaattgaagatgatgagttcccttttananatgctgaa

SEQ ID NO: 1535 - DNA, 821 bp, Homo sapiens
  misc_feature 391, 664, 727, 730, 775, 786, 787, 790, 794: n = A,T,C or G
agcgacgcgcgtatacgactcactatagggcgaattggagctccccgcggtggcggctcgcccgggcaggtacatagacccagcccaaggttggcctttggggtctgatagcattcacagagcaggagattcacccttggaagcaattgaatgtgtaaactctgagagcagacactgacaatgcaatgcctgcatacctgactcctgggctgccttccttctcagcagagcccactgaaagtctcacgtgtgcctttaaccaatgaggatggcaggccttatctgtgtttgaagtggacaggtcattgctacccctgttggagaagctatgtaagaaggagtaggctggcttctggtctagttcgactcattctttatagggacatttcanaatgatgagttggctaaaatttactttaaaggggaaatgtaaaattacctcttcttttcctatccccttcttcctttcccatcctgagccctctggcaaggcctgttgcagctcaagaagtttttggtcagattacaaagttaccaaatggtcaacagggaaggacccacaagcagattccaaaaactctttcattcacttgaagttaaactgaaaatggcttccttctttgagtaattggaagaagtttgagttctaaccagtttgctggtntcttcaaagtctttttaaaaacattgaatggcttttaaactttattaaaaataaaatgccctnaanaaaatttgggaaagcgccgacaaatgggccttgcttctgggaatncatttgcagcnnaangccntccaaaaaaaccccacttttgtttgtt

SEQ ID NO: 1536 - DNA, 846 bp, Homo sapiens
  misc_feature 7, 11, 18, 28, 38, 183, 259, 303, 304, 318, 334, 417, 447,460, 465, 489, 520, 529, 548, 549, 550, 556, 569, 573, 584,598, 614, 621, 625, 633, 649, 657, 665, 671, 674, 675, 684,686, 710, 720, 735, 749, 775, 779, 780, 784, 811, 823: n = A,T,C or G
  misc_feature 842, 845, 846: n = A,T,C or G
acgcganacgngtatacnactactatanggcgaatagnagctccaccgcggtggccggccgcccgggcaggtacgcgggggcctcacagatgatgactttcttcatcttcttgctctttttcccatccttcaccggggtcttgtgcaccctggccatcaccatctggagattgaagccttcanctgactgtggcccttttcgaggtctgcctctcttcattcactccatctacagctggatcgacaccctaagtacctnggcccgctctagaactaagtggatcccccgggctgcaggaattnnatatcaagcttatngataccgtccgacctngagggggggcccggtacccagcttttgttccctttagtgaagggttaattgccccttggcctaatcatggtcatagctgtttnctgtgtgaaattgttatccgctcacaattncacacaacatacnaaccnggagcataaagtgtaaagcctggnggtgcctaatgagtgagcttacctcacattnaattgcgtngcgcttcactggcccgttnnncaatcngggaaaacctgtnggtngccaacctccnttaatgaattcggncaaacccccggggaanaggcggntttnccgaattnggccgctttttcccgnttcctttnattaattnactccnttnnccctcgggnantttccggttttcggccaaacgggnattaaacttnaacttaaaagggggntaattaccggttanttccaaaaaaattaaggggataaccnccgnnaaanaaacatttttaaccaaaaaggcccgcnaaaagggccagnaaacccgtaaaaaagggcncgnn

SEQ ID NO: 1537 - DNA, 836 bp, Homo sapiens
  misc_feature 5, 11, 18, 181, 182, 220, 225, 238, 270, 273, 284, 298, 332,395, 398, 409, 415, 420, 423, 444, 452, 453, 467, 470, 473,500, 503, 518, 553, 556, 642, 646, 655, 669, 690, 722, 728,743, 764, 781, 787, 804, 816, 835: n = A,T,C or G
agcgnatccgngtatacnactcactatagggcgaattggagctccaccgcggtggcggcccgcccgggcaggtacacatggggtttcaccatgttggtcaggatggtctcgaacttcagacctcaggtgatccgcccaccttggcctcccaaagtgctgggattacaggcatgagccaccnnacccagccagttaatttttctattaactacagacctanttaanattgaggcaaaanaaatgggtccttgggatttgaaaattactatncantttggaagttnaatttgcaacatanattgtctgttattaaattactagatataatatcncataggtggaaagaaaggttgcttaattaaagatctaagttactagtcatggtgtcagatatnganaatgattgaangttatnaagantcncacaccagatgagtaaattgntgttttcnngaagaagttacatnaangtnaccggagtatatttcagcattttttgntanattaaaaaatttgtnaagctattttcaatttcagggaaatactcttaacnaantttaccgggtaaaatgaccaaattccaggtttaattttcacatgttaacaccctccttgagcccctttatttttttaaagctcttnaatntattttggncctgaaattaaccntttcttttaaggaagaatttnaaaaatttttttgaaaaaaagttggaaattcntggaanaggcccctggttatngtttttcaaattttaaaattnccttttttaaaatttgncccttnaactaccttaagggttntttttcaaaaanttaaaaaattgcctggggnt

SEQ ID NO: 1538 - DNA, 818 bp, Homo sapiens
  misc_feature 3, 5, 13, 14, 16, 35, 84, 86, 94, 96, 128, 143, 190, 214,279, 280, 288, 295, 296, 297, 299, 301, 310, 312, 318, 328,332, 333, 334, 335, 336, 337, 338, 347, 353, 383, 386, 388,390, 392, 407, 409, 410, 415, 434, 436, 441, 446, 452: n = A,T,C or G
  misc_feature 456, 465, 466, 467, 469, 472, 473, 474, 479, 480, 483, 489,492, 493, 495, 509, 510, 511, 512, 520, 536, 538, 569, 571,573, 582, 587, 592, 593, 594, 597, 600, 601, 612, 618, 624,628, 635, 638, 651, 653, 654, 655, 667, 673, 675, 700: n = A,T,C or G
  misc_feature 706, 736, 746, 752, 758, 769, 791, 793, 799, 800: n = A,T,C or G
gcnanacgcgtanncnactcactatagggcgaatnggagctccacccgcggtggcggcccgcccgggcaggtactttttttttntnttttgttntnttttttggaggactgggaaatagaggactggnaatttgagcaaattntgaggaatcttaaattgctattaggacaccaatatgacgcatcaatnaatcattattttctaggactctgnttaccaaagtaatagacagctgagccaattctccattattttggcaaaagataatgcaaatttannttactgtntgctagnnnantngattcactncntaaaanaaactgattncttnnnnnnnaaaaaatcnattgtnaatatcacacaccaaaaatcattcgtttancanantnanttttataattagacnannagtgnaaacaccacatattttaanangcaanacctntgactncttnttgaaactnnnangcnnnttctnntcnttttgntgnngnattaagaagccaannnntttttatnaaaaccttggctgagnangatagaactgtttctagaactaatgctattncnancctttttgntttgnactgnnnccnaannctatctttcangaattnaggganggcntggccanggncacttggaccgtnannntttccaggcatnccaacnanaacttgggaaaattcttttaacttnttgganctccccaggctcaattactttttccacttnactacccaancctganccaaantaccccttggnggaaaaatgttttccggggtcntngtcccnnttttgaaactagtagatc

SEQ ID NO: 1539 - DNA, 811 bp, Homo sapiens
  misc_feature 16, 23, 34, 42, 251, 276, 358, 548, 629, 680, 701, 717, 724,730, 757, 764, 771, 780, 782, 784, 792, 796: n = A,T,C or G
tacgctaatacgactnactatantcactataggncgaattgnagctccaccgcggtggcggcccgaggtacgcggggagtcttggttttctgctagtgctgctgctgggaggacgacggacggcagcggccaagcaagaagaaagacgtggcagcaagcgggagtcggggatagtgtcatcggttcggtaaagtttctgttctctgatttggggatattccctgcccaaaaaaaaaaaaaaaaaaaaaaangtccctgcccgggcggccgctctanaactagtggatcccccgggctgcaggaattcgatatcaagcttatcgataccgtcgacctcgagggggggcccggtacccancttttgttccctttagtgagggttaattgcgcgcttggcgtaatcatggtcatagctgtttcctgtgtgaaattgttatccgctcacaattccacacaacatacgagccgggagcataaagtgtaaagcctggggtgcctaatgagtgagctaactcacattaattgcgttgcgctcactgcccgctttncagtccggaaacctgtcgtgccacctgcattaatgaatcggccaacgcccggggaaaggccgtttgccctattgggcgctnttccctttctcgcttcaatgactcgcttgccttggtccttcggattcgganaaccggtattagcttacttcnaaaggcggtaaatacngttattncacaanaatcaaggggattaaccccaggaaaanaacattnttaaccnaaaaggccncncnaaaaaggncccngaaccctaaaaaagg

SEQ ID NO: 1540 - DNA, 515 bp, Homo sapiens
  misc_feature 2, 3, 4, 10, 18, 396, 475, 487, 488, 492, 506: n = A,T,C or G
gnnncgcccnatcgactnctatagggcgaattggagctccccgcggtggcggccgcccgggcaggtacgcgggtatgattgtatatgtgttactccgatatgtaatccatttcactggctgagtttggcccctagccatgtgttaatataaagtaggcatggcttcccaatggaaatctctgagaatgacagtggagttgtgcaagcattttacattgccacataaatcgaatttggccattttatggttaaaaacggcacatttaggcagttgaatatgaccgttaccttgcagactaaaaggttgaaggcccgaaactaacttttagctaacaataagggctgtgccccaatggaaactgagtttcatttttctgagaaaggtttggattgacntgaaatattttcctctacaggtcaagggactttggcatgtggtggctgaaaactggagctttttttgtgtgggctccangtttctcactgnnttcntgcaatgccttcantgggcaaag

SEQ ID NO: 1541 - DNA, 504 bp, Homo sapiens
  misc_feature 10, 11, 20, 390: n = A,T,C or G
gtttcgcccnnatacgactnctatagggcgaattggagctccccgcggtggcggccgaggtacgcgggatgtttgccactttgcaaaggagctcactgtggtgtctgtgttccaaccactgaatctggaccccatctgcgaataagccattctgactcatatcccctatttaacagggtctctagtgctgtgaaaaaaaaaatgctgaacattgcatataacttatatttgtaagaaaatactgtacctgcccgggcggccgctctagaactagtggatcccccgggctgcaggaattcgatatcaagcttatcgataccgtcgacctcgagggggggcccggtacccagcttttgttccctttagtgagggttaattgcgcgcttggcntaatcatggtcatagctgtttcctgtgtgaaattgtttatccgctcacaattccacacaacataccgaagcccgggagcataaaagtgtaaaagccttgggggtgcctaattga

SEQ ID NO: 1542 - DNA, 509 bp, Homo sapiens
  misc_feature 10, 13, 132, 227, 237, 238, 248, 425, 442, 465, 469: n = A,T,C or G
gtttcgatcnctnctatagggcgaattggagctccccgcggtggcggccgaggtacttccgaagatgggcttgtatctggtttcggacggactgttaatgacaatttgatcgacgggaattgcacaccccanaatccaccacaaaagaaaaaggttacaaatttaacaatttatagtccttttaatagtttttttttttttcataatactactgaggggaattggtnagaatgtatnnatgtaaggcnttcttaatttaagttattaaagtttacatttttaatatttttaaaccttttgtaaatgcttggcttaattagaaaatgtttacagaaaagtaaaaaaattctagtaatatgggaaatccttgtaagcagcatggtttcagaaaaatctcaagatgatttatttcaccaaattgagtntttttttaaaactaggnaacttccccaaccaaaaacacangacnttgaataatatttttgtgttattacctttattgtacctgc

SEQ ID NO: 1543 - DNA, 497 bp, Homo sapiens
  misc_feature 120, 136, 165, 197, 209, 212, 217, 218, 223, 224, 244, 263,372, 388, 393, 401, 430, 434, 460, 483, 490, 495, 497: n = A,T,C or G
ggagctccccgcggtggcggccgctctagaactatgtggatcccccgggctgcaggaattcgatatcaagcttatcgataccgtcgacctcgagggggggcccggtacccagctttagtnccctttagtgaggganaattgcgcgcttggcgtaatcatggtcanagctgattcctgtgtgaaaattgttattccgntttacaaatatnacnacatnnatatnnagcccgggagccataaaggngtaaaagccttggggtgcnctaatgagtggagctaactcacattaatttgcggttgcgctcacttgcccgctttccagtcggggaaacctgatctgtgccagcttgcattaaattgaatcggccaacncgcggggagaggcggnttgcngttattgngcgctcttccgcttcctcgctcactgacntcgnttgcgctcggtcgtttcggctgcggngagcggtatcagctcactcaaangctgtantaccngn

SEQ ID NO: 1544 - DNA, 432 bp, Homo sapiens
  misc_feature 5, 77, 87, 92, 102, 104, 138, 145, 150, 152, 159, 161, 166,190, 191, 195, 196, 199, 200, 224, 225, 233, 241, 247, 249,256, 263, 272, 274, 277, 296, 308, 323, 326, 327, 328, 345,349, 353, 354, 371, 389, 391, 420: n = A,T,C or G
gagcnccgcgtaatacgactcactatagggcgaattggagctccaccgcggtggcggccgcccgggcaggtactctntttttttttnttttntttaggcagntnaaatctaggatggtgttaaccttgtcttcatttngccaatnatatntnaaaaatnanaaacnacattgaatctgcatttcttggannaganngtnnataacaaactatttctcaatattnngatactanaaactagngaaggngncatgggntccagcntcttatctntnatntgaacatgggtttctgaanggagcctatatnataatataaatggtntgnnnaaaatgaggcactagcnttgnctgnnactgctataaaaaaatnaccatagaccattgactnanccacaaacatatacttctcacagttctgngaagttggaaag

SEQ ID NO: 1545 - DNA, 423 bp, Homo sapiens
  misc_feature 5, 423: n = A,T,C or G
gagcnccgcgtaataccgactcactatagggcgaattggagctccaccgcggtggcggccgcccgggcaggtacttttttttttttttttttttttaggcagctaaaatctaggatggtgttaagtttcttcattttgtcaattatatataaaaaattagaaacaacatgaatctgcatttcttggatgagatagttaataacaaactatttctcaatatttgtatactaaaaactagtgaaggtgttatagagtttcagtatcttatctcttatttgaacatgggtttctgaaaggagcctatataataatataaatggtatgtagtaaatgaggcactgtcttggctgggactgctataaaaaaattaccatagaccattgactaaaccacaaacatatacttctcacagttctggaagtn

SEQ ID NO: 1546 - DNA, 575 bp, Homo sapiens
  misc_feature 1, 210, 218, 227, 322, 323, 450, 461, 520, 569: n = A,T,C or G
ncgtatacactactatagggcgaattggagctccaccgcggtggcgtttgcgtattgggcgctcttccgcttcctcgctcactgactcgctgcgctcggtcgttcggctgcggcgagcggtatcagctcactcaaaggcggtaatacggttatccacagaatcaggggataaccgcaaggaaagaacatgtgagcaaaaaggccaagcanaaggccangaacccgtnaaaaaggccccgttgcttggcgtttttccataaggcttccggcccccctggaccgagcattcacaaaaaaatcgaccgctcaaagtcaagaaggnnggcgaaaacccggacagggactataaaagataccaggccgttttccccctgggaagctccctcgtgcgctctcctgttcccgaccctggccgcttacccggatacctgtcccgcctttctcccttcnggaaagccgtnggccgctttcttataagctcaacgcttgtaggtatcttcaaattcggtggtaaggtcgnttcgctcccaagctgggcctgtgtgcaccgaaccccccccggttcaagncccgac

SEQ ID NO: 1547 - DNA, 532 bp, Homo sapiens
  misc_feature 1: n = A,T,C or G
ncctatacactactatagggcgaattggagctccccgcggtggcgtctacctcattgtcagcctcctgctccccattttcctcattagcattcccgttagcaggggcgtctcttccattttctgcctcttccacaacttccttcttctcctttaagtccttggtggtgatttcggagctggtgtctacggctgcgtctgaccccgcgtacctcggccgctctaagaactaagtggatccccccgggctgcaggaaattcgatatcaaagcttatcgataccgtcgaccctcgaggggggggcccggtacccagcttttggttccctttagtgagggttaattgcgcgcttggcgtaatcatggtcatagctgtttcctgtgtgaaattgttatccgctcacaattccacacaacatacgagccgggagcataaagtgtaaagcctggggtgcctaatgagtgagctaactcacattaattgcgttgcgctcactgcccgctttccagtcgggaaacctgtcgtggccagctg

SEQ ID NO: 1548 - DNA, 892 bp, Homo sapiens
  misc_feature 4, 11, 32, 378, 541, 545, 558, 599, 634, 640, 643, 695, 712,714, 726, 737, 742, 772, 777, 786, 804, 831, 842, 843, 848,849, 850, 852, 855, 856, 858, 872, 874, 875, 878, 885: n = A,T,C or G
atgnctatacnactcactatagggcgaatcgnagctccccgcggtggcggcccgcccgggcaggtacgcgggagagttagttgatttcagtagttcaacaatgtcagtataaacccatattttgcttagccatatattgctcaattctgccatccttgggactggcttcatcctcaggctagtagcaaaatggttgcggtgattccaggcatcatatcatatccataaataacaacttccaaaagaagaggaaaagtatctcttcctgtgccactgtttttggatagaggaaactttctacaaaaacctctagcaaacttctttcccatctttttggccagaattgggtcataggctagttcctgaaccagtcaccantaaataacccttaggttaatcacgtttctcaatctggaatggtgttggcttctactgaggtatatggttgtattggggagagattctgttaaagaggaagagggagagaattgatgctaggaaagtaatttggaaaaccataactctcttcagtggtattggntttntcaataaacagtnttagcaagttattttttactttttcaaaagttaaaatctanctgtgggaggatcgcttgagccctggaaagtcgangctgcnctnagctgtgattataccactgggcctcggccggtctagaactaagtggatcccnccggctgcaggaattcnanttcaagcttatngatacccgtcnacctnaagggggggccccggaccccacttttgggnccttnggggagggnaatgggccctggcgtaanatgggcatactggttctgtgggaaaanggtttccttcnntcccnnnanatnnanccggggggtaaaangnnaancccgggngcccagg

SEQ ID NO: 1549 - DNA, 539 bp, Homo sapiens
  misc_feature 2, 3, 7, 9, 20, 28, 212, 225, 234: n = A,T,C or G
gnntggncncactactatanggcgaatnggagctccccgcggtggcggccgaggtactgatttttttttttctttttttcttttttttttttgagagggactctcgccctgtcacccaggctggagtgcaatggcacgatattggctcactgcaacctctgcctcctgggttcaagtgattttcctgcctcagcctcctgagtaacaaggantaaccaggcatgngccaccacncccagctaatttttttgtatttttagtagaggcaggatttcaccatgttgttcaggttggtctcaagctcttgacctcatgatccatctgcctcagcctcccaaagtgctcggattacaggcatgaggcactgcgcccagctgactgatttcttttggctaaacactttttaagtagatgatctattttttcccccgtttatgtatgcaattatcaccaggaaaattgtaactatactcaataatatgggctttacaattggacagacactttatttacgatatctgggctctgtggaatattct

SEQ ID NO: 1550 - DNA, 552 bp, Homo sapiens
  misc_feature 3, 10, 31, 169, 171, 213, 216, 224, 226, 230, 241, 245, 253,254, 255, 257, 386, 403, 412, 419, 439, 448, 498, 499, 547,551: n = A,T,C or G
gtntacgtancactactactactatagggcnaattggagctccccgcggtggcggccgcccgggcaggtactttttttttttttttttttttttttttttactctcctgttgcttttcttcttctttccctttcaggcatctcctcgttttattttctgtaactcacanantgctgcaaaataatgttagggctttgcagtttattccttgcnatntaactgcntnaatntaaaaaagggncctnaccattannncncgttggggttattcaaataacccaagggaatgtaaagcgatttcatatctccttgaatcaggaacattaattaatcatattgatgagaaatgcaaccgtttttatttaccagggcaagaggctgccaanatctttctgagtttaanaaattgcanactctgngggaggggagggaaaaattnatttagttnttaaattggagggggctttttttctatcatggggaatgctggaaaaggtnncccaagcccttaatgttaatgttaccaagaagttgaaatggtgggatnactnt

SEQ ID NO: 1551 - DNA, 651 bp, Homo sapiens
  misc_feature 4, 7, 14, 18, 21, 23, 24, 36, 39, 46, 47, 86, 101, 103, 110,121, 126, 142, 175, 204, 218, 224, 236, 237, 242, 255, 260,267, 276, 279, 291, 292, 293, 315, 341, 347, 394, 399, 407,431, 432, 433, 438, 442, 458, 461, 463, 467, 487: n = A,T,C or G
  misc_feature 531, 559, 561, 570, 582, 594, 599, 610, 612, 619, 623, 625,634, 635, 638, 639, 642, 648, 649, 650, 651: n = A,T,C or G
tttnccnctaaacnactnctntnnggcgaattgganctncaccgcnntggcggccgaggcaccttttttttttttttttttttttnggggggatgggtatntnccatgtnataccaacagntcatnaactcctgggcataanccagcctcccaccaacatcattaacttaatcanagcaccaagtgtcacatatggtaacacantcacaacttcccangaattnaaatttttggannaggtngtacatttttttntgggnccttttntttaattcnttnaaccctttactnnnaggatcttggacccaacaaaanaaaaaaattgggcagcccaacacttntttttncttccctttccttttccttttaatccccattttttctacatttcagntcaanaaaaattngttcaagaaaacaccaattttaannnaaaanaaanccaagaatttgggggnccntnggtnaacttggaccaagaaagttncaaatttgctaatttcccaatgaaaaaattgtttcctttttctnaaaaaatcaaaggggcctttttggtaantngggcccaanttgaacccatanaaataaaacccncttgnttattaaaaantncaatttncttngnaaaatttcnnaannttntactannnn

SEQ ID NO: 1552 - DNA, 900 bp, Homo sapiens
  misc_feature 717, 720, 731, 749, 750, 752, 754, 787, 811, 834, 845, 860,863, 879, 893, 896: n = A,T,C or G
acgccgtatacgactcactatagggcgaattggagctccccgcggtggcggcccgagggtacaacaacaaagtctgcccaccttcttgtgtgcacctctgtgatcagaagtagcaatcagtgatcggatgcagatctctaatatttggaagacaacatcctttttgcccaccctggagcccataggctgcatgcaagtttctccaagaactgggggatgggtagctgctaccgttttaagagctaaaattaaaattaattgtgcttttaccttataccttcccctggaatttgcaagcttacagtagactccagagttgcaaaaatagttacattaggcagattttgccagtataattgttgtctaggagcacggccagactcctggtgctttctacccttccatcttccccaaccgctagttattgaaacttactttaatacaggaatgtaagcagtttactttgtgttttttcattttcatcacttatgaataactcagctagtgaaaaacttcttagagtaaatcatttttctttcaaaataatgttgacattgctctgttgaaatctagtgtttatttcagagaaagtctgcggccagtttgatttttatttcttttcagattacctggctctaaagatctgggatgctttaaatctttttccttttaatcaaataacccatgaaaatatcttgggtgtgcccgcgtacctgnccngggcgggccgntcttagaactagtggatnncncnggctgcaggaattcgatatcaagcttatcgatnccgccacctgagggggggcccggnccccgcttttgttcctttagggngggtaattgcnccctggcgtaatcanggnatacttgttcctgggnggaaatggtatccntcncaat

SEQ ID NO: 1553 - DNA, 525 bp, Homo sapiens
  misc_feature 2, 55, 60, 62, 84, 91, 94, 100, 113, 154, 163, 199, 236,237, 248, 249, 252, 253, 254, 268, 274, 293, 297, 299, 300,321, 351, 360, 396, 468, 477, 481, 486, 490, 506: n = A,T,C or G
gntgggccctaactctactatagggcgaattggagctccccgcggtggcggccgnccggncnggtacgcggggggagatgctgncacctangtnacttgnaggaccctatacngcaacctcctttgccaggaactatttataaacatcctgcangaaaatgantcaaggaagcttttcttttgagctatttacagcttntagcaattgagtaaagtatactcctgtgaacaaaatnntggaacatatnngtnnntctctaactgattnctccanaatttggaactagttcagngaantnnaagagacagggatatcccacnaggttatgcaaaacatcaagagaagatganaggtcaganatgggaagaaacaagaactttgacatgcttggtgtncttgcccaagctttgaagaagtttacaaagtctatatgtcagaatacacatttcccaccttgcccaacagtnaacttttgntccntttanaganggggtacctcggcccntctagaactagtggatccc

SEQ ID NO: 1554 - DNA, 525 bp, Homo sapiens
  misc_feature 5, 237, 351: n = A,T,C or G
ttggnccctaacactacttagggcgaattggagctccccgcggtggcggccgcccgggcaggtaccaatgtgtggcagtccaaaattacgaggaaaatgagttcccttcatgggtcacatcagcaatttttttttccccttttgagacagagtcttgctctgctgcccaggttggagtgcagtgagaccccgtcccaaaaaaaaaaaaaaaatgcaagtctggaaaaaatatagctngggagtcagtaatgccagttttagctgagggagttaagatcatttaatcagtgttaaggaagaaactcaatagtagtgaccaccaatacttaaggaaaaaggataaagtacctnggccgctctagaactagtggatcccccgggctgcaggaattcgatatcaagcttatcgataccgtcgacctcgagggggggcccggtacccagcttttgttccctttagtgagggttaattgcgcgcttggcgtaatcatggtcatagctgtttcctgtgtgaaattgttatcc

SEQ ID NO: 1555 - DNA, 529 bp, Homo sapiens
  misc_feature 1, 3, 4, 224, 229: n = A,T,C or G
ntnngccctatcgactactatagggcgaattggagctccccgcggtggcggccgcccgggcaggtacttgaagtgtgactaatgtgaccaagggaactgaattttaaattttatttactttaaattaatttaaactgaagatagcgacatgtggccagtggctaccacattggatacagccttagattcctcccagaccagacaaccttctgtggccttccaangttgnaacagcaaactcacactgtgggcagccaggcctggagtggggcccagcaagccgcatcctggggtcaggtctggccaactaattatctactgtctatggtcacattagtgctacaatggcagcatcgagcagttgcaacagagatggtgtggcctgcaaaactgaaaatattcatatttactatctggccctttacagaaaaacatgctgacccctgcactacagcaattagttttggagagaacattcctgataaaagcttacatcttctctcaaaacatgacacgcaatagcagtggt

SEQ ID NO: 1556 - DNA, 931 bp, Homo sapiens
  misc_feature 418, 591, 611, 625, 685, 697, 698, 711, 724, 732, 744, 755,760, 762, 767, 772, 773, 778, 784, 795, 804, 823, 837, 839,849, 850, 861, 866, 873, 876, 878, 879, 889, 892, 894, 903,907, 908, 922: n = A,T,C or G
acgcgcgtaatacgactcactataggggcgaattgggagctccccgcggtggcccggcccgcccgggcaggtacaatctctggccctacattttctaaatgttatgccaccccgaccaaggggcaactcctacaaagccaggcaaaataataaaatcatatttgtctctagtggaatggataactatgcctaaaactgtgccctttgaaaagcaactagagagataatttctgaagtgtttgtccctacctgaatgtgtggcaaaattctaaactccctgaagtgtgaaagtggtttccaagccacatgcacatccagtagtggtaaagggtgaaaatctaactggctaagagggcttcatagcaacattaaccaaaaagtggtttatgtagtctttgcctgcttcataattccctangcattctatgctattctgcacctcggccgctctagaactagtggatcccccgggctgcaggaattcgatatcaagcttatcgatccgtcgacctcgagggggggcccggtacccagcttttgttccctttagtgaggggttaaattggcgccccttggcggtaaatcattggncatagctggtttcctggtgngaaaattggttatncgcttacaattcccacacaacataccaagcccgggagccataaagtgtaaagcctggggngcctaattgagnngagctaactccantaattggcgttgngcttactngccccttttcangtcgggaaacntgtcngngccanctggnnttaangaatcnggccaaccccngggggagangcggtttgcgttatggggngctttttccgttcntngttactactnnctggcctcggnctttnggttgcnggnanncgggatttanctnanttaaaggcngggnntccggtttcccacnaaatcaggg

SEQ ID NO: 1557 - DNA, 901 bp, Homo sapiens
  misc_feature 312, 316, 348, 511, 537, 588, 634, 657, 676, 694, 697, 710,753, 772, 777, 793, 800, 806, 808, 824, 829, 841, 843, 868,878, 879, 897: n = A,T,C or G
cacgccgtatacgactcactatagggcgaattggagctcccccgcggtggcggcccgcccgggcaggtacatccaaattgggctacgaaaagtggcaagtttgattgtagcatcatgtctttgagtgtcctattggactacagattagaggataataaagaacattcatttgaggtttcattgtttgcggaacttttcaacgaaatgcttcaaagagattttggtgtccgtatatacaaatcattactgtctcttcctgagaaagaggacaaaaaagaaaaggataaaaaaagcaaaaaagatgagagaaangatnaaaaaaaaaaaaaaaaaaaaaaaaaaaaaaanggtcaccgttaagaagttgagcttttatcttagaggcagcagaaggtttggagccaaggaatgaaatgatgaggcgtccttcaggtaatgaacttcagctgcagtgtgaaaggggcaggaagactggcagctgtcaaaactggaacagtccagtgagtatgtncaggcccgggcttgggcagtgaccanggcagggagcaccatcaatttctgcggtagaaccttctagaggaagaccanacagagggtcaacaagagttgaaaggagaaaaatattgaggatgangtccaagtttttagtttcaaaanactaggcatatgggtaatnccgcgtccttggccgttntanaactagggatccncgggcctgaggaattcgatatcaagcttattcgatcccgccancctcagggggggcccgggncccanctttggtccctttagngagggtnaatgcncncttggcggaaattatnggcanacttgttccttngngaaaattgtttccgtttcaaatccnccaaaatacnncccggggccttaaatgtnaact

SEQ ID NO: 1558 - DNA, 899 bp, Homo sapiens
  misc_feature 5, 6, 8, 10, 612, 635, 646, 658, 720, 739, 768, 804, 806,810, 831, 833, 837, 846, 855, 861, 877, 889: n = A,T,C or G
cgccnnanangactcactatagggcgaattgggagctccccgcggtggcggcccgaggtacctgaaagtgacggggagaatggaaccaagttggaaaacactttgcaggatattatccaggagaacttccccaatctagcaaggcaggccaacattcaaattcaggaaatacagagaacgctgcaaagatactccttgagaagagcaactccaagacacataattgtcagattcaccaaagttgaaatgaggaaaaaatgtcaagggcagccagagagaaaggtcgggttacccacaaagggaagcccatcagactaacagctgatgtctcggcagaaacgctacaagccagaagagagtgggggccaatattcaacattcttaaagaaaagaattttcaacccagaatttcatatccagccaaactaagcttcataagtgaaggagaaataaaatactttacagacaagcaaatgctgagagattttgtcaacaacatttgaatattataacctgcaggggtctgtcctgcagatggttgagaccataaccagatactgatattcagtgaaagagcagcaaggatttccgagctgattaccagaccccaanggaagatgcttgtaaagagcccnccagccacagncctggcttgctngccctgggggcatttatttagtaaagttttaatggccaaagcttttgagtcacacaccccgnggtaattaacctgggcatncccacctggagagccatcttgccctgggngatcaaagaaaggacatttgcgggacccctgatgangntgcnccttggcggaaagacacttgncnactnaaacttggnggaaaaacncctgtngagggtgccccttggnggaagaacactnacccgggtga

SEQ ID NO: 1559 - DNA, 1009 bp, Homo sapiens
  misc_feature 3, 47, 90, 155, 172, 187, 190, 194, 214, 224, 245, 291, 316,331, 335, 341, 347, 356, 375, 377, 386, 399, 401, 406, 409,411, 413, 415, 426, 437, 438, 441, 443, 444, 450, 460, 472,489, 492, 496, 502, 503, 504, 505, 515, 522, 525: n = A,T,C or G
  misc_feature 527, 528, 530, 531, 533, 540, 543, 544, 545, 553, 557, 559,560, 563, 564, 567, 570, 572, 580, 583, 589, 595, 600, 601,605, 610, 612, 627, 631, 635, 638, 641, 645, 650, 654, 661,664, 667, 671, 673, 678, 684, 689, 693, 695, 696, 708: n = A,T,C or G
  misc_feature 710, 712, 713, 718, 719, 723, 724, 737, 740, 745, 746, 750,751, 755, 757, 768, 770, 779, 782, 784, 785, 786, 787, 791,792, 795, 797, 802, 808, 809, 810, 814, 822, 823, 827, 830,843, 846, 849, 854, 855, 858, 861, 868, 875, 877, 881: n = A,T,C or G
  misc_feature 887, 888, 892, 900, 906, 923, 924, 943, 946, 954, 967, 971,973, 978, 986, 1006, 1008: n = A,T,C or G
canggcgtaatacgactcactataggggcgaattgggagcctccacncgcggtgggcggcccgaggtacttttttttttttttttttttnttttgggcctaattgctttgggctgaagacagagtgaggcgatgtactgtaaggcgaacaccttntgcacagcaaacccgtnattcgctcacctgtntgnggtnaggctcttgtagagagtgancactcactantagtttttaataataaaccangtaaccaaagtgagatgaaggaactatttttggacaactgggtcantgtgtgaaggccccaagtcctgganatgttagtaaggatntccnttgctnagcttntgagaaacntttacccacacactaagangntgatttctnacaggggaacatncngtggnatnancnanggcctcccccnggtacctgtgnnggntnncattcnttaacttatnttttattttcanttaattggatattatgnacncttnactctnnnntatactaatntctaatnttntnntnntnggaaaantgnnntatctcanactnannatnntcnaananttcaattnatnccacangtgtcntattnngttnatccnantcctgaatatttaanaatntagntcnacncttnattanaatntatgtanctntcntttntncaatnctttanacgcngaangnnaatcttatatcntntnnatatnntttnntattgcctactcntcngcatnnaatnnctancntgacatttttnanctcatctanttntnnnncatnnctntntttanatattnnnctgncttctgtnngttnttntctgtatataatnccnttntatannctntcnttcatantcttctntntctntctctnntctntcatattntgtctntattccttcatattacnnttttctatatctacgatcnctnattaaatngacttctactacnctananatatntttctacncatcattctatcattcttancng

SEQ ID NO: 1560 - DNA, 496 bp, Homo sapiens
  misc_feature 2, 3: n = A,T,C or G
gnnagccgctatcgactactatagggcgaattggagctccccgcggtggcggccgaggtacaaggcatttagagaaagctttttgattccattcaatcctggaaaccaacatgttgaagggccagattttccaccattttatagggatgcaaactttagctcagagaggttaaatgacttgccaacagtcacacaactagcacttagaggaacgggaaggctaactcggagctgatgctgcagcttacactcactccccactcccacgcaacacaaactctttctaggcagcttcgaaggtacctgcccgggcggccgctcgattatccacagaatcaggggataacgcaggaaagaacatgtgagcaaaaggccagcaaaaggccaggaaccgtaaaaaggccgcgttgctggcgtttttccataggctccgcccccctgacgagcatcacaaaaatcgacgctcaagtcaagaggtggcgaaacccgacaggac

SEQ ID NO: 1561 - DNA, 864 bp, Homo sapiens
  misc_feature 592, 603, 688, 699, 714, 717, 722, 737, 740, 749, 758, 779,797, 808, 827, 836, 842, 847, 851, 860, 862, 864: n = A,T,C or G
agcgcgtatacgactcactatagggcgaattggagctccaccgcggtggcggccgaggtacaacgcctggaacgagaagcgcagggtctacgaagaatagggtgaaaaacctcagaagggaaaactccaaaccagttgggagacttgtgcaaaggactttgcagattaaaaaaaaaaaaaaaaaagcctttctttctcacaggcataagacacaaattatatattgttatgaagcactttttaccaacggtcagtttttacattttatagctgcgtgcgaaaggcttccagatgggagacccatctctcttgtgctccagacttcatcacaggctgctttttatcaaaaagggggaaaactcatgcctttcctttttaaaaaatgcttttttgtatttgtccatacgtcactatacatctgagctttataagcgcccgggaggaacaatgagcttggtggacacatttcattgcagtgttgctccattcctagcttgggaagcttccgcttagaggtcctggcgcctcggcacagctgcacgggctctcctgggcttatggccggtcacagcctcagtgggactcccacagnggcccctgtancccggggcaagcaggaacagggtctttctgcatctgttttctggaggaactcaaggtttgggttgcccagaaaaaaatgtgcttnattcccccctnggttaaatttttacncancctangaaacatttccaagntcntgtgatggncgagacaanggatcctttaaggaagggggngggggcttttcccaaccntggaggatttnttgaaaggtcaaagggttnaattttaanggcttnaaaancatntgaggttcnancn

SEQ ID NO: 1562 - DNA, 492 bp, Homo sapiens
  misc_feature 2, 3, 6, 93, 203, 307, 458: n = A,T,C or G
gnncgnaacactacttagggcgaattggagctccccgcggtggccggccgcccgggcaggtacttttttttttttttttttttttttttaggncgaatgcagggttttattgagtggtggaggtggttctctgaaggatggatgcagagctggaagcggggatggcacgggaagataatcttcctgctgggtggccaaacctntccgaccaccctcggctgaactcctctcggcgttcaaatgttcctcttctctctttctctgctgtatcgtttcaccattcatctgcttgtctgggatggtgaanacaactgtttgctcatttgcttggcgataggtgattgtctcgccgctcagctataggcgatggtctcaccactcggtgataggcgattgtcccatctaggtcgccaaaatgtgtctggaattggtgggttcttcgtctcactgacttcaanaatgaagccgcggacactcgcagtgagtgttgca

SEQ ID NO: 1563 - DNA, 866 bp, Homo sapiens
  misc_feature 688, 701, 732, 737, 743, 748, 757, 779, 780, 788, 791, 793,811, 812, 819, 820, 829, 852, 862, 864: n = A,T,C or G
tagcgcgtatcgactactatagggcgaattggagctccccgcggtggcggccgaggtacaggagactttctgatttccaatcttggctcaggtcagaagaaaaaggggaaaggttacattcctggaaagaaaatacagcctatttgagggcatgcctgactttcagtccatgcactagtcctcttggctcgtagagttttcagtgccctgaaaccatgatccctctgcctccatggtcctctgagtgtagttattatgtctgcaaaccagtaatgtcacaagtcaaagggtctggggcttcccagggaaccactatgactgagtatattctgatttgagaaacctgtgacaagtcttctcagcactcgccttctaatttttggagccgatgcctgggttcccagcatccaggtcacagtagctggaaatcatgcaggaagggcaaaaagccagcagcccagaatggactgtctctgcagctctggcacattctctacacatcgccacaccactcaaatgtcctataaaatatcaaaaccaataacctggacatgacccgattaatctgtacctgcccgggccggcccgctctagaactagtgggatcccccggggctgcaggaaattcgatattcaagcttatcgataccgtcgaccttgaagggggggccccggtacccagctttgntccctttagtganggttaattgcccgcttggcggaaatcatggncatanctgttncctgngtgaaattngttatcccgttcacaattcccnnacaacatnacnancccggggagccataaaannggtaaannctgggggtncctaatgagtggacctactcacnttaaatggcntngg

SEQ ID NO: 1564 - DNA, 477 bp, Homo sapiens
  misc_feature 7, 12, 465: n = A,T,C or G
gggccgnatacnctactatagggcgaattggagctccccgcggtggcggccgaggtacttcagtttctctagattaccatgtaagacagctctgtggatcctcttcagatgatacggtttaatggggtattggggaaatgcgaagccatccgagcacaagcgctccatgagggtgggccacctctcccgcttgccgtcttccataatcgtcggctgcaaattgtagcctgcagccgtatttcagctcgccttcggggatcgccgcctccgaagagcaacaacgagcaaagcagtctgtccacggacctccgcacagactctcagcgcctcccgcctctcagcagaaacgcccaacagaagggttagaaccagcgagcacgcgcaccttagccggccctccccgcgtacctgcccgggcgggctctagaactagtggatcccccgggctgcaggaattcgatatcnagcttatcgatt

SEQ ID NO: 1565 - DNA, 567 bp, Homo sapiens
  misc_feature 7, 10, 17, 31, 33, 38, 50, 95, 141, 151, 152, 153, 246, 248,251, 252, 253, 260, 270, 277, 295, 349, 432, 518, 548: n = A,T,C or G
gggggcntgncactacnactactatatggcnanttgancctggtggcggncgcccgggcaggtactcgggggtaggatggaaggacgaacttggngatgcagacctgacgctgggaggagatgctgccacctaggttactnactcggtccnnntacggcaacctcctttgccaggaactatttataaacatcctgcaggaaaatgagtcttatatgtcaaaatacacatttcccacctttgcccancngtnnnaaaaccntaggaaggangaaaaancatttaaaaaatgacacnggaatgttaatggaagcaatgtgatggtcgttttggaggtggaaccctttcaanaaaggtaattaaatgcccttggttaagaagaaggccaaaagaagcttgcgcaccttttttcctgccatgtgaggaagccaaanaagccggctgtctgcaacctgcaagaggaccctcactagaaagctagccatactggcatcctcatcttggctttccaactttccanaactgtgaagaaagtatatgttttggtggnttaatcaattgggtctatg

SEQ ID NO: 1566 - DNA, 526 bp, Homo sapiens
  misc_feature 323, 437: n = A,T,C or G
tcctatcactactatagggcgaattggagctccccgcggtggcggccgaaggtaatcgggggccagtctttatactgctgacagtaataaattccaaaatcttcagactgcagtccactgacgacgagagtgaagtctgtcccagacccagagccaatgaatctggctgggacaccagtggccctggtggatgcagcaaagacgaggagcctgggagcctggccagacttctggtggtacctgcccgggcggccgctctagaactagtggatcccccgggctgcaggaattcgatatcaagcttatcgataccgtcgacctcnagggggggcccggtacccagcttttgttccctttagtgagggttaattgcgcgcttggcgtaatcatggtcatagctgtttcctgtgtgaaattgttatccgctcacaattccncacaacatacgagccgggagcataaagtgtaaaagcctggggtgcctaatgagtgagctaactcacattaattgcgttgcgctcactgc

SEQ ID NO: 1567 - DNA, 482 bp, Homo sapiens
  misc_feature 2, 3, 10, 126, 153, 160, 168, 173, 176, 184, 192, 198, 202,211, 225, 230, 235, 244, 247, 249, 252, 256, 269, 277, 279,290, 308, 319, 339, 348, 350, 375, 377, 387, 412, 434, 436,442, 463, 478, 481: n = A,T,C or G
gnnggcgccnaacactacttagggcgaattggagctccccgcggtggcggcccgcccgggcaggtactttttttttttttttttttttttttttatttttttttttttttttttttttttctaagncattactttttattttgaaggatttgngaaactnttcacatnatggnganagtttgtntgattaanaaaaancagntttttcatnaaatgcttggaggngaacnagttntcaccctgngananccnaccntcccattaacttngaagtttntnttgattaatanaaaaaaaaaggggagggngaaaaaaaggnggaacatgctaaaaaccttntgacaatcntncaaatgtcccgcgtacctcggccgntntaaaactagnggatcccccgggctgcaggaattcnatataaagcttatcgataccgncnacctcnagggggggcccggtacccaanttttgttccctttanggng

SEQ ID NO: 1568 - DNA, 474 bp, Homo sapiens
  misc_feature 3, 474: n = A,T,C or G
ggnggccgcgtatcactactatagggcgaattggagctccaccgcggtggcggccgaggtacttaactagggttagccgaggtcaggagggtggatgccttattatgggattagtgcccttctaagagggacagtagagggcttgttcatgctctctctctccatgcacaagaaagagcacacagtgagaaggaaagaggccctcaccagaacctgaccatgctggcaccgtgattgcagacttccagcctccaggattgtgagaagataaatatctgtggtttaagtcaccaagtctgtggtgtgttttatggcagcacaaggtaacccagatgatgcttttcaccactgggtggtccagcctttcatggaagctgtcagctcctcagccttgcaaaaaatgcttgctggtcactctctttggtcctttcagatgcctttcttagtggtgcctctaccaggcccttgacttcn

SEQ ID NO: 1569 - DNA, 796 bp, Homo sapiens
  misc_feature 3, 794: n = A,T,C or G
cgnccgtatacgactcctatagggcgaattggagctccccgcggtggcggccgaggtccatacagtttttctaattttctaattaaatgtaagtattgtgaatattttctcttgggaatgattacttttctttggagtttgatagtggtataaactgtttatattttgtattctatcaggaaagtattacagtaatggaataattataatttcattgagtgcgtctcctctttttaatatgaattttgagcaagtttttagattcatttatatgaagtgtccatttttgtaggtaaaagtagttgaaaaaggtaatgtatggttcaacctaataacagaaaatatctagccttaattagaaaaataagtcataaagacaactttgtttcaaataaggggaaatacgatagcagtcatgaaaaactgaaggatacaaagagaatattttaattggtagccatacaaagtggagatattttagaatctatttcattctctaatatatttgagtcattttattttgggtaaaataaattataggtggagcatggtggctcacgctggttatcccaaagcgctgggattataggccgtgagcccgccactcctggccgaaatctgttttaagtatagaacatcatgaaattggattctggtgctttaagcatttcatgactgaactgctgtctggatccacctgaagagatctcattgaatatcatatggcccagaagtggtccataattttctttagctccatctatgtaaatattttgaccaattttgcccaagtnct

SEQ ID NO: 1570 - DNA, 800 bp, Homo sapiens
  misc_feature 6, 16, 39, 41, 82, 105, 166, 172, 193, 207, 227, 236, 245,253, 255, 257, 258, 261, 273, 285, 288, 342, 352, 353, 368,419, 454, 472, 543, 549, 550, 554, 579, 600, 618, 626, 638,647, 649, 659, 663, 685, 687, 689, 690, 715, 718, 720: n = A,T,C or G
  misc_feature 727, 772, 786, 787, 800: n = A,T,C or G
gtatcnactactatanggctaattggagctccacccgcngnggcggcccggccgggcaggtaccatggttggaatgataaangatattgtcatttttgttagcantgaagtgagtggcatctatgtattttttaaggtatataatgaaattgtgcctaggggagtnataatncactctatgtatttttatatntacttaaatcaatncattcttacagactagcttntttagtggnaacatacangccgattntntnnctncatgaatgattncggacatgtttncangagcggaggtccttagccaccagttcacccaggtgtcttgctcttatctttaanaagggaaaannggctaggggtttctntccaccatgtgctgttctccaggactttgggtgaatccacgtgtgggaaanaaggtagcatcagctgtaagattcaatgatgtctntggtgcagcagaatacanactgcgatctttgaaacgctgttgaaactccttggctactcctggaggctctaacttgaaggaaagcgctnattacnntganactctggacttcaacactagagtantgaagcctccttatagccctnttgccaggagcccctggngggttttncatgtgagccanaaggctacntntgaagatccntcanggcttcccaaaagggactggtntngnngatcttccgggtatcaaaggtaaanggntngagactnattctagtgaccaggcgagtttcccgaacccccggttttttgaanatcacacctggganncctggactttcan

SEQ ID NO: 1571 - DNA, 882 bp, Homo sapiens
  misc_feature 36, 42, 58, 73, 102, 111, 121, 137, 175, 183, 184, 198, 209,218, 225, 239, 260, 264, 295, 330, 341, 343, 348, 356, 358,360, 364, 385, 390, 398, 400, 404, 409, 411, 412, 421, 428,429, 450, 453, 467, 469, 480, 484, 485, 489, 491: n = A,T,C or G
  misc_feature 509, 522, 527, 533, 542, 594, 598, 609, 619, 630, 644, 646,651, 657, 660, 662, 673, 674, 679, 680, 695, 699, 712, 726,737, 747, 754, 758, 761, 767, 776, 804, 820, 823, 827, 837,849, 862, 868, 874, 875, 876, 880: n = A,T,C or G
acgcgtatacgactactatagggcgaattggagctnccccgnggtggcggcgcggtgncggccgcccggacangtacgcgggatggaaagaaatgaagacanttttagacntgctagactnatggttgactatacancaaccatctcagaaagagttattcagatatagcttcanactgatanntaaatcatataaantaatgtggtantcaaaatangagttangtaactactgacanatataaggaaagtcgtaccanttcngaactaaaaacaatggtctatgttgctggangaacaatgtggggagggtgaagtatggccccatancgtgatttctntntggtnctggaganantntaanagtaatcaagcttacttatgngtgtnttttcttnanaganggggntnnaccatgttncccaggnnggactcaaattcttgagctcnacngatccttcaacctnancctcttgagtnacanngganantagtcacattccactgtnactggctggcttncaatntgggancaacaagtnttaccaacgcggtctaagatttttcttcttaaccactttaggggggaatggnttancgaaaaaaccntggaacccangacagggagtngaatttattgaatngncaacncccggnganangtccttgggcnnttttnnaattttgggttcccncggnctggaggaatttngaatttaagccttntggttcccggnaacccttaanggggggncccnggnccccantttttggtnccttaaagaagggttaaattgccccctngggaaaacatgggcanaangggntccctggggnaaatagttttcnattgcaaattccncaaaanttcgannngggnct

SEQ ID NO: 1572 - DNA, 482 bp, Homo sapiens
  misc_feature 2: n = A,T,C or G
tnctatagggcgaattggagctccccgcggtggcggccgcccgggcaggtacgcgggaaatgaaattggagctggaccatttagtcagttcattaaagcaaaaactcggccattaccacccttgcctcctaggctagaatgtgctgctgctggtcctcagagcctgaagctaaaatggggagacagtaactccaagacacatgctgctgaggacattgtgtacctcggccgctctagaactagtggatcccccgggctgcaggaattcgatatcaagcttatcgataccgtcgacctcgagggggggcccggtacccagcttttgttccctttagtgagggttaattgcgcgcttggcgtaatcatggtcatagcttgtttcctgtgttgaaattgttatcccgctcacaattccacacaacataccgagcccgggagccataaagtgtaaagcctggggtgcctaattgagtgagctaact

SEQ ID NO: 1573 - DNA, 546 bp, Homo sapiens
  misc_feature 2, 3, 7, 86, 226, 275, 316, 351, 359, 361, 367, 373, 376,378, 393, 398, 399, 400, 401, 404, 416, 427, 429, 430, 432,433, 438, 444, 445, 451, 455, 456, 461, 464, 473, 477, 480,482, 483, 492, 494, 499, 502, 510, 517, 522, 523, 527: n = A,T,C or G
  misc_feature 532, 535, 536, 538, 541, 546: n = A,T,C or G
gnnacgncctatcactactatagggcgaattggagctccccgcggtggcggccgaggtactttttttttttttttttttttttttnctccacatcttcacattctttctgaataacaagcctaagtccccatgacctgatcacctgtcaggtgatcaccttggccatcaccttggcctttattcacctagtgatgcttctcatagtaatggatttgttgtctccanatgtatttgagtcactgcatttttggaatggactttaagatgtaaaggngtaattctacctgagcagaagtgacaaggggcctttccatntgcacccccagcccgcgtacctgcccggaaatctnaatctttnanagttgngtgacnttntntatacccatattccnggggnnnncantatttttttttntatttttaccnanntnnttttnacctgnnttctangctnngtttntanatttttttngtanctngnnccccattgnanctttntanccaatatngaaaatnctttnnttanctttnttnncnganacccn

SEQ ID NO: 1574 - DNA, 501 bp, Homo sapiens
  misc_feature 2, 3, 7, 153, 251, 264, 294, 310, 432, 436, 439, 449, 453,458, 473, 476: n = A,T,C or G
gnnagcnaacatactatagggcgaattggagctccccgcggtggcggccgcccgggcaggtactttttttttttttttttttttttgagacagggtcttgctttgctgcccaggctagagtgcagtgtcgcaatctcagctcaccgcaacctntgcctcccagactcaaaccatcctacccttaatcttccaagtagctgggactacgggtgtgtgccatcatgtccagttaatttttaaattttttgtanagaacaaggtctnactatgttgcccaggctgggtcttaaactnctgggctcaagcaatntgcctgcctccttctcccaaaatgcttgggattagaggcatgagccacaatacctggccactatgcaatttgtatgtatttttaaacgataattttttttttttttttaaacagagttttgntttntcnccgaggccanaagngcagngggcacaatctcagntanactgcaacttcaagcctcccaggtt

SEQ ID NO: 1575 - DNA, 496 bp, Homo sapiens
  misc_feature 2, 3, 10: n = A,T,C or G
gnngcgctancatacttagggcgaattggagctccccgcggtggcggccgaggacgcggggagctacaacaggcaggcaggggcagcaagatggtgttgcagacccaggtcttcatttctctgttgctctggatctctggtgcctacggggacattgtgatgacccagtctccagactccctggctgtgtctctgggcgagagggccaccatcaactgcaagtccagccagagtgttttttccaagttcccaactataagaacttctttagcttggtacctgcccgggcggcccgctctagaactagtggatcccccgggctgcaggaattcgatatcaagcttatcgataccgtcgacctcgagggggggcccggtacccagcttttgttccctttagtgagggttaattgcgcgcttggcgtaatcatggtcatagctgtttcctgtgtgaaattgttatcccgctcacaattccacacaacatacgagccggg

SEQ ID NO: 1576 - DNA, 489 bp, Homo sapiens
  misc_feature 2, 3, 399, 400, 417: n = A,T,C or G
gnnagccctatcactactatagggcgaattggagctccccgcggtggcggccgaggtactcgcgggccttggagggggccaccgacagagctgacatcaccgtcatgatgcctgcattccaggagtcacggatgggaaagtaaatctttggaggggctgggagctggggtatctgcaggcctgtctgctgacacacgtactagaatgttggctataatagttctgttcttacaacacatgaaattttttcgttttattttattttgttttcatagtgcatgttcatttctactcacaaacatgttcttggtgtatttcttatgcaaacaatcttcaggcagcaaagatgtccgttacatctaaacttgaataataaagttttaccaccagttacacatnnaaaaaaaaaaaaaaaangtacctgcccgggcggccgctctagaactagtggatcccccgggctgcaggaattcgatatcaagcttatcg

SEQ ID NO: 1577 - DNA, 514 bp, Homo sapiens
  misc_feature 142, 224, 258, 283, 314, 337, 339, 387, 462, 470, 482, 495,498, 503, 506: n = A,T,C or G
ggcgaattggagctccaccgcggtggcggccgaggtactttggcctctctgggatagaagttattcagcaggcacacaacagaggcagttccagatttcaactgctcatcagatggcgggaagatgaagacagatggtgcanccacagttcgtgtgatctccagcctggtcccctggccaaaagtccgagggatactgctactctgttgacagtagtaagtttncaaaatctttcaggttgcagaactgcttgatggngaagaagtgaaatctgtcccagatncactgccacttaaacctttgatggggacccnacttttgcaaactgggattgcancntaagaatgagggagtttaggggggcctttccctggtttcttgctgatnccaattttaaatagatattaatggacttgacttgccccgggcaaggtgattggttgaccttcttttcttccaacnagatgccngacaaggggagngattggttccaangcngggcncgncccccggg

SEQ ID NO: 1578 - DNA, 463 bp, Homo sapiens
  misc_feature 4, 62, 118, 135, 142, 145, 147, 151, 157, 158, 161, 164,165, 167, 183, 202, 203, 221, 260, 261, 275, 292, 322, 398,407, 419, 460, 462: n = A,T,C or G
actnctatagggcgaattggagctccccgcggtggcggccgaggtacgcgggggttgtatcnggacttatggtggccaccaaatatgaagtgagtgtctatgctcttaaggacacttngacaagcacaccagctnatggagntgncnccantctggnnaangcnngnccaccaagaagggctngtgtgacagatgctactgnnaccaccatcaccattagntggagaaccaacactgagaccatcactggcttccaaganngatcgccgttccanccaatggccatgactgncaatccacagaaccatcaagctcatatgtncaccaagctacacccatcatcaggtttacaaccaggcactgactacaagatctacctgtacctgcccggggcggcncgctctagnaactagtggatnccccgggcttgcatgaattctatataaagcttatcgatacntnc

SEQ ID NO: 1579 - DNA, 455 bp, Homo sapiens
  misc_feature 183: n = A,T,C or G
tatcactacttagggcgaattggagctccccgcggtggcggccgcccgggcacggtacttttttttttttttttttttgagacagagtctcactctgtagcccaagctggagtgtagtggcgtgatcttggctcactgcgacctccatctactgatttcaagtgattctcctgtctcagcctntcgagtagctgggattacaggcgtgtgccaccatgcctggctaatttttttgtatgtgtagtaaaagatggggttagctgttgtttgattttatatagaccgtgacatgtcttatgatatgagaatgggctggaactatagcctcggggtccttgccctttcctaaggacttactgtttattgatcaagtaaaagtgaaacaggagcatgtttaaaataatgtagcctcattttaaaattttctgcactcttacaagtcaatagatcatggg

SEQ ID NO: 1580 - DNA, 484 bp, Homo sapiens
  misc_feature 286, 294, 313, 337, 407, 408, 469: n = A,T,C or G
ctaacactacttagggcgaattggagctccccgcggtggcggccgaggtacgcgggggcgaagacaaatgatccttaaagaaggtgtggggtctttcccaacctgaggatttctgaaaggttcacaggttcaatatttaatgcttcagaagcatgtgaggttcccaacactgtcagcaaaaaccttaggagaaaacttaaaaatatatgaatacatgcgcaatacacagctacagacacacattctgttgacaaagggaaaaccttcaaaagcaatgttttttttncctccacnaccaacagaaacatgccanttaacctgccccggggcgggccgnttctagaaacctaagttggatcccccgggcctgcaaggaattcgatatcaagccttatcgatacccgtcnnacctcgaagggggggcccggttcccagcttttgttcccttttagttgagggttaaattgcngcgcttggccgtaat

SEQ ID NO: 1581 - DNA, 487 bp, Homo sapiens
  misc_feature 7, 393: n = A,T,C or G
gccctancactacttagggcgaattggagctccccgcggtggcggccgaggtacagctgggtgctgcagcactggagtgcgaacttgtggctgtggttatgaaggagcctcgtcagctatgcctttaacccctggtgaagcagtgccagtcacactttgccagtcaaacggagaggcagcagtagtaagaccagaccaaatcaaaccaaaccaagcaaaccacggggaatggagacacagagtttcattctgtcacccaggctggagtgcagatgcagtggcatgatgatagtgcactacaacttggaactcctgggctcaagccatcttccctccactgcctccaagtagctggggactacaggtcatgtgagcacacagcataaaggcagntgcccacaagccaggaagagaagcatcatcagaaacccgaccatactggcttcctgatctcagactttcagcctccagaatggattattgcctg

SEQ ID NO: 1582 - DNA, 440 bp, Homo sapiens
  misc_feature 395, 422: n = A,T,C or G
tagggcgaattggagctccccgcggtggcggccgaggtacgcgggggagagagacacacagatctaagtcgggggccagagggagctccctcaactaggcagcacagccctactgatcagcgcatgtgtgtaaggaaccacctcaggccagagaaagagccatgtgagaagattagaaggaacagtggtgctgacacaggacctagggtagggcctgttcccaccaccctagctggaaaacctcatgatttatggggcactgggtagaaaacacaagtgagaaaccctagatgggcactgccacctgacacagctatacagcaggacctgaaaggatcacacttgcatcctaggacaaagctcaaaagtaccttgcccgggcggcccgctctaanaactagtgggatcccccggggctgcangaaattcgatatcaagct

SEQ ID NO: 1583 - DNA, 493 bp, Homo sapiens
  misc_feature 5, 18, 227, 234, 250, 252, 255, 256, 258, 262, 265, 266,269, 275, 280, 285, 289, 293, 297, 301, 304, 305, 311, 312,317, 319, 323, 325, 328, 332, 345, 347, 352, 353, 357, 389,393, 396, 409, 414, 416, 417, 419, 426, 428, 438, 461: n = A,T,C or G
  misc_feature 490: n = A,T,C or G
gcccnaacactactactnctatagggcgaattggagctccccgcggtggcggccgcccgggaggtttcatgactcaccacaggggcacccagcaaattggcatccgagccaaaatgagagtgcaagcttttgagtttccaatgtaaagctcatcaaactttgacattacttcttttttatataaggggctttttttttttttttttgcataaaaaattttaaaaaancaaattnaaaaaaaattcaaatnanttnncntganctnntgnccatanaaacnttgcntgtnctgncccnaggnaanntggaannttcgnanggtntngcnctcnaccctgggtaacnancaaanntttntttcaaaaaaaaaaaaaaaaaaaaaattccantttntancccataaaggccntttanannantggtccntngggccgtttntaaaactagggggatcccccggnctttgcgggaatttcaatttaaacccttntcg

SEQ ID NO: 1584 - DNA, 476 bp, Homo sapiens
  misc_feature 2, 3, 4, 5, 6, 7, 14, 134, 170, 171, 172, 293, 378, 386,403, 439, 460: n = A,T,C or G
gnnnnnnctcccgnaacttacgactactatagggcgaattggagctccccgcggtggcggccgcccgggcaggtacatacccccacaccaggctaatttttcctatttgtagaaacacggagtcttcctatgtngcccaggctggtctcgaactcctgggctcaagcagnnngcccacctcaccctcccaaagtgctgggattataggcataagccaccacgcctggccaatttctgttaaattttaccttcattattctctaattctagcctgcttcatttctgtcagcggnactagtcactgttttctacattgtccatcgggaatgtatgccccattaggatggggactttgcctattttgtttaccattatagnatcattanttgaaatagtgcctggncgtgtttccaaaaaagtacattatactattctcttnaaataaaaaaccacagtaaanaaatttgtctttcaaa

SEQ ID NO: 1585 - DNA, 552 bp, Homo sapiens
  misc_feature 6, 53, 86, 94, 116, 149, 154, 168, 190, 230, 257, 288, 297,378, 392, 401, 413, 422, 428, 429, 431, 432, 435, 440, 444,446, 451, 459, 468, 472, 483, 484, 490, 495, 497, 502, 507,512, 538, 546: n = A,T,C or G
gcgccnaaacactactatagggcgaattggagctccccgcggtggcggccgangtacaccaagcacctatttttataacttagctncccatggngagataatggcttgcgtgcatnttatgtatccataacatacatacaaggctcggnctttncaatgggataacanttcacaactcttcgatttgaantgtaatgaatctggcgacaaggatttttctctaatggatnccaaagttagccagaacttttaatgtnaagatgaaaaagggtgtaaggtgttatattntcttcaatncctttaccacaggaggctaactccacaatttccctcatgtttctcattcagaaaaaaaaaaaataattaaatttttgtgtntccgaatttatttntgatgaatngctttcttatgntgcctgatngttttnnannttncttgnaaantntaaanctttgggnttctttaanaaantttttcttaanngtttanggggntnatttnaaccnttacnggggtttggttattaaaaacaatttntttttttnttgggg

SEQ ID NO: 1586 - DNA, 491 bp, Homo sapiens
  misc_feature 5: n = A,T,C or G
gcccnatcactactatagggcgaattggagctccccgcggtggcggccgcccgggcaggtacaccctagctccagcttcccctgggagactgtgcatctcctggctccactaacaccaccttcttctgaccttccagcctagagatgatgactctgccagcctagatgggctctgggttgtctccctattcctgtttgctttgtagatttcccattatgctgtcaccaactccccagcctaagccctctctattttaaattctcaagtggattatgttcctgattagtccctgactgatataccactctcctcatgatctctgattagttttcctgttaggttgttgcagtaaaaaaaaaaaaaaaaagtacctcggccgctctagaactagtgggatcccccgggctgcagggaattcgatatcaagcttatcgataccgtcgacctcgaggggggggcccggtacccagcttttgttccctttagtgag

SEQ ID NO: 1587 - DNA, 485 bp, Homo sapiens
gcccacccgatcgactccttagggcgaattggagctccccgcggtggcggccgaggtacgcggggagaacttgtgtgcttagacctgacgctgggaggagatgctgccacctaggttacttgtaggaccctatacggcaacctcctttgccaggaactatttataaacatcctgcaggaaaatgagtcaaggaagcttttcttttgagctatttacagcttttagcaattgagtaaagtatactcctgtgaacaaaatttggaacatacttgtttctctctaactgatttctccagaatttggaactagctgtagctgagaccaatgatgctgacctccctcaaaagctgcatttctgaatttctgaaggcaaactgtctgcctatattgtacagcaaaataatttcctgtattaaaaccgtttttattgctcaaaaaaaaaaaaaaaaaagtacctgcccgggcggccgctctagaactagtgg

SEQ ID NO: 1588 - DNA, 493 bp, Homo sapiens
ggccgcgaatacgactactatagggcgaattggagctccccgcggtggcggccgggggccattgagactgccatggaagacttgaaaggtcacgtagctgagacttctggagagaccattcaaggcttctggctcttgacaaagatagaccactggaacaatgagaaggagagaattctactggtcacagacaagactctcttgatctgcaaatacgacttcatcatgctgagttgtgtgcagctgcagcggattcctctgagcgctgtctatcgcatctgcctgggcaagttcaccttccctgggatgtccctggacaagagacaaggagagggccttaggatctactgggggagtccggaggagcagtctcttctgtcccgctggaacccatggtccactgaagttccttatgctactttcactgagcatcctatgaaatacaccagtgagaaattccttgaaatttgcaagttgtctgggttcatgtcta

SEQ ID NO: 1589 - DNA, 479 bp, Homo sapiens
  misc_feature 2, 4, 24, 31, 46, 212, 215, 229, 231, 232, 233, 244, 333,353, 376, 377, 397, 419, 432, 436, 446, 449, 464: n = A,T,C or G
gngnctatcactacttagggcgantcgaatnggagctccccgcggnggcggccgaggtacgcggggagtcttggttttctgctagtgctgctgctgctgggaggacgacggacggcagcggccaagcaagaagaaagacgtggcagcaagcgggagtcggggatagtgtcatcggttcggtaaagtttctgttctctgattttgggggattnttncctgcccaaaaaanannnaaaaaaaaaanttgttcctgcccgggcggccgttctagaactagtggatcccccgggctgcaggaattcgatatcaagcttatcgataccgtcgacctcnagggggggcccggtacccancttttgttccctttagtgagggnnaattgcgcgcttggccgtantcatggtcatagctgtttcctntgtgaaattgttnttcnctcacaattnccncacaacattacgaanccggggaagctttat

SEQ ID NO: 1590 - DNA, 473 bp, Homo sapiens
  misc_feature 199: n = A,T,C or G
cctatcactacttagggcgaattggagctccaccgcggtggcggccgcccgggcaggtacacatgctagggtccaggacagcaggaccaagccagcagaaacagcctgagcccaccgcagactggcctggctatactggacaatgccactcctcctgtacctcggccgctctagaactagtggatcccccgggctgcangaaattcgatatcaagcttatcgataccgtcgacctcgagggggggcccggtacccagcttttgttccctttagtgagggttaattgcgcgcttggcgtaatcatggtcatagctgtttcctgtgtgaaattgttatccgctcacaattccacacaacatacgagccgggagcataaagtgtaaagcctggggtgcctaatgagtgagctaactcacattaattgcgttgcgctcactgcccgctttccagtcgggaaacctgtcgtggccagt

SEQ ID NO: 1591 - DNA, 452 bp, Homo sapiens
ctatcactacttagggcgaattggagctccccgcggtggcggccgaggtacgcggggaagatgtgcgggaggcatatcgccgtagaggctgggccttcaagaacccgctctagaactagtggatcccccgggctgcaggaattcgatatcaagcttatcgataccgtcgacctcgagggggggcccggtacccagctttttgttccctttagtgagggttaattgcgcgcttggcgtaatcatggtcatagctgtttcctgtgtgaaattgttatccgctcacaattccacacaacatacgagccgggagcataaagtgtaaagcctggggtgcctaatgagtgagctaactcacattaattgcgttgcgctcactgcccgctttccagtcgggaaacctgtcgtgccagctgcattaatgaatcggccaacgcgcggggagagggcggtta

SEQ ID NO: 1592 - DNA, 456 bp, Homo sapiens
  misc_feature 441: n = A,T,C or G
ctatcactacttagggcgaattggagctccccgcggtggcggccggccgggatggcaacagatggtgcgtgccggggaccgcgttagcagcagcactcttgagaaaccaggaaaagagccccgcgtacctcggccgctctagaactagtggatcccccgggctgcaggaattcgatatcaagcttatcgataccgtcgacctcgagggggggcccggtacccagcttttgttccctttagtgagggttaattgcgcgcttggcgtaatcatggtcatagctgtttcctgtgtgaaattgttatccgctcacaattccacacaacatacgagccgggagcataaagtgtaaagcctggggtgcctaatgagtgagctaactcacattaattgcgttgcgctcactgcccgctttccagtcgggaaacctgtcgtgccagctngattaatgaatcggc

SEQ ID NO: 1593 - DNA, 468 bp, Homo sapiens
  misc_feature 3, 5, 6, 136, 152, 171, 200, 209, 213, 223, 240, 244, 268,284, 287, 289, 302, 332, 340, 346, 363, 407, 408, 437, 439: n = A,T,C or G
ggngnngccgcgaatcgactactatagggcgaattggagctccccgcggtggcggccgaggtacttttttttttttttttttttttttttttttcattcttttcttataagtaagttgtccataagtgaacacttnaaaagcaacaattccntcccctggattcaaggaanaatcctatgcataatcattcacatgcatnatgacccanattnttactgggtngtttaaaaagggtgaancagnggtcctttgagtgttcaaacccanttcccaaggagcacanatncncctgaatcccatnttgggttgcaagccctgttgagtaaaaaanaaaccttntggttncaacattcatccttttnatgataattgccaaaaaatttttaacaaacattaatataatgcnnaacatcccagtacctgcccgggcggccgntnttaaaactaggtgggatcccccggggctg

SEQ ID NO: 1594 - DNA, 838 bp, Homo sapiens
  misc_feature 3, 5, 8, 9, 11, 19, 24, 25, 26, 27, 28, 31, 33, 34, 37, 45,48, 51, 54, 55, 57, 59, 61, 62, 65, 66, 67, 71, 74, 75,80, 82, 84, 108, 117, 118, 130, 133, 136, 142, 195, 219,236, 275, 287, 320, 326, 330, 341, 348, 351, 359, 361, 363: n = A,T,C or G
  misc_feature 366, 376, 391, 393, 399, 407, 423, 425, 428, 433, 442, 451,459, 462, 475, 491, 500, 503, 505, 512, 514, 517, 522, 526,527, 528, 529, 537, 543, 545, 570, 576, 578, 581, 587, 591,595, 601, 602, 609, 617, 627, 648, 651, 662, 667, 669: n = A,T,C or G
  misc_feature 681, 682, 685, 686, 694, 707, 709, 711, 712, 715, 717, 723,735, 736, 737, 738, 754, 760, 761, 775, 778, 782, 785, 793,799, 800, 801, 802, 809, 810, 812, 813, 832: n = A,T,C or G
gtntncannanattttgangtatnnnnntgntnnctntttctctnttntcnttnncntntnnttnnnttantannctctntntnctatatttattcctacattcttcntatcctctnnagatagagttcntcnccntatacnactcactatagggcgaattggagctccaccgcggtggcggccgaggtactttntttttttttttttttttttcaatntttattttggttttctnacaaaggttgacagttttccataacaggttgtaagagtnttgaaaaaaaanttcaaatttttgggggagcgggggaaggagttnatgaancctntattgcattanaggcccnttngatctaantncnatntttttttccnttttttgccccaacnantttttnttaggcanatgttatttatgttancnacnaaatntaatattgngtattggcnttttacangtncttttccagtttntatatatatagagcanacgtatcgncanangttaatngnggntctanatannnnaaataaanaggttntntttctttacaaaaaatctttgcgtntatttntnttntttgtnttanaatngttcannaaatttnggaggttnccccattttntaatttttcggaaaaaaccanagnactttgggggnccccnanattgggttcccnnccnntataaganatatttccccctngngnntcnanggcccncccccatccccnnnntttggttccccaaaanaggggnnggccatattttttncantagnggntaaagcgngcctannnnccctttnnanntggggcccttctaattttntggttt

SEQ ID NO: 1595 - DNA, 476 bp, Homo sapiens
  misc_feature 6, 84, 87, 128, 345, 351, 369, 375, 456, 462: n = A,T,C or G
gccgcnaatacactactatagggcgaattggagctccccgcggtggcggccgaggtacttttttttttttttttttttttttgnttnacatttgggggtaaagtgcaagtttgttaaaaagatattgnggaatgttaaggctggagtacaaacaaatccatcatccaggtagtgagcatagcacacaattggtagtttttcaacccttttttctctccctcccttctcatgttccccagtgtctattgttcccatctatatgtacatgcatactcaatgtttagttcccacttataagtgagaacatgtggtatttagttttattcttttttatactcagtccanatttgnggctcacaggctgggtanataaanacttttgtgtccaaatttccaaccagtagctgctatacacacatatctgggcctgccgattttcccatttgcttgttgaanaatcgncttttatgaaagaa

SEQ ID NO: 1596 - DNA, 448 bp, Homo sapiens
  misc_feature 290, 412: n = A,T,C or G
ggagctccccgcggtggcggccgggggccattgagactgccatggaagacttgaaaggtcacgtagctgagacttctggagagaccattcaaggcttctggctcttgacaaagatagaccactggaacaatgagaaggagagaattctactggtcacagacaagactctcttgatctgcaaatacgacttcatcatgctgagttgtgtgcagctgcagcggattcctctgagcgctgtctatcgcatctgcctgggcaagttcaccttccctgggatgtccctggacaanagacaaggagagggccttaggatctactgggggagtccggaggagcagtctcttctgtcccgctggaacccatggtccactgaagttccttatgctactttcactgagcatcctatgaaatncaccagtgagaaattccttgaaattttgcaagttgc

SEQ ID NO: 1597 - DNA, 507 bp, Homo sapiens
  misc_feature 2, 4, 5, 9, 20, 33, 485, 503: n = A,T,C or G
gntnntgcngctaatcactnctatagggcgagncgaattggagctccccgcggtggcggccgcccgggcaggtacgcgggattactcaaaaagaatcagtcctgaaagggtgggcaaatgtgcagctctccctcagggtcgtgggatctgggtccaacagtctggcctttcagccttcaggctgttttaggcttgaagtttcgtgtggctgatcaaagaaagaaggcatacgcagatttctacagaaactacgatgtcatgaaagattttgaggagatgaggaaggctggtatctttcagagtgtaaagtaatcttggaatataaagaatttcttcaggttgaattacctagaagtttgtcactgacttgtgttcctgaactatgacacatgaatatgtgggctaagaaatagttcctcttgataaataaacaattaaccaaatactttggacagttaaaaaaaaaaaaaataaaaaaaaaaaangtccctcggccgctctanaact

SEQ ID NO: 1598 - DNA, 493 bp, Homo sapiens
  misc_feature 4, 17: n = A,T,C or G
ggcnccgaatacgactnctatagggcgaattggagctccaccgcggtggcggccgcccacggctcatagcctgtgggttggtgctgatcggcatgttcgtgatgaaactctaaccgtcggacaaaactaaaaaaggaatgggttatgacagtcgctttctggtgtgtgttgatcgctatttttctgccgtatctgtgcacgggcgtggccaagttcagcggtggcaagttcgggccccggcagaaccatgacccccgagctttcctggaaaccctcgaggggttcgccaagcgtgcccacagtgcgcaactcaacagctttgaagtgaccccggccttcgcggcggcggtgatcattgcccatttggccggcgctgcgtcgctggtgacgatcaacgtattggcggtgctgtttattaccagccggctgctttacatcatctgctacctggcggactgggcgattctgcggtcggtggtatgggcggtggggg

SEQ ID NO: 1599 - DNA, 503 bp, Homo sapiens
  misc_feature 2, 3, 4, 17, 32: n = A,T,C or G
gnnnaggcggcgcgcgnatacgactactatanggcgaattggagctccaccgcggtggcggccgagataccactatgcctggctaatatttttatttttttatttttgtagagacagggtcttgttatgttgcccaggctgttctcaaactcctatcctcaagccatcctcccatctcagccactcaacttgctggaattaccagcggaagccactgtgcccagcccagactcccttttacctagtatatcatgtctaatttctaacaaaaaattaaaaaaacattgtaagaggaaaaaaagaaaccctaaaacaaacaagcaaacaaaaaacccaaaacaacaaaaagtttcaagaaacagagctagctgacagaactatattcagatatggcaggtatattagaattatcagattggtaattttaaacaactatgactaatatggtaagagtgataatggaaaaaatagacaatttgcaagaacagatcagtaatataagc

SEQ ID NO: 1600 - DNA, 495 bp, Homo sapiens
  misc_feature 1, 3, 28, 35, 41, 47, 65, 132, 192, 217, 218, 231, 309, 375,387, 405, 493: n = A,T,C or G
nangcattcaattactatagggcgaatnggagctncaccgngggggngccgggcaggtacccatntaaaccccaaacctcgggctccagaagcagatgagcagatgaggagacgcctctattccgtgtcgtntagaatgagcaaacagttgtcttcaccatcccagacaagcagatgaatggtgaaacgatncatcatgataaaagagagatgaggnncatttgaacgccnagaggagttcagtcgagggtggtcggagaggtttggccacccagcaggaagattatcttcccgtgccatccccgcttncagctctgcatccatccttcagagaaccacctccaccactcaataaaaccctgcattcaacctgcnaaaaaaaaaaanaaaaaaaaaaagtacctnggccgctctagaactagtggatcccccgggctgcaggaattcgatttcaagcttatcgataccgtcgacctcgagggggggcccggtncc

SEQ ID NO: 1601 - DNA, 414 bp, Homo sapiens
gagcgcgcgtaatacgactcactatagggcgaattggagctccaccgcggtggcggccgcccgggcaggtacttttttttttttttttttggtcttataatatttgtttgacacctcaaacctcttattttcatttcagagactgattaaatacagtctcaaggtgataaaataacacagtaggataaaaataaagtgacaagtggcaagggatggttagtcatctttgatacctgtggatactcaaacccaccatttaaaatgtcttaggtgttagatgtggtaggtgtttctatcaggaacacgtgggaataaaaacaaatttagaactcacatctgggcttctcacttctaaaacaagggtcaggaggccagaaggcggagcagcgcatcagttaggatttgacaggaccc

SEQ ID NO: 1602 - DNA, 402 bp, Homo sapiens
  misc_feature 109, 250: n = A,T,C or G
cgcgcgtaataccgactcactatagggcgaattggagctccaccgcggtggcggccgaggtactttttttttttttttttttttttgggcagctaaaatctaggatggngttaagtttcttcattttgtcaattatatataaaaaattagaaacaacaccgaatctgcatttcttggatgagatagttaataacaaactatttctcaatatttgtatactaaaaactagtgaaggtgttatgtgtttcantatcttatctcttatttgaacatgggtttctgaaaggagcctatataataatataaatggtatgtagtaaatgaggcactgtcttggctgggactgctataaaaaaattaccatagaccattgactaaaccacaaacatatacttctcacag

SEQ ID NO: 1603 - DNA, 470 bp, Homo sapiens
  misc_feature 1, 57, 75, 77, 82, 86, 99, 115, 118, 160, 163, 186, 187,191, 205, 224, 225, 241, 357, 369, 380, 385, 410, 434, 438,439, 467: n = A,T,C or G
nccctaatcactacttagggcgaattggagctccccgcggtggcggccgaggtactnctgcctgggttatgggantnaaatnttgnccagggacatccnagggaaggggaacttnccnaggcagatgcgatagacagcgctcataggaatccgctgcagntgnacacaactcagcatgatgaattnntatntgcaggatcaaganagtcttgtctgtgaccacnngaattctctccttctnattgctccagtggtctatctttgtcaagagccagaagccttgaatggtctatccaaaagtctcagctacgtgacctttgaagtcttccatggcagtctcaatggcccccgggccgntctagaactagnggatcccccgngctgnaaggaattctatatcaagcttatcnataccgttgacctccagggggggncccnntacccagcttttgttccctttttagtgnggg

SEQ ID NO: 1604 - DNA, 484 bp, Homo sapiens
  misc_feature 2, 3, 5, 7, 104: n = A,T,C or G
gnntngngcctttatcactcttatagggcgaattggagctctccgcggtggcggccgcccgggcaggtacgcggggagtcctgaaagggtgggcaaatgtgcanctctccctcagggtcgtgggatctgggtccaacagtctggcctttcagccttcaggctgttttaggcttgaaggtgggtttttgctaggacccttggctgtctctctgtcagatggatgactaagtgagtttcgtgtggctgatcaaaggaagaaggcatacgcagatttctacagaaactacgatgtcatgaaagattttgaggagatgaggaaggctggtatctttcagagtgtaaagtaatcttggaatataaagaatttcttcaggttgaattacctagaagtttgtcactgacttgtgttcctgaactatgacacatgaatatgtgggctaagaaatagttcctcttgataaataaacaattaacaaaaaaaaaa

SEQ ID NO: 1605 - DNA, 490 bp, Homo sapiens
  misc_feature 2, 3, 4, 16, 102, 106, 184, 271, 407: n = A,T,C or G
gnnnaggcgacgccgnatacgactactatagggcgaattggagctccccgcggtggcggccgcccgggcaggtacttttttttttttttttttttttaatgngcanaggattgacctgtgcatgcttttgatctctcattcaaaggatcaatattaaataaaattgtcatgagctgtgttgaanacagggcgctttcaaatagaggtaatttgctcttgtgttgtaagaggaacatgtcaacaaagataggaaatgagggtgatcgtgcanatggcttgtatcttatatatgcaaaggagttcccgcgtacttctgtcttccagttttccacttcaaacttctatcttctccaaattgtttcatcctaccactcccaatcaatctttccattttcgtctgcgtttantaaatgcgttaactaggctttaaatgacgcaattctccctgcgtcatggatttcaagggcttttaatcaccttcggtttaatc

SEQ ID NO: 1606 - DNA, 498 bp, Homo sapiens
  misc_feature 2, 3, 4, 12, 13, 22, 45, 112, 264, 268, 289, 291, 314, 318,325, 332, 350, 493: n = A,T,C or G
gnnnagtggccnngaatcactnttataggggcgaattggagctcnccgcggtggcggccgaggtacttttttttttttttttttttttttgagttccaggatacaggtgcanagtgtggaggtttgttacataagtagatgtgtgccatggtcgtttgttgcacctatcaacccattatctaggttttaagccccatatatgttagctatttgtcctaatgccttctttcccctcacccaccaaccgccctcaagtcagttttntaanagtattaatcaagaaaccatntnataatcacaccaaagcatatttntacncaagatntaaaatnctaggatatttgctaaanataaatgcatgccatacactgtaacaatgggaaatgacttcctacaggataacaatgctaaaattaaactctttgtaattagtaaagatgaacatgtgggtaatataattggatatattttttaaactattttttgtcctcantaaaa

SEQ ID NO: 1607 - DNA, 483 bp, Homo sapiens
  misc_feature 8, 483: n = A,T,C or G
ggcgccgnatacgactcactatagggcgaattggagctccccgcggtggcggctcctatggatgctttaaggcagtgtttctcaaccagagacaagcttgccacccactgaatatttgtcagtgtccaaaaatgtttttggttgtcatgactggaggtgggaggagtgtgctattgacatctagtggctagagggcaggtatgctgctaaatatcctaacacacaggacggcccctctgcaacaaagaactacctgacccaaaatgtcagttgtgccaaggttgagacaccctgctgtaggggatagaaagaagtgtaagaaatggtttcaaactcaagaacaatgattagagagatggatggatggatagataggtacctgcccgggcggccgctctagaactagtggatcccccgggctgcaggaattcgatatcaagcttatcgatacccgtcgacctcgagggggggcccggtacccan

SEQ ID NO: 1608 - DNA, 760 bp, Homo sapiens
  misc_feature 4, 5, 9, 14, 16, 21, 23, 24, 27, 28, 29, 30, 41, 43, 45,50, 51, 53, 55, 56, 59, 60, 61, 63, 64, 68, 76, 84, 92,95, 96, 97, 105, 107, 111, 114, 311, 320, 323, 324, 325,337, 348, 356, 358, 375, 380, 381, 399, 406, 417, 421, 435,442: n = A,T,C or G
  misc_feature 446, 457, 466, 469, 478, 480, 484, 488, 490, 500, 502, 505,508, 517, 523, 524, 526, 532, 533, 534, 536, 537, 539, 542,544, 545, 552, 555, 556, 561, 566, 567, 577, 581, 595, 596,598, 599, 615, 616, 618, 624, 627, 639, 641, 649, 651: n = A,T,C or G
  misc_feature 653, 659, 660, 662, 677, 681, 683, 690, 695, 697, 706, 710,711, 715, 718, 724, 726, 728, 729, 731, 732, 734, 738, 740,741, 743, 746, 748, 749, 750, 752, 759: n = A,T,C or G
gaanntttncactntnctatntnntcnnnnttctcaatttntnanttttnnanannttnnnanntttntatttttncaattttnaattttanttnnnccagtttngntcgngcngctatacgatcactatagggcgaattggagctccaccgcggtggcggccgaggtactgtatttccaaaagtaagtttctattcctagaactaaaacagaaaagaagtgttgtgagatacataaatgaagccaataaatttaaccaagggcttaccattttcctgcaggatgtttataaatagttcctggcaaatgangttgccgtnatnnnggttcctacaangtaaccctaangttggcangnattctccttcctcatcnttcanngttctttaagcacaacantttttcntttccgccgtnaccntgcaccttggtcgngctcgcnttcntagtaacttangtgggtatnccnctccggggntntagncatngnaaattttccnantcntcnaaagtcttnaaattnntnttaacnnngnntntanannctttttnaannggggnggggnnccccggtgtntccnccaatccatttatnngnnttccccttatttaaanngnaagggnggnttttacaaattnancacctacntntngggtanntntaaaattataattgngacncntaaaganccctngnttttttccnaganngtgnggnaaaaantnanntnnanttcncnncnttntnnntnaatttcng

SEQ ID NO: 1609 - DNA, 482 bp, Homo sapiens
  misc_feature 1, 8: n = A,T,C or G
ntgcccgnatcactacttagggcgaattggagctccccgcggtggcggccgcccgggcaggtaccaccatcagcactgctgattttcagttttgctatctattccaggtttgtccttactcccaaaaaaactaactagagagcacaactgaaaaaaatatataattctttggaaactgtccctgatttttatgcaaatgatatgcttcaacagcatttcagatccatccatgttgaaacctgtccgttcttcatgcgttgctcaagttggtgatgctctgagggtgatgctgttgccatagctgtttctgttggaccgcaagctgttgagactggtctgaagttgataggagatttacaagaggggacacacaatttgccggaatgatcaaacctacaatccgttgcccatcttccgttcttagccgcacgatctgcatcttcacgtttgtgccactgacagatgctagaacaccctcaact

SEQ ID NO: 1610 - DNA, 490 bp, Homo sapiens
  misc_feature 2, 3, 8, 16, 17, 422, 425, 426, 427, 428, 429, 430, 431,433, 439, 440, 441, 442, 446, 447, 450, 451, 453, 455, 463,464, 468, 469, 472, 473, 474, 475, 477, 478, 479, 480, 481,482, 483, 484, 485, 486, 487, 488, 489, 490: n = A,T,C or G
gnncgccnaatcactnntatagggcgaattggagctccccgcggtggcggccgaggtacataaaagtttaaatcctaatgtattaaaaaagtttaatagcactataatttcagaactttatatcatgcttatcataccatcccatagtatgggaatctttccatttcagtaaatgtagatccacagtaatatttttaagggctatgcattccattgtctagatgaaccacagttcattgaaacaactgtccgatgatgaacgctgaagttgatcgagcggccgcccgggcaggtactgcggcgggtaggcctaggattgtgggggcaatgaatgaagcgaacagattttcgttcattttggttctcagggtttgttataattttttatttttatgggctttggtgagggagggagggggtanttnnnnnnntnaatatnnnnagtnnggnngntnagggaatnntgtnnggnnnngnnnnnnnnnnnnnn

SEQ ID NO: 1611 - DNA, 508 bp, Homo sapiens
  misc_feature 2, 3, 5, 11, 17, 28, 39, 91, 95, 96, 103, 114, 115, 116,125, 127, 132, 133, 135, 136, 148, 156, 172, 188, 192, 193,217, 262, 266, 308, 326, 334, 352, 385, 392, 436, 442, 459,466, 497: n = A,T,C or G
gnnangttttnctctcnacttactatanggcgaatatgnagctccaccgccgtggcggccgcccgggcacggtactctgttttttcaaacntttnntattacntttttatactnnnttttatttntnatttnntnnaaaacatttttnatgttttncatatccttgactttnaacacatgttgctcanatgnntttcttggaagccaaagcattgangttcacttggttcaccaaaggcccgaccccaaacacatatacatncagnataatcctcccttgggtttttgcgatccttgccaatgtatancaagtcccggatctcatnaatgcccncgtacctgcccgggcggncgctctagaactagtggatcccccgggctgcangaattcnatatcaagcttatcgataccctcgacctcgagggggggcccggnacccancttttgttccctttagngagggtnaattgcgcgcttggcgtaatcatggtcatanctgttttctgt

SEQ ID NO: 1612 - DNA, 483 bp, Homo sapiens
  misc_feature 9, 345, 365, 385, 390, 452, 472: n = A,T,C or G
tccctatcnctacttagggcgaattggagctccccgcggtggcggccgaggtacatcatatttgcttgttggctttatgataacttagaaataatattctggattaactgtgtgactcatgagagagtttgtgcaactatgtttccaaatttacttgattttcaagacttacactagaactgtgcgaacaaggtaataagtaaagcatatgtattaatacaacctttggtcaactcttgggtagccccagtgttggcctcccgctttggcctcccaaagtgctgggattacaggcatgagccaccgcagccagccaacatagagataatcttaaagactcctaanaaaaaaaaaaaaaaaaaaangtacctgcccgggcggccgntctanaactagtggatcccccgggctgcaggaattcgatatcaagcttatcgataccgtcgacctcnagggggggcccggtacccanctttttgtttc

SEQ ID NO: 1613 - DNA, 484 bp, Homo sapiens
  misc_feature 3, 9, 16: n = A,T,C or G
gtncggctntctactnctatagggcgaattggagctccccgcggtggcggccgaggtactactttttactgcatcctgcaacaaatatcactgaaatgattcatttctggaagcattctactggagcatcccgtggcctggaacagagctctggggactggcatccttccactgactttgatgctgatgacagccctgatcgtgtgattcagctggccttaacccgacccacgtgcacgtattcctcagcacatctggagctgaagtcgagagcctctgtgggaacgcttggcagcccatgctgttctaaggctggagcaggatagactgctttcatctctgatgttagaaagcagacctgtttcagggtttggggaaggttgttcgatatgaactgggtcctctctaattatttttactgtatgtgtgacttcttcctagaaagaatggaagaatgtttatgttagaacattttatctattct

SEQ ID NO: 1614 - DNA, 933 bp, Homo sapiens
  misc_feature 2, 171, 176, 181, 182, 183, 185, 189, 192, 196, 197, 198,202, 204, 206, 213, 214, 215, 216, 217, 230, 235, 236, 238,241, 243, 244, 249, 251, 261, 262, 277, 291, 299, 300, 304,305, 312, 315, 319, 320, 323, 324, 329, 330, 333, 336: n = A,T,C or G
  misc_feature 344, 346, 351, 352, 356, 357, 367, 371, 373, 377, 378, 379,382, 384, 387, 388, 399, 401, 402, 404, 407, 413, 414, 419,420, 421, 422, 425, 433, 435, 437, 439, 446, 448, 451, 461,463, 466, 469, 470, 475, 478, 492, 493, 501, 507, 513: n = A,T,C or G
  misc_feature 519, 530, 533, 538, 544, 545, 555, 575, 579, 594, 596, 597,598, 600, 601, 605, 609, 622, 624, 629, 630, 634, 637, 639,640, 650, 652, 657, 660, 679, 680, 700, 710, 726, 729, 730,732, 742, 743, 747, 749, 757, 759, 760, 763, 765, 766: n = A,T,C or G
  misc_feature 768, 769, 772, 777, 792, 793, 808, 821, 823, 824, 825, 826,830, 832, 837, 839, 841, 843, 848, 852, 854, 862, 868, 878,880, 881, 882, 884, 889, 913, 918, 920, 924, 927: n = A,T,C or G
cngacactactatagggcgaattggagctccccgcggtggcggccgcccgggcaggtacttttttttttttttttttttttttctttttttttttttttttttttttttttttttttttttttttttttttttttttttttttttttttttttttttaaaaaaaaaaaaangggtnttttnnntnaaanccnaccnnnttantntngaaaaannnnnggaaaaaaaatcnttttnncnaancnnggttngnttttttttanngggggggaaaaaaanaaaaaaaagggggnattttagnnattnngtccccnaanttanncgnnggggnnggnaancccccggncnttaannaaannggggaaaacntttntntttnnnggngnggnncaccccccccntnntngtntttctnnaaaannnnggnggagaatnancngntcttcanancangaaaaaaacncntcnccnnccccnctngaacttgggtaagnntaaaaaanaagggncccccngggggngaggaattcanttntaggntttttnnaccccccaancggggggggggggcccccancccnattttttgttccctnannngnngggnaaancccccccctggantnaatannaggnacntnngttgtcgtcnanggagnaanaatttttattcgaagcacnnaaacaaccaaaaaataatancggactgggnaaacataaaaaatggntanncntggtgggggnncttnanagaaggancnnctnanncnncantttgntaggggggtgccccnnattcccccttttacnacaaaagtgaaancnnnngcgngnacctntntntntaagnatcncnccaccacngggggnggagggcggntnnngntaatnggcccttttccaatttcgaaaaanaaagnangaanganttggag

SEQ ID NO: 1615 - DNA, 900 bp, Homo sapiens
  misc_feature 1, 3, 8, 116, 124, 137, 163, 172, 174, 180, 183, 209, 210,217, 222, 223, 232, 233, 237, 249, 259, 267, 268, 292, 320,325, 331, 339, 347, 372, 384, 391, 398, 406, 417, 420, 433,435, 436, 445, 450, 456, 463, 468, 472, 474, 483, 489: n = A,T,C or G
  misc_feature 495, 517, 531, 535, 541, 543, 558, 570, 572, 584, 613, 627,654, 656, 665, 677, 678, 686, 694, 708, 712, 719, 724, 740,755, 756, 757, 761, 779, 785, 803, 805, 806, 810, 812, 819,823, 851, 852, 857, 859, 864, 871, 887, 893, 894, 898: n = A,T,C or G
ngncactnctatagggcgaattggagctccccgcggtggcggccgaggtacttttttttttttttttttttttttggggtttttttttttttttttttttttttttttttttttcnggggggancatgggacctttnttcgttaaaacatcaggctccaaatntggactttnancaaaanccnttgccgggaacaaagggacaaaaaanntgaaatnaacanngcctggcannaatnacagccgggcangggtgctccnagccttgnntcccccggccgttttaaaactagnggatcccccgggctgcaggaattcgatntcaancttatngatcccgncaacctcnagggggggcccggccccaacttttnttccctttaagngagggtnaattgcncccttggngtaatcatggncanagctgtttcctgngnnaaattgttntccgntcacanttccacncaacntacnanccgggagcntaaagngtaaancctggggtgcctaatgaggganctaactcacattanttgngttgcncncactgcccgtttcantcggaaaacctntngtgcccacttcntttaataaaatcggccaacccccgggganaggcggttttgctntttggggcgctttttccgtttctcgcntnaatgactcnctggcccttggnnctttcggnttgcgggnaacgggtttttagntcantttaaanggggngtatatcggttttccncaaaaattagggggnnntacncgggaaaaaacatttgancaaaanggcccctcaaaagggccngnnaacncntaaaaangccngttggcttggcttttttcataaggttcnnccccntnggagngcctttnaaaaaatggcccttanatcaanngggngg

SEQ ID NO: 1616 - DNA, 907 bp, Homo sapiens
  misc_feature 56, 90, 101, 118, 135, 151, 188, 194, 205, 225, 240, 271,290, 305, 309, 336, 367, 376, 491, 494, 526, 551, 620, 660,682, 708, 722, 729, 731, 742, 743, 763, 772, 780, 785, 792,794, 796, 802, 805, 807, 831, 872, 880, 892, 893, 897: n = A,T,C or G
  misc_feature 898, 899, 900, 901, 905: n = A,T,C or G
cgacactactatagggcgaattggagctccccgcggtggcggcccgaggtactttntttttttttttttttttttttttccgaaaggaancaaaacctggngggttaattaatccttnttgatgctgggcagcantaataggatcaagaanaaagcctttctcctcctgtgctcccaaggatgcccancggganactgtgagganatggaacacagccttcactntgttaattgttcaanagcaaatcacctgccgtgaggaccatgacantcctgggggccatttgtanaatattcatccccanactntgaactgagtcttgaagtctgagtaanaatttgctgggtgaaaaaaagggtaacgttntttcaaaanggagaaaccagcttaaacaagggtcccggggggcagaacatcatgataggagtaggaatgcaggtgaggttttggttttctgcaaaatattgggtacctgcccgggcggccgttntanaactagggggatcccccgggctgcaggaattnaatatcaagcttatcgatcccgccnacctcgagggggggcccggtccccaccttttgttccctttagtgagggttaattgcccccttggcgtanttcatggtcataactgttcctgtgggaaattgttttcccntcacaatttcccccaacattangaacccgggaaccttaaagggtaaancctgggggggcctnatggagngngcctaacctcnnattaattgggttgcgcccanctggccccntttccaancgggnaaacctntngngccccnctntntttaattgaaatcggccccccccnccggggaaaagggggtttccgtttttgggcgctttttcccnttctttgntaacttgaattnnttgnnnnngggngg

SEQ ID NO: 1617 - DNA, 883 bp, Homo sapiens
  misc_feature 516, 570, 571, 572, 573, 574, 575, 576, 577, 578, 579, 580,581, 582, 583, 584, 585, 586, 587, 588, 608, 614, 625, 675,682, 697, 722, 733, 735, 738, 771, 799, 809, 840, 866, 881: n = A,T,C or G
cgacgactcactatagggcgaattggagctccccgcggtggcggccgaggacgcgggtatgcatgcattttctctgagttatattttaaaatctatacatttctcctaaatatggaggaaatcactggcatcaaatgccagtctcagacggaagacctaaagcccatttctggcctggagctacttggctttgtgacctatggtgaggcataagtgctctgagtttgtgttgcctcttttgtaaaatgagggtttgacttaatcagtgattttcatagcttaaaatttttttgaagaacagaactttttttaaaaacagttagatgcaaccatattatataaaacagaacagatacaagtagagctaacttgcttaaaaaaaggatggaggctctgaagctgtgacttcattatcccttaatactgctatgtcctctgtagtaccttagatttctatgggacatcgtttaaaaactattgtttatgcgagagccttgctaatttcctaaaaattgnggatacattttttctcccatgtataattttctcaccttctatttaaaaaaaaannnnnnnnnnnnnnnnnnnaagtaccttgcccgggcggncggctntagaactaggnggatcccccggggctgcaggaattcgatttcaagcttatcgataccggcnaccctcnagggggggcccggtncccagcttttgttccctttagtgangggtaaatgcncnctnggggaaacatgggcatagctggttcccgggggnaaatggtttccgttcacaattcaccaanatacgaaccngggaccttaaaggtaaagcccggggggcccnatgggggagctacctccatttattgngttgccccactggcnct

SEQ ID NO: 1618 - DNA, 896 bp, Homo sapiens
  misc_feature 387, 674, 719, 721, 728, 741, 763, 766, 810, 814, 828, 833,842, 869, 872, 876, 879, 880: n = A,T,C or G
cgacactcctatagggcgaattggagctccccgcggtggcggcccgaggtacccaaaagtgggtcttgaaatataattgtttctgagaggaacttattctcaggatatttttgtaagagggacaaaactacttaacagtgtgtatccttgcaataagtatattaatgaatacgatacaaccattttatacaggcaaaagatggtttaatgccaaagcacaaactcataaacccagttgatgaggagccagaacaatggtcattactgtatagagatgttttaaaaagtcaccatataagctttgaaataattctaatgaaaattatatgaccttgaggctgggcgcggtggctcatgcctgtaatcccagcactttggggaaggccnaggtgggtggatcacaaggtcaggagatcgagaccatcctggccaacatggtgaaaccctgtcactactaaaatacaaaaaattagcccgggcatgatggtgcatgcctgtagtcccagctacttgggaggctgaggtgggcgggtcgcttgaacctcagaggcagaggttgcaatgggccaagacggtgccactgcactccaacctgggggacagagcaagactcttgtaaaaaaaaaaaaaaaagaagtacctgcccgggcgggcgctctaaaactagtgggatnccccgggctgcaggaaattcgatatttaaacttatcgatacccgncnacctcanggggggcccgggncccagcttttggttccctttanggnggggtaattggcccccttggcgtaatcatgggcataactggttnctgngggaaattggtatncgttnaaaattccncccaacatccaacccggagccttaaanggnaaanccnnggggggcctaatgggg

SEQ ID NO: 1619 - DNA, 476 bp, Homo sapiens
  misc_feature 1, 4, 15, 24, 31, 34, 42, 45, 48, 51, 54, 154, 161, 193,221, 278, 281, 285, 289, 296, 299, 307, 323, 343, 357, 358,360, 363, 399, 441, 458: n = A,T,C or G
nagnccctatcatanttttagggnaatgggnctncccggggnggnggncgnccnggcaggtactgtcatgcaaggatgggaacacattctgggaaatgtgtcgttaggcaattttgttgtgagaacattatggagtgcatttacatggacccanatagtanagcctactacatacctaggctgtatggcatancctgttgctcccaggatacaaacctgcntagcatgttactatactgagtactctttggaagcagctggacttggcttgatcgtanganaatncggngtccagntcnctgggcanacttctccatgtgttnctacatactggaacgccttnaccaagcggagggnntnttncacgcttcaggcccactgggagatcgttgacgcttnaaatgcttgatgactccattggggtcaattattgaagagacntcttagtgcaagaccanaaccttctaacagcacac

SEQ ID NO: 1620 - DNA, 483 bp, Homo sapiens
  misc_feature 1, 4, 10, 108, 112, 128, 134, 137, 170, 171, 182, 186, 191,192, 195, 199, 204, 205, 206, 207, 243, 254, 255, 299, 302,304, 317, 322, 329, 339, 341, 342, 346, 354, 359, 365, 367,374, 377, 386, 391, 393, 398, 410, 423, 426, 428, 431: n = A,T,C or G
  misc_feature 439, 461, 466, 478, 479: n = A,T,C or G
nagnccctancactacttagggcgaattggagctccccgcggtggcggccgaggtacttttttttttttttttttttttttttttttttttttttttggggaaccatntttnaatttattgacattgncaattnatnaacaaaacaggatttttttttttcccatggaannaaatccttttnaatntgccnnaanatgngcccnnnnattttcaccttggaaatgtaccatttcaagctttantcaggggaaannattccttttttactttcaaaatttttacgttgctgccaaaagtnttntnaacatttgctttnaattntgttttnagggcatttntnnctgnttttgcanaaatntgggantntcggatntanctgaatccnccctntntccantaggcccccatncttaaacaaaagnggngntcnttgggccnaatccccaaaaccccggcaatnttggntaaaccccccgnntacc

SEQ ID NO: 1621 - DNA, 479 bp, Homo sapiens
  misc_feature 2, 3, 6, 18, 52, 54, 55, 64, 67, 68, 71, 76, 81, 84: n = A,T,C or G
gnnagncccgaatcactncttagggcgaattggagctccccgcggtggcggncnngggaccttngcnntcnaaaanaccanctntgacacagactaaaagcatcacctgctcaactctcaatattgctttatcagcatcttttctctgtagctccaggggaatcttttctctaaaacatttatgcccttgctttggctagaaacacattaactggtttactcattgagaatccagcatatttaagaggtgaccctgtgttttttgtgatattgaggcattcatacagagctgcagttagacggggttacgggggctaaaagcagaaaaaaaattccatttcatcgggatggaactgaaggattttattctataaagcggccctggttgaatctggcaattctttttgccaagatccctagcagaagatttagcccatgtccttcccctcacttgtgtgagtggccccttctgaatctct

SEQ ID NO: 1622 - DNA, 482 bp, Homo sapiens
  misc_feature 2, 6, 57, 62, 64, 67, 80, 83, 148, 198, 240, 271, 288, 302,312, 341, 356, 364, 376, 401, 425, 452: n = A,T,C or G
gnaagnccctaacatacttagggcgaattggagctccccgcgggggcggccgaggtncaagnanttnaaatttctttagnccnctcaaattcttgcttctaacttatggctcttcattttctcctttttacggggctgacgcacccantccttaggggtcttttctgtttctaagacatgatgttttttgtttgttgnccaccttaggagcttactttttggttcacagtctgaattatntacaatgtccacaattccatggtcccctttnaatggatatgctattanacacaagttcctgncttcatcttnttcaaagcgcacagataccacacctttgnaccggcccgggcggncgctcggntctagaactagnggatcccccgggctgcaggaattcnatatcaagcttatcgataccgtcnacctcgagggggggcccggtaacccancttttgttccctttagtgagggttaattgc

SEQ ID NO: 1623 - DNA, 528 bp, Homo sapiens
  misc_feature 1, 3, 69, 72, 73, 79, 87, 102, 107, 111, 313, 323, 347, 348,372, 373, 454, 456, 458, 472: n = A,T,C or G
ngngacgcgcgtaatacgatactatagggcgaattggagctccacccgcggtgggcggccaaggtcccnggnnaaaatnaggaggancccggaaggatgggntgcanttgnggaggagggtttcaaaggaaaaaggtcggaaagcaaaggcctgaaaagccagaggcaggtggagagagggtggaaagtgagcagcgggcctgggctggagccgcacacgctctcctcccatgtttaaatagcacctttagaaaaaattcacaagtccccatccacaaaaaaaaaaaaaaaaaaagaaagtacctgcccgggncggcccgctntagaactaggtggatcccccgggnntgcagggaatttcgattatcaagnnttattcgatacccgtcgacctcgaggggggggccccgggtaccccagcttttgttcccttttagtgaagggtttaatttgncncncttgggcgtaaatnaatgggtcatagcctggtttcctgtgtggaaaatttgtttatcccgcttcacaaat

SEQ ID NO: 1624 - DNA, 479 bp, Homo sapiens
  misc_feature 6, 18, 19, 22, 30, 32, 34, 36, 86, 106, 173, 202, 208, 211,216, 218, 237, 260, 265, 266, 276, 345, 358: n = A,T,C or G
acgtancactactattcnntanatggcaantngnanctccccgcggtggcggccgaggtacgcgggggcacgtgggaagctcgcancagctggggaggagccaaancctcggcgctcacctaagccgcagggagatacacccaactgggagatgaggaaacagcaacccaganaggagaactaacccacacaggatcatttngcgaangancaaangnttaaataaccaatacctgnacttttttttaggacaaacttantgcanntttgaaggangccaaccatggatttgaggcgtgtgaaggaatatttctcctggctctactatcaataccaaatcattancttgctgtgctgntttagagccctgggggccgatctatgctttaacaccatcttactaaccattattgctatggtggtatacactgcctatgttctttattccaaatccacattcccctggcttgggaaatttt

SEQ ID NO: 1625 - DNA, 481 bp, Homo sapiens
  misc_feature 2, 343, 355, 399: n = A,T,C or G
gnaagccctatacactactatagggcgaattggagctccaccgcggtggcggccgcccgggcaggtactgagtcaaggacgtctttaacgtcatggacggctcctttacccacgctttctagatcttcgactgcatcttttcctagttttccgagtccccccacagctttttttgctccgtctaggcctttttccagaaggctggatctctgcttccttggcttttggtgcctgtcttggctaaccctggggtcttcacctggcattttccttttgagcttgctgatgcttcatggcaagggttccccgatcctggggcagaggcggccctctggatcataangcacaagaccanggctcctgccagagctgtcaggaagaggagagtcattgaacctnatgcttctgtgttgcttggagtgggtattgcccacccaaatccttggaagatctttgggaatctagggtccccgccgtaccc

SEQ ID NO: 1626 - DNA, 482 bp, Homo sapiens
  misc_feature 69, 212, 229, 233, 266, 346, 381, 404, 435, 466, 482: n = A,T,C or G
cgtatcactactatagggcgaattggagctccccgcggtggcggccgggggcagctggaggtgcctcanaaggtgcattctgcttcctgcaggggcttgaaacaccaaggcactccagggatcctggagtcaaagcagcagccccggttgttgcactccttgggggtgacatgggggtagccgcagtccaccctgtccttggctggcacggnacaactggttttgcaanacanggcccaacgtaccttcggcccgcttctagaacnagtgggatcccccgggctgcaggaattcgatatcaaagcttatcgataccgtcgacctcgagggggggcccggtacccanctttttgtttccctttagtgagggttaattgcgcncttggccgtaatcatggtcatangctgtttcctgtgttgaaattgttatcccgntcacaattccacacaacattaccgaagccgngaagcattaaaagtgn

SEQ ID NO: 1627 - DNA, 471 bp, Homo sapiens
  misc_feature 13, 222, 249, 268: n = A,T,C or G
gccctaacgactnctatagggcgaattggagctccccgcggtggcggccgcccgggcaggtacgcgggcagagtgccgcttaacacaaagcacccaacttacacttaggagatttcaacttaacttgaccgctctgagctaaacctagccccaaacccactccaccttactaccagacaaccttagccaaaccatttacccaaataaaagtatagaccaatngaaaattggaaacctgggcgcaatagnatatagtacctcggcccgnttctagaactagttggatcccccgggctgcaggaattcgatatcaagcttatcgataccgtcgacctcgagggggggcccggtacccagcttttgttccctttagtgagggttaattgcgcgcttggcgtaatcatgggtcatagcctgtttcctgtgtgaaattgttattcccgctcacaattccaccacaacataccgagc

SEQ ID NO: 1628 - DNA, 839 bp, Homo sapiens
  misc_feature 2, 3, 4, 9, 14, 16, 20, 21, 25, 28, 32, 36, 38, 40, 56, 64,72, 76, 78, 81, 92, 95, 99, 109, 110, 119, 133, 157, 160,173, 182, 202, 225, 229, 233, 240, 302, 312, 328, 338, 351,352, 353, 357, 358, 360, 362, 375, 378, 381, 385, 389: n = A,T,C or G
  misc_feature 398, 405, 417, 429, 431, 432, 433, 443, 468, 474, 480, 481,487, 494, 497, 500, 507, 515, 518, 521, 524, 526, 533, 538,559, 562, 573, 580, 581, 582, 585, 612, 617, 624, 628, 636,637, 640, 645, 651, 657, 661, 663, 664, 676, 677, 679: n = A,T,C or G
  misc_feature 683, 685, 698, 699, 701, 706, 714, 727, 730, 736, 737, 744,747, 749, 750, 754, 766, 780, 785, 805, 808, 809, 812, 815,821, 823, 834, 836: n = A,T,C or G
cnnntatantatananttanncgantanactnaatncntncatcatttattatatnatttatantatttatntaangntantctatataacnatntatntatactttanntatataagntcggatcgctcctntagggcgaatgggagctccaccgnggnggcggccgaggtnctggggatnttttaaaatattcacagttnacaatgatcatgcttgttcctanaganttgngggccanacacttaagtgaaagcagaagtgttttgggtgactttcctacttaaaatttttggtcatatnatttcaaaancatttgcatttttggnttgggctgcnataattgcctttnnncttnntngnaatcccccaatanctnaanaatntttnaaaatattnaactttntcatttttaaanaaaatcaccttngnnntccggggttnattttggaaaattatctttttcatnaaaagnccaatnnaaaacnatggggnccnaanattggtnggccaatnccnccnttnanttttttnatttngaagcaaaaaaaacccccctnatnagttggaatanaaccttnnnccnaaagggggttggaaatagcctttttgnggaantaaaaantcanttggatgnnagnttatnggaagncctttnatanannaccttggggaannanaaancnttttctctttccnnangaagncaaaaaangggggtctttaanatnctaaanntgggaanaangnnaatntcaaaacctttnttaaaaagcccttnggggnttttttgtctttcccccggncanntanccnctttgncncccgggggggntnggg

SEQ ID NO: 1629 - DNA, 482 bp, Homo sapiens
  misc_feature 2, 3, 5, 57, 92, 121, 124, 150, 162, 164, 178, 196, 212,214, 220, 222, 223, 225, 227, 245, 251, 258, 261, 274, 280,281, 284, 299, 302, 309, 310, 311, 319, 324, 332, 338, 346,355, 361, 403, 407, 408, 415, 420, 437, 453, 455, 458: n = A,T,C or G
  misc_feature 461, 465, 466, 467, 478: n = A,T,C or G
gnnanggcacattactatagggcgaattggagctccccgcggtggcggccgcccggncaggtactttttttttttttttttttttttttttngaaaaagtcatggaggccatggggttggnttnaaaccaactttggggggttcgattcnttccttttttgncnaaattttatgtatncgggttcttcaaatgtgnggtagggtggggggcntncattananncnantccaagggttaaatgganggggtncttctanttntttaggacttttngttttnnaancaaaggcttctcaantcntgaaaannnttaatatnactgntgttaaanaaaatnaatgaacntcccgcttnccttgnccgttttaaaactagtggatcccccgggcctgaaggaaattntganntaaaccnttatnaatacccgtctaacctngaggggggggcccggntnccnaantttnnnacccttttaangagg

SEQ ID NO: 1630 - DNA, 475 bp, Homo sapiens
  misc_feature 2, 3, 100, 103, 128, 153, 157, 172, 173, 203, 223, 232, 233,266, 268, 279, 284, 288, 291, 294, 297, 312, 330, 343, 347,368, 374, 377, 395, 418, 423, 442, 454, 456, 475: n = A,T,C or G
gnnacgccgctaatacgactactatagggcgaattggagctccaccgcggtggcggccgcccgggcaggtactttttttttttttttttttttttttttnaanatgctttcagtttaatagctgtttnaaatttttttttttttttttttttnaggntttaggctgaaaacnnaaagcctgctgctcctgggtatcatttctnaacttctccttacagctatnagtactganntcaagggaccgtttttaaccgtcatgggacggntnctttacccacnctttntaanatnttngantgcatcttttcctanttttccgagtccccccanagctttttttgcnccgnctaggcctttttccaaaaggntggaanctntgcttccttggctttggngcctgtctggctaaccctgggtnttcanctgccattttccctttganctgctggaagcntnatggcaagggttccccgan

SEQ ID NO: 1631 - DNA, 495 bp, Homo sapiens
  misc_feature 222, 229, 247, 264, 285, 312, 321, 387, 442: n = A,T,C or G
gccctatacgactactatagggcgaattggagctccaccgcggtggccgtggtcgcggccgaggtacatttccttgtagactctgttaatttcctgcagctcctggttggttctggagcagatgatctcaatgagagagtcctcgtcggttcccagccccttcatggaagcttttagctcagaagcgtcatactgagcaggtgtcttcaataggcccaaaantcaaccntcttccaagtgggccagnataaaggcttgactttnaagtggctggatgcaaaggtnccttttttgggtcccttctctgggtanggccgaaanggcaatatcctgtctcttgtgcattgccccgcgtacctgcccgggcggccgctctaagaactagtnggatcccccggggcttgcaggaaattcgatatcaagcttaatcgatacccgtccnacctcgaaggggggggcccggtacccagctttttgttcccttttagtgagggt

SEQ ID NO: 1632 - DNA, 479 bp, Homo sapiens
  misc_feature 3, 4, 5, 212, 216, 253, 292, 389, 398, 408, 412, 413, 421,438, 443, 454: n = A,T,C or G
cgnnncaactactatagggcgaattggagctccccgcggtggcggccgcccgggcaggtacgcggggagagggaaccgggcggagcggccaacatggcggaacgcaggagacacaagaagcggatccaggaagttggtgaaccatctaaagaagagaaggctgtggccaagtatcttcgattcaactgtccaacaaagtccaccaatatgangggntcacccgggttgattattttattgctttcaaaagcangtggactgtcttttggattcaaagtgggcaaaggccaanaaaaggagaggaagctttatttacaaccagggagtctgtggttgactactgcaacaggcttttaaggaagcagtttttttcaccgagccctaaaagntaatgaaanaaatataacnaaannccagaaanaaggggtcccttgggcncgttnttaaaactagntgggatcccccgggctgcaggaaat

SEQ ID NO: 1633 - DNA, 581 bp, Homo sapiens
  misc_feature 3, 51, 139, 200, 211, 226, 233, 243, 245, 254, 256, 273,276, 306, 314, 340, 357, 361, 366, 380, 385, 397, 402, 408,416, 423, 434, 451, 452, 454, 459, 460, 465, 468, 469, 483,484, 487, 491, 492, 530, 536, 540, 571, 573, 575: n = A,T,C or G
cgntcactacttagggcgaattggagctccccgcggtggcggccgcccggncaggtacacgggggctgttggtggcggcggagacagctgtgaagtgtgaggttctttgtctgctggcagctaggggcgacgaggcggnacgtcatggaagtgaaggatgccaattctgcgcttctcagtaactacaaggtattttagtnacttactggantttaaaagagccacntttttangaaagtgttnancgaatttancnccagtttcttgggcaancantaaactttgatactacctatccaccctatnaaaaaccntttaaatattacatttttaacataancacccaatgcgaggcgnccancagancctgaaaaatttgntcaanaaataatttttncttcnacaatnccatttgnaaaaaancccccacaaangttttggactccaaaanncnttttnngaaangcnntttctagccctggnnttngaanncccaccccgggtctcttgttcaccttggccttgttggntagaanaccnaaatcttgaaatgggttggggaaggaataantngnaaaaat

SEQ ID NO: 1634 - DNA, 502 bp, Homo sapiens
  misc_feature 2, 5, 14, 15, 16, 18, 20, 24, 28, 43, 94, 126, 140, 141,153, 160, 165, 168, 199, 211, 216, 222, 231, 232, 240, 251,256, 294, 298, 299, 301, 303, 319, 323, 326, 328, 329, 331,368, 405, 407, 414, 423, 436, 437, 447, 450, 451, 465: n = A,T,C or G
  misc_feature 468, 470, 476, 489, 495: n = A,T,C or G
gnccnctactactnnntnanggcnaatnggagctccccgcggnggcggccgaggtacttttttttttttttttttttttttttttttttttttnacttttttttttttttttttttttttttgggntttcttacaaaggnngacattttccanaacaggngtaanagngttgaaaaaaaaattcaaatttttgggggancgggggaagganttaangaaacntgttttccnnaaatgctntggaaacaaanccttnttttttctttttttgccccccaatttaacccaaagttnaatnngncnaaaaaaaaatgggaangggnttncnncntttccgttttaaaaaaagaaaggaagaagaattggcnaaaaaaaaagttttttcaaatttctttctttttaaantnaaatggngtccatttnttttgaaaaaaanngggccaatgnccnnaaaaaattcctggncancncccccnatgtccaaagggngcaaanatcaagg

SEQ ID NO: 1635 - DNA, 472 bp, Homo sapiens
  misc_feature 1, 5, 13: n = A,T,C or G
ncccnaaacactncttagggcgaattggagctccccgcggtggcggccgaggtacttttttttttttttttttgttctgaaaccataattgcttggcccttcagttgaataggttgaatgttcatctataccatgccctttttccactgtttctccattaatctctcacttgtctttaattggcacaggagttttcccctgaaaatcctttgaactcttattctaaggatgagattttttttttttgctaatccatagaaaaatggtcactatttctatttgatttatgaaaactgtttttttaatgaatgttcttaatttgttgtttctattatcccttttctccttcgtaggttcctttttttgtaattcatcttgttaataaagttcttcctcacctagttaatttcagaaaattaatgtcaagtaggataaggcattaattcaggctagcaaggattctttctggtta

SEQ ID NO: 1636 - DNA, 804 bp, Homo sapiens
  misc_feature 6, 8, 10, 11, 14, 15, 17, 18, 19, 21, 24, 25, 26, 29, 33,38, 40, 41, 47, 48, 51, 57, 63, 68, 73, 74, 80, 84, 89,91, 95, 97, 105, 107, 108, 109, 111, 118, 119, 120, 126,127, 128, 129, 130, 133, 142, 150, 151, 154, 158, 168, 172: n = A,T,C or G
  misc_feature 176, 246, 285, 340, 342, 368, 378, 383, 386, 402, 406, 409,424, 448, 450, 465, 475, 482, 485, 495, 517, 537, 547, 553,559, 569, 570, 573, 578, 584, 601, 612, 626, 641, 648, 650,653, 655, 657, 659, 674, 677, 680, 695, 700, 704, 707: n = A,T,C or G
  misc_feature 721, 725, 728, 740, 747, 757, 758, 762, 766, 777, 798: n = A,T,C or G
attacntnanntcnntnnntntannnttntatnaaatnannttctannatntcatanatttantatanaattnnatttcntctncatananttanantattaatntnnntntttatannnatattnnnnnagngcgccgtanctatacgnntanggcnaaattggaanctcnaccngcggtggcgggccgaggtaccccagaaacttaaagtataataataaaaaaaagaaaaaagaagttcattnattttgactcctacaaaggcaaggaataagggtttttgntgttgtttgttgtttttgagactgtctcgctctgttgcccagggctgggagtgcnanctggccgtaatttttggatcaacttncaaaccctcncgccntcnccaagggtttcaaagncaanttnttcttaccttccaancacttcctaaagataagcctgggngnactaaccagggcatncacaaaccancccaacnatncaaggggctnaaatttttttttttggataagnttattttaagttatgaaagnaccagggggntttttnaactcnattgttttgnnacncaagnggtttntggttcttttggaaaancttcccccggnacaccttcaagggnttggaatacttggcntttaacntnttngngncncctctcccaaaaaanatngcnttggggggatttaantaaangggncgntggaaagcccaacnttgntgngccctttggaanccctggngaaaataaanngggntttnttaaaaataanccaaattttttttaccaatantttggg

SEQ ID NO: 1637 - DNA, 407 bp, Homo sapiens
  misc_feature 313: n = A,T,C or G
cgcgtaatacgactcactatagggcgaattggagctccaccgcggtggcggccgcccgggcaggtacaggaggccgacaatttggtgaccagtgatggcaggccactcagctttgagtagccatgtccgccacaggccctgcggcacatctcagctccctgggtgcagaattctgacatcatggccttcatgcccgtgctcagtgcgtggagctgtgagaacatggaggggggttgggcggtgttagggggcctccaccatagggaccaaccctgtgcaccacttactgagcatctactcatgcccagctcanctctgaggtccccgcgtacctcggccgctctagaactagtaggatcccccgggctgcaggaattcaatatcaagcttatcgataccgtcgacct

SEQ ID NO: 1638 - DNA, 401 bp, Homo sapiens
cgcgcgtaataccgactcactatagggcgaattggagctccaccgcggtggcggccgaggtactggttgaattcaggcatctttctgtgaatctcgcttatcaggctggagtaaaattcttctgcattgggtggcttataattcagagttccaaatgaccacagaatcttggcaacatctttacttcgacagtgtgccactctaggaggcaaagacgcagccactgcattcattactccttcattcaggaagcgtaaggccgagcagtaaagagtcaggtgcatgacaccttgaactcccagggaaggaattcgctgaggagctatctctccaatctgcttcatgaaattgatgtgatccacgtgagtgaaacggaacattttaacaatattcactaaggt

SEQ ID NO: 1639 - DNA, 392 bp, Homo sapiens
  misc_feature 10, 14, 15, 21, 27, 37, 38, 43, 56, 58, 72, 79, 80, 100,132, 133, 175, 187, 194, 204, 229, 271, 280, 284, 298, 315,318, 319, 320, 326, 327, 354, 371, 376, 382, 386, 387, 392: n = A,T,C or G
tactatatangcgnntagtgncctctncatccatgcnncagcngacgtccttgtgncngatccacacagaantatactnnccttgactgtcagcctgtcngggcagctgtagagctcatttagttctctcanntgtaaaatggagaggctgtatctcccagagaagtcatgcagnagagatgagggnggagtcnggaccaaatntcaggcccagactcctggctaccancatgtgccaaagtacctgcccgggcggccgctctagaactantggatcccncggnctgcaggaattccntatcaagcttatccatnccnnnaacctnnagggggggcccgtgtacccagcttttnttcccttttgtgagggntaatnctcgcncttnngcagn

SEQ ID NO: 1640 - DNA, 385 bp, Homo sapiens
  misc_feature 60, 73, 85, 155, 321, 348, 385: n = A,T,C or G
cgcgtaatacgactcactatagggcgaattggagctccaccgcggtggcggccgcccggncaggtacatgtanaaaatccagcancagaagagccatggctcactgctaatcacataacacacacaggagtctatttatgcatggaatgtggcanattttttaacaagaagtcacaacttgttatacaccagagaactcatacaggagagaagccctatcaatgcagtgagtgtggaaaagccttttcacagaagtcactgctcacggttcatcaaagaacgcactcaggagaaaaaccgcatgggtgcagcgaatgtcanaaagcttttagtaggaagtcactccgnattttacatcagagaattcatactggagagaagccgn

SEQ ID NO: 1641 - DNA, 906 bp, Homo sapiens
  misc_feature 611, 652, 678, 739, 742, 748, 751, 765, 774, 782, 794, 803,814, 817, 852, 855, 866, 878, 892, 893, 894, 902: n = A,T,C or G
cacgatacactactatagggcgaattggagctccccgcggtggcggcccgaggtactattttttttttttttttggatttttagtagagacggggtttcaccacgttagccaggatggtctggatctcctgacctcgtgatccgccagcctcggcctcccaaagtgctgggattgcaggcgtgagccacaccacgcccttcctattcttgagttttaagtgttttttattttttattttttgcatgttttggataccagtctcttatccgttatgtgttttgcaattattttctctcattctgtgccttttctttttattcttttaacagtgtctttgcagttcagaaatgttacttttaacatagttcgactcagcagcttttgctttcatggaccatattttggtttttggtgttgtatcaaaggagacagagtgaaagatactgaaatacacacctgagctgtttcctcgagggctttgactttgtagcatggctgagatttcatatgctctgtagctctgccttcggggttgcagaggatgaagagactttggggaggctggaaaagttggagaaaaactggcaactaagcatctcgcaagcttcangggtcttcttcttttcttcctaaaagggattcctggaaaangaaagtacctggccgggccgggccgntctaaaactagtggatccccccggctgcaggaaattcgatattaaagcctaatcgaaaccntcnacctcngangggggggccccggnaccccaacnttttggtnccctttaatgangggtaaatnccccctggcgnaantatggcaatagctgttcctggggtgaaatggtaanccnttacaattccnaaaaaaaacaanccgggagcataaannntaaaactngggg

SEQ ID NO: 1642 - DNA, 893 bp, Homo sapiens
  misc_feature 73, 252, 276, 281, 306, 346, 408, 430, 455, 476, 487, 501,502, 515, 521, 544, 549, 561, 567, 573, 576, 580, 690, 700,701, 704, 713, 718, 719, 720, 745, 746, 765, 770, 773, 782,819, 821, 824, 827, 834, 842, 846, 850, 859, 864, 867: n = A,T,C or G
  misc_feature 872, 876, 882, 883: n = A,T,C or G
agggacgcgcgtatacgactactatagggcgaattggagctccaccgcggtggcggccgcccgggcaggtacnatttaatcctcacccctgactgtcagtagactgccatggaaaccccaaggatgcctgtcctgttggacatgtggtcagagactggctccaaagatatctcccaaagagcaaaagccaccatcttcctgttggtgcccagacacaggtgcatgagctccaaggactccttcctaggccanctctctgctgcctgacctaaactnacctnatttttgggagctggtctgagagtntgccttggagatgtgttggatgggaactaggggtttgtangctccattgtgagcaatactgatgggaaatgaccccaactggtatggatattttgcataaangcccctgaaatctgacatgctnagggtcagagccatgaaccactgtnttgacaaaccccatgtacctnggccgctctanaactagtggatccnncgggctgcatganttcganatcaagcttatcgattcccgccncctcnagggggggcccngtaccnaacttntgntccntttagtgagggttaaattgcgcgcctggcgtaatcatgggcatagctggggggctggggggaaaatggtattcggtccaattcccacgcaacaatcgagccgggagcatnaaatggaaannctngggtgcctnatgannnaactaactcaattaattgcgtttgnncctaatggccggtttcaanagggnaanctgtcgggncccttcattaatgaatcgccaacccccgggagaggcngnttnctntttggcncttttaanattnttgntaatgattnttggnatnggccntcgntggggnnagggggttat

SEQ ID NO: 1643 - DNA, 879 bp, Homo sapiens
  misc_feature 542, 552, 578, 589, 630, 634, 638, 650, 658, 672, 715, 721,732, 733, 736, 740, 749, 753, 756, 758, 767, 768, 769, 770,771, 776, 779, 780, 784, 795, 803, 813, 815, 818, 824, 825,831, 832, 835, 836, 838, 839, 845, 847, 849, 850, 851: n = A,T,C or G
  misc_feature 852, 853, 854, 855, 856, 857, 859, 860, 861, 863, 866, 868,869, 870, 871, 872, 875, 876, 878: n = A,T,C or G
acgatcgactactatagggcgaattggagctccccgcggtggcggccgaggtacactacaactacaactggcatctgagtaagctaccctgctggtggcctgcctggagtcaccaacacaagtgccagcatatgtcaccctagggcaaaaggatagataagcttagttcaccggcgctaccactgaaacccagaaatgggaccatacagcatttcagtgtagccagcacaacttcactgtagtctctagcaataaccacactgtaacacactgaggaaaccacagatgccactaatgatattcacagccaaagaaatcacacagacttcacgattgaatgcaaagccaacaaaccccacccaacgaacattatagtcacatcttcaggaaaaaaatcctcacccttaaagaaagtaaattcaaaaataaaaagtgactttcatatcagatgcacagaaatcaatgtacctgcccgggcggccgctctagaactagtggatcccccgggctgcaggaattcgatatcaagcttatcgatccgncgacctcganggggggcccggtcccaacttttggtncctttaatganggttaattgcgcgcttggcgtaatcatggcatagctggttnctgngtgnaaatggtatccnttacattncaccaacataccancccgggagcctaaaaggtaaagcctggggtgcctatgagtganctactncattaaatggnntgngctnactggcccntttncantnggaaacctnnnnngccantgnntaanaaatggccaancccggggngagggggttngngtnttgggnnttttcnnttnntnnttaatnantnnnnnnnnngnnntnggntnnnnnaanngnt

SEQ ID NO: 1644 - DNA, 496 bp, Homo sapiens
  misc_feature 2, 3, 4, 5, 6, 12, 13, 15, 18, 19, 20, 48, 76, 80, 84, 87,107, 110, 113, 153, 183, 212, 230, 236, 253, 257, 260, 262,264, 271, 277, 290, 291, 307, 309, 313, 337, 379, 380, 388,400, 402, 405, 406, 411, 414, 415, 423, 447, 459, 473: n = A,T,C or G
  misc_feature 483, 488, 491: n = A,T,C or G
gnnnnngcccgnncncannnactactatagggcgaattggagctccgncgcggtggcggccgcccgggccggtacncggnatcngcncatatgggcatcggcattgncgnggncatgatatttggcatgatcttcaatatgatcttgtgctgngctatccgcaggaaccgcgagatggtctanagtcagcttacatccctgagcaggaaagnttacccatgaagattggngggatnttttgtttgttatgcanatgnttngntngatgttngttgtntgactgtttgccnnctaatgtaagtattcntntcancattgactacgataaactcatgangggtacatcacattggaatgtctttcttaatgcctttcatcnnaatatttnacaattttgaangnatnnagccngcnnggttcttnccttgtacggttcgccactatatnttccaatacttngtagtgcacaccanttgttattgncaccntcnaaata

SEQ ID NO: 1645 - DNA, 950 bp, Homo sapiens
  misc_feature 1, 2, 29, 30, 35, 51, 58, 83, 95, 99, 101, 107, 108, 109,110, 111, 112, 113, 114, 117, 118, 120, 121, 131, 138, 139,141, 142, 143, 145, 146, 149, 150, 153, 154, 155, 159, 161,194, 252, 293, 320, 328, 359, 378, 394, 436, 468, 469: n = A,T,C or G
  misc_feature 492, 508, 510, 517, 521, 531, 533, 534, 542, 561, 562, 565,581, 584, 585, 589, 598, 617, 629, 647, 653, 655, 683, 693,695, 699, 703, 704, 707, 708, 711, 718, 719, 722, 727, 728,730, 734, 739, 754, 771, 806, 808, 822, 831, 832, 838: n = A,T,C or G
  misc_feature 839, 853, 857, 870, 874, 877, 885, 886, 887, 888, 890, 894,900, 909, 912, 914, 917, 921, 930, 934: n = A,T,C or G
nngcactactatagggcgaattggagctnnccgcngcggcggcccgaggtnctgccgnccgggcaggtacgcgggggtagacngaaagaagaacntgcntnctaagnnnnnnnnctnngnngagatgctgnctcctanntnnntnntannatnnnatangngaacctctttgccaggaactatttataaacatnctgcaggaaaatggtagctgagaccaatgatgctgacctccctcaaaagctgcatttntgaatttctgaaggcaaactgtctgcctatattgtacctcngccgctctagaactagtggatcccccnggctgcangaattcgatatcaagcttatcgataccgtcnacctcgaaggggggccccngacccaacttttgttncctttaatgagggttaattgcgcgcttggccgtaaacatggncatagctgtttcctgttgaaaattgtaatccnnttacaatttcacacaacatccanccgggagccttaaatntnaaagccngggnggcctaatgngnngaggtaantcccattaatttgggttgnnctnattgcccccttttccnagnngggnaaccttccntgcccccttgctttaattnaatcggccaacnccccggggagaagggggntttggntnttgggggctttttccggtttcctagttnaattaaattncnttgnctcnntcnnttngggtttnnggnaagcnntnttantttanttaaaaggggggggnataccggttttccacanaaattagggggttaaccccaggaaaaaaaattttnancaaaaaggcccccnaaaggcccnnaacccnnaaaaagggccgttngggngggtttttccaangggnccncccccttnnnngntttnaaaaanttcccttanttnanggngggnaaccccccngggnttaaaaaacccccttt

SEQ ID NO: 1646 - DNA, 460 bp, Homo sapiens
  misc_feature 2, 3, 4, 5, 7, 13, 20, 428: n = A,T,C or G
gnnnnanggccgnatcactnctatagggcgaattggagctccccgcggtggcggccgaggtactccgtcatcatctccctagacagtgaccaaactacatgcaaataaatttgaaaaccggaaaaatttagaacacagtaagcagaataagcatgtagataccagggacaagacagtagttacttacactgtgaactcctaaagctttccagactgcgaagctaatcacaccaaccccacaccatgcatacagggagccccagcccagagctcgcaaggcaagggaagacccgctttccggtaatgcagccgtggccatacttcccttattgaaccattcagggcttttctttttagccaatgataatgttgtaataaatccagctagcattcccgctgcagcaacggtacctgcccgggccggccgntctagaaactagttgggatcccccgggctgca

SEQ ID NO: 1647 - DNA, 898 bp, Homo sapiens
  misc_feature 449, 493, 510, 529, 534, 560, 563, 570, 594, 596, 597, 598,600, 615, 619, 623, 626, 628, 631, 633, 637, 638, 640, 667,670, 677, 679, 680, 681, 682, 685, 687, 692, 696, 700, 705,706, 708, 714, 715, 721, 724, 725, 726, 727, 728, 732: n = A,T,C or G
  misc_feature 733, 736, 740, 745, 747, 748, 749, 753, 754, 757, 761, 762,763, 765, 767, 768, 769, 770, 772, 774, 775, 780, 781, 782,783, 784, 788, 790, 791, 792, 793, 794, 795, 797, 798, 799,801, 803, 807, 808, 809, 811, 812, 813, 814, 815, 817: n = A,T,C or G
  misc_feature 818, 819, 820, 821, 822, 823, 824, 825, 826, 827, 828, 829,830, 831, 832, 834, 835, 836, 837, 839, 840, 841, 842, 843,845, 846, 852, 854, 855, 857, 860, 861, 862, 863, 865, 866,867, 868, 870, 872, 873, 874, 875, 876, 878, 879, 880: n = A,T,C or G
  misc_feature 881, 883, 884, 885, 886, 887, 888, 889, 890, 891, 892, 894,895, 896: n = A,T,C or G
aggacgcgcgtaatacgactcactatagggcgaattggagctcccccgcggtggcggcccgaggtacttttttttttttttttttttttttttgggtgtttgacttctgataacttctaagtcttactcctctgtatgtcttttgttccacatctgagcaagctaataagaaagcctgggtgctttctgctttggtgcttacaggagatccaaaccatacaaccctctgcttgcacacaggaactctcacctcaatctcactttctaaccacaagcaaaacccaaaggcagtctcctttcctttctcccataaaccattgcggacctacttgggaggcctgcaccccattgtccacaaaaacttgaattctgtaagtaataattttttaagctctttcggagtgggtttcacatctcagtctcaacatctgaattaaatattgactganagtgaatcctgcaccttcagaatggctacaaaatgctctcttanaggtttgtgtgtgtctntgcttacataactatctgntattnaaatgttgactactttttttcatganttntaacatnttaattattttaaaaaaaatcctntnnnanttccacaattggctntttncttnaananatngntttnntncttactggggcttaaaaacttttttgnccnttaaaangnnnnaananttttnggtnaaantcaanntngttaanntaaaanaannnnnggtnntanaccnttatntnnnggannatntaannngngnnnnantnngcctnnnnnaaanannnnnnannntnanaatnnnannnnntnnnnnnnnnnnnnnnncnnnntnnnnntnnaaattntnnanccnnnntnnnntntnnnnnannnntnnnnnnnnnnannngg

SEQ ID NO: 1648 - DNA, 934 bp, Homo sapiens
  misc_feature 336, 371, 373, 384, 459, 492, 558, 588, 615, 639, 644, 652,657, 667, 670, 692, 696, 698, 703, 705, 731, 743, 757, 765,769, 770, 771, 781, 786, 791, 795, 810, 818, 821, 840, 846,862, 877, 878, 886, 892, 904, 913, 920, 930, 934: n = A,T,C or G
aggacgcgctaatacgactactataggggcgaattggagctcccccgcggtggcggcccgaggtactttttttttttttttttttttttttttgcgctcgggggggggcggtgaggggaggaagagttatagtagaagataaagaaaaagatttttttttaatgcaagcatcaagagccctgaaaatggctaactaggtaaagtataccattcttttctcaagaatcacacactgaaacaacagagagaatcagcctgagagattttcgcaggagccttaaaagcaggagttgtaggtcaatggaaaaacaaatgcttccggtaaagcaccccttnacccatcttcccgcgtacctgcccgggcggcccgntntaaaactagtngatccccccggctgcaggaaattcgatatcaagcttatcgataccgtcgacctcgagggggggcccggtacccancttttgttccctttagtgaggggttaaattgcnccccttggcgtaatcatggtcatagcttttttcctgtgtgaaattgttatcccctcacaatttcanacaaacataccaacccgggaccataaagtntaaaaccctgggggtgcctaatgagtngacctaacctcacattaatttgcnttgcnctccctgnccccntttcaaattnggnaaaacctttttgccaccttcanttantnaaatngnccaaccccccgggaaaaggccggttnctttttgggccntttttcctttcttngttaaatnactnnntgccttgggncttcnggttngggnaggggttttattttntcaaaggnggnaatccggtttcccaaaatnggggtntccccggaaaaaaatntttccaaaaggcccnnaaaggccnaaaccntaaaaaggcccngttgggggntttttanagcccccccntaan

SEQ ID NO: 1649 - DNA, 919 bp, Homo sapiens
  misc_feature 521, 638, 658, 665, 670, 672, 692, 693, 695, 697, 698, 704,708, 709, 732, 765, 767, 770, 777, 782, 785, 799, 816, 836,861, 869, 877, 883, 893, 895, 897, 898, 903, 906, 909, 914: n = A,T,C or G
aggacgcgcgtaatacgactactataggggcgaattggagctccacccgcggtggcggcccgaggtactcttttttttttttttttttttttaatcagacagggtcttgctctgttgcccaggctggagtgcagtggtgcgatctcggctcactgcaacttcagcctcctggattcaggcaacactcctgcctcagcctcccacgtggctgggattacaggtgcctgcccccatggctaattttttgtattttttgtagagatggggtttcaccatgttggctgggctggtctcactctcctgacctcaagcaatctgcctgtctcagcctcccaaagtgctgggattacaggcgtgagccaccgccccagcctgagccttttttttttctaatgcatccaaggttaaggggaagacgcaaataacaggactactctaaaaggaaacctgtttgaactctgtgagatcagtcatcagtctcagtattccacaggcacaccttaatttcattgtaaaaaganatatatattttggctatttttgggcttttgggggcctatttggctttttaccttatgtaaaaacttatacaaaagtgatttttacatttaaaaaaaaactgaaataaattggatagntacttaactaaatgaaaaanatttcanaaccntnggatgattttaatcttgaannantnngggggnttanncaataaaaccatcaatccccttnttggaatgggattttaaattttctggctttaangnganatttganagggnaangcattcttttttantttgaaaacattaactnttcccccgtggtttttgaanaacttttaaatttgcctggggtatnggttggcnttcctttngtgggnttaaaacccntntnnattanccngangaaanaaaat

SEQ ID NO: 1650 - DNA, 918 bp, Homo sapiens
  misc_feature 585, 646, 688, 692, 699, 704, 712, 713, 716, 718, 725, 727,731, 752, 765, 769, 790, 798, 801, 802, 804, 806, 809, 813,814, 815, 818, 838, 839, 841, 842, 845, 872, 873, 884, 893,897, 909: n = A,T,C or G
aggacgcgcgtaatacgactactatagggcgaattggagctccaccgcggtgggcggccgcccgggcaggtaccttgaaatcagataatctcgacatccagaaatagcctttgatttgttctttctctgatgtcttgtgtccttgggatcaaagcctctttcactggcaccaaataatgcccagtgaggagttctggccatataatcctttgcgctgaacgtttttgatccaccactatcttcatattcctggatgagctcctggaagcggttataatcgatccatgtccaccattcaccaccaattttaaactttctgtgtgctatcaggaggcaattagagtgttcgtgttcacatgcaatttcatattcggggatcagatccaccaactcgtggacaaactgtacctcggccgctctagaactagtggatcccccgggctgcaggaattcgatatcaagcttatcgataccgtcgacctcgagggggggcccggtacccagcttttgttccctttaatgagggttaattgcgcgcttggcgtaatcatggtcatagctggttcctgtgtgaaaattgttatncgctcacaaattcacacaacataccaaccgggagcataaagtggtaaagcctgggggcctnatgagtgaactaaactcacattaattgggttgggcctactgnccgntttcaancgggnaaaccgtnntgncnacttgantnaatnaattggccaaccccccggggngagggggttgggnattngggggccttttccgtttcttngttattanttnntngnctngggnnnttnggttgggggaacgggttaanntnnttnaaaggggggaaaccggtttcccaaaannggggtaacccnggaaaaaantttnccaaaggccccnaaaggccgg

SEQ ID NO: 1651 - DNA, 756 bp, Homo sapiens
  misc_feature 4, 16, 22, 23, 25, 29, 112, 121, 144, 151, 154, 167, 169,175, 180, 185, 196, 209, 215, 217, 226, 230, 235, 238, 244,249, 269, 275, 279, 290, 300, 302, 306, 311, 313, 323, 338,341, 350, 367, 368, 377, 379, 384, 395, 397, 400, 410: n = A,T,C or G
  misc_feature 412, 424, 446, 450, 452, 468, 469, 485, 488, 493, 508, 525,561, 564, 578, 584, 592, 596, 608, 630, 637, 658, 671, 674,686, 696, 700, 710, 721, 726, 727, 738, 753, 754: n = A,T,C or G
aaanctcgtatccacntaatannantcantatagggcgaattggagctccaccgcggtggcggccgcccgggcaggtactttttttttttttttttttttttttttttttcnaaaggcttnattttaagttaatatgtatacanagaaagngtntatatttttgggnanaaaatnatgcntttcntaggacaggantaatacatttagntggggntnttataaaanagcnccaanacnttaggnggggnaaccaaactggttatggggnttgatntaanccaaacccatnacccataaantntttnaggtngnaagtaagcantattataacttggantcnagggggagnaaaagggcccccctaannggggagggntncccanttggtctaaanantgnaaaatttggnanttgttgccaagntccaccaggcagggggcaaagnacantnattttcctccaactgnntcaggaggggttaagnagntaacnctggcctaagcttgnaaaaaagggcccctacnttctttggccgttttaaaaactagggggatcccccnggncttcaaaaaattcnaaattnaaagtttnatcnatacctgtcganccttaaggggggggccccgggncccccantttttgttcccttttaagggngggttaaattgcnccnttggccgaaaanaaatgggaantagntttttccttntggaaaaattntttannccccttcaaantttccaaaaaaaatnnct

SEQ ID NO: 1652 - DNA, 734 bp, Homo sapiens
  misc_feature 2, 7, 10, 156, 629, 711, 713, 724, 725: n = A,T,C or G
anagccntgncgcgcgtaatacgactactatagggcgaattggagctccaccgcggtggcggggataacgcaggaaagaacatgtgagcaaaaggccagcaaaaggccaggaaccgtaaaaaggccgcgttgctggcgtttttccataggctccgnccccctgacgagcatcacaaaaatcgacgctcaagtcagaggtggcgaaacccgacaggactataaagataccaggcgtttccccctggaagctccctcgtgcgctctcctgttccgaccctgccgcttaccggatacctgtccgcctttctcccttcgggaagcgtggcgctttctcatagctcacgctgtaggtatctcagttcggtgtaggtcgttcgctccaagctgggctgtgtgcacgaaccccccgttcagcccgaccgctgcgccttatccggtaactatcgtcttgagtccaacccggtaagacacgacttatcgccactggcagcagccactggtaacaggattagcagagcgaggtatgtaggcggtgctacagagttcttgaagtggtgggcctaactacggctacactagaagaacagtattttgggtatctgcgctctgctgaaagccagttacctttnggaaaaaagagtttggtagctcttgatcccggcaaacaaaccaccggttggtagcggggggtttttttggtttgcaagcagnanattacgcgcannaaaaaaggg

SEQ ID NO: 1653 - DNA, 783 bp, Homo sapiens
  misc_feature 125, 168, 203, 209, 210, 213, 218, 220, 230, 236, 238, 241,245, 247, 271, 276, 277, 278, 282, 287, 319, 329, 332, 334,356, 358, 360, 361, 369, 370, 377, 379, 381, 388, 392, 397,399, 401, 402, 407, 408, 412, 413, 414, 416, 419, 420: n = A,T,C or G
  misc_feature 425, 427, 434, 436, 456, 458, 473, 476, 479, 480, 488, 492,494, 497, 502, 503, 508, 512, 513, 515, 517, 520, 528, 531,532, 539, 543, 544, 547, 549, 551, 552, 565, 569, 570, 574,577, 578, 582, 583, 586, 587, 594, 595, 597, 600, 601: n = A,T,C or G
  misc_feature 603, 608, 612, 617, 619, 620, 621, 630, 632, 633, 635, 642,643, 644, 646, 647, 648, 651, 656, 658, 661, 667, 672, 675,680, 681, 684, 687, 689, 690, 693, 694, 695, 700, 702, 704,705, 706, 708, 710, 712, 726, 727, 730, 731, 732, 733: n = A,T,C or G
  misc_feature 736, 737, 739, 741, 743, 746, 747, 751, 757, 764, 779, 781: n = A,T,C or G
atagcgcgtaatcgactcactatagggcgaattggagctccccgcggtggcggcccgaggtactttttttttttttttttttttttttggcttttttttttttttttttttttttttttttcccnttttaaaaaaggtattaattaattctttttttttttttttttngggaagggtgaatgcccttttggtttttggccatnttcggnnggncaaananaaaaactaantttgananatnaatncnaaggaaaaaaattttttccaaagnccatnnnaaantggcncccattttttggcttttgggggggttcaattngggttgcttntcngnttccgggttggggggaaagttntntnnctttaaannccccccnancntgatacnagtnctttntnannttctnntttnnnanctnnacctnanttctcantnactatttctccttaccaacnantaataccctggaaanttnaannaccccacntttnanacnggccnngtaancccnntngnttntatatcanaannataaacnccanncantnanntcgtataaataanatannatcnatnncccnnatnnccatatnncntanntnttaantgcnattcntnnnatcgcaacntnnanacataannnannncanaactntncancgttcnaaaanaantaaanntantantnnatnnntcctntntnnntntnanaccccatcaaaccnntcnnnntanncntncnccnntcantaaacnattgatnatcttcccctccccncncc

SEQ ID NO: 1654 - DNA, 732 bp, Homo sapiens
  misc_feature 3, 732: n = A,T,C or G
ganagcctggccgcgtaatacgactcactatagggcgaattggagctccaccgcggtggcggccgaggtactttgtctctgtgtctctttcttttccaagtctctccttccacctaatgagaaacgcccacaggtgtggaggggcaacccatcccttcactgaaccatttttattcttccagaaatgtgattgataacagtaaagccacactcctcaagtgcctgaaatacccctcattgtcttcttcaggtggcaagggctctggaacagccacataaagcccttgaagataaggatggtcaaacaaaataatatcatacctggagaaactcagatcttggtaagatttactggttgggaatccaaagttaatgccaagaagcagccgccagttgggatcaaatgtgagcctatggatcaaggtgcgtacctgcccgggcggcccgctctagaactagtggatcccccgggctgcaggaattcgatatcaagcttatcgataccgtcgacctcgagggggggcccggtacccagcttttgttccctttagtgaggggttaattgcccgcttggcgtaatcatggtcatagctgtttccttgtgtgaaattgttatccgctcacaattcacacaacatacgaagcccgggagcataaagtgtaaagcctggggtgccctaatgagtgagctaactcacattaattgcgttgcgctcactgccccgctttccn

SEQ ID NO: 1655 - DNA, 727 bp, Homo sapiens
  misc_feature 2, 10, 15, 651, 692, 693, 697, 698, 699, 700, 701, 702, 703,704, 705, 706, 707, 708: n = A,T,C or G
anagcgcgtnacgcncgtaatacgactcactatagggcgaattggagctccaccgcggtggcggcccgaggtactctgacatcatctgacatggcagctccccagccatggtggtggtgatagaaatataaatggtgacagcagcagcagtgtgatagtcacggtggagggagattgcttttctgcagccatgcttctggcatctcccaacctgggtgggacccagctgaagatctgcagagaaaccagccatttctgagagcaaggcaatcagtgggcatttactggagggtgtctaggttcttaacatctcactgttatttgggctcatgggatcataagaatgacaaaataaagagaagtcctcatttctgaccacaagaagcttgacacaattccagtaagtcttggattgaaaggagagacatgttttcatgtgtttatattcccttaacaaccaatataccttgacattgaagagccaagatgtgagtgggaggtagtgctatggtttgtatgcatttcccaaagtttatgtgttggaaacttaatcctcaatgcaatggtgttgagaggtgggacttttaaaaagtgattaggttatgagggctctgcacttataatggattaatgctgttatcatgggagaanatgggaatggattcctaataaaaggatgagctttgaaaaannaaannnnnnnnnnnntgttccttgccccggccgg

SEQ ID NO: 1656 - DNA, 727 bp, Homo sapiens
  misc_feature 2, 10, 137, 293, 298, 307, 315, 338, 390, 437, 594, 669,685, 708, 724: n = A,T,C or G
anagccgtgncgcgcgtaatacgactactatagggcgaattggagctccaccgcggtggcggccgaggtacttttttttttttttttttttttttttggggatggagtctcgcttttttgcccaggccggactgcantggcgctatctcagctcactgcaagctccacctcctgggttcacgccattctcctgcctcagcctcctgagtagctgggattacaagcacccgccaccgcgcccagctaaatttttgtatttttagtagagatggggtttcaccatgttagccaanatggnctcgatctnctgacctngtgatctgcccgccttggcctcncaaagtgctgggattacaggcatgagccaccgcgcccggctttactttccgnaacttattgagagatgtcatgatccttatggaccccttcagggtttntacacagaaaagaaagagacaagaaacagagggccctcgaactctcaaaaataggccaagatggcataattaagtctatgaatcaagataggttttctaagtggagagcaatactaaatttcttgtaaggtgaagactaaaggaaataccaagcatntttattttaacaattctctaagaattagaaaaaattaacttcatttttaaacatttaaagtctaccacacccatnatcatgacttaccaantctttacaaagctcgatcctatntcaaaaaagccacatnttt

SEQ ID NO: 1657 - DNA, 733 bp, Homo sapiens
  misc_feature 3, 6: n = A,T,C or G
ganagncgcgtaaaccacgtaatacgactcctatagggcgaattggagctccaccgcggtggcggccgcccggcaggtacatttcttgtttgtcttttttttctttttcttgtcaattcttgggtgggagaaaagccttctaatatttcctcatccaaaaactcatagtctgagatttttgcagttaattttatcatgattagtctagaatacgactgcctttcattttgcattcaccttcttcgtctaataatgattaatgccttctgtcagttttttctctttgccattatgaatggaaaatgaaaaattgtgaattcccatcggtgttcagtgaaagctaaaagtagacaacaggtatgatgtcttgaaagatgatgatgaaatactttggacaatacaatgagaaaactaatatcttaaaaactatttagttatttttagcatagttgagaataatgaattataaataatgaattataaataatgaactattaaaaactattaaaaaacaacagtttttacatttgtttcaaaatgtagggaaaaaatacgctcactaggattccatcatatttcttagatttataaagagttcagtggactcatttgataattgcaagatagcatgagttttagtctgttcttttaaaaaataaggttttctctttggtctttgggaagacttttaagaaagaataaaagtaatgacatctcaatcctaaccaagtat

SEQ ID NO: 1658 - DNA, 891 bp, Homo sapiens
  misc_feature 1, 12, 15, 627, 683, 705, 749, 782, 784, 840, 852, 882, 886,887: n = A,T,C or G
natatagggagngcntaatacgactactatagggcgaattggagctccaccgcggtggcggcccgcccgggcaggtacacttcactttctcgtgctcttcctaagagagtagtgttttcttcctccccaccgagaaaaaaaataaaagcaacaactggaacttcttccttaccctgccttgtctgcagaccctggaggccccttccatttccccttgtccttttccttgtcttttttggttcccgccgcagtggtcgagtcgccctcgaacacgctgaacagctcatctccgaatgcgtccgccatttttgggagcagtgagagccccgcgtacctcggccgctctagaactagtggatcccccgggctgcaggaattcgatatcaagcttatcgataccgtcgacctcgagggggggcccggtacccagcttttgttccctttagtgagggttaattgcgcgcttggcgtaatcatggtcatagctgtttcctgtgtgaaattgttatccgctcacaattccacacaacatacgagccgggagcataaagtgtaaagcctggggtgcctaatgagtgagctaactcacattaattgcgttgcgctcactgcccgctttccaagtcnggaaacctgtcgtgccagctgcattaatgaatcggccaacgcgccggggagaggcngtttgcgtattgggcgctcttncgctttcttgcttaattgactcgctgggcttcggtccgttcggntgcggcgagcggtattaacttaactcaaaggcngnaataccggttattccacaaaaatcaagggggataaccccaggaaaaaacatgtganccaaaaggccancaaaaggccaggaacccttaaaaaggcccntttnntgct

SEQ ID NO: 1659 - DNA, 871 bp, Homo sapiens
  misc_feature 793, 796, 823, 831, 834, 859: n = A,T,C or G
gcgcgtatacgactactatagggcgaattggagctccaccgcggtggcggccgaggtactgagtcaaggacgtctttaacgtcatgggcggctcctttacccacgctttctagatcttcgactgcatcttttcctagttttccgagtccccccacagctttttttgctccgtctaggcctttttccagaaggctggatctctgcttccttggctttggtgcctgtctggctaaccctgggtcttcacctgcattttccttttgagctgctgatgcttcatggcaagggttccccgatcctgtcgagcggccgcccgggcaggtacgcggggcacagcggcttccttgatccttgccacccgcgactgaacaccgacaacagcagcctcaccatgaagttgctgatggtcctcatgctggcggccctctcccagcactgctacgcaggctctggctgccccttattggagaatgtgatttccaagacaatcaatccacaagtgtctaagactgaatacaaagaacttcttcaagagttcatagacgacaatgccactacaaatgccatagatgaattgaaggaatgttttcttaaccaaacggatgaaactctgagcaatgttgaggtgtttatgcaattaatatatgacagcagtctttgtgatttattttaactttctgcaagacctttggctcacaaaactgtagggtatggtgagaaaccaactacggattgctgcaaaccacaccttctctttcttatggctttttactacaaactacaagacaattgntgnaacctgctatacaaggttattttaaanaaatgganggncaaaaaaaaaaaaaaaaaaaaaagncctcggccgttt

SEQ ID NO: 1660 - DNA, 875 bp, Homo sapiens
  misc_feature 1, 3, 523, 596, 604, 657, 666, 670, 673, 686, 688, 689, 693,705, 709, 737, 758, 761, 762, 763, 773, 775, 779, 780, 782,786, 787, 789, 795, 800, 803, 826, 835, 836, 842, 847, 848,858, 859, 871, 873: n = A,T,C or G
ngnccgtatacgactactatagggcgaattggagctccaccgcggtggcggccgcccgggcaggtactttgcctacggcagcaacctgctgacagagaggatccacctccgaaacccctcggcggcgttcttctgtgtggcccgcctgcaggattttaagcttgactttggcaattcccaaggcaaaacaaatcaaacttggcatggagggatagccaccatttttcagagtcctggcgatgaagtgtggggagtagtatggaaaatgaacaaaagcaatttaaattctctggatgagcaagaaggggttaaaagtggaatgtatgttgtaatagaagttaaagttgcaactcaagaaggaaaaaaaaaaaaaaaaaaaaaagtacctcggccgctctagaactagtggatcccccgggctgcaggaattcgatatcaagcttatcgataccgtcgacctcgagggggggcccggtcccagcttttgttccctttagtgagggttaattgcgcgcttggcgtnatcatggtcatagctgtttcctgtgtgaaattgttatcccgctccaattccacacaacatacgagccgggagnataaaagngtaaagcctggggtgcctaatgagtgactactcacattaattgcttgcgcctnactgcccgntttncanacgggaaacctgncnngccncttgcattaatnaatnggcccaaccccggggagaggcggttgcntattgggccctttttccgttnctnnntcaatgactngntgcnntnggtnntncggctncggcnacngttttaacttaattaaaggcggnaatccggtnntccacnaaatnnggggataccnnggaaaaactttnanct

SEQ ID NO: 1661 - DNA, 885 bp, Homo sapiens
  misc_feature 2, 5, 9, 10, 12, 700, 706, 726, 727, 770, 815, 818, 830,834, 855, 868, 880, 884: n = A,T,C or G
angcncgtnncncgcgtaatacgactactatagggcgaattggagctccccgcggtggcggccgaggtaccaaaaagactctcaaaaaccaatactcccacgggcaagggaatagccaagtttgttgcggtttccaatgaatgacatcagccctgtgtaggtctcaatcaaaatgggttcagttaacaccatcagtttctttcctcttccagatccagttgaattcttgtgggcattctggatagctggaacaagcttagacatgaacccagacaacttgcaaatttcaaggaatttctcactggtgtatttcataggatgctcagtgaaagtagcataaggaacttcagtggaccatgggttccagcgggacagaagagactgctcctccggactcccccagtagatcctaaggccttctccttgtctcttgtccagggacatcccagggaaggtgaacttgcccaggcagatgcgatagacagcgctcagaggaatccgctgcagctgcacacaactcagcatgatgaagtcgtatttgcagatcaagagagtcttgtctgtgaccagtagaattctctccttctcattggtccaagtggtctatctttgtcaagagccagaagccttgaatggtctcttcagaaagtctcagctacgtgacctttcaagttttccatggcagtctcaatggcccccnggccgntctagaactaggtgggattnncccgggctgcaggaattcgatatcaagcttatcgataccggcnaacttcgagggggggcccgggacccaacttttgttccctttaagngangggtaaattgcncgcntggcgtaatcatgggcatagntggttcctggggnaaatggtttccntacnt

SEQ ID NO: 1662 - DNA, 881 bp, Homo sapiens
  misc_feature 2, 15, 689, 746, 765, 781, 794, 811, 818, 821, 861, 873, 880: n = A,T,C or G
angccgtatcgactnactatagggcgaattggagctccccgcggtggcggccgcccgggcaggtaccagttttaaacctgttctattctaaccttggaatggagtcacatgtttcagcagcaatatgctgtttcccttcctcggtttctcacatcaccctctggagaatggtgtggaaactgccctgtttttacatcaagataaaagcttcaggaagttactggagagtggaatgcaggggtcattctggataacacaaaataactatttgattagaccaaccatttggtctctaaaattgggtgctaaagacaaagataggaaattcaaaaaatcaccacctgtagaagaaaaatcagttaataatttgacagatttaagggcctcacctttctctcacagaactttacctcataacaccctgtttgggaaaattggaaaatatcttctccttacctcctaggggataaacaagagtttaaatgttgccaccaactcaaacaaaacacacctcattctttatgttctggagggagagggagtccttattttgcttcaaagtttcctttctggagcttcttttttttaagcaaaaaaaaaaaaaaaaaaaaaagtacctcggcccgctctagaactagtgggatcccccgggctgcaggaattcgatatcaagcttatcgataccgtcnacctcgagggggggcccgggacccagcttttgttccctttagtgagggttaattgcncgcttggcgtaatcatggncatagctggttcctgngtgaaatggtatnccgttacaattcccacnacatacnaanccgggaccataagtgtaaagcctgggggggcctaatgagnggagcttacctnactttant

SEQ ID NO: 1663 - DNA, 665 bp, Homo sapiens
gagcgcgcgtaatacgactcactatagggcgaattggagctccaccgcggtggcggccgcccgggcaggtacaatgaggcagatgcagatgcagtgtgtgtcactccagtcttgaaggagttacactggctctccagcaagggtataatccatatcaaaaccaaaacactttatcttttccattgctaaacttcggttcacaaacacccgatgataggcttctcgacgatactttttcagggcatgcttatccatgttagcagacatatctgctgcattctgtaaccgatcactccaggaggttgacattttattttaactgtattttgtattacttgtaatcccagaactttgggaggccgaggcgaatggatcacttgacgtcaggagatcacatcactgtacctcggccgctctagaactagtggatcccccgggctgcaggaattcgatatcaagcttatcgataccgtcgacctcgagggggggcccggtacccagcttttgttccctttagtgagggttaattgcgcgcttggcgtaatcatggtcatagctgtttcctgtgtgaaattgttatccgctcacaattccacacaacatacgagccgggagcataaagtgtaaagcctggggtgcctaatgagtgagctaactcacattaa

SEQ ID NO: 1664 - DNA, 653 bp, Homo sapiens
  misc_feature 5, 91, 93, 94, 95, 99, 102, 105, 106, 107, 108, 109, 112,121, 127, 131, 135, 138, 151, 156, 157, 158, 164, 165, 180,186, 189, 191, 200, 201, 204, 213, 218, 219, 221, 226, 234,235, 249, 256, 258, 259, 264, 269, 291, 295, 298, 302: n = A,T,C or G
  misc_feature 305, 308, 313, 314, 325, 333, 337, 338, 341, 350, 352, 353,358, 364, 365, 371, 375, 379, 390, 391, 399, 411, 412, 413,414, 418, 419, 420, 421, 425, 428, 434, 437, 444, 453, 459,463, 465, 468, 470, 476, 482, 502, 503, 505, 506, 507: n = A,T,C or G
  misc_feature 512, 514, 516, 518, 528, 530, 546, 552, 555, 556, 559, 563,572, 573, 577, 579, 580, 584, 591, 592, 595, 596, 600, 602,603, 604, 606, 607, 612, 613, 616, 620, 627, 628, 630, 632,634, 640, 643, 649, 651: n = A,T,C or G
gagcnccccgtaatacgactcactatagggcgaattggagctccaccgcggtggcggccgaggtacttttttttttttttttttttttaancnnnaaanccnttnnnnnaantttccaaantggttngaantttnccnttttaaggttttnaaccnnntttttnnaaaaccccccccccntccggnaanantaaggttcnnggnggccgtttnaaaannanggaancccccggnntgaagaaattcaanttaaacntnntcaancccgncaacctcaagggggggcccggncccnacntttngtnccnttaannaagggtaaatngccccctnggcnnaanaatggcaananntgttncctggnnaaaatngtantccnttaaaaattcnnaaaaaaanacaacccggaannnnaaannnnaaanccngggggnccnaataagnaacctaacnaaaatnaatngnttngncctaantgcccnttttcaaatcggaaaacctnncnnnccacntnantnaataaatcgncnaacccccgggaaaagncggttngcnnttngggnccttttccnnttcntnnttanttaattnnttnncctngnnntnnggttnnggnaagnggttaanntnantnaaaggnggnaatacngnta

SEQ ID NO: 1665 - DNA, 728 bp, Homo sapiens
  misc_feature 16, 26, 27, 28, 43, 59, 66, 73, 97, 109, 113, 178, 179, 180,181, 182, 184, 185, 186, 187, 188, 200, 218, 219, 220, 221,222, 223, 224, 225, 231, 232, 245, 246, 247, 248, 249, 250,251, 252, 253, 254, 255, 256, 257, 274, 340, 346: n = A,T,C or G
  misc_feature 348, 349, 360, 374, 400, 415, 458, 466, 494, 505, 511, 522,529, 531, 535, 538, 548, 554, 572, 573, 584, 596, 605, 618,635, 640, 655, 660, 667, 668, 669, 671, 675, 682, 701, 702,705, 706, 708, 718, 721, 722, 723: n = A,T,C or G
gagcgcgcgtaatacngacttcactnnnaggggccgaattggnagcttccaccgcggtngggccgngcccggnagaggtttaacctttccggggggncccaccggtttnaagngggggcccgggggggttttaaaggggggtttggggggttttggggaaaatttggggggggggggnnnnngnnnnntttttttttttngggggggggggggggggnnnnnnnncccccnnggggggggggggnnnnnnnnnnnnngaaagaattgggcccancggggggaaacaacttaacctttgtttggccaaaccggccctttgggccggggggccttttttttnttttcnannaaaaaaaattngaaaaaccggggancaaagaaaaaccccggggcccccccnttttttttttaaaancccccaaaaacccaaaaagggtttttttttttcaaaccccaanaaaaaaanaaggggaactttttttttttgcaaaaantttttaaaaancccccnaaaaccccccnttttttngnaggnaanaaatttcccnaattgnggggaacccctttttttnnaaaaacccttnggggggtttttnttttaaaanttttttaaaaaanttttaaaaaaacccccnccttnttttttaaaaaaaanagggnttttttnnncnccanaaaaaancccaaaaaatttttttttnnaanntnccaaaaaaanggnnnaaaaa

SEQ ID NO: 1666 - DNA, 664 bp, Homo sapiens
  misc_feature 5, 486, 502, 549, 565, 571, 608, 628, 629, 631, 632, 634,639, 642, 647, 650, 652, 656, 662: n = A,T,C or G
gagcnccgcgtaataccgactcactatagggcgaattggagctccaccgcggtggcggccgcccgggcaggtacgcgggagctaatctttgataaagactaactatgggcaaggctttactctttgtttgtagtaacttacttaatcctcattataacccctttatatagatgctgtattttctccattttacagagaggaagtagagcctcagagatgttatgtcacttgtcaaaagtcacccagctagtgaatggctggatcaaactggatcatgtccaagtagcctggcttcaaagttcacacgctttactatatttattcttttttttttcttttgagatggagtttcgctcttgttgcccaggctggagcacaatggcatgatctcagcttaccacaacctccacctcctgggttcaagcgactctcctgcctcagcctcccgagtagctgggatgcgccaccacgcctggctaattttgnatttttagtagagacngggtttctccattgttggttaggctggtctcaaactcctgacctcangtgatccacccacctnggcctnccaaagtgctgggattacaggcgtgagccacggagtntggcgtatatttattttcanngnntnattancanaattntanantcanctgttntg

SEQ ID NO: 1667 - DNA, 661 bp, Homo sapiens
  misc_feature 5, 489, 547, 562, 573, 618, 620, 626, 627, 628, 634: n = A,T,C or G
gagcnccgcgtaatacgactcactatagggcgaattggagctccaccgcggtggcggccgcccgggcaggtacaatagccgtgatctcggctcactgcaacctccatctcccaagttcaagcaattctcctgacttagcctcccaagtagctgggactacaggcacatgccaccacgcctggctaatttttgtattttttgtagagacggggtttcaccgtgttcgccaaggtggtcttgaactccaggcctcaagtgatctgcccacctcggcctctcaaagtgctgggattacaggcatgagccaccacacctggcctggattagtaatttcggatttccaaattcaggtcaagaagtggaatttattatggtgggttcttgtgaaaaaaatataaatgtggccttttaaatatatttagtttttttttaaacaaaggctactcaaaccattaccttcctggcccccttgaaaagaaaaaaaaaatntatccatcccattttgctttctctaattttgaaaagtcagaaagatctcaaaggtttnttactaccgtacctnggccgctctanaactagtggatcccccgggctgaggaattcgatatcaagcttatngntaccgnnnacctcnaggggggggcccggtacccacttttgt

SEQ ID NO: 1668 - DNA, 696 bp, Homo sapiens
  misc_feature 152, 177, 232, 241, 256, 268, 278, 288, 361, 405, 409, 412,413, 415, 416, 418, 419, 421, 423, 429, 441, 443, 444, 445,447, 454, 455, 456, 459, 461, 464, 468, 469, 470, 473, 475,476, 478, 479, 480, 481, 485, 486, 487, 488, 489, 494: n = A,T,C or G
  misc_feature 495, 497, 498, 503, 505, 506, 507, 508, 511, 512, 515, 516,519, 522, 525, 528, 531, 532, 533, 537, 539, 540, 541, 543,544, 545, 546, 547, 548, 549, 550, 551, 554, 555, 557, 558,560, 565, 566, 567, 568, 569, 570, 572, 573, 574, 581: n = A,T,C or G
  misc_feature 582, 584, 586, 588, 589, 590, 591, 592, 593, 594, 596, 597,599, 602, 604, 606, 609, 611, 612, 614, 616, 617, 618, 619,620, 621, 623, 624, 626, 627, 630, 632, 634, 635, 636, 637,638, 642, 643, 644, 645, 649, 650, 651, 652, 654, 655: n = A,T,C or G
  misc_feature 658, 659, 660, 661, 662, 663, 664, 667, 668, 669, 670, 671,673, 674, 675, 676, 677, 678, 679, 683, 684, 685, 686, 687,688, 689, 690, 691, 692, 693, 694, 695: n = A,T,C or G
gagcgcgcgtaatacgacttcactatagggccgaattggagctccaccgcggtggcggccgaggtacttttttttttttttttttttttttttttcagcattgccacatacctggagttcctctttagttggtggcagtcagcagggttctntgaaaacaatttataaacaaattgnggctgttctgaaactagggcaaccgatatcttgagtttcatctgtttagtgtttnaaacctggncctgatgttagtgtncccatattaaanatttgactgngggccttccnaatgccaatgtatcccggatggatggcctaaggtccttaaccacaaatgttaatgctaaaaatcatgatgatnatgtgtgtgtgcgtgtgtgtgtgtgtgtgtgtgtgtgtgtgtgngtgngtnngnnannananacactnaaactgaaaacngnnngnagggtcnnnaananganatgnnnacntnntnnnntccnnnnnaaganngnnaaggntnnnnaanngcnnaangancgngcntannncacntnnnannnnnnnnnaanngnngngaaannnnnntnnncgggggnntngnannnnnnncnncntgngnanacncnncntnnnnnntnntnnaananannnnngggnnnngggnnnnannagnnnnnnnaannnnntnnnnnnnaaannnnnnnnnnnnnc

SEQ ID NO: 1669 - DNA, 689 bp, Homo sapiens
  misc_feature 2, 7, 8, 10, 11, 13, 15, 17, 18, 19, 21, 22, 23, 25, 29,35, 38, 41, 47, 48, 50, 51, 54, 56, 64, 70, 74, 81, 86,92, 93, 94, 100, 363, 423, 432, 435, 444, 481, 491, 492,502, 507, 515, 526, 536, 540, 548, 550, 551, 555, 559, 561,563: n = A,T,C or G
  misc_feature 565, 569, 574, 578, 579, 580, 581, 593, 604, 613, 622, 631,635, 653, 655, 666, 669, 672, 676, 678, 679, 681, 682, 685,688: n = A,T,C or G
tngttanntnntntntnnnannnantttnattagnatnttnaatctnnanntanantaactgtntaatantaanttttatnataantttttnnntagatnagctatacatcatatagggcgaattggagctccaccgcggtggcggccgctctagaactagtggatcccccgggctgcaggaattcgatatcaagcttatcgataccgtcgacctcgagggggggcccggtacccagcttttgttccctttagtgagggttaattgcgcgcttggcgtaatcatggtcatagctgtttcctgtgtgaaaattgttatcccgctcacaatttccaccaccaacatacgaagctcgggggagcantaaaagtgttaaaagctctggggaggtggccctaaataggagatgtagcctatacctcancaatttaanttngccgtttgncagcttcaccttgccccgctttttcacaggtacgtgngaaaaacccnngttcggttgnccaanccttgcanttttaaaattngaaaatttanttgnacccaaancnnccantctngngngnaagnaagtnaccnnnntttttttgtccngttttattttngggtagccnggccctttnaatttttcnccgncctttttaaccttcggtncnttcaaaccctnggnacnttcntnngnnttngcng

SEQ ID NO: 1670 - DNA, 1012 bp, Homo sapiens
  misc_feature 4, 6, 7, 8, 9, 10, 18, 19, 21, 22, 33, 35, 36, 39, 41, 43,45, 46, 49, 51, 53, 61, 64, 65, 66, 69, 78, 80, 82, 89,93, 95, 96, 106, 112, 114, 115, 124, 126, 130, 135, 143,150, 164, 165, 166, 167, 168, 169, 170, 171, 196, 271, 340: n = A,T,C or G
  misc_feature 353, 355, 357, 361, 365, 369, 370, 377, 378, 379, 386, 388,391, 397, 398, 402, 405, 415, 417, 420, 423, 432, 434, 435,438, 447, 452, 453, 457, 458, 465, 467, 468, 469, 476, 478,485, 486, 488, 497, 503, 507, 511, 523, 526, 530, 531: n = A,T,C or G
  misc_feature 532, 540, 547, 552, 555, 558, 561, 568, 572, 577, 578, 582,587, 593, 599, 613, 616, 619, 621, 625, 633, 644, 646, 647,655, 656, 660, 661, 671, 678, 681, 684, 688, 690, 693, 695,696, 701, 705, 709, 712, 716, 717, 723, 727, 730, 734: n = A,T,C or G
  misc_feature 737, 738, 742, 749, 752, 761, 762, 763, 767, 780, 783, 785,789, 790, 791, 795, 805, 808, 818, 823, 828, 830, 836, 837,842, 845, 846, 856, 858, 859, 865, 867, 870, 880, 883, 884,885, 887, 890, 901, 907, 910, 916, 917, 925, 931, 935: n = A,T,C or G
  misc_feature 936, 939, 940, 942, 951, 959, 961, 964, 967, 986, 990, 998,1006, 1011: n = A,T,C or G
cctncnnnnncctacttnnannactattgtttncnntcntntntnnttntnancacatatntannnatnttgttatgnanantttttcncttncnntacgttaatnataaantnntatagttgncncttntctcnactaattncatattnatttagttttgtgnnnnnnnngcgcgtgatacgactcactataggngccgaattggtagctccacccgcggtggcggccgaagttgcctcttttaggaatctctttggaattgggagcacngatgactctgagtttgagctattaaagtacttcttacacaccaaaaaaaaaaaaaaaaaaaaaaaaagntacctgcccgtgntntngtanatgnatgnnttgttcnnnttatttntnatnacaatnntctntcntgtatcattntntcntanctcttagcntnnatntatatcatncatanntcannttctaantnnntttcctntnttctttnntntattgtatntatctnaatncatngtgtgtgtggantgnatcnnntaataatntatcttntcatntcntantancaatctnatcntcatnnatgntattntctccntaatgntatcatatttcacnggnatntnttangatatatntatataatatntnnttgttatnntaanntattgtgtgntatcgtngtntantatntncantnnatatnatgncatnatnactnntgtttnatantantccntcnntttntcttatnatnttatcattnnnatantctcttcatcatntcntnatcnnnatgntaatctctgnttnttctgtatantatcntattngnatcgtnntgatnacnntgatattatnannttcatntntancattatcatngtnnncnggnatcatattctnatgctnacnctcatnntattggtnatcatnatcnnatnntnttatgatcntcatctantntgnttnttttctgatatattttttnaatntcatattngtattctncattng

SEQ ID NO: 1671 - DNA, 842 bp, Homo sapiens
  misc_feature 2, 3, 9, 13, 17, 22, 24, 26, 29, 31, 39, 44, 45, 46, 49,51, 52, 54, 55, 59, 61, 62, 69, 70, 77, 78, 81, 85, 88,90, 91, 95, 97, 102, 105, 114, 123, 127, 131, 133, 136,138, 216, 253, 316, 326, 328, 338, 426, 432, 435, 439, 446,477: n = A,T,C or G
  misc_feature 479, 494, 510, 516, 518, 520, 525, 531, 536, 540, 545, 561,575, 586, 590, 601, 608, 618, 620, 626, 630, 635, 642, 647,649, 657, 671, 673, 680, 696, 698, 699, 701, 703, 711, 712,718, 723, 748, 761, 767, 785, 805, 810, 817, 820, 829: n = A,T,C or G
  misc_feature 831, 832: n = A,T,C or G
tnnttgttntccntgtncctcngnanatncnttctaatncttannnttntnnanntttntnnctgtacnnattctannctnctanttnanntctncnttacnttnctttccctnctctagacntagnggtncnccncntacgactcactatagggcgaattggagctccaccgcggtggcggccgaggtacttttttttttttttttttttttggnttcatttactccattatgttacgcttatgcttggganttcattttcgacatattgcaaaatttatactgtggtcagaattattcaggtgtatctcctganctgtggaacntnctttactacnttaacccttataaatttttaaattaaaccttttaacccttttcaggggaataaggcattcccccaaaccaccaaccttcttaaccaantggaanacnttanctccttngaaaaaaaaaaaaaattttaagcccccaaantnttaattttaatttanaaaaccttttttggcnttttanancnttttntggtcntcggnaaanggggnaacatcttttggtacnttttttttttcctnaacccttggantaanaattttttttntaaaccntcttattaantngccttntttnccttnccaattnttggnanttgagggncaacttaatagaananataaccnttcctaattcaaaaanannantnttttaaannggaacnctttntcaaattgggccccctttttttccntttttttgtcaantaaaanattttaaaaagcaaaccnctttaattttctttaaaaantgggnaccccanaanaatatttangnnaaattttaag

SEQ ID NO: 1672 - DNA, 469 bp, Homo sapiens
  misc_feature 167, 202, 285, 302, 323, 343, 346, 348, 358, 368, 370, 375,382, 384, 385, 386, 392, 395, 403, 404, 407, 408, 415, 426,429, 431, 440, 444, 449, 458, 461: n = A,T,C or G
ggcgaattggagctccccgcggtggcggccgaggacgcggggaggcagacatgggagtgccaaggtggccagatggttccaggactacaatgtctttatttttaactgtttgccactgctgccctcacccctgcccggctctggagtacctgcccgggcggccgctntataactagtggatcccccgggctgcaggaattcnatatcaagcttatcgataccgtcgacctcgagggggggcccggtacccagcttttgtttccctttagttgagggttaattgcncgcttggatgtaatcantggtcatagctgttttcctgngtgaaattgtttaattcacnttnancaaaatttcnacatcaaatnantatcngagtccngnnnaaggcnttnaaaaattnntcnnaaagttnccttggggggntancnccttaattngagnttgtnaaactaaantcntcaacaat

SEQ ID NO: 1673 - DNA, 510 bp, Homo sapiens
  misc_feature 152, 165, 168, 178, 188, 193, 195, 201, 209, 212, 215, 219,227, 228, 229, 232, 233, 235, 239, 246, 247, 249, 250, 268,271, 277, 280, 283, 285, 289, 293, 294, 295, 296, 303, 306,309, 313, 315, 317, 319, 322, 327, 330, 332, 333, 335: n = A,T,C or G
  misc_feature 336, 340, 342, 346, 347, 349, 367, 368, 370, 371, 373, 377,386, 388, 390, 391, 392, 395, 396, 397, 400, 403, 404, 407,408, 411, 421, 426, 427, 428, 431, 432, 437, 438, 441, 448,450, 451, 452, 464, 465, 467, 470, 471, 474, 477, 480: n = A,T,C or G
  misc_feature 488, 492, 495, 503, 504, 508, 509, 510: n = A,T,C or G
ggagctccccgcggtggcggccgcccgggcaggtacgtttctctttcatcttcactttttgttcaggagcttcgacagccttctcttgtcttctaacgggacagttggggcttcaggaaggggactgagaataggggtgtgagtgacaggtncctggggtcttgnttngagatgaccnggcggggggnatctnanaagaancacctctnctnatnatcnattatctnnnaanntntatnagaaccnntnntatatagattctttttancgnctcccngcnctnanaacntatnnnnaactagntangcnctantncnantancctcnagnannannaccncntcanntntctttctctaaccctctnncnntntatncaaataatntntnnnacnnncanttnntanntancttatcattnctttnnncannactannacnttatttncnnnccccctcttccnncnttnnttnaantcnatcttctnaacntanacaaattnnttgnnn

SEQ ID NO: 1674 - DNA, 481 bp, Homo sapiens
  misc_feature 2, 3, 4, 5, 14, 16, 17, 20, 24, 43, 59, 102, 103, 186, 197,200, 217, 229, 230, 241, 243, 251, 257, 263, 268, 281, 283,302, 312, 314, 316, 318, 323, 332, 337, 348, 349, 363, 365,368, 373, 376, 379, 414, 430, 437: n = A,T,C or G
gnnnnggattttcngnntcntctnctatagggcgaattggatntccccgcggtggcggncgaggtacttctgcctgggttatgggagtaaaatcttgtccanngacatcccagggaaggtgaacttgcccaggcagatgcgatagacagcgctcagaggaatcctctgcagctgcacacaactaantcatgatgaantcntatttgcaaatcaaganagtcttgtctgnnaccagtagaantntttccttntgattnttccantggtntatctttgtcaananccagaagccttgaatggtnttttcagaantntnanctacntgacctttnaagtnttccatggcannctcaatggccccangncgntctanaantantggatccccctggctgcaaggaattcgatatcaancttatcgataccgtcngacctcnaggggggtgccccggtacccagcttttgttccctttactgaggg

SEQ ID NO: 1675 - DNA, 873 bp, Homo sapiens
  misc_feature 366, 462, 484, 619, 625, 705, 736, 757, 759, 770, 795, 797,814, 822, 829, 841, 862, 870, 871, 872, 873: n = A,T,C or G
ggcgatcgctactatagggcgaattggagctccccgcggtggcggccgcccgggcaggtacttaattatgcaacaacaagatttgcagggagcataaccacatagttcccctgagtatgctgccagtatgctccacaaatgattaaatataaaataaacaagagctaactgtgaatatgaagttgtaattccaccaacggggttccagtgatgtcataaaccactagagcaaaattcatgtcaccaaaggatcccagatgggcttagagaactgtactcagtagtggtctctactacagacgtgggtccaggaaacccttttcacctctgttttctgccccttcacatctctacaagtgcccttcnttcttggtttcttccttcaagttttctaaaatcatacttatcctgcttttctaaatgtaagttccttttaattcattcattgggtctatcattcangggcagatgaaccaaatacatncttttggacaacgattcataattatatatactttcattagaaaaaaaaaagcccgatatttaatagaaaatcccatttaggacaagagccttaaaacgtacctcgggccgctctaagaactagtgggatcccccnggctgncaggaattcgatattcaagcttatcgatcccgtcgacctcggagggggggcccgggacccagcttttgttccctttaagngagggtaattgcgccgcttggcgtaaacatngggcatagctggttcctgggngnaaattggtatncgctcacaattccacacaacatacnancccgggagcaataaagngtaaaagnccggggnggcctaatgagngagctaactcacattaattgngtggcgcnnnn

SEQ ID NO: 1676 - DNA, 913 bp, Homo sapiens
  misc_feature 4, 6, 345, 446, 598, 630, 632, 640, 680, 708, 718, 781, 792,796, 814, 822, 850, 851, 883, 894, 910, 911: n = A,T,C or G
tggncnatttactactatagggcgaattggagctccccgcggtggcggccgcccgggcaggtacgcggggaccctagatcccaagatctccaaggatttggtgggcatacccactccagcacacagaagcatgaggttcatgactctcctcttcctgacagctctggcaggagccctggctgtgcctatgatccagaggccgcctcagccccaggatcggggaacccttgccatgaagcatcagcagctcaaaaggaaaatgcaggtgaagacccagggttagccagacaggcaccaaagccaagggaagcagaagatccacccttctggaaaaaggcctagacnggagcaaaaaaagcttgtgggggggactcggaaaactaggaaaaagatgcagtccgaaagatctagaaagcgtggggtaaaaggagccgtccatgacgttnaaagacgtcccttgactcagtacctcggcccgctcttagaactagtgggatcccccggggctggcaggaaattcgatatcaaagccttatcgatacccgtcgaccctcgaggggggggcccgggtacccagctttttgttccctttagtgangggttaaattgcgcgccttggcgtaaatcatngncattagcntggtttccttgtgtgaaattggtattccgctcacaaattncacaccaacataccgaacccgggagccntaaaagtgtnaaagcctggggtggcctaatgagtggacctaacttcacattaattgcgttgcgcttcacttgnccgctttccangtcngggaaacctttcgtgccnagctgcanttaatgaatcggcccaccccccggggannaggcgggtttgcgtattgggcgcttttccggnttcttggttanttgacttgcttgggcnncg

SEQ ID NO: 1677 - DNA, 483 bp, Homo sapiens
  misc_feature 3, 74, 128, 147, 160, 190, 198, 211, 219, 244, 253, 255,258, 259, 268, 279, 288, 290, 292, 295, 299, 303, 308, 322,329, 351, 354, 379, 398, 403, 417, 420, 439, 451, 454, 460,480: n = A,T,C or G
ctncttagggcgaattggagctccccgcggtggcggccgaggtacttttttttttttttttttttttttttttnctggaaaaagtcatggaggccatggggttggcttgaaaccagctttggggggtncgattccttccttttttgnctagattttatgnatccgggtccttcaaatgtgctggtagggnggggggcntccatataagtcnctccaggntttatggaggggttcttctactatnaggactttncnctnngaagccaangcttctcaaancatgaaaantntnaanattnccgntgttngagaaatgaatgancctccanatgataggatgtttcatgtggngtntgcatcggggtagtcccagtaacgnacggggcattccggatagncccanaaagtgtttgtggnaanaaagttaccattaaccccnatgaatatgatngtnaaatgntttttggcgtcacgtttggncta

SEQ ID NO: 1678 - DNA, 828 bp, Homo sapiens
  misc_feature 2, 3, 4, 8, 9, 10, 12, 13, 16, 17, 19, 20, 24, 27, 31, 32,34, 35, 37, 40, 41, 44, 48, 51, 52, 53, 54, 56, 61, 65,66, 67, 69, 70, 73, 87, 92, 93, 100, 102, 106, 108, 116,117, 118, 124, 129, 130, 158, 159, 242, 260, 286, 294, 339: n = A,T,C or G
  misc_feature 361, 376, 382, 384, 390, 397, 399, 411, 420, 425, 428, 437,450, 453, 477, 486, 499, 502, 504, 506, 535, 557, 560, 592,601, 621, 629, 644, 659, 678, 687, 700, 705, 725, 733, 750,751, 765, 777, 778, 794, 796, 798, 802, 810, 812, 814: n = A,T,C or G
  misc_feature 820, 821: n = A,T,C or G
cnnntatnnntnnttnncnnttanccntatnntnncnatnnaanccantannnntntaatntttnnncnnttntttctcttttaatnaactnntcattantncttntncttaaggnnnagggtnttctnnactctcatatagggcgaattggagctcnnccgcggtggcggccgcccgggcaggtacagcgggggagactggcaacctgaaaaaggctgtcattctacagggctctaatgangttgaacttgttgctganggcaacagcaggttcacttacactgntcttgtanatggctgctctaaaaagacaaattgaatggggaaaggacaattcntttggaaattaccaaaaaacanaattaaagggcccantttacngnccctgnccccttncnctttggataatntttccaccnctttntgnggaccaatncaggttggggtgnccntgaactccaaaaaaaaatttttcntttttgttnggggaaccaattntgngncnccccaagcttccttgcttttttcaaaaantaaaacaattggaaaaccttcnaanatttccttaaaaaattttaaaaaaaaaaaagnaaaaaaagnaaacaattttttggacatanaaaaaacntttttccttcctttntgggcccccaatctntgcttttccatgtcctttnccttttttngtttaaaaccttngcaanacaggcccttggaaaattcnccttttcnccaattttttccttttnnttgggcaaccaatnccttaacccttnngccttttaaaaaaatntngnttgnggggccanananaagganngaaacat

SEQ ID NO: 1679 - DNA, 456 bp, Homo sapiens
  misc_feature 3, 6: n = A,T,C or G
ctnctntagggcgaattggagctccccgcggtggcggccgaggtacttacactgaaaacttcaagcaagtagcaccagggctccccctaagcataacaggggcctgattagcaccccagaagaacccctcaaaaagtatataaatttattgcgtcctagcaaagatctgcagcttccagtattcacacaatgtgaagatattaacaatacaaaatatattttgaaagtcaaacacctgtagttcatagtgcttttttagatttgttaaaaaaaatacaatgcttagtttcctatataggatatacaaaagcaaaaaatacatatgtatatagtagaaataaatcagccatagtaatttacagcttttgtctccaaccctcccctaatcataatctttatcccacacttcagtatatactttctgggatcaaaggatcaatttattctgaaccaggc

SEQ ID NO: 1680 - DNA, 486 bp, Homo sapiens
  misc_feature 2, 3, 4, 12, 19: n = A,T,C or G
gnnnagggttcnaacactncttagggcgaattggagctccccgcggtggcggccgaggtacaaggactgcatcgagtccactggagactattttcttctctgtgacgccgaggggccatggggcatcattctggagtccctggccatacttggcatcgtggtcacaattctgctactcttagcatttctcttcctcatgcgaaagatccaagactgcagccaagtggaatgtcctccccacccagctcctcttcctcctgagtgtcctggggctcttcggactcgcttttgccttcatcatcgagctcaatcaacaaactgcccccgtacctgcccgggcggccgctctagaactagtggatcccccgggctgcaggaattcgatatcaagcttatcgataccgtcgacctcgagggggggcccggtacccagcttttgttccctttagtgagggttaattgcgcgcttggcgtaatcatggtcat

SEQ ID NO: 1681 - DNA, 907 bp, Homo sapiens
  misc_feature 1, 5, 73, 163, 170, 180, 197, 221, 248, 307, 324, 443, 510,518, 528, 533, 534, 541, 544, 558, 566, 582, 591, 606, 609,614, 615, 624, 642, 643, 651, 655, 676, 678, 680, 683, 685,696, 697, 702, 709, 710, 713, 718, 719, 723, 726, 731: n = A,T,C or G
  misc_feature 734, 742, 745, 751, 754, 757, 758, 761, 782, 784, 785, 797,798, 799, 803, 804, 805, 809, 815, 816, 817, 818, 820, 821,822, 827, 828, 834, 843, 844, 846, 855, 860, 862, 869, 871,873, 875, 876, 878, 879, 884, 886, 887, 888, 890, 893: n = A,T,C or G
  misc_feature 894, 896, 897, 898, 900, 901, 902, 904, 907: n = A,T,C or G
ngctntcactcactatagggcgaattggagctccccgcggtggcggcccgcccgggcaggtaccgcggcccgntaaacatgtgtcactgggcaggcggggcctctaatactggtgatgctagaggtgatgtttttggtaaacaggcggggtaagaatttgccnagttctntacttttttnaccctttccttatgaancatgcctgggtggggtgacagtgnaggggtaaataaatgactttgttgggntgaattgtaagaatattgggcctggttaattgtcaagtcaagtgttttaaatctgaccncaggctttatgccggangaagaatgttttcatggttaccttatactaacattagtcttctatagggtgatagaattggtccaatttggggtgtgaaggaagttcaagttatatgtttggggatttttttaaggtantgggtccccgcgtacctcggcccgctctaagaactagtgggatccccccgggcctgcaggaaattcnatatcaanccttatcganaccgnngaccctnganggggggggcccggnacccaacnttttgttccctttaanggagggttnaattgcccccccttngcntaaannatgggccanaaccttgtttccctgggnnaaaaatgntttncccctccaaattccccacaanantnccnancccgggagccnnaaaanggtaaannccnggggnngccntantgganggnccaacttnccnattaantgncgnnggnccttcattgccccttttccantnnggaaaaccttgnnnggcnnncttnatttannnnannngcccnncccccngggaaaagnngnttggatatntgggncntttcccntncntnntnnttaanannngnccnngnnntnnntnggn

SEQ ID NO: 1682 - DNA, 889 bp, Homo sapiens
  misc_feature 5, 6, 8, 10, 73, 74, 77, 79, 80, 85, 91, 92, 104, 115, 125,133, 136, 142, 164, 189, 196, 202, 302, 378, 489, 500, 506,526, 533, 557, 559, 561, 610, 654, 657, 669, 684, 708, 728,742, 751, 752, 776, 781, 787, 802, 803, 812, 816, 817: n = A,T,C or G
  misc_feature 828, 831, 834, 837, 840, 848, 858, 864, 866, 868, 873, 887,889: n = A,T,C or G
gtggnngnancactactatagggcgaatggaagctcccccgcggtggcggccgcccgggcaggtacttttttnnttntnnttttntttttnngggcaggggcanatggctgtttnttgatccttnagtcttgnttnaattanatcatacttttgccagcgaganatggaaacagaggaagggatctagnagaacgncctganacaggggcaccaagggtcaggctgctggaaggcattggggaaggctaatctccactggaccccccaggcttgctttaacacaggattttggggcttgctncaggcttgtcgctttttttggtatctcctaatcgcaaaaagaagcgtccagcaacaaccaggattccaagcgccgnggccacacccgacttcaaccttggccttttccacctgtttacagcgggactttgccatatctcaactgggtgacaaaagtgctcacagttctgcttacaaaactggacctnggcccgtctanaactantggatccccccgggctgcangaattcnaatattaagctttatcgataccgncnanccttgaggggggggccccgggccccaagtttttgttcccttttagtgangggttaaattgccccccctgggcggaaatcatggggcaataagntgntttcctgggggnaaattgtttttcccnttaacaaattcaccccacataacnaacccgggagcataaaaggntaaaacctgggggngccctatgnnggggacctacccccatttatttgngttgngcctanttgccccttttcaanngggaaaacntttnngccccattttntanatnaancgncccccccncggggaaagngggttntnantgggnccctttcccttccncn

SEQ ID NO: 1683 - DNA, 865 bp, Homo sapiens
  misc_feature 374, 438, 452, 459, 463, 522, 523, 534, 585, 594, 611, 626,660, 663, 683, 684, 702, 718, 733, 756, 762, 764, 767, 771,807, 816, 818, 845, 848, 850, 855, 863: n = A,T,C or G
ctcactatgggcgaattggagctccccgcggtggcggcccgaggtactctgctcaaaatggctggtgctactggtgcactaagttgtgaggaattacctctgctcgggacagaataaaaaatcctaggcctcaaggaaaaactggtggcatccttctgggtcttttcaagtccttgcatctaaaaatcaatcttgacaaaaataaaacaaaaagccacaacaaaagaaagccaaaccaatcccccaccctaaaggaagaaaaaaattgatgtgaaagcccatccacccttctacccaggtgccttatagcaaaggtgactgcagctgtaaagtcaaagctgaatgacagacaaaaatggaggccagacaccacngtctggaggtagctacccttgaattccagaacccagactcttcttggggtaattcttggttttnctgagattaaaatnatccagntgtncactagggcctaggggatcccacccatcagatttttggccaggtcccaggaaataaccnngaccaaatggngacttagaattccaagaacctctggttttccaccttttccccttccttcanattttttanggtttttttccattggnttggggcaccccttngtaccagccggggtggttgggttacctaccaagnaanaatgggcttttttttcccannttgcaatccaaaatgggnggacctggggtaacangggcccaaacccccnttttctttccttgaaccacctcnattaanancgngggngccagggaaaccttttccccccccccttgggccttnttggggccntntccaagggaagggtggacctttggggnaananttttncccccttnct

SEQ ID NO: 1684 - DNA, 847 bp, Homo sapiens
  misc_feature 320, 466, 501, 531, 535, 551, 554, 562, 564, 586, 610, 647,657, 665, 676, 681, 691, 694, 696, 725, 739, 744, 746, 751,757, 759, 762, 763, 792, 798, 801, 803, 819, 827, 840, 843,844, 845, 846: n = A,T,C or G
actactatagggcgaattggagctccccgcggtggcggccgccgggcaggtactcactgctgcaggcagccctgctctgcgtcaacgccatcgcagtgctgcacgaggagcgattcctcaagaacattggctggggaacagaccagggaattggtggatttggagaaagccgggaattaaatcacaagctaatgaaccttattcgatctgtaagaacccgtgatgagaagtgccattgataataagtaaactcaattgcaattgtgttacttttattatttggatgaatatcaagtggagaaaatggagactcagaagangacatgccagtagaaagttattactttggtcattattgggaatatttatatcttagctggctgaccttgcacttgtcaaaaaatgtaaagctgaaaataaaaaccaggggttctatttatctggttttttttaatggtgcacttgnaggttcattccaaagaatcagatctggaaggcagnacctttccagactggaattctgatgctcanggtnatatagttcatgcctnggngagaatgntnaaaggggccagactggggcttnctttttttaaaaaattttctatcncccccttcccagggatgaaaaattttttttcaaaggnttggaaggtncttggacntaacccctganggggnggggggtttnccntnaataaaaattaaaaagggttttttaaaangaatttccccccanaaaangnaaaanaggggnanttnnaaaatttttttttagcccccgggtaaaantttggncantngccccccctttaattnaaattttnccccctttggggnggnnnng

SEQ ID NO: 1685 - DNA, 861 bp, Homo sapiens
  misc_feature 305, 365, 383, 415, 424, 438, 443, 455, 459, 463, 472, 474,485, 488, 507, 535, 553, 557, 562, 567, 594, 619, 635, 637,646, 659, 663, 674, 678, 694, 714, 718, 725, 726, 728, 741,743, 745, 757, 759, 760, 781, 788, 810, 813, 822, 834: n = A,T,C or G
  misc_feature 838, 858, 859: n = A,T,C or G
tactatagggcgaattggagctccccgcggtggcggcccgcccgggcaggtacagccacggtcacacactacccacagcgcggtggcaggcccgctgctcaatgaggagacgatcacaccatttcggagataagcagtgccattgtgtctggaggagaagagagaattaaaaataaaatagaattcaacaaaaaatatatatagaaaaaaaagaaaaaaaaaaccaaacagaaagtacctcggccgtctagaactagtggatcccccgggctgcaggaattcgatatcaagcttatcgataccgnccacctcgagggggggcccggtacccaacttttgttcctttaatgagggttaattgcccncttggcggtaatcatggncataactggttctgtgtgaaattggtattccnttacaattncacacaacattacnagccnggagccataaantgtnaaancctgggggngnctaaatggggnganctaactcccatttaaatgnggttgggcctccttggcccctttttcantcgggaaaaccctgtcgngccnacttnaattnatggaaatcggccacccccccgggganaggcggtttgcctttttgggggccnttttccctttccttgntnattgacccnttggccccgggcntttnggtttgggggnaccnggttttatctttcttntaaagggggggattccggtntttncccaaanntnggggggaaacccngngnaaaaaaattttngnnaaagggccccaaaaggcccgnaacccanaaaagggccctttttgggggtnttntaaaagggncccccccctggngagntttaaaaaaagcccccatgnngg

SEQ ID NO: 1686 - DNA, 484 bp, Homo sapiens
  misc_feature 1, 2, 3, 425: n = A,T,C or G
nnnaggccctaacactacttagggcgaattggagctccccgcggtggcggccgcccgggcaggtactcgtaataaatatgcatccggaaacaagataaaaggctacacctcgtcaggcatcctacaaaaatgtctcaagttttatatactctgcagcatttctgtgcgggggcagaaggggctgttgtgtattttctgaagtgctgtgacaaaaggtccttttcacattttcttttgggaagcatttttgaaattgcttaactataattaaacaacttaagaaaagtaacaccaagctttaaagccatttttgctttgctgtcattggtccttatccaatacagatcaacatatcatccagcacagcccccgcgtacctcggcccgctctagaaactagtggatcccccggggctgcaagggaanttccgatatcaaaggctttatcgattaccgttcgaaccttcgagggggggggccccggt

SEQ ID NO: 1687 - DNA, 476 bp, Homo sapiens
  misc_feature 2, 3, 4, 418: n = A,T,C or G
gnnnaggcccgtatcgctacttagggcgaattggagctccccgcggtggcggccgaggtactctcttcccactctgcggttctgccaagcaccttgcctgggcacttgtgtgtgtgcaagactctacagtgtgttgtctgctgctttttttttttttcttcttctgtttcaattggcagctctgtttcctaaagtggaatgaactgaagatacaaatactaatagaagataaaatacccataagctgaaaaaaagagacagagagcaatcatgttcaatgtcaccatcctgccaacccccactctgtaaaatatacattatcacctactctcagcatctcacttttgacactaaaacttaaaataattttatttaatagggagaatttataattattagtttttatttcaaaaaaaanaaaaataatcccacaaccaggaaaacccctacaactgggttgcaaactcagggctttt

SEQ ID NO: 1688 - DNA, 476 bp, Homo sapiens
  misc_feature 2, 3, 4, 5, 426: n = A,T,C or G
gnnnnaggccctatcactacttagggcgaattggagctccccgcggtggcggccggggaactcatcttctaacttcttcttgagctgaagatacttggacttgtagcctcaagcgccacaataaacgactcggacggcgagagccatggctcggggctgccacatccgctgaggagcggacgcccgggccacactccccgcgtacctcggccgctctagaactagtgggatcccccgggcttgcaggaattcgatatcaagcttatcgataccgtcgacctcgagggggggcccggtacccagcttttgttccctttagtgagggttaattgcgcgcttggcgtaatcatggtcataagctgtttcctgtgtgaaattgttatcccgctcacaatttccacacaaacatacgaagcccgggagcantaaagtgtaaaaggcctggggggtgcctaatgagtggagcctaacttcac

SEQ ID NO: 1689 - DNA, 494 bp, Homo sapiens
  misc_feature 2, 3, 4, 237, 279, 302, 320, 384, 431: n = A,T,C or G
gnnnaggccctatcactacttagggcgaattggagctccccgcggtggcggccgcccgggcaggtacgcggggtggggggggtcctggtctttggcttctcgactcggtcctgtttcgacagcgaacatgtcgcggcctgtcagaaataggaaggttgttgattactcacagtttcaggaatctgatgatgcagatgaagattatggaagagattcgggcccttccactaagaaaanttcggattcatctccccgaagaaagctaaaaaataattaggncgatctggaaagaattcacaggnaagatagtgaggactcanaagcacaaagatgtgaaggaccaatgaaggatgattctcactcagcagaggatagtgaaggatnaaaaagaaagatcataaaaaatgttgccgccaacaaacggcaagggnggcattctaaagcaaccttctaaacaagaagaggggattgctccatgggaaaaaatgtgggcc

SEQ ID NO: 1690 - DNA, 472 bp, Homo sapiens
  misc_feature 229, 241, 258, 298, 374, 455: n = A,T,C or G
aggccctatcactacttagggcgaattggagctccccgcggtggcggccgaggtactttttttttttttttttttttttttggtttttatttttgtggttttttgtttttgttttaacctttgcaaacacgatggtgatgaggaatgccttgccaggctctcccagacacatctgtggttctgggctgtgaatgttaaacacacactgggatagacgaccagggatgangtgttccctatnttctccccgcccaccanttgtcaatgtggcctaaaaaaaggctttaaagggaaaacnaaacttaaaaaaacattgagtttccctgcatttagctgaaacagggatctcgtctgaagggctggaggaagcagcncggatcagccacttgcctcccggcccacggctcgctctagaaactagtgggatcccccggggctgcagggaattcgatatnaagctttattcgatacc

SEQ ID NO: 1691 - DNA, 488 bp, Homo sapiens
  misc_feature 2, 6, 362, 476: n = A,T,C or G
gntagnttgaccacgtatcgactactatagggcgaattggagctccaccgcggtggcggccgctctagaactagtggatcccccgggctgcaggaattcgatatcaagcttatcgataccgtcgacctcgagggggggcccggtacccagcttttgttccctttagtgagggttaattgcgcgcttggcgtaatcatggtcatagctgtttcctgtgtgaaattgttattccgctcacaaattcccacacaacataccgagccgggagcataaagtgtaaagcctggggtgcctaatgagtgagctaactcacattaattgcgttgcgctcactgcccgctttccagtcgggaaacctgtcngtgccaagctgccattaaatgaatcggccaacgccgcgggggagaggccggtttgcgtattggggcgctcttcccgctttccttcggctcactgacttcgcctgcgctcgggtncgttcggctgcg

SEQ ID NO: 1692 - DNA, 481 bp, Homo sapiens
  misc_feature 2, 3, 4, 7, 9, 16, 47: n = A,T,C or G
gnnnagntnacgccgnatcgactactatagggcgaattggagctccnccgcggtggcggccgaggtacgcggggactgctaggggcttaagcggagggagtcgagccagcgtcgccgcgatggtgttgttggagagcgagcagttcctgacggagctgaccagacttttccagaagtgccggacgtcgggcagcgtctatatcaccttgaagaagtatgacggtcgaaaccaaaacccattccaaagaaaggtaccttgcccgggcggcccgctctagaactagtggatcccccgggctgcaggaattcgatatcaagcttatcgatacccgtcgacctcgagggggggcccggtacccagcttttgttccctttagtgaagggttaattgcgcgcttggccgtaatcatggtcataagcctgtttcctgtgtgaaaattgtttaatcccgctcacaattttccacacaacaattaccgaa

SEQ ID NO: 1693 - DNA, 498 bp, Homo sapiens
  misc_feature 2, 3, 4, 7, 9, 24, 467: n = A,T,C or G
gnnnagntnacgccgtatcgactnctatagggcgaattggagctccccgcggtggcggccgcccgggcaggtactgcacgggcgtcaattccatgccagagggaggatgaattagggatgaaaaggaggagataaggaagagttacaaggtgggcaaacccagggtctagtatcgtttctcaggggaaattcgctgtcggggaaaatggagcactcccacatctattaaaaaaatgaaagaaaatcctgggggtgcatcttgctctctgtaggacttggcctcatgtgaattcccaggaagctgtgtttccagaggcatgctctttccaaacccatcctgctgctctcagtgttctcctgcttcgcctaatgtggacagatctcaccgggatgcccaccgttgggaagtcgggaagtgaataagtggggccttgcccggggggttgcccggggggaggtgcctgggntattaggaggaagacttaagtggaaaatgct

SEQ ID NO: 1694 - DNA, 492 bp, Homo sapiens
  misc_feature 2, 4, 5, 276, 415: n = A,T,C or G
gngnnacgccgaatcactactatagggcgaattggagctccaccgcggtggcggccgcccgggcaggtacgcggggggggttgtggagtggatgctttggcaagatggcggggagcggcgtccgccaagttacttctaccgccagcaccttcgtgaagcccattttcagtcgggacatgaacgaggccaagcggagggtgcgcgagctctaccgcgcctggtattcggggagggtgccgaacacttgtgcaccaatttccaagcttggacatcacntgtgaaaatgggacgggataaagtccgagaaaatgtttatgaagaaatgcccatgtcacagaccccagggtggtttgatcttctggtcattaagggaaagatccgaactggaagaaaacaattaaagtaatggaaagcnagcgggacacattgtttattgccggttcttccatgaaaacaagaagccgccaagggccaaagggattttcctatcca

SEQ ID NO: 1695 - DNA, 479 bp, Homo sapiens
  misc_feature 2, 3, 4, 16, 19: n = A,T,C or G
gnnnaggcttgccganacnttactatagggcgaattggagctccaccgcggtggcggccgctctagaactagtggatcccccgggctgcaggaattcgatatcaagcttatcgataccgtcgacctcgagggggggcccggtacccagcttttgttccctttagtgagggttaattgcgcgcttggcgtaatcatggtcatagctgtttcctgtgtgaaattgttatcccgctcacaattccacacaacatacgagccgggagcataaagtgtaaagcctggggtgcctaatgagtgagctaactcacattaattgcgttgcgctcactgcccgctttccagtcgggaaaacctgtcgtgccaagctgcatttaatgaatcggccaaccgcgcgggggagaggcggttttgccgtattggggcgcttctttcccgctttccttcgctcacttgacttcgcttgcgctcgggtccgtttc

SEQ ID NO: 1696 - DNA, 491 bp, Homo sapiens
  misc_feature 2, 3, 4, 9, 23, 390, 479, 483: n = A,T,C or G
gnnnaggtnaccgcgatcgactnctatagggcgaattggagctccccgcggtggcggccgaggtactttaatttgttcttatcttttttcccttccttttaatcgcctaggctattttcctgcattattcatttttaaacttttaaaatccagagtgggttaaaatgcttattttactcaaagactgtttacactgcactgttgaaacatcagattatcaagttcaagtctttaaggggaaccatctcttttgacatcttaaaatttaactcgaaaagagtttctttaagctgttaggtgtaaaaatattttaactttcttatttcaaattttaaaaactcatacatatcagttcatgtattcatttcattcagtaagtatgcaatgtgncatatacctgtatacccagggcattgtgcctaaagtgcctgagggcttctaagggtgaaacaccaattttttttgggtctttaggatangttngagaatta

SEQ ID NO: 1697 - DNA, 483 bp, Homo sapiens
  misc_feature 2, 3, 4, 5, 24: n = A,T,C or G
gnnnnaggtacgccgaatcgactnctatagggcgaattggagctccccgcggtggcggccgtggtaggtaagcatctgcagctcatctggaatactacagtcttgaggacgtgctttccatacgccctgtgtctggtctacatgcaggcgtgtcttgtgataaatcctgttacgggcatgtgtgtgtgagggcttctatgtggccccccgactccattttattagagtttggcataagttgactccattttggttccagcaactttcacataaggaaactgaggctcagagaagtcaagggacttgcccccaggtcccactaacactgtgcagtggagtgatgcaaaccccagttttcccagtggatggaagctgctgtgggttgaagtgcaagggttgccggtgttgaaaccagagggggtggtgccagaagaccaagtgtggggaatgtgaagaagccccgcgttacccttcgggcccgct

SEQ ID NO: 1698 - DNA, 482 bp, Homo sapiens
  misc_feature 2, 3, 4, 5, 10, 24, 107, 126, 143, 190, 218, 249, 265, 322,358, 363, 371, 395, 420, 454: n = A,T,C or G
gnnnnaggcncgcctaaacgactnctatagggcgaattggagctccccgcggtggcggccgaggtacttttttttttttttttttttttttcaatgttgttgtctanacttctatgtagttttaanactgctaatatgtattnaatttccaggtttttttagttttctatttcttttcacataacgtttnttcttgcttcagtcatataatatcctgngtatctgaatattaatcttcattttggtttngaaacatttttttttnttaccaaatgaagaggttgattgatttggagttttcctggacagtgatatacatganctttttttaaaaaaagaaacatgatgttattagggngtaancttttttnttttggaagtaataaaaatacctnaaaaatgtattcatcttaggtggtnccttctaaaaaggggtctaggactgggctgggcncagcccattagaaagtccaactaggagg

SEQ ID NO: 1699 - DNA, 493 bp, Homo sapiens
  misc_feature 2, 3, 4, 9, 11, 14, 18, 21, 23, 30, 417: n = A,T,C or G
gnnnagagncnccncacnaantnactatanaattggagctccccgcggtggcggccgaggtacagctttacattctataaacttgaatttcaaacttcaacacccctcactaatcagccatccgaagaaaggatattgaacataagcaaatcctcttggacggcgagtgtagaaatcaagtggaacatacacatcaactataggaccataacgaccaaattcacgcccgcaaggtcttcagacctggtgtcgtcggccacgttcctgacgaacagagacgtgttggggggacgcaggtagcgggacatggcggcggcgtgtctcggccgctctagaactagtggatcccccgggctgcagggaattcgatatcaagcttatcgataccgtccgacctcgaggggggggggcccggtnacccagcctttttgttcccttttagtggaggggttaaatttgccgccgctttggccgtaaatcaatggtcataagc

SEQ ID NO: 1700 - DNA, 483 bp, Homo sapiens
  misc_feature 2, 3, 4, 5: n = A,T,C or G
gnnnnaggccgccgctatacgactactatagggcgaattggagctccccgcggtggcggccgcccgggcaggtacgcgggggacaccctagatcccaagatctccaaggatttggtggcatacccactccagcacacagaagcatgaggttcatgactctcctcttcctgacagctctggcaggagccctggtctgtgcctatgatccagaggccgcctctgccccaggatcgggggaacccttgccatgaagcatcagcaagctcaaaaggaaaatgcaggtgaagacccagggttagccagacaggcaccaaagccaaggaagcagagatccagccttctggaaaaaggcctagacggagcaaaaaaaagctgtggggggactcggaaaactaggaaaaaggatgcagtcgaaggatcttagaaaaggcgttggggtaaaagggagcccgttcccatggacgttaaaaagacgtccttgac

SEQ ID NO: 1701 - DNA, 492 bp, Homo sapiens
  misc_feature 2, 3, 8, 18, 368, 370, 382, 391, 434, 470: n = A,T,C or G
gnnagtgncgtatcactncttagggcgaattggagctccccgcggtggcggccgcccgggcaggtaccagcacctctgagaaagaaaaagccagacaaacatgaggataacagaagaagttgggcaagcccggtttatacagaagcagatggaacattttcaagactctttcaaaagatttatggtgagaatgggagtaagtccatgagtgatgtcagcgccagaaagatgttcaaaacttgcgtcagctgcgttacgaggagatgcagaaaataaaatcacaattaaaagaacaagatcagaaatggcaggatgaccttgcaaaatggaaagatcgtcgaaaaagttacacttcagatcttgcaaantnaaaaattaaaanggtaccttnggcccgctctagaaactagtgggatcccccggggctggcaggnaatttcgatatcaaggcttttatccggataccgtcngacctcgaggggggggggcccc

SEQ ID NO: 1702 - DNA, 457 bp, Homo sapiens
  misc_feature 396, 419, 444: n = A,T,C or G
ggcgaattggagctccaccgcggtggcgtgccagctgcattaatgaatcggccaacgcgcggggagaggcggtttgcgtattgggcgctcttccgcttcctcgctcactgactcgctgcgctcggtcgttcggctgcggcgagcggtatcagctcactcaaaggcggtaatacggttatccacagaatcaggggataaacgcaagaaaagaacatggtgagccaaaaggccagcaaaaaggccaggaacccgtaaaaaggccgcgttgctggcgtttttccataggctccgcccccctgacgagcatcacaaaaatcgacgctcaagtcagaggtggcgaaacccgacaggactataaagataccaggcgttttccccctgggaagctccctcgtngcgctctcctgtttccgaccctnccgcttacccggatacctgtccgcnttttctcccttcg

SEQ ID NO: 1703 - DNA, 487 bp, Homo sapiens
  misc_feature 2, 3, 4, 9, 13: n = A,T,C or G
gnnnagtgnccgnatcactactatagggcgaattggagctccccgcggtggcggccgaggtacttgcgtccgctacagtatgtcaatcgcttgccccagcacagctgtcattcttctctacagaagagcttctcctcatcaactggggatggttacagttcttcctaaaaaaggatggctgctctttttctaaagaggttaacactacaaactgtaaagtctgaaaataggttgcatttagatgttttggtaaacacatccttgcaaaagacagcaccaagcacagttgtcccctattgcttctgccccaagactctccttcctaattcatgcaaaagcctttagtacctgcccgggcggcccgctctagaactagtgggatcccccgggctgcagggaattcgatatcaaaggcttatcgatacccgtcgacctcgagggggggggcccccggtacccagctttttgttccctttaagtggagggg

SEQ ID NO: 1704 - DNA, 541 bp, Homo sapiens
  misc_feature 2, 3, 11, 22, 23, 28, 34, 38, 46, 99, 247, 269, 302, 307,313, 317, 328, 332, 342, 343, 364, 380, 382, 408, 418, 432,435, 440, 461, 468, 485, 487, 491, 510, 518, 522, 528, 540,541: n = A,T,C or G
gnngtgcctancactacttacnntaagncgaatngganctccccgnggtggcggccgcccgggcaggtacgcgggaccaacaatgttagacaaatgtanccaaaccaaaaaatacacatgttctatgaatccatatatgcaaggttcacaataggtgatagtagctactcttttgggaaggagtgaggaaaggactgacagagtattgcagagggggctccgggcgtttgtaattctatttcccagnggcaggtgttggtttgcatgancatgttcacttttgtgggaattcatttggctgnaactnaatttnccanaattatttatnaatnaaaaatgatnnttattccattgggaaccctgncaggatagggaaagangntggggcaacttaaaaacaattgggtngggccgaatncttaccaattttanttnttaanaatattggatccccggggggngtggttngaaccttggcccctctnanaaantaaaggggatttccccccngttttggngggnatttcnatttttaaaacnn

SEQ ID NO: 1705 - DNA, 506 bp, Homo sapiens
  misc_feature 2, 3, 4, 8, 40, 118, 129, 155, 165, 166, 168, 176, 197, 213,219, 220, 234, 254, 260, 262, 343, 345, 349, 356, 364, 399,404, 419, 446, 463, 478, 480: n = A,T,C or G
gnnngggnccctaacactacttagggcgaattggagctcnccgcggtggcggccgcccgggcaggtacttttttttttttttttttttttttttttttttttttttttttttttttgnaaaaaaaattntgtttattctccttccccttccctangaaatgggcnnanaggggttnaggggccaactttggctgacnctgcaacaaaaactanttaaanncttggaaaaaactngggagggcacaagggttttnggactnanggggtcacaggttgccccctttgaggacagggctccccccggaaggaatgcaaaaaataatgaaaggatgaaatgcccaantncctngggccgntttaaaantaggggatcccccgggctgcagggaattcgatatnaagcnttatcgataccgtcnaccttgaggggggggcccggtacccancttttgttccctttagngagggttaattgccncnccttgggcgtaaaaatgggcaataag

SEQ ID NO: 1706 - DNA, 507 bp, Homo sapiens
  misc_feature 2, 3, 5, 11, 13, 16: n = A,T,C or G
gnngnggccgncncancactactatagggcgaattggagctccccgcggtggcggccgaggtaccaaatggacaagcctgcagaagcaagtcaggcaactggctcaattttgtattcagctcagagtcatttttttgacctgaataaagaaaatcctgtatcccaaaaagaaattcaaagccttgtgaaactccactgacactaattagtggcggacgaggggacaagaagttggtcactagtggaacacaagcatatatcatgtcattcttcagaaaagcaacaactggccagagttcttcacctcctatcaggagtccataaatggatgttttattgatgcgtgaacagctatcacgactctcaacgaagtctttatcatcatccaataaatctaagttcaaagagcagtgctttaagaaagggaccatcttcagggaacaggcacataacttgctccattggaaagacttctggctcggtttttcaacagttggatacccgtct

SEQ ID NO: 1707 - DNA, 497 bp, Homo sapiens
  misc_feature 2, 3, 4, 6, 331, 434: n = A,T,C or G
gnnngngcctatcactacttagggcgaattggagctccccgcggtggcggccgcccgggcaggtacatttacaaactttggaaacaagtttgatggtgtctttaaaagttaagcatacacttaccataggatccagccatacttccccggagagaagaaagtgtgcctctcagcaaggcttacacacgaatattcacagcagctttatttataaaagcttgaaaatggaaaaccggcccaaccgccatccacatgcaaatggataacccacggtgatgtgttccatccatgcccgaggaataccattcagccataaaaaggaacggatcanaaacgcatgcaacagtgtggaccaatcttaaaatagttgtgtggactagaatgagccagtccaaaacagaatcctgaaactcccctactctgctaacgggagnaaagtggatttccatgtaccttggccgctctagaactagtggatcccccgggctgcagggaat

SEQ ID NO: 1708 - DNA, 503 bp, Homo sapiens
  misc_feature 3, 169, 170, 202, 215, 243, 248, 253, 335, 345, 362, 364,385, 387, 392, 410, 415, 438, 441, 445, 446, 448, 450, 454,455, 463, 469, 485, 496: n = A,T,C or G
gtncgtgccctaacactacttagggcgaattggagctccccgcggtggcggccgaggtactctttttttttttttttttttttttttgcagactttggcaacatattgagagcctgaattaacactgaatcctatgaaaacagttttgtaattataatgctgaatcagnnttatgtgtaattacaccaatatgctactctgngaaacatttcttnagggaaaatgttcccgggtatattttgnatttntgccnctgccttttataaaaggtctcattatttcatgaactttaatttaccaggccaagtcctaactgtaggcttaggcaagggccnacaatgcacntctttttcaaggagctncntctgtgctctgagaaactgtntnttgcncaggtggaagaaacaggntcggnaagttcagttctgcttaatggcncantttnngngngggnngggtttcncaattnccctaaaaggggggcnccttaactttntttttcc

SEQ ID NO: 1709 - DNA, 478 bp, Homo sapiens
  misc_feature 2, 3, 4, 7, 8, 12: n = A,T,C or G
gnnnggnncggntatcactacttagggcgaattggagctccccgcggtggcggccgaggtacagagcaaagctcaccacaggtagcagcagaaccttgagcccccacatcctgctgatggaaatctgttgtctggcttcgtttcggcagcaaagtgtgggcacaccatcaggggtgctagatttattccatcgggattgcgccccgcgtacctgcccgggcggcccgctctagaactagtggatcccccgggctgcaggaattcgatatcaagcttatcgataccgtcgacctcgagggggggcccggtacccagcttttgttccctttagtgagggttaattgcgcgcttggcgtaatcatggtcatagctgtttcctgtgtgaaattgttatccgctcacaattccacacaacatacgagccgggagcataaagtgtaaagcctggggtgcctaatgagtgagctaactcacattt

SEQ ID NO: 1710 - DNA, 491 bp, Homo sapiens
  misc_feature 235, 284, 328, 350, 384, 405, 441: n = A,T,C or G
tgtgcctatcactacttagggcgaattggagctccccgcggtggcggccgcccgggcaggtacgcgggggactcggaaaactaggaaaagatgcagtcgaagatctagaaagcgtgggtaaaggagccgtccatgacgttaaagacgtccttgactcagtactatagctgtaaggagaagctgagaaatgatacccaggagcagcaggctttaccgtcttcaagcctaaaacctngtaaaaaaaaaaaaaaaaaatttaaaacagctattaaactgaaagcatntgttaaaaaaaaaaaaaaaaaaaaaggtacctcggccgctctanaactagtggatcccccgggctncaggaattcgatttcaagcttatcgataccgccnacctcgagggggggcccggtncccagcttttgttccctttagtgagggttaattgcncgcttggccgtaatcatggtcatagctgtttcctgtgtgaaattgttatc

SEQ ID NO: 1711 - DNA, 483 bp, Homo sapiens
  misc_feature 4: n = A,T,C or G
gggnggccgcgtatcgactacttagggcgaattggagctccccgcggtggcggccgaggtacgcgggcatccttaggagacctgagtcctcaagaaaaccctcttctggaagtagttgctccttcagaacgttttacagaaaacactaatgtaaaagacacaactaatgtaaaagacacaaaagagatgtgttcaaagacacatctctgaaaacacaaactacaatcatcctcctgaggcagtttccgctgggactgcattcaacttagaaccaactgttaaacaaactgagacaaaatgggaatacaacaatgtgggcattgacttgtcccctgagcccaaaagcttcaattacccattgctctcgtccccaggtgatcagcttgaaattcagctaaccgagcagctacggtccctcatccccaacgaggggatgtgaggaaagttcatgtctcatgttatctggaccttgaaaatgggaat

SEQ ID NO: 1712 - DNA, 539 bp, Homo sapiens
  misc_feature 2, 3, 5, 8, 9, 23, 418, 498, 519: n = A,T,C or G
gnnantgnnccatttggacgcantttactactatcgggcgaattttagctccaccgcggtggcggccgcccgggcaggtactgctgtggacctcttgaaacaaattgtaaaagcaagacttgaaatgatcaaactgtttgacagcaacttgactgccttcctgaacaaaactcaaagttatagggacacaaaaatatgcagcaaccaacaaagtaaaattcacagtgtctggttttctatcaaacttttgagccacactaaaacagggaaatgaccataatgaagggataaatcaatcatgttaaactgactcagagctgacacaggtgtaagaattaccagaaaagaacattaaatcagtttttataactgtatactgtacatcccccaaattaaggtagacaaaaaaaaagatatnaaaatattcaagctaacatttaaagaaagaaaaactgggggctttgggtgctgtggctcatgcctataattttcccagcnattttttgggggaggcctatnccagggagggattcacttgg

SEQ ID NO: 1713 - DNA, 533 bp, Homo sapiens
  misc_feature 2, 3, 4, 5, 6, 12: n = A,T,C or G
gnnnnngcctancactacttagggcgaattggagctccccgcggtggcggccgaggtacgcggggagatatttactttatgaattaaagctggagtcagtgtcagcccgaaggctgaaggaaaaagagcaacagatccagggagcattcacctgccctgtctccaaacagagccaccaaggaggagcaggggagcgacggccgctctagaactagtggatcccccgggctgcaggaattcgatatcaagcttatcgataccgtcgacctcgagggggggcccggtacccagcttttgttccctttagtgagggttaattgcgcgcttggcgtaatcatggtcatagctgtttcctgtgtgaaattgttatccgctcacaattccacacaacatacgagccgggagcataaagtgtaaagcctggggtgcctaatgagtgagcctaactcacattaattgcgttgcgctcactgcccgctttccagtcggggaaacctgtcgtgccagctgcattaatgaatcggccaacgcgc

SEQ ID NO: 1714 - DNA, 504 bp, Homo sapiens
  misc_feature 2: n = A,T,C or G
cntaatacgactactatagggcgaattggagctccaccgcggtggcggccgatgcacagagtagagccttgtgcaggtaaatttctcatcccagcactctgcagtggtatttttttcactgagggagagcaagaaagccaggctaggcgtccccgcgtacctgcccgggcggccgctctagaactagtggatcccccgggctgcaggaattcgatatcaagcttatcgataccgtcgacctcgagggggggcccggtacccagcttttgttccctttagtgagggttaattgcgcgcttggcgtaatcatggtcatagctgtttcctgtgtgaaattgttatccgctcacaattccacacaacataccgagccgggagcataaagtgtaaagcctggggtgcctaatgagtgagctaactcacattaattgccgttgcgctcactgcccgctttccagtcgggaaacctgtcgtgccagctgcattaatgaatcggccaacgcg

SEQ ID NO: 1715 - DNA, 717 bp, Homo sapiens
  misc_feature 5, 8, 9, 12, 19, 22, 23, 25, 33, 34, 40, 184, 204, 205, 210,216, 219, 223, 225, 226, 228, 229, 236, 238, 239, 241, 243,246, 248, 250, 254, 255, 256, 258, 261, 268, 270, 276, 277,279, 281, 287, 290, 291, 292, 293, 295, 296, 297: n = A,T,C or G
  misc_feature 298, 299, 300, 302, 303, 304, 305, 307, 309, 313, 318, 319,320, 321, 322, 323, 325, 330, 331, 335, 336, 338, 340, 342,345, 346, 348, 357, 359, 360, 372, 376, 381, 385, 386, 395,402, 415, 416, 418, 428, 429, 436, 437, 446, 463, 465: n = A,T,C or G
  misc_feature 466, 467, 468, 472, 473, 474, 486, 489, 491, 494, 495, 498,499, 503, 510, 511, 514, 519, 520, 522, 524, 526, 529, 530,534, 539, 542, 543, 544, 545, 546, 551, 552, 553, 555, 557,558, 567, 570, 571, 574, 575, 576, 578, 584, 604, 605: n = A,T,C or G
  misc_feature 612, 617, 618, 619, 623, 625, 626, 629, 631, 635, 638, 650,652, 664, 665, 668, 670, 671, 675, 677, 680, 685, 693, 699,700, 710, 711, 715: n = A,T,C or G
acaanatnnatnataaacntannantgattgannacaacnaagtaaattgacctatactactatagggcgaattggagctccaccgcggtggcggccgcccgggcaggtacttttatttttttttttttttttttttatttttttttttttttttttttttttttttttttttttttttttttntttttttttttttttttttnnaaaantaaaanaantttnanngnnaaggggncnnananggnanantttnnnanaanaaaaaangncccctnntnanaaaaanatnnnnannnnnntnnnngntnaatncccannnnnngnttttnnaaanngnananganncnttttttggnannaaaaaacctttngaanccccncctnntctattttnatttatnaaaaaaaaaaaanncncttattaacnnaaagtgnngaaaaaaanaaaaaaagatagagggngnnnnaacnnncatttaaatganatntnggnnggnncatnaagtatnnccntgggnntntntnatnntacnaaaanaannnnntcctnnncnannaaaaaaatnggnnggnnncncccccnttataaaataaaaataaagnngtgcatntaacnnntacngnnggngnaaanggngaaataaatatncnccccctccctcnnttnannaaangnganaaatntccccctnaaccgnnccctccccanngtanaa

SEQ ID NO: 1716 - DNA, 780 bp, Homo sapiens
  misc_feature 4, 5, 6, 8, 9, 10, 13, 18, 20, 25, 27, 34, 35, 37, 40, 41,42, 110, 118, 126, 139, 152, 171, 176, 177, 178, 179, 189,196, 203, 208, 225, 227, 232, 237, 257, 261, 262, 264, 265,266, 268, 277, 282, 295, 296, 306, 326, 354, 356, 358: n = A,T,C or G
  misc_feature 369, 380, 391, 402, 410, 413, 419, 424, 429, 433, 443, 454,459, 464, 480, 484, 499, 505, 507, 517, 525, 535, 541, 552,583, 595, 620, 624, 655, 662, 664, 666, 722, 723, 725, 737,751, 754, 757, 759: n = A,T,C or G
tttnnntnnnttntatananaattntntattctnntnagnnnaggcctaacactccttacgactcactatagggcgaattggagctccacccgcggtggccggccgcccngggcatgnacgctggngatgggaaactgnggaaacatgcatnagcgccaatcctttgaatnttccnnnngaaacactgntggacanattctantgctnaaaaaaaacacgttttngntttgnagaanaccattggatgggggatttncagnntnnncnaccggcaanccctnaacttccttgaannatgtcccttnatgtgcacgctgggccattnctttccgacttttttcttccagcccgancntntccccagaaancaatcacaatnattcacctgcnaaaaaaataantcaatttngcnattacnattgngaatncaanggcccaggtnggggaaaaatngttanaaagnaaaaaggcccccttgnaaanccttttattgggggnggttcnanaaaattgganaaggggtnggaaattttnaaaagngggccttgganaaggggaaaaattaaggccaaaaaattttcnaccccttaccancaagattttctttgggaaaggtatngggnttttggccacctgaaataaccaacaccttgnggggganantngggagggcaaaaaaaccagttcttttttgaaaatatttcccaaaacaaccgccaanngncttggttggaanaccttaccccctanttnggntnaggaataattttggccaccct

SEQ ID NO: 1717 - DNA, 665 bp, Homo sapiens
  misc_feature 17, 31, 295, 296, 297, 298, 299, 300, 301, 302, 303, 305,306, 307, 308, 311, 312, 313, 314, 315, 316, 317, 318, 319,321, 322, 323, 324, 325, 326, 327, 328, 329, 330, 331, 332,333, 334, 335, 336, 337, 338, 339, 340, 341, 342, 343: n = A,T,C or G
  misc_feature 344, 345, 346, 347, 348, 349, 350, 351, 352, 353, 354, 355,356, 357, 359, 362, 363, 364, 365, 366, 367, 368, 369, 370,371, 372, 373, 374, 375, 376, 377, 378, 379, 380, 381, 382,383, 384, 385, 386, 387, 388, 389, 390, 391, 392, 393: n = A,T,C or G
  misc_feature 394, 395, 396, 397, 398, 399, 400, 401, 402, 403, 404, 405,406, 407, 408, 409, 410, 411, 412, 413, 414, 415, 416, 417,418, 419, 420, 421, 422, 423, 424, 425, 426, 427, 428, 429,431, 432, 433, 434, 435, 436, 437, 438, 439, 440, 441: n = A,T,C or G
  misc_feature 442, 443, 444, 445, 446, 447, 448, 449, 450, 451, 452, 453,454, 455, 456, 457, 458, 459, 460, 461, 462, 463, 464, 465,466, 467, 468, 469, 470, 471, 472, 473, 474, 475, 476, 477,478, 479, 480, 481, 482, 483, 484, 485, 486, 487, 488: n = A,T,C or G
  misc_feature 489, 490, 491, 492, 493, 494, 495, 496, 497, 498, 499, 500,501, 502, 503, 504, 505, 506, 507, 508, 509, 510, 511, 512,513, 514, 515, 516, 517, 518, 519, 520, 521, 522, 523, 524,525, 526, 527, 528, 529, 530, 531, 532, 533, 534, 535: n = A,T,C or G
  misc_feature 536, 537, 538, 539, 540, 541, 542, 543, 544, 545, 546, 547,548, 549, 550, 551, 552, 553, 554, 555, 556, 557, 558, 559,560, 561, 562, 563, 564, 565, 566, 567, 568, 569, 570, 571,572, 573, 574, 575, 576, 577, 578, 579, 580-665: n = A,T,C or G
gagctttcgtaatacanactcactataggtnttgaattggagctccaccgcggtggcggccgaggtactttttttttttttttttttttttttttttggttttttacatcaccatgcaggttacattcatcttccactggaatgactagagccctccaggtagtagcctgactacagaagaacacaggactggctcctgggggcaaacaggctctcttgcttctcctcattggccatgccttagcatggttcctccctatctcctactcaagcaggtcctcagtacctgcccggnnnnnnnnnannnnatnnnnnnnnnannnnnnnnnnnnnnnnnnnnnnnnnnnnnnnnnnnnncnaannnnnnnnnnnnnnnnnnnnnnnnnnnnnnnnnnnnnnnnnnnnnnnnnnnnnnnnnnnnnnnnnnnnannnnnnnnnnnnnnnnnnnnnnnnnnnnnnnnnnnnnnnnnnnnnnnnnnnnnnnnnnnnnnnnnnnnnnnnnnnnnnnnnnnnnnnnnnnnnnnnnnnnnnnnnnnnnnnnnnnnnnnnnnnnnnnnnnnnnnnnnnnnnnnnnnnnnnnnnnnnnnnnnnnnnnnnnnnnnnnnnnnnnnnnnnnnnnnnnnnnnnnnnnnnnnnnnnnnnnnnnnnnnnnnnnnnnnnnnnn

SEQ ID NO: 1718 - DNA, 1008 bp, Homo sapiens
  misc_feature 1, 2, 10, 11, 17, 18, 21, 22, 23, 33, 34, 39, 41, 42, 51,52, 55, 56, 61, 62, 70, 71, 76, 77, 78, 80, 81, 82, 83,84, 85, 86, 87, 88, 91, 94, 97, 101, 147, 153, 161, 170,191, 222, 244, 251, 284, 290, 303, 304, 308, 326, 328, 350: n = A,T,C or G
  misc_feature 352, 362, 374, 378, 422, 432, 440, 445, 468, 492, 499, 500,520, 527, 545, 550, 551, 557, 572, 576, 589, 597, 612, 615,621, 624, 630, 638, 644, 649, 650, 660, 672, 674, 678, 682,685, 686, 698, 700, 703, 704, 719, 720, 723, 726, 727: n = A,T,C or G
  misc_feature 736, 746, 749, 751, 754, 757, 758, 761, 767, 774, 780, 782,786, 787, 788, 799, 804, 814, 816, 817, 827, 831, 852, 858,860, 866, 867, 868, 873, 875, 884, 891, 892, 893, 897, 898,900, 901, 913, 917, 920, 921, 926, 931, 934, 937, 949: n = A,T,C or G
  misc_feature 955, 958, 962, 963, 970, 983, 989, 990, 994, 1005, 1007,1008: n = A,T,C or G
nncctaactnntacatnngtnnnttccatttcnnatatntnntactgtganngannaatannatgaatcnntaatnnntnnnnnnnnnatngtncangctnttaggcgaatggactcctgcggtggcggccgaggtacttttttttnttattntttttttnctattggcnctagagggggtagagggggtnctatagggtaaattcggggccctattttcanagatttttaggggaattaattntaggacnatgggcatgaaactgtggtttgctccacagatntcacantcattgacccgtnnttantacccccggtctgagtantnggtggaaagtggtttggtttanangtccgggaanttgcatcttttntttnagcctaatgtggggacagctcatgaagtgcaagactgtctttgngatgtaaatnatttatancgaanggggggcttcaattcggggaagnacctgcccgggcgggtcgctctanaaactanngggatccccccgggctgcangaaatcnatatcaagcttatcgatnccggnnaccctngagggggggcccggnaccnaacttttgttccntttagtgnagggattaatttgcnccncttggncgnaaaatnataggtcnataagnctggnntcctgtgcanaaaaagggtccncnattncaanttnncccacatacttncngannccggggagcataaanngtnaanncccgggggngccctaatgngtnangcnaanncanattaanttggagntgcggntnactnnnccctttccaantccgngaaaaccttntnngccaacctgnaatntaatgaattcgcccaaccccnggggananaaggcnnntttgntntaatgggcncccttcnnnattnntnngctaattgatcnttanccnngaacnttcgnatnggnggcaaggggatncagacntanttanngggcggntaatatggggttntcccannaatnatggggtttangnn

SEQ ID NO: 1719 - DNA, 666 bp, Homo sapiens
  misc_feature 31: n = A,T,C or G
gagcttttcgtaataccgactcactataggnttgaattggagctccaccgcggtggcggccgaggtacatcgggcacattaccacaccaggcgagggtcattcgcttccttgtctgtcacctggggtttatgacaatctcggtggtagagattatggcactcctgacattctactaattgattgccagatgccaccatcatttgcctacaaacaacgcaggccaatcccatctccatggcaaaatcatcagcactggtctcctcaaaactggaaaggtcagccataggtaaatccttgctactttggacagtaatgggagatgactgtgtttctggtttctccaatctaggtttctttggaatatcaactccttcagtgatgtctgatttcattttatcagcaggtctcttttcagcttccttctttaccttttcagttgtgaggaccttgccattattattaccagaaggaagactggatgatattttgggctcttgcttaatggaaatgttttttgtgcttgaaattttgggtggctccacatccttttgagatggacggtaactggaatcaatgccccgagccaaagattcatcaagccccgcgtacctgcccgggcggccgctctagaactagtggatcccccgggctgcaggaattcgata

SEQ ID NO: 1720 - DNA, 757 bp, Homo sapiens
  misc_feature 2, 14, 22, 27, 34, 35, 46, 159, 230, 271, 291, 329, 369,371, 375, 377, 383, 384, 386, 414, 415, 459, 469, 474, 479,491, 520, 524, 535, 539, 543, 547, 550, 552, 561, 566, 570,571, 574, 579, 604, 605, 609, 617, 622, 624, 633, 636: n = A,T,C or G
  misc_feature 637, 639, 643, 644, 645, 646, 649, 652, 653, 659, 660, 661,663, 681, 682, 685, 691, 693, 694, 696, 697, 699, 704, 706,721, 722, 726, 732, 734, 737, 742, 744, 745, 746, 752, 757: n = A,T,C or G
tntttttttttttntttttttnttttncttgtgnncgcgcgtaatncgactcatatagggcgattggagctccaccgcggtggcggccgcccgggcaggtacttttttttttttttttttttttttttttgggattgtgaaaactaatcagtcctatanactttcctcttgtggatgtgcagacacagcctaatagaaaagggctatttggttgggagaattcccagganaaatatctgtttccatccaatgaatataaaaccccagcttnttctggtgtttttccctganaagggaaaaataagagcactggttaagtttgggaccgnatccttcttctcttgggacttctcttcctcttaattatgncncctngngtaatnntncaggcctgtttatttcccgtctgcaaanntaatgtagggaaggagcttatcttattcagcttttttttttttntcacaagatntttgntaagnatgccttatccnaattagtatggtattgccagcaatagtcngctnagggggcctancctntganacanaantntagaaatcnttgcnaccnngangtggnaatttgggggaaaaccggggccttnnttanactttttngaaanancttcttcanaannanattnnnntcnccnnagaccnnnantttgtctcttccccaaannttntttctnannannanatgtntntagagttctttaccnntgtntttttngnatnggacnannnggaaangatan

SEQ ID NO: 1721 - DNA, 682 bp, Homo sapiens
  misc_feature 4, 7, 10, 19, 20, 25, 27, 30, 311, 312, 315, 321, 322, 323,328, 330, 333, 339, 341, 346, 348, 351, 353, 358, 363, 366,368, 374, 380, 382, 385, 389, 391, 392, 395, 398, 402, 405,408, 410, 416, 418, 424, 430, 431, 435, 436, 439, 444: n = A,T,C or G
  misc_feature 455, 456, 462, 485, 487, 508, 510, 518, 519, 528, 544, 545,546, 555, 556, 562, 569, 570, 577, 578, 581, 586, 587, 588,589, 592, 593, 594, 595, 596, 597, 598, 599, 600, 601, 602,603, 604, 605, 606, 607, 608, 609, 610, 611, 612, 613: n = A,T,C or G
  misc_feature 616, 620, 621, 624, 626, 630, 633, 634, 635, 636, 637, 638,639, 640, 641, 642, 643, 644, 645, 646, 647, 648, 649, 650,651, 652, 653, 654, 655, 656, 657, 658, 659, 660, 661, 662,663, 664, 665, 666, 667, 668, 669, 670, 671, 672, 673: n = A,T,C or G
  misc_feature 674, 675, 676, 677, 678, 679, 680, 681, 682: n = A,T,C or G
tttnttntantttgaaatnncgcgnanacnactcctatagggcgattggagctccccgcggtggcggccgaggtactagttttttcacgcctgcaatcttggagtctaggttgccttgtctctcctatttttaaataagtgaaatttgggagattgtaaaatctgtaaagtttgttttgtgaaaataaaatgttcacagtagaatttttctctgaaaaaaaaaaaaaaaaaaaaaaaaaataaaaaaaaaaaaaaaaaaaaaaaaaaaaaaggcccttttttttttttttttttttttttttttttccggnnttnaaaaannnaaaancnccntttttngnaaaangnggnanaaaanctttnccntntttgtncagggnanttncccntnnaanttncccnttnaancngggggngnaaaaancagccnntttnnccnttttntttgttaaaanntttttnaaaaaaaaaaaaaaagggggggntntttttaaaaaaaaaaaaaaangnaatcctgnntaaaacccncaaaaaaaaacttaannnggaccaaannggggtnctttttnnttaacannaanccccnnnnctnnnnnnnnnnnnnnnnnnnnnnttngggnnaanangggnttnnnnnnnnnnnnnnnnnnnnnnnnnnnnnnnnnnnnnnnnnnnnnnnnnn

SEQ ID NO: 1722 - DNA, 836 bp, Homo sapiens
  misc_feature 2, 3, 7, 10, 17, 75, 80, 120, 121, 129, 162, 173, 176, 180,188, 189, 195, 199, 205, 210, 216, 222, 234, 236, 237, 240,255, 257, 258, 326, 337, 387, 413, 441, 506, 534, 558, 605,626, 641, 643, 644, 649, 656, 689, 714, 717, 721, 729: n = A,T,C or G
  misc_feature 731, 737, 746, 767, 775, 786, 806, 813: n = A,T,C or G
annttangangtatacnactactatagggcgaatcggagctccccgcggtggcggccgaggtactttcttttttnttttnttttttcgcaaaataatggaagatccttttgaaacttacnntcttcagntatcaatattactgcattatggagctagtgcantcctgcatagnctngccnaaatgacnnggcacnatanaaaaanttaangtcttntatgancaagacaagtcntnnaanataatttaaggcctngnngtgaattaatcagtctaatttaaagctgaagaataaaccataaattatccacctgaaatgcacagcantatgctttttnagcttctgttctggggacaaaataacaaaaacaactcttgcttatggttngtgtattacaatccttctggacctgnaggagtgaaagtcaattccatttttcanctgttcatggaagatttcaggactgttttaacccgttgcgtggaatgccaaactgtggacactgngcagatgctagtgctcgaaaggcttctncttctaaatgagggtgagactgantcatggacttccaccctggtgtttccattatgttggctggcttggtngctgttccagtttttcccatntttacccccaagttntnnaaatnccttgcncggcgggccgttttaaaactagtggaacccccnggctgcaagaatttcaatttaagcnttntttntaccggcntncctcgnggggggggnccggacccaacttttttcccnttaaggangggtaactgcncccctgggcgaaataagggncatatcnggttcctgggtgaaatggtaccc

SEQ ID NO: 1723 - DNA, 835 bp, Homo sapiens
  misc_feature 2, 4, 5, 6, 7, 10, 571, 583, 608, 637, 647, 681, 684, 708,716, 725, 734, 738, 773, 792, 793, 796, 809, 828, 833: n = A,T,C or G
angnnnngcncgcgtaatacgactcactataggggcgaattggagctccccgcggtggcggcccgaggtacgcggggatctcacagaaaatgaccaggtgtggctccagcttcccaatgccgagtcaaatggcctatactcctctgagtatgtccactcctctttctcaggattcctagtggctccaatgtgagtacctgcccgggcggccgctctagaactagtggatcccccgggctgcaggaattcgatatcaagcttatcgataccgtcgacctcgagggggggcccggtacccagcttttgttccctttagtgagggttaattgcgcgcttggcgtaatcatggtcatagctgtttcctgtgtgaaattgttatccgctcacaattccacacaacatacgagccgggagcataaagtgtaaagcctggggtgcctaatgagtgagctaactcacattaattgcgttgcgctcactgcccgctttccagtcgggaaacctgtcgtgccagctgcattaatgaatcggccaaccccgcggggagaggcggtttgcgtattgggcgctntttcgctttctnggttactgactcgctgggcttcggncgttcggctgcggcgaacggtatcaactnactcaaagcnggaataccggttttcacagaatcaggggataacncangaaaaaacatgtgagccaaaaggncaccaaanggcccgaanccttaaaanggcncggttgctggcgtttttcataaggtccgccccttnagaaggattacaaaaaatnnacnctcaagtaaaagnggggaaacccccagggctnttaanat

SEQ ID NO: 1724 - DNA, 846 bp, Homo sapiens
  misc_feature 2, 3, 411, 414, 422, 423, 428, 430, 538, 567, 615, 624, 647,669, 671, 710, 723, 729, 731, 733, 743, 757, 768, 771, 782,789, 809, 814, 833, 838, 846: n = A,T,C or G
cnncgtatcgactcactatagggcgaattggagctcccccgcggtggcggccgaggtacgcggggagtcctgaaagggtgggcaaatgtgcagctctccctcagggtcgtgggatctgggtccaacagtctggcctttcagccttcaggctgttttaggcttgaagtttcgtgtggctgatcaaagaaagaaggcatacgcagatttctacagaaactacgatgtcatgaaagattttgaggagatgaggaaggctggtatctttcagagtgtaaagtaatcttggaatataaagaatttcttcaggttgaattacctagaagtttgtcactgacttgtgttcctgaactatgacacatgaatatgtgggctaagaaatagttcctcttgataaataaacaattaacaaanaanaaaaaaannaaaananagtacctgcccgggcggccgctctagaactagtggatcccccgggctgcaggaattcgatatcaagcttatcgataccgtcgacctcgagggggggcccggtacccancttttgtttcctttagtgagggttaattncgcgcttggcgtaaatcatggtcataagctggtttcctgtgtgaaatngttatcccncttcacaatttcccacaacatancaacccggggagcctttaagtntnaagccctggggtgcctaatgaggggacctaacctcccanttaattgcgttgngcctantngnccctttcaancgggaaacctgtcntgccccctggnttnattgaatcggnccacccnccggggagaaggcggtttcnttttnggcccttttccgctttctngttantgactcgn

SEQ ID NO: 1725 - DNA, 837 bp, Homo sapiens
  misc_feature 4, 7, 384, 434, 583, 607, 620, 659, 679, 686, 713, 718, 725,747, 748, 763, 766, 774, 777, 781, 790, 791, 793, 796, 799,823, 828: n = A,T,C or G
gcgncgnatacgactcactatagggcgaattggagctccccgcggtggcggcccgcccgggcaggtacccgttcctccagtgcccagagatgctctccgcaccaagccacagatgtggaggaggcaggtagggggtcaaagaggggtggtatcggttattcaggacttttttttttcttaaatatcctgtgcttctttcaatcatttgaaggtaaaaccaggtcctgtgagtggtaaactgatttttggttcttatgaaggtattattttctgtgtagatatttgttaacttggtgtccttgcagggtagacgatcagcgaagctttctgttccaccatcttgctcctctcattttagacctaatatattgactataagtgttnccctctggaagtattgactatatctgcatcaatactaagaaaataaaatntaatcatagagactgaaacatattaatatatatataatgggtgttaaactaatggtaattgaaataaatgataagtcttaatgttagagggttagactgaccctaatttataatctgctttcggttcttgctgttgggtcattatttcntattaccatgttggaccaaagggngaaattgtctggntatgccatggccctattttcaaggaaaccttggagccantttaaaaataatataaaccntcatcantttacccttttcccgaaaattgggttngaaanaaatctnatttttcttttttgggcaattnngggaaattaaaaccngantttttttnggnggancctggcccnntnaantangggatccccccggggggaggattnttttnaacctttcc

SEQ ID NO: 1726 - DNA, 844 bp, Homo sapiens
  misc_feature 2, 3, 4, 5, 8, 556, 588, 598, 634, 635, 636, 678, 692, 707,714, 715, 747, 763, 783, 786, 787, 790, 801, 808, 843: n = A,T,C or G
gnnnngcnccgtatacgactcctatagggcgaattggagctccccgcggtggcggccgaggtacaccagaacttaaagtataataataaaaaataaagtattacagaacatggtcaattatattaaaaagtagattaattaatgtccatatatacattttttggtggaaatcaaacataatgaaaactatttcacataattaatattttgtttattttttacttattaatttattgcagagatgggagtcttgctatgttgcccaggctagtctcaaactcctggcctcaagtaatcctcccacctcaatcccccaaaatgctgggatttcaggaacatgccactgcactttattagtgttacctgtcataaagttaattactcataattttatttcagtatatatatatatatatatatatacacacacacaccatacacaccatagtagaataaattaattatattttctacaaaaattattttcaatcttttttggtacaatgagtatcattttcacatcttatcttaaaaatgcctggagaaggattcaggnccctgccaatttggtttctttgccaaaaatcnggtccttgtnttcttaccacttaaatttttttccaaaaattatttnnncttaagattatcccatttgtttaaatttttgaaaggtaaaantttcaaaaaaaggnccccggcaagggttnaatggannttttgggggggaaaagggccaaataccggaanccttttggttaaaaangcctttcccccttttaaggnaannaanccccaaaccantttaaantttttcaagggggggccttttttttttccatgggng

SEQ ID NO: 1727 - DNA, 879 bp, Homo sapiens
  misc_feature 12, 20, 21, 599, 666, 682, 745, 749, 783, 818, 819, 846,861, 862: n = A,T,C or G
aagccgtatacnactactannactcactatagggcgaattggagctccaccgcggtggcggcccgatggcctcttctaggcagatccgtctacaactggtaacagcaaccatatcgagtttctctttatcacaataccacgaggcttatcatcattgccatgcctttagtaacatcacttttttaaatgggcattttcacaatgtaatctgcaacctacatataacatgcactctttattgaaggccgtacctgcccgggcggccgctcgagagacacattacctgaatgagcaggtgaaagccatcaaagaattgggtgaccacgtgaccaacttgcgcaagatgggagcgcccgaatctggcttggcggaatatctctttgacaagcacaccctgggagacagtgataatgaaagctaagcctcgggctaatttccccatagccgtggggtgacttccctggtcaccaaggcagtgcatgcatgttggggtttcctttaccttttctataagttgtacctcggccgctctagaactaagtggatcccccgggctgcaggaattcgatatcaagcttatcgatacccgtcacctcganggggggcccggtcccagctttttgttcctttagtgaggggtaattgcgcgcttggcgtaatcatggncatagctggttcctgngtgaaaatggtaatccgttcacaaattccacacaacataccaagccgggaacataaaagtgtnaagnctgggggggcctaatgagggagcctacctcacanttaatggggtgggcttacttggccgcttttcaagnngggaaacctggcgtgccaactgcattnatgaatcggccaccnnccggggagaggcggttt

SEQ ID NO: 1728 - DNA, 871 bp, Homo sapiens
  misc_feature 2, 4, 16, 99, 103, 156, 280, 394, 432, 434, 437, 519, 712,718, 733, 767, 768, 780, 783, 799, 815, 818, 819, 823, 831,837, 841, 855, 856, 869, 870: n = A,T,C or G
gncntataccacgtantacgactactatagggcgaattggagctccaccgcggtggcggcccgaggtactttttttttttttttttttttttttttggnttanagacagggtctcacaatgttgcccaggctggtcttgaacaatcctcccacctntgcctgccaagtaactgggattataggaatgagccatcatgcctggctcaaatatactccattataatcatatgggaccctgtcctatatggggtctgtcactaactgaatcatcgttatgcancacatgactgctatgtgtatatatgtatttatttataagaaataaatattacataccagaattttacagttttgtcctctaactctttggaatgctaaaggacagacacttgtntttttaaatacccccattgtacctgcccgggcggccgntntanaactagtggatcccccgggctgcaggaattcgatatcaagcttatcgataccgtcgacctcgagggggggcccggtacccancttttgttccctttagtgagggttaattgcgcgcttggcgtaatcatgggcatagctgtttctgtgtgaaattggtatccgcttacaattccacacaacatacgagccgggaagcataaaatgtaaagcctggggtgcctaatgagtggactaactcacattaattgggttgcgctcactggccgcttttcanatcggnaaacctgtcgtgccnactgcattaatgaaatcggccaacccccggggannaggcgggttggntanttggggcttttttcgnttcttagttaaatganttnnttgncttggtcnttcggnttgnggaaaccggtttannttaattaaaaggnng

SEQ ID NO: 1729 - DNA, 862 bp, Homo sapiens
  misc_feature 1, 7, 94, 191, 251, 278, 371, 453, 458, 474, 480, 488, 498,530, 533, 542, 588, 593, 635, 644, 646, 648, 650, 659, 668,671, 722, 749, 754, 762, 763, 768, 792, 793, 799, 800, 807,814, 819, 833, 842, 846, 854, 855, 857, 860: n = A,T,C or G
ntgcgcnctaatacgactactatagggcgaattggagctccccgcggtggcggccgaggtactttttttttttttttttttttttttttttttnacaactccttaaaaaggtaaaagccatcgcttgagccagggaggttgatgctgcagtgagtcatgattgcaccactgcactccagcctaggtgacanagccaggccctgtcttaaagaggaaaaaccattcctagctcacggggccacatgccatantttgctgacccctgaattcaacctttntgcttttctgcaagctgcctctctctcgaaatgttttgacatctagcttgctgacacctttgattcaagcctggcgcagcgggactggctganctcacctgcccgggcggccgctctaaaactagtggatcccccgggctgcaggaattcgatatcaagcttattgataccgtcnacctngaggggggggcccggnacccancttttgtnccttttagtnagggttaatttgcccctttggcgtaaacaatnggncataagctntttccctgtggtgaaaattggtttcccgctcaacaaatttccacanaaaantacgaacccggggagcataaaagtggaaaaaccctggggggngcctaatgngngngnctaactcanattaattgngtnggcctcacttgcccgttttcaaattgggaaaacctttggtgcccacttggnttaattaaattggccacccccgggganaaggngggttttnnttttnggggctttttccgtttcttggttnnataaannccctggncttggtngttcngttggggggaaggnttttcctcnattnaagggggnnantcngg

SEQ ID NO: 1730 - DNA, 819 bp, Homo sapiens
  misc_feature 11, 34, 60, 64, 94, 103, 156, 174, 176, 189, 192, 194, 204,208, 219, 233, 234, 237, 265, 274, 287, 290, 292, 318, 325,336, 344, 354, 368, 369, 374, 385, 388, 389, 393, 395, 397,405, 413, 422, 423, 427, 457, 470, 475, 483, 500, 508: n = A,T,C or G
  misc_feature 510, 512, 516, 518, 522, 531, 552, 564, 566, 576, 578, 590,593, 598, 599, 600, 602, 607, 611, 630, 631, 633, 635, 660,664, 670, 674, 676, 682, 691, 698, 699, 700, 702, 703, 707,710, 711, 718, 721, 723, 727, 728, 732, 737, 738, 739: n = A,T,C or G
  misc_feature 745, 748, 749, 750, 752, 754, 755, 757, 765, 768, 769, 775,784, 812, 815, 816, 817, 818, 819: n = A,T,C or G
tactactatanggcgaattggagctccccgcggnggcggcccgaggtaccacgataagangcangccaaagtattgtcatgaaaggtagggaangagcatggngaggcctcagtggaaaggtacaaccgcatcatccactcccagaagttccggangggggcagggaagggccncnttggaggccgttngangngaggatgccncccnggacaagtgcncctgggaagcctgnngantgtatgtcccatcagtagcttgaaatanaccctcccncttgctaaaggtnatngnaaaaatgttcctgccccggcgtggcntctatanctaattggatnccccgggntgcatgaatnttaatttgatgctnntaaantccgtgacctntanngggngncntgttcccngcttttgntccctttannaaanggttaaattgccccttcgcgtaattatggncattagctgtttnctgtnttaaaatngttttccgctccaattncacacacntntngagncngggngcataaagngtaagcctggggggccttatnaggggagctacntncattaattgngntgggctcactgnccnttttnnntnggggnaccngtagtgcccatgtattttnngnantcgcccaccccccccgaaaaagccntttnttaatnggancnttttcncttcttggnaaatgannngnngccntgnnagtttangtngngggnngcgngttannntccccnaannngntnntnggattttnccnnattttnggggaaaancccgaaaaaaaacatttggccaaaagcnccnnnnn

SEQ ID NO: 1731 - DNA, 865 bp, Homo sapiens
  misc_feature 4, 5, 6, 189, 557, 620, 736, 744, 771, 786, 787, 791, 798,804, 812, 814, 829, 837, 863: n = A,T,C or G
aggnnnccgtatcgactcactatagggcgaattggagctccaccgcggtggcggccgaggtactggaggttggctgtggtgtgggaaacacagtctttccaattttacaaacgaacaatgacccaggactctttgtttattgctgtgatttttcttccacagctatagaactggtccagacaaattcanaatatgatccttctcggtgttttgcctttgttcacgacctgtgtgatgaagagaagagttacccagtgcccaagggcagtcttgatattatcattctcatatttgttctttcagcaattgttccagacaagatgcagaaggctatcaacaggctgagcaggcttctgaaacctggcgggatgatgcttctgcgagattacggccgctctagaactagtggatcccccgggctgcaggaattcgatatcaagcttatcgataccgtcgacctcgagggggggcccggtacccagcttttgttccctttagtgagggttaattgcgcgcttggcgtaatcatggtcatagctgtttctgtgtgaaattgntatccgctcacaattccacacaacatacgagccgggagcataaaagtgtaaaagcctggggtncctaatgagtgaagctaacttcacatttaattgcgttgcgcttacctggcccgctttccagttcgggaaaacctggtcgggcccaacctgcattaaatgaaattgggccaaccccncggggaanaggccggttgcgtatttgggccgcttnttccgctttccttgnnttanttgactngcttgngcttcggncngttcggtttccggcnaaccggtnttaagctcacttcaaagggggggaantt

SEQ ID NO: 1732 - DNA, 850 bp, Homo sapiens
  misc_feature 391, 399, 402, 403, 406, 408, 413, 418, 420, 421, 425, 431,435, 436, 438, 441, 446, 448, 449, 451, 454, 458, 461, 462,463, 467, 468, 474, 475, 476, 490, 491, 513, 516, 519, 521,523, 526, 535, 544, 554, 562, 581, 586, 589, 595, 597: n = A,T,C or G
  misc_feature 601, 602, 609, 626, 628, 629, 632, 636, 641, 649, 654, 656,659, 660, 662, 667, 669, 684, 689, 699, 700, 701, 708, 709,711, 714, 717, 724, 725, 729, 731, 742, 753, 770, 771, 785,791, 799, 802, 822, 823, 825, 832, 835, 839, 845, 847: n = A,T,C or G
tactatagggcgaattggagctccaccgcggtggcggccgcccgggcaggtactagaggtaaatttttaataacatactaatgtgaaatggtatctggtttttattcagactttttgtgagcatattcttatagacactagaaataaatacatagaaggagactttgagcacaagggagaagagagttattagcactcctgaggcctctggaatgctgcttttctatccaggtatcttgcttgctaccagcagaattgactggtattggttctcactggccagggagcctctgctctgttcctggaatataaggcttttattcaggagcaaatcattgatagtaactttgctttatctagccattgacttcagcaaaaaaaaaaaaaaaanaaaaaggnccnnggncngtttnaaacnannggancccccnggcnngnagnatttnanntnaancttntcnnnaccnncgaccnnnagggggggcccggnncccaacttttggtccctttaanggnggntnantgnccccctggngtaaacaanggcaaaactngtttcccnggggaaaaattggtatccngttcnaantttccncncaanntcccaanccgggaagcattaaagngnnaangccnggggnggcctaangaggngnacnnanctcananttatttggcggtggnggctnaacttggccnnnttttcanncnggnaancctggtnnggcnanctggatttaantgaatccggcnacccccgggggagaggnnggtttggcgatttngggggncttttccnttncttggttaaatgacttcgtnngnctcaggnatnttcnggttgngngaa

SEQ ID NO: 1733 - DNA, 849 bp, Homo sapiens
  misc_feature 37, 140, 239, 678, 749, 759, 762, 765, 767, 774, 789, 796,812, 816, 840, 848: n = A,T,C or G
tatcgactactatagggcgaattggagctccaccgcngtggcggccgaggtacgcggggattgtgtgcaaaatcagagaggggtgcaagatcctgatttttcaggagttcaagcgacaatggcagcccaatacggcagtntgagcttcaaccccagcacaccaggggccagtttggtgagagggcattcagtgctccccagaccaggctgcagggagggcctggaaggcaagagcccanaaattcccaattgagaattgtgttagtgggtaaaaccggagcaggaaaaagtgcaacaggaaacagcatccttggccggaaagtgtttcattctggcactgcagcaaaatccattaccaagaagtgtgagaaacgcagcagctcatggaaggaaacagaacttgtcgtagttgacacaccaggcattttcgacacagaggtgcccaatgctgaaacgtccaaggagattattcgctgcattcttctgacctccccagggcctcatgctctacttctggtggttccactgggccgttacacttgaggaagagcacaaagccacagagaaagatcctgaaaatgtttggagagagggctagaagttcatgattctcatattcacccggaaagatgacttaagtgacaccaatttgcattgactacttaagggaagcttcanaagacatttcaaagaattgatggacattttcggtgaccgcttcttgtgcgtttaaacaaacaaggcaacanggcgctgaancangangncccaaangggcacagtttgctngggcctngatccaaccgcgtggnggangggaaaacaaaggaaaggctgttncacttatnt

SEQ ID NO: 1734 - DNA, 868 bp, Homo sapiens
  misc_feature 13, 24, 28, 29, 35, 38, 40, 41, 46, 54, 57, 67, 172, 174,180, 181, 186, 190, 191, 231, 352, 427, 437, 545, 551, 554,578, 680, 703, 709, 710, 722, 725, 740, 748, 762, 773, 783,788, 799, 806, 808, 811, 825, 854, 857, 866, 867: n = A,T,C or G
taggatacttttntacgactactntacnnctatanggngnntcggngcgtccancgnggtggcggcncgcccgggcaggtactttgggaggccaaggcaggtggatcaactgaggtcaggagtttgagaccagcctagctaatgtagtgaaatcctgtctctactaaaaatncnaaaatnngctgngtgnngtggtgcatgcctgtaatctcagctactcaggaggctgangcaggagaattactggaactcaagaggcagagactgcagtgagccaagatcgtgccatggcactcctgcctggacaacagagcaagactccatccttaagctccctgacttgctgctcgtnctttctctggcaaaatctcatcttggatgagccccgacttcgtgtttgctcaatgacaccactcacctgaaccanaaaaaaaaancaaaaagtggtcagaagatatcatcataaattcaaattatttacataaaaaattggccctaaatggtttcagaaatcaattaaaagttttggttttttcaaaaacatnattttnttnaaaaaaccccaacgtgtattaaanccattttttctatggtcttctaacaattatttcaaccttcttcttaacttgatatcttggccaaatcactcaaaagagaaaatatttttccaattaaggcangaacccgaccatttttcccttancctgannaaaaataatatnccncaaggatgccccccncttaaccntttttttgccttanttattttcaanaaaaaagttnccttnggcccttttanaaattantnggntcccccgggctgcncggaatttcaattcaagcttattcgattnccngccaacctnng

SEQ ID NO: 1735 - DNA, 857 bp, Homo sapiens
  misc_feature 572, 724, 755, 770, 776, 791, 806, 835: n = A,T,C or G
agccgtatcgactcactatagggcgaattggagctccccgcggtggctctgtaatgcggcgtaagaagaaaactggctcccaacagaagcagaaaagagaagcgaaaagcaataatacagactgtcacctctagggtttatgctgtcactaggatacatctttagcattctactctgcttagaaataaagcacaagaagataaagtattatggaaagcaattgccctattgattatttcctaggtgtctaaatcacaatcatttaagctaattatacaccagcatatgatatctaaccagagaagaaaggtcttacccacgtgtgctcagaatcatgctgctatgaaatgcccgagtttgggttcctttttataagtaagctctgtaatgccaaacttcttttctttatacatagtgagggtaatcacagggagtcagagcttaggaaataatccacaactttagtatcctcttcaaatgtcttgctttatggtcttgtgtataagccaggatactccaaaatttcttttaatcaagacttgtttccttaaatatcacctaagttttattgnttcttaccattcctctttaaagaggatctttcctaataattctttttcacccttacaccgggaatcaatagcccagtgaagcataattcattcagtagggcataaagcccctgttccatgggccccctggtgggcaattaaccatatcctgnggactgggttccaatcaggggctggctcttncatattatcggccanggcaancccactggctgggtncctcggccgctctanactagtggatcccccggctggaggaatcnattcaacttattcgatcccgcc

SEQ ID NO: 1736 - DNA, 881 bp, Homo sapiens
  misc_feature 2, 6, 19, 58, 62, 63, 65, 68, 73, 77, 80, 81, 85, 87, 89,101, 147, 169, 180, 189, 217, 220, 233, 239, 241, 246, 252,261, 263, 269, 288, 314, 338, 342, 358, 361, 365, 383, 410,414, 434, 438, 443, 455, 462, 465, 466, 467, 479, 480: n = A,T,C or G
  misc_feature 485, 550, 551, 558, 570, 588, 595, 597, 598, 626, 644, 654,657, 666, 684, 688, 698, 702, 704, 706, 724, 730, 732, 734,736, 759, 773, 775, 800, 805, 816, 817, 825, 835, 858, 863,874, 875, 877, 878: n = A,T,C or G
gngccnatcgctactatanggcgaattggagctccccgcggtggcggccgaggtactngcanntnctnttttntttnttnnctcncntntgggaatatctngaatttaaactagtaattcagctcctcttcagcactcacaatatantctgttgccaatgcctgatganacacatagctnatgaccatngcacttctctttttttccatggttcgcnttnaggaggtaatttncttcancnactanaggatntccttcctnancaattnaaagaaatattcggtcaantgatttttaaataaaaaacggttctnaccttctaattgtccatttatttnatcnatcacttttggaggcncancctngggtaaacacacatgctnctgtgaaacagtctcacagagactctnaaantcccaagactttcttcatantccntttgnttggattctggnggggagnatnnnatatgctctcannggttngttcattcttcaaatccaaagggctttatttggaacaaacttttgctttcaatgggcaggcctcnnaaggcanatggccttcttnggggggctctggctttgnaaggtgngnngggcccttcaattcttaagggtttaagntgggaaaaaaaaactttnattccccagntangccttcaanaagaccattttttaaccngggngcccttttcntttntngngaaaggtttaaaattcangcaccntntntnccttttaaattgcccattcatgnaagccattcctttngnaggggaacccctggggtaaaccccnatccntttgggaaaanngtttccanaaacttttanaaccccagaactttttttaaggnccttngggttggattnngnnggg

SEQ ID NO: 1737 - DNA, 891 bp, Homo sapiens
  misc_feature 1, 2, 6, 71, 73, 92, 95, 105, 119, 157, 196, 217, 224, 247,255, 267, 270, 287, 306, 313, 372, 376, 377, 383, 394, 398,401, 452, 462, 485, 516, 517, 534, 539, 572, 579, 584, 607,619, 624, 631, 645, 652, 658, 685, 708, 720, 729, 738: n = A,T,C or G
  misc_feature 741, 757, 764, 783, 789, 796, 813, 842, 844, 853, 857, 864,876, 882, 884, 885, 886, 887: n = A,T,C or G
nnccgnaccactactctacggcgaattggagctccccgcggtggcggccgaggtacttggatttttttttntntttttttcctattgatgtnatnttattgccgncgtaaataaggagnaggtaaaacattttgtgctttaacaagtgaggcacagnttaaaagttttaaacagcaatataaaaatacagtacagngcataaataaataatatatcnccacttntagtcgaattttgaaaccctcantgtaaatnataacttcactngantggggaggcacaaggtncatgtgctaatgttctgtnaatccanaaaatcatatcacataagatcaatcaggaattaaagaaatcaaattaatcacacttggngttnnctaaantaagaataggncaanatncctgtttccaagttatcctgggtatataaaaagcttctcttgcaatcatanaaaaagtttngaaagggttcattgaagaaagcnccttgcatttcagatgacctttaaatatttnngggggcttttttatatnaaganctttaacaaggtatatatgcccctgtatatttngaataanatatnggatgaaaagggggcccatacangcctcaagagtngtgcncccatcnagaaatatttttanggggatnccgggntcttttaaattttgaatattcaaagtntttcaagttctaccaaagttttntgaatccctctnggatgtttncttagaaantcntaattttcatagttangaaaccngggttttttaaaaaggaantgccgnttttttnaaaacaacccggttccntgcccgggcgggcggttttaaactagggnancccccggcntgcnggatttnaatttaaccttnacaaancnnnnacct

SEQ ID NO: 1738 - DNA, 869 bp, Homo sapiens
  misc_feature 5, 15, 17, 36, 61, 111, 146, 188, 249, 266, 302, 417, 574,627, 644, 669, 676, 706, 711, 724, 749, 761, 792, 799, 838,843, 849, 858, 867: n = A,T,C or G
agccntaacgctaancnactactatagggcgaatgnagctccccgcggtggcggccgaggnactttattttttttttttttttttttttttttggagaaggagtttcgctnttgttgcccaggctggagtgcaatggcgcgatctntgctcactgtaacctccgcctcctgggctcaagcaatttttntgcctcagcctcctgagtagctgggattacaggcgtgtgccaccactcccggataattttnttttgtatttttagtanaaatggggttttaccatgttggtcaggctggtctcnaactcctgacctcaactgatccacctgcctcggcctcccaaagtgctgggattacaggtgtgagctactgtgcctggcccgaagatttcatatttataagaagagagaataattntctttaaaccaaagtttaaaatatcaggagaaaacataataaaagcatcattatgaaagtatctaaatctttcattttaaattacaacttaccatataaggaatattctgcttcctgacctgtgtcactctcactggaaagttgatgtgaggctggngggttaaagtgttacttaaaagattgaccaactgataaaactattggtgctgnaactacattgctgctgntaagtaacactggatgttgacaaantcactgntgaatgtaatacctggcccgggcgggccgntttanaaactaagggaancccccgggctgcaggaattcgatantcaacttattcnatacccgcgaccctcgaggggggggcccggnaccccancttttgttccctttaatgagggttaattgccccctggcnaaaanatgggnaaaactggnccttggggnat

SEQ ID NO: 1739 - DNA, 852 bp, Homo sapiens
  misc_feature 1, 2, 4, 578, 581, 621, 647, 653, 693, 701, 713, 718, 735,757, 761, 774, 802, 810, 827, 849: n = A,T,C or G
nncncgtaatacgactactatagggcgaattggagctccccgcggtggcggccgcccgggcaggtaccaaagagggcataataatcagtctcacagtagggttcaccatcctccaagtgaaaaacattgttccgaatgggctttccacaggctacacacacaaaacaggaaacatgccaagtttgtttcaacgcattgatgacttctccaaggatcttcctttggcatcgaccacattcaggggcaaagaatttctcatagcacagctcacaatacagggctcctttctcctctacaaatccaatgtaggccattgtatttttgcagtgagcgcagttgaattcttctgggtgccaagatttccccagtgccactaagaatggtcctctgacagaagaaaaagaggccaactaagtttgagaataaaatttctagagttagcctggatatggacctcttttatgcaatgtccaaccaattaaatacttgctcaattttccttcttaaggactgaactcatgggtgttgggtgttgtaaattcacagagggactctgcattgatgtccccgcgtacctnggncgctctagaactaagtggatcccccggctggaggaattcnatatcaagcttatcgataccgtccanctcganggggggcccggacccaacttttggtcccttaatgagggtnaatggccncctggcgtaatntgggncatagctggtttctggngggaaatggtatccgttacaantccncacacataccganccggggcattaaagggtaaagcctgggngccttaanggggggcctacctccanttaattgcgttgggcccactgnccc

SEQ ID NO: 1740 - DNA, 888 bp, Homo sapiens
  misc_feature 51, 455, 566, 572, 612, 657, 666, 667, 676, 733, 735, 780,784, 790, 806, 809, 840, 850, 853, 854, 862, 864, 865, 880,883: n = A,T,C or G
gcgcgtatcgactcctatagggcgaattggagctccccgcggtggctctgnaatgcggccgtaagaagaaaactggctcccaacagaagcagaaaagagaagcgaaaagcaataatacagactgtcacctctagggtttatgctgtcactaggatacatctttagcattctactctgcttagaaataaagcacaagaagataaagtattatggaaagcaattgccctattgattatttcctaggtgtctaaatcacaatcatttaagctaattatacaccagcatatgatatctaaccagagaagaaaggtcttacccacgtgtgctcagaatcatgctgctatgaaatgcccgagtttgggttcctttttataagtaagctctgtaatgcccaaacttcttttctttatacatagtgagggtaatcacagggagtcagagcttaggaaataatncacaactttagtatcctcttcaaatgtcttgctttatggtcttgtgtataagccaggatactccaaaatttcttttaatcagacttgtttccttaaatatcacctaagttntattgnttcttaccattcctctttaaaagaggatcctttcctaatnattcttttttcacccttacacggggaatcaatagcccagtggaancataatttnnattcagtanggcattaagcccgctgctccatgggcacctggtgggtgcaattaaacccatataccntntggacctgggttccaatccaaggggcctgggttttccatatcatngtgncaaggnaaccccactggactgngtnccctcggcccgctctaagaactagtgggatnccccggggcnggnnggaattcnanntcaaactttatcaanccntccct

SEQ ID NO: 1741 - DNA, 854 bp, Homo sapiens
  misc_feature 2, 3, 4, 5, 7, 9, 16, 690, 744, 776, 779, 802, 806, 818,820, 827, 834, 848, 851, 853, 854: n = A,T,C or G
gnnnnancncgtatcnactcactatagggcgaattggagctccccgcggtggcggcccgcccgggcaggtaccaaatattagaaaaaacaaacaaaaacggaaacaatccctagtagcattccttggcgtgcaaagtcagcaggaaatgattatccattgacagttttcatgataagtcttggaagcattcaaaaagcagagggaatcatcggggattgttcagattaggttctgtgggatgccttgttcttaatttaactctgagttccaggatttcattccctttataacatctctaacagggtcatgttcaatttagtgcaagtgcaaaatgaaaatgaaatgaaaccaacaaatacattaggagcgaaggctgatcgttaagatctgtagtccccgcgtacctcggccgcgaccagctctagaactagtggatcccccgggctgcaggaattcgatatcaagcttatcgataccgtcgacctcgagggggggcccggtacccagcttttgttccctttagtgagggttaattgcgcgcttggcgtaatcatggtcatagctgtttcctgtgtgaaattgttatccgctcacaattcccacaacatacgagccgggagcataaaagtgtaaagcctggggtgcctaatgagtgagctaactcacattaattgcgttgcgctcactgnccgctttccagtcgggaaacctgtcgtgccactgcattaatgaatcggccaccncccggggagaagcggttgcgtattgggcgctnttncgcttcctgcttaattgactcgnttgncctcggccgttngnttgcggnaacggtntaacttacttaaangcngnn

SEQ ID NO: 1742 - DNA, 891 bp, Homo sapiens
  misc_feature 15, 17, 344, 371, 544, 569, 579, 628, 654, 678, 689, 709,713, 716, 725, 730, 734, 751, 756, 758, 783, 790, 791, 798,807, 813, 814, 816, 829, 831, 836, 852, 855, 878, 887: n = A,T,C or G
atgccgatcactacncnactactatagggcgaattggagctccaccgcggtggcggccgcccgggcaggtacctgttactggatttggctccggggtcctgcaggaccagttcatgccttgtctctcagccccctgcaaacagcacagagcatccagttctgccctggagcctggcactcccactgcactcctctcaagccccaagttttcactggcaaggggacagcatttataggactcttaagtgcatcccctaatcctgtcaatgtctcacctgattccctcggggtccaggacttggtgttccagttgaggtagggctgggcatctggtttctgaaaantgaggtctctggaagtctggggaggtnggccatcgaatcttgaagatgtgcctgctgtcaagcttgtggaacctgctcctcttgtgcccttgctcctcttgggtaaggctcgggcattttttatgaacagaagctgggaggctcctctaagattcaagttttgtttagccacttcaataaaccattgacattcattaccnagagggctgggttttctatggggtnttcctaaaancatccatttttggtcccttcttggcctgactctgggataagaaaatctnctattgctgctcctgagctgaaacanggaaattctttaccgtgggagacnagcacccttcnatattgttcttcaccatttngaanaanttcattagnttttnggangcattccttggaagganggttngnccttgggcttaactggttccagcanagccttnnattaacntcctttaancctttnnangccgggaattttnangcccngcttggggcaacttanccnattgaagggcggttttgcttgtngaaaactgnttct

SEQ ID NO: 1743 - DNA, 658 bp, Homo sapiens
  misc_feature 650: n = A,T,C or G
gtatacgactcactatagggcgaattggagctccccgcggtggcggccgaggtacaagttcctaggcaggtcccagcacactcataataagtgtgatacaacagggttttagtcatgatgttccccgaccacgtagtgtgggtgcagtggaggcatccctcccagggttctccttttaacatggataaggggagtagcaagaacaaagtgatgagtagcatgttcatacccagcatggacagaaaaggctttttcctggggggagaaggctaagcaaagtggcagcttaatagcaaagtaattaatatgacaaggaaaattactggacttcagatttctaaccacatttacttccctgatgatgactcaagcttcggccgctctagaactagtggatcccccgggctgcaggaattcgatatcaagcttatcgataccgtcgacctcgagggggggcccggtacccagcttttgttccctttagtgagggttaattgcgcgcttggcgtaatcatggtcatagctgtttcctgtgtgaaattgttatccgctcacaattccacacaacatacgagccgggagcataaagtgtaaagcctggggtgcctaatgagtgagctaactcacattaattgcgttgcgctcactgnccgctttc

SEQ ID NO: 1744 - DNA, 651 bp, Homo sapiens
  misc_feature 1, 3, 4, 47, 49, 57, 61, 79, 126, 141, 148, 151, 161, 168,182, 190, 192, 201, 204, 211, 212, 220, 236, 239, 249, 287,322, 328, 329, 335, 353, 378, 396, 402, 416, 419, 423, 424,435, 448, 449, 454, 456, 457, 462, 467, 469, 502, 503: n = A,T,C or G
  misc_feature 525, 535, 541, 542, 547, 573, 575, 576, 577, 591, 593, 596,597, 604, 609, 629, 637, 640, 642, 650: n = A,T,C or G
ngnnagggggaacccaccgcggcggcggccgcccgggcagggacgtngngagggggngagnaaacccgcgcaggggctnctgctgagggggcaggcggagcttgaggaaaccgcagagaagttgtnccctctaagaaaganagagatnaanacaactactnaaaaaanatagacaataggcnactaaganantgcttatcnggnaagtttnnaacggaangggaatagcccaaganaanaagagaaaanatgaagacccagaagagtagcaggaggaaggaaaaganaaaaggggcactaaaacatgacggaggggcgagangaagcnnccacanggagaaaaaaaagcatgncaaaagaaaatggagagaaaggacnacagagccccgaaagaanaccaanagaagggcaacgcncanagannaaaaggaaggngaccgaaacagcnnaaagncnnagggnaaaangngggaggcgaccaaaaaaatgggaaggcgaaccnnagaaaaagagaacaaaccgaanggggaagaanagaccnngaaanccatgacgcaagggagaaaccgcganannnaaagcccagggaangnaannaccaaancgcanaccaaaagggaaagaaaaancggggagnggnanggaaaaana

SEQ ID NO: 1745 - DNA, 920 bp, Homo sapiens
  misc_feature 2, 3, 4, 5, 9, 12, 15, 18, 589, 590, 604, 627, 652, 664,685, 687, 707, 710, 716, 742, 753, 765, 775, 782, 806, 826,834, 836, 842, 853, 856, 857, 868, 889, 896, 904, 905, 915,917, 919: n = A,T,C or G
gnnnnatgnttnccnatngactactatagggcgaattggagctccaccgcggtggcagcggccgcccgggcaggtacgcggggacctcaagccatgggcctctgcgaagcgccggcgtgcccacggctaagaaacttcctctttctgctcccgggaacgaaggctgtagcagagaaggccttcaagtttcgagaccagttccagccgcagcccgagcactggtgaccttgaattaagtctaatgttgggattggaagacgcttcagacatccgctgccgccctgggcaagcgaccagctcaaggttaccccacagggacgtgctctggtcccacggtccagtgctcttttgtcggttagttttgtcatttgtaaaataggaacagtagatagtggtaggaaagtggttgtgaaaacttaatagaaagctaagcgccttggtcgggcgcagtggcatgtcacccctgcaattctatcacttttggaggcttgaggcgggccggatcgtttgaacccaggaattcgaaaccagttctgggcaatatgaaaaccccatcttttgcaaataaagtaccttcggccgcttttannaactaagtgggatncccccgggcttgcagggaattcnatattaaaccttattcgataccggncgacccttcganggggggggccccggtacccancntttttggttccttttaagtngangggttnaattgcgccccttgggcggtaaatcntgggcatagcntgttttcctgtngggaaaattnttttccnttcacaatttcacaacaaaaattnccaagcccgggagcataaantggtaaancntggggngccttaatggnggnnactaaactcanattaaattgggttgggcctanctggccnttttccanncgggaaactngntnc

SEQ ID NO: 1746 - DNA, 398 bp, Homo sapiens
tagggcgaattggagctccaccgcggtggcggccgcccgggcaggtaccaggcaggatggagcaggatggtgtgagatttcatcacactactcaggatagtgcacaatctaacacttatgaattgtttatttctaaagttttccatttaatatatttgaaatgaagtagaccctgtgtgtagctgaaactttggaaaggaaaactatggataagggggactactagaatacacttcaataaaatagcattttaacaaaatcctagtgtccgtagagtagttctccatctagctgtccatctttcaaatgtggagagaggtgagatgagggaagaagttatggtcagagaggggagacaggtgtgtgtggtgtggggtgtgcaggtagatacatagctc

SEQ ID NO: 1747 - DNA, 731 bp, Homo sapiens
  misc_feature 2, 4, 5, 7, 8, 11, 12, 13, 15, 16, 17, 20, 23, 26, 29, 30,31, 36, 40, 43, 46, 49, 52, 53, 56, 59, 64, 65, 70, 72,73, 76, 78, 87, 88, 90, 91, 92, 93, 94, 95, 98, 99, 106,111, 118, 122, 141, 142, 143, 150, 151, 156, 159, 193, 283: n = A,T,C or G
  misc_feature 304, 326, 340, 356, 373, 375, 379, 403, 410, 413, 421, 422,429, 461, 465, 469, 476, 482, 504, 505, 510, 515, 520, 527,530, 531, 533, 536, 537, 556, 557, 574, 577, 580, 591, 601,602, 604, 605, 619, 626, 639, 649, 660, 661, 666, 667: n = A,T,C or G
  misc_feature 668, 670, 676, 685, 690, 695, 696, 704, 705, 716, 720, 722,723, 728, 729, 730: n = A,T,C or G
tntnnanntannntnnntcnatnaangannnatatntacnatnacnaanatnntanttnttaanntgaantnnaantnttttaatannannnnnnagnncgggtanaaccnattgctnactntagggcgaattggagctannnggagctnnaccgnggnggcggccgaggtacgcggctaacaagaattcttnaacagcagaaattaacgaaacaacaacctcatctactgattttctggctagagcttatggtgttgaaatggccaaagaatttgttacatnagcaccaaaaccatctgactngtatttatggaacccttctggnaggaaggaatctgngagaaagctggaattntatggggggatttcatntncacnactttcttgcaaacatacattganggctaanccnggaccaannaaaaaancccacgtaccccaaccaatttttgggtttttnttgnaaanggggggncccccnttgggaaaaaaaaaaaacaaannacctnggaanggggngggcccnaanngnggnncccttaaaaaaggccccgnntaaaaaattggccttgnaanccnggggaaatttnccccccaacnnannttttttccaaaganggaattnggccttggccccntttttttttntttttcagggnnggggnnngngaaaanaaaaaaaangggcntttgnncccccctnntttttccaaanaaantnnccccnnng

SEQ ID NO: 1748 - DNA, 971 bp, Homo sapiens
  misc_feature 7, 19, 23, 54, 91, 92, 93, 94, 96, 100, 102, 104, 108, 109,110, 111, 112, 118, 120, 122, 123, 128, 149, 156, 180, 196,238, 242, 250, 256, 261, 290, 297, 327, 344, 364, 386, 397,400, 417, 441, 452, 470, 478, 495, 498, 526, 539, 550: n = A,T,C or G
  misc_feature 551, 582, 584, 598, 620, 638, 672, 676, 683, 699, 709, 742,743, 753, 765, 767, 772, 782, 798, 825, 862, 864, 870, 905,906, 907, 913, 914, 915, 920, 929, 939, 944, 970: n = A,T,C or G
taattangtgcgtccgganaatntgggggaaggccctacccacccccgccgggntggggccgggggcccccgggaaggggttaacctttannnntntccntncntttnnnnntatatntntnnatttnttttgggggaaaaattggttnaaaaaantccttttttttaattttaaaaaanaccaaggttgtggttncttttttcccccaccggggtaagggtaaaaaaagcctttttngggnccacccanttaccnagggntttttaaaaaaaaaaaattaaaattccanccccccnccccatttaaaatttttaatttaccccaanaaaatttttccccttcntttttaattcaaaaaccttngccaattaaccttaaaaagggntgggttttttnttncaaaaaattaaacccanaaattttttttttttttcccccgnctcaaattaanaaaaaaaaaattaacccntggggggngggaaaaaaaaaaaaanttnttggtatttataaaaattaacaacccangggggggtttatnaaggggaaagnnaaaaaaaaagggaaattattttttttttccntnaaaggggggcccanaaaatttttaaaccctttaaangggggggaaattccccanttttttttggggggggaaaaaaaaaaaaaagggntttnggaaagngttctaccccttgggntggggggggnaatttaatttttttttaaaaaaaaaaaaaattnnaattcccaancccaagggtttnanaaccnaaaaaggggnaaattcccaattgggncctttttggggttttcccccttaaccnacgggtttaatttttgggccggggggggccccccaananaacccnccttttttaaaaaggtttgggaaaaaaaggccctnnnaaaaannngggtnggttttttngggggggggntgggnaacctttttttcccctttaacctttna

SEQ ID NO: 1749 - DNA, 958 bp, Homo sapiens
  misc_feature 17, 28, 49, 78, 90, 92, 99, 104, 106, 108, 121, 123, 134,161, 168, 170, 181, 183, 186, 195, 200, 202, 232, 246, 326,346, 357, 430, 436, 447, 479, 495, 502, 529, 537, 545, 577,586, 616, 649, 656, 667, 674, 706, 723, 743, 793, 803: n = A,T,C or G
  misc_feature 825, 853, 875, 881, 884, 925, 930, 937, 944, 956: n = A,T,C or G
tgggggaaggccttccncaaaccccggncgggggtggggccgggggccncggaattaaccccttccaaaccccgggtngggggccttggncnttggatncattntncncgggttgggggtncnggggaattggnttcccaaattgggaaaaaggggaaagnggttccngnaatgggaaagncnaanggaaatggnccttntnaaaaccggttgggccaaggaaaaccaaaanggaaaaaccaaagnccaagggcccttaacctttttttggttgggggaaaaatttggggggaaattcccccccccaaaaaccaaaaattgggttnccaaaaagggaaaccaaggncccccggttcnttgggttgggaaccaattcaccccaaccccttccggattgggggcccccttccaaaaagtaaattgggggccnaagggnttccaaccccnttttcccaatttttgggggcccaaaatttaanggcccaaaccaaaggnccccaanttctccaaagggggaaaaggccctttncctttttncaaaaggnccgggccaaatttcctttccggggggaaaggncccaaaggnttttccaaaaacctttgggccccccaattngggtttttcccccgggcccccggggggaaaaanggggggnccccctttttnccccttncccaaacccttggggggttaaacccccctttncggggggcccccgggcntttcctttaagggaaaaaanccttaaggtttggggggaatttcccccccccccgggggggcctttgggcncaaagggggnaaaatttttccggaaatttaanttccaaaaaggcctttttaaatttccgngaatttaaccccccgggtttcngggaanccnttttttaaagggggggggggggggggggccccccccggggnttaanccccccnaagaccntttttttttggntt

SEQ ID NO: 1750 - DNA, 402 bp, Homo sapiens
gggcgaattggagctccccgcggtggcggccgcccgggcatggtacgcgggggcggcggcggcggaggttgcagtgagccaagatcgcgccattgcactccagcctgggggacaagagtgagacttagtctcaaaaaaaaaaaagaaaaaaaaaatcagggatatagttcatatcccacttctttgtttacaccgatgtccctgaatatcagcctgtagctaatggacttgggatttctggtctaagtgggcctcctggggatggggtggtacctcggccgctctagaactagtggatcccccgggctgcaggaattcgatatcaagcttatcgataccgtcgacctcgaggggggggccccggtacccagctttttgttcccttttagtggaggggttaaa

SEQ ID NO: 1751 - DNA, 794 bp, Homo sapiens
  misc_feature 3, 6, 8, 18, 21, 24, 32, 51, 64, 88, 99, 109, 114, 124, 136,141, 142, 196, 217, 220, 228, 231, 236, 238, 245, 268, 270,272, 293, 299, 300, 301, 302, 306, 311, 313, 330, 339, 341,345, 350, 354, 359, 362, 378, 379, 385, 386, 392: n = A,T,C or G
  misc_feature 395, 396, 400, 404, 405, 411, 412, 413, 415, 417, 430, 431,433, 436, 437, 439, 441, 451, 462, 464, 476, 485, 486, 487,489, 491, 492, 494, 499, 503, 504, 508, 510, 519, 523, 524,526, 528, 531, 539, 541, 545, 558, 580, 582, 583, 599: n = A,T,C or G
  misc_feature 601, 621, 633, 636, 638, 643, 644, 648, 663, 666, 672, 679,680, 689, 691, 699, 702, 729, 732, 733, 742, 743, 750, 754,755, 759, 761, 762, 770, 771: n = A,T,C or G
ggnagncntctcacccgncgngtngggcgggncccgaagggtaacctttancagggggggaacncgctcagggggggcccctcgtagnaaattccggtnaattccctgnagganccctccttgnaaaagaagccangttcnnaaggggttttggtttttcaacttaaagctggccaaaaacccccattttggtttncttttaaaatttttggaatanaanccttggtnggnggccntntaaaaancaaggaaaagcccccccgaaagnancnttaaattttgtgttcccccanttcggnnnntaancctcncnataaggaaatattcttncaggccccnancttnggggngagnttccnttngaaaaagaaattaccnntttttnntttttnggnnaggnaaannggcccnnntnantttaaatatttgnngngcnntncnaaccaaggcnttattagagancncaattttttagnggttttttnnncnanntngcccnagtnnaaantnccaatcgtngcgnnantntcnggaaatantnttanaaaaagagggggnttttcctcccttttttattgtngnnggaaaaatttactaantnccaacgctccttgaggggangaaaagttggtnttnancctcnnttcngcccccccgggggcngcnccgagnacttccnnttccctttntntaaaaaanaanatctttcaaggggggggggggagattnccnnccccccccnngggggcngctnntttngnnttaagggnnggaaaaaatttcttcccgcaaag

SEQ ID NO: 1752 - DNA, 427 bp, Homo sapiens
  misc_feature 77, 117, 160, 179, 184, 216, 219, 239, 264, 274, 275, 280,282, 295, 298, 308, 315, 316, 319, 322, 326, 329, 337, 357,358, 359, 363, 366, 368, 374, 381, 385, 389, 390, 391, 392,400, 404, 405, 410, 417, 418, 420: n = A,T,C or G
ggagctccccgcggtggcggccgaggtacttttttttttttttttttttttttggctgcaaagatgctttaaaaatntattgttttagtccaaagatacccctggcacaagcgacantaatattacagggacattaaattaaggaaagaaccaactgatntgtgtctatgagagaagancttcngggtgaggaactgggaacaaaggaggaagacnctnttagcaagccctggggcccncctttattgacgtgggggaaaagtnttgagtcccnnaatgnanatttcctgaagcngancttaaatggnaactgtnnccngancatntanatgtaaancccttgattttaataacccnnntttnagnangggggnggggggnggcncctnnnngttacccngggnnccatntaatttnnanatacttg

SEQ ID NO: 1753 - DNA, 424 bp, Homo sapiens
  misc_feature 3: n = A,T,C or G
tancactacttagggcgaattggagctccccgcggtggcggccgaggtacgcgggagcagaggaaacatcctgtccaattctaggttttcctcccttggcctcctttccccagcattgtctaccctggcccacttcctgcattctccccatgccctgctatttctgattctttgcttctcctagcgagatactttccttatatgatagctgctgagaagtttcccagaactgctagaggaaaagaagtggggaatttaggaaatatccctcactgacctaactccattatcttcactctttcattcttcctgccacctcatgcccattctctttactgtctagcatgctgaaagaaggaagtgatctaaatgccagcgtgttcagtggtaaatattagttggtgcaaaagaaaaaccatgatta

SEQ ID NO: 1754 - DNA, 414 bp, Homo sapiens
  misc_feature 242, 248, 253, 259, 269, 278, 293, 304, 307, 312, 314, 341,352, 357, 359, 369, 375, 378, 383, 389, 397, 404, 410, 413: n = A,T,C or G
ctatagggcgaattggagctccccgcggtggcggccgcccgggcaggtacgcgggtgagttgaaatgttctgtcaaatgtgtctcacatctacacgtggcttggaggcttttatggggccctgtccaggtagaaaagaaatggtatgtagagcttagatgtccctattgtgacagagccatggtgtgtttgtaataataaaaccaaagaaacataaaaaaaaaaaaaaaaaaaaaaaaaaantccctnggccnctctanaactagaggntcccccggnctggaggaattcganttcaatcttanccntaccncncacctcgagggggggcccgggacccancttttgtttcntttantnaaaggttaantttgcnccncttgncccttnaatccaanggtcatnagcctnttng

SEQ ID NO: 1755 - DNA, 845 bp, Homo sapiens
  misc_feature 1, 3, 8, 9, 10, 13, 14, 17, 22, 23, 34, 38, 41, 47, 51, 58,59, 67, 73, 76, 85, 93, 95, 96, 110, 112, 116, 130, 276,279, 317, 341, 344, 356, 367, 368, 374, 387, 390, 398, 435,440, 446, 453, 459, 462, 473, 474, 480, 483, 493, 507: n = A,T,C or G
  misc_feature 509, 513, 529, 541, 544, 568, 572, 574, 582, 586, 590, 592,603, 612, 614, 620, 622, 624, 628, 638, 647, 662, 667, 672,687, 689, 691, 694, 701, 705, 735, 737, 739, 746, 762, 763,764, 766, 780, 783, 795, 798, 816, 818, 822, 828, 842: n = A,T,C or G
  misc_feature 845: n = A,T,C or G
ntnttgannnaannttnaattnntctaataaaantatnacncaatcnattntattatnnattaaatnttattntantttattctntattttantnntttacttattttantnagtntggggctgttatcnttgggtacgactcactatagggccgaaattggagctccacccgcggtgggcggcccgaggtacagaggggtctgtttctaagtctggaacctcaacacgaggctgggatgctttcacaactgtgctctctcccactgtccagccanaanaatggttggttctttcccacagtgctttcccccccatnccttttcaacacctccttgttggnagngggaactcattnggggaaccggnncccaanagaagggaaaaanccntggggganttcaacctttcttggaacaaggggaaaaatcgggganccaanagtccnacaaagnctttgnccnccaagggaaannccccanggntttggccttncttggggccccttncnaagntttctttctcaaaatnttggttttaagngcnccctcccaatgggggaattccaanaccnantggaagtnaaancctngngtaaaaaaggnccaggccanancaaaantncnttgnggaaaggggnaaggcccangcggaaaaaggaagnaaggnccccnccaaataaggggggnangnttnggctttnggtntgcctttggcaagcttggaaccgggggttntnanacccaangaattggaaataaccnnngnaaatttttttccanctngggggaaggaanttntccttttttggttcttancnaaangggaanggaaaaaaatttgnccn

SEQ ID NO: 1756 - DNA, 404 bp, Homo sapiens
  misc_feature 2, 338: n = A,T,C or G
cnaatacgactactatagggcgaattggagctccccgcggtggcggccgaggtacaatttcttttggttcattttcagattcaggcattttcccccttggctctcaatgctgtttgggtttccaacaattcagcattagtgggaaaaagtgggccctcatacacaagcgtgtcaggctgtcagtgtttggtgcacgctggggaagaatttactttggaaagtagaaaagcccagcttttcctgggacatcttctgttattgttgatgttttttttaccttgtcattttggtctaaggttgccattgctgctaaaggttacccgatttcaaagtccagnataccaaggcatgtgggatattgtttagcctaccgttttactcacaggccaggcgaactggacatt

SEQ ID NO: 1757 - DNA, 759 bp, Homo sapiens
  misc_feature 1, 2, 3, 4, 10, 13, 15, 16, 17, 21, 22, 40, 43, 48, 58, 60,61, 62, 71, 73, 75, 77, 93, 96, 101, 106, 111, 113, 118,122, 125, 131, 132, 151, 251, 306, 325, 365, 366, 381, 404,419, 439, 446, 456, 460, 484, 489, 503, 504, 509, 518: n = A,T,C or G
  misc_feature 525, 532, 535, 536, 539, 546, 555, 557, 568, 587, 596, 605,609, 610, 614, 616, 629, 635, 638, 642, 648, 662, 675, 678,702, 708, 735, 744, 748: n = A,T,C or G
nnnnttactngtncnnnaatnncgatttagttcttactantantaatntacttatttntnnnatttatttnantnantttattcatatttttnatnttatntatanattantnagtanagcnacntatttnncccccgactacactataanggcgaattggagctccacccgcggtggcggccgaggtactttatatagattttcaaacaaaagattgattgtgctttttgaataaaaaagatagggtatnttccaacctcactgacttaaaccttgtggaatacagcacttctaaactaacaacncacgtcaaaaaagaacaanatttgaataaatccccaggtggggatgcctcaaaaaattnnttctttttaagaaanggttttaagggatctggcttaantttcctggcttaatntaatcattaatttggccttngcgggcnaaaaaaaaanaagnaaccacaaggaaggcttggccttngttcnttaaaaaatttttnnttccncaaaaaacnttctccncccttcncgnnagntttttcnaaggccaantnggccaaaccanccttccaagaaaatttttnggaaaaaanaaaaaaacntttnnttgncnaaagccaaaaacnccttgngtnaccnattaanttgggggtttaaancccccgaaggttncgnaaccaattttttggaattttaagnccaagnggccattttttttaaaaaaccttggantttttcccnttcnttttaaaccaa

SEQ ID NO: 1758 - DNA, 413 bp, Homo sapiens
  misc_feature 314, 327, 330, 364, 368, 372, 376: n = A,T,C or G
cgaatcactactatagggcgaattggagctccccgcggtggcggccgcccgggcaggtacgagaagaagggggctggaacaaataagttacggctgattttactctgcaaaatatataaggggttttcaaattaataaccattcagggtccccaaacagcctaatctttgtcaattggtgccaaattatgcaaggtgctgccaattctggttgtctaacaaatcaagaccagtgtatgttactcctcggctgaagcctgattgattctggtcattatatgggctgatctcatttttcacacatgggaatcaatnttgttgagcccanatnttcatttacaggagaaagccccagaaaacgactnattntacnacgncaacctttatcccgggaccaccaggagcacccacaga

SEQ ID NO: 1759 - DNA, 422 bp, Homo sapiens
  misc_feature 1, 5, 6, 7, 8, 9, 21: n = A,T,C or G
naggnnnnncccgtaacactnctatagggcgaattggagctccccgcggtggcggccgtgggacctgcaattactacgcaaacgcttacagcttttggctcgccaccatagagaggagcgagatgttcaagaagcctacgccgtccaccttgaaggcaggggagctgcgcacgcacgtcagccgctgccaagtctgtatgagaagaacataatgaagcctgactcagctaatgtcacaacatggtgctacttcttcttctttttgttaacagcaacgaaccctagaaatatatcctgtgtacctgcccgggcggcccgctctagaactagtgggatcccccgggctgcaagggaattcgatatcaaaggcttatcgattacccgtcgacctcgagggggggggccccggtaccccagctttt

SEQ ID NO: 1760 - DNA, 383 bp, Homo sapiens
  misc_feature 93, 214, 227, 234, 241, 293, 350, 383: n = A,T,C or G
cgaattggagctccccgcggtggcggccgaggtacatttgcattgctataaaataatacctaaggcttggtaatttataaagaaaagaggttnatttggctcatggttctacaggctatatatgaagcataatgctgacatctgcttctgatgaggacatcaggaagcttaaaatcatgttggaggtttaaggggagccagcatatatcacggngagaaaggagcangagacanaggggcntaccacactctttaaacaaccagattttgcttgaattcagagcaagaacctnactcactaccaccaaaacagcatggaatccatctcatgaaggtattcttcttgcatngactcaaacacctcccattcagcttccaccttn

SEQ ID NO: 1761 - DNA, 406 bp, Homo sapiens
  misc_feature 354, 381: n = A,T,C or G
ctaatacgactcctatagggcgaattggagctccccgcggtggcggccgaggtaccattttatttagtgttgtaggaaatgttgggttacttcttaaaaacgaaaccaaagaaattcaaaagtcccaaagaaagaaagcaggaaataataattctataatccaaaaacgttgggcgatccttcagttggaggaagagggcgtcagttaagtagctcacacagtagatatggagacaccatatggagataccggagttaagtttggtggatactaggaattaagttctccacctaaggcaattaatttttcagccttgagagataaattagtaggttctaggaaaaaggaaaatnacagttgactggggagaaagggtgggnaggggagggatgggtgccgtcattt

SEQ ID NO: 1762 - DNA, 402 bp, Homo sapiens
  misc_feature 4, 54, 61, 62, 67, 73, 82, 87, 99, 150, 157, 163, 178, 213,215, 220, 221, 222, 226, 275, 283, 299, 335, 365, 385, 386,393: n = A,T,C or G
actncttagggcgaattggagctccccgcggtggcggccgcccgggcaggtacnccacaannccagnagattngtctccttncctgnggcctcatctancttacttattcagactttctggacacaaggggtttgttatcttcatgaaantttaatntgtgtnacgttagaaatgaanttagaaaaagatgttcttgctgtaaacactgggcngnagtannntcanaagaagactgtggttcttggatgccctcatgcctttgttccaggtgcangtgcctantggagggtgcagtagntcttgcaacataccaaggacccatcttgcagggacnctggatggcttagctcctgggaacgggtanggatagggaagggtcttgtnngacccancctttgttg

SEQ ID NO: 1763 - DNA, 724 bp, Homo sapiens
  misc_feature 4, 7, 11, 12, 15, 17, 24, 26, 29, 31, 35, 36, 37, 43, 45,51, 53, 57, 61, 65, 66, 67, 68, 71, 75, 76, 81, 84, 87,88, 92, 93, 94, 96, 101, 110, 120, 123, 129, 130, 131, 139,225, 251, 276, 281, 342, 345, 371, 375, 390, 408, 419, 420: n = A,T,C or G
  misc_feature 425, 432, 435, 481, 513, 517, 522, 534, 538, 549, 584, 590,591, 592, 595, 600, 606, 634, 638, 652, 669, 672, 674, 704,706, 710, 721, 723: n = A,T,C or G
gaanatntctnnccntnatttttnancantntaannntaattntnctgttntntctntctnttannnnaanaatnntcatngtnttnnttcnnntntaatntataatatnacattttttnagnttaggnnntgaccgcnatcgactcactatagggcgaattggagctccaccgcggtggcggccgcccgggcaggtacttttcccaaaatgctatattgcaatnggactggaggctataagtggtctacngctctggctctaagcatcaccctcngaggntttggagcagaccgtttctacctgggccagtggcggagaaggccttcgggtaagcctcttncanccttccggttggccttgggtaaatantggnacgcctgataggacngttccctggattcatatnagaagtttggnnttatngtttggnacncaaaccaggatgggctccttttgggtaacccttcggtccgccttcntagaaaactaagttgggatacccccccgtggncgtngcaangtaaatattcgnaatnaattccaaaanccttttattccgaaataaccccgggtgctgaaccnccttcnnnagnggggngggggnggcctccccggaggttaacccccccaangccntttttttttgggtnttccccccttttttaanggntnggaagggggggttttaaaaatttttggccngnccgngcctttttggngng

SEQ ID NO: 1764 - DNA, 420 bp, Homo sapiens
  misc_feature 3, 5, 8, 100, 126, 152, 172, 178, 196, 203, 205, 219, 222,224, 226, 228, 231, 259, 262, 298, 317, 322, 334, 350, 353,355, 371, 385, 397, 400, 409, 411, 415: n = A,T,C or G
ccnantcnactcctatagggcgaattggagctccccgcggtggcggccgcccgggcaggtactttttttttttttttttttttttttttttcataggtanaaggaacttgccttgagtctcaaatnaaacttgggacttaggacttttcagnggaggctggaatgaattaanactttnggggactattggaaaganatgattntnttttgcaatgtganaanancntncantgttgggggctggaggggaatgatgtanttnaaatatttgacccttccaaatctcatgttgaaatgngacccccattgttgaaggnggaanctgatgggaggngtttgagtcatgccanaananacttcatgaatggatncatgctgttttggnggtagctgaganganttcttgctntnaatncaagc

SEQ ID NO: 1765 - DNA, 699 bp, Homo sapiens
  misc_feature 3, 7, 8, 11, 15, 22, 25, 26, 29, 31, 39, 41, 50, 53, 61,62, 63, 69, 71, 73, 75, 83, 86, 90, 94, 102, 112, 126, 130,135, 140, 157, 228, 273, 291, 292, 336, 342, 358, 363, 365,375, 378, 391, 402, 405, 411, 423, 431, 437, 461, 462: n = A,T,C or G
  misc_feature 482, 485, 501, 513, 520, 527, 540, 548, 552, 561, 569, 571,592, 599, 602, 603, 605, 609, 617, 623, 631, 635, 638, 644,649, 658, 660, 672, 676, 679, 680, 682, 683, 687, 692: n = A,T,C or G
ccntatnnttncatnttatctntanntgnanttttcccnantgtatatcnatntatttatnnntttttntntntntatatgcnttnattnatanatcaattnaagattcggntgttcagcacatcnactnctatngggcnaattggagctccaccgnggtggcggccgaggtacgatttttaaaatctagcacatttaaaacactgttagttcaactttccttatttntggagaattttaggaatactcaatttacatatctgtataaatcangacagagctccttttaannagactttataaatctaatattatcaatacccccccaaatttcanggaagnaacattatacacaaanattangnatataaggcnctntctgttaaattantagaactacantanctttgncaaaagcaccancattatgnaggagncttaggtaaaaattagtttatcanntcttcctgcgaaatttttgnagnccataaaataaccagngtagtattaccnagtactnttaagcncggaccatcccantcttccgngttncattgggangttccccntnaatcccccaagtgaaggcctncttaagnaanngnaaanttttaaanatgganccaccaancaancanccaatngaaanattaatttngnaaaggttggttngggnaanntnngggntcggnaaatttc

SEQ ID NO: 1766 - DNA, 779 bp, Homo sapiens
  misc_feature 1, 2, 6, 7, 9, 11, 12, 15, 20, 23, 24, 28, 31, 33, 34, 45,47, 52, 56, 62, 64, 67, 68, 69, 71, 75, 77, 87, 106, 117,118, 122, 130, 133, 135, 137, 139, 141, 168, 281, 282, 320,338, 345, 355, 367, 388, 422, 435, 473, 475, 480, 483: n = A,T,C or G
  misc_feature 513, 528, 529, 534, 542, 556, 558, 575, 577, 579, 583, 585,586, 597, 599, 620, 622, 624, 631, 647, 653, 656, 664, 676,684, 689, 705, 708, 714, 718, 720, 727, 729, 733, 737, 739,743, 766, 774: n = A,T,C or G
nntctnntntnntantactnatnnactnatntnntctcttattantntccancatntttatntnctnnntntatnanaatttatttnattttaatcatttttattnttatctttttnngatngggtgtgnatngntnancnactactactcactatagggcgaattgnagctccaccgcggtggcgagcggccgcccgggcaggtactgagtcaaggacgtctttaacgtcatggacggctcctttacccacgctttctagatcttcgactgcatcttttnntagttttccgagttccccccacaagcttttttgctccngtctaggcctttttccanaaaggcnttggaatctncttgctttcctntggcttatggttgcctgttantgggccttaaccctgtggtctttcaacccttgcnattttttcctttnttcgaagccttgacttggaattgccttttcattggggnanagggngantttccccccccgaattccccttgggggtgncaagaaaagggccanngcccnttctttgngaaatccaaattangngtccaaccaagggaacncnangtgngnnctttccctttngnccccaaggaaagtccttggtntnangtggtanaaggaaagggggaaangaaggnttntaatttgnaaaccccattcnaattgccnttttncttgattggttggccntcngggaantttngngggttanantagncccnancccnaaaaatttccctttctggtgaangaaatccntttgg

SEQ ID NO: 1767 - DNA, 670 bp, Homo sapiens
  misc_feature 12, 14, 15, 19, 20, 21, 23, 27, 32, 35, 38, 45, 48, 50, 54,59, 60, 66, 68, 69, 71, 76, 77, 78, 81, 83, 101, 102, 112,115, 116, 117, 126, 128, 358, 406, 412, 439, 445, 450, 455,461, 472, 489, 494, 500, 520, 521, 540, 542, 559, 564: n = A,T,C or G
  misc_feature 573, 596, 601, 616, 621, 635, 649, 664, 665, 669: n = A,T,C or G
aatcttacctancnntctnnntnttcntttanatnatnttttttnacnanttantaatnnatcttntnntntttannnttnantttattcattatctaatnnagatcggatntgnnnctttctcgnantacgactcactatagggcgaattggagctccaccgcggtggcgtttttccataggctccgcccccctgacgagcatcacaaaaatcgacgctcaagtcagaggtggcagaaacccgacaggactataaagataccaggcgtttccccctggaagctccctcgtgcgctctcctgttccgaccctgccgcttaccggataccctgtccgcctttctcccttcgggtaagcngtgtgcgcctttctcataagcctcaccgcctggtagggttatctcaantttctngctggtaaggataccgtatccgcttcncaaagncctgnggacntggtgntgtcactcaancccccccccgctttcangcccncgaacncgcttgtcggccctttattnncgggtaaacttaatacgtncntttgaagtttcccaacncccgngatataggnacaccgaactttattcggctcancttgnggccaggccaagccncaacnttgggttataaccnagggggattttaangcccaagtaagaccnnaagng

SEQ ID NO: 1768 - DNA, 413 bp, Homo sapiens
  misc_feature 368, 404, 408, 413: n = A,T,C or G
gggcgaattggagctccccgcggtggcggccgcccgggcaggtacgcgggattgacatcccacactacctgatttgatacactaagaagggcttatcatttctgtggtactcttggccaacaatgcacgtgtaacatttattcattgaaacacattaggcagaattgcaggacattcttcaaaatagctgtccaatactcttcaaaagtgtcaggtcctggaagacaaagagatactgaggaaccatcacagagtgggagaggacatagagtgataaaaactaactgtgatgtggaatcctacattggatcatggaccagaaagacagcactgatgggaagactgatgaaatctgaataagtctgtantttggtttaaagaagaagaattataacaataatggnttanctgcn

SEQ ID NO: 1769 - DNA, 435 bp, Homo sapiens
  misc_feature 4, 48, 59, 68, 70, 74, 82, 99, 106, 151, 162, 189, 194, 212,227, 332, 341, 352, 353, 356, 358, 411, 415, 417, 426: n = A,T,C or G
actnctatagggcgaattggagctccccgcggtggcggccgaggtacncggggaggatnaacacgaancngatnaacctcanaaatcctgtctggctgncagattncaagtaaaaaaaaaaaaaggtgggttggggggacccttttctttntagttgtcttnaaggaaaattaattatacttttttttngttcnggtcgaaatttttatganatatctctcacttgncttccactttgaaccggtcaaagctcatagctgccagctctgaatgaggaggggagaagcccctgggtctttctttgaaaggaatccgctgcttgagggctgccnccctcatgncgtgcgtgtcnnttntnttcctgacgcatcttgtgatatcagaggtaactatggcaaagcattccaggcngttntnaatgtgaancacttacac

SEQ ID NO: 1770 - DNA, 447 bp, Homo sapiens
  misc_feature 3, 4, 5: n = A,T,C or G
agnnnctcgaaacgctcactacttagggcgaattggagctccccgcggtggcggccgcccgggcaggtacaaagactattgtagagactatccgggttagtttgcaaggggagccaatgatgagtaatttgaaagaaattcacctggtgagcaatgaggaccctactgttgctgcctttaaagctgcttcagaattcatcctagggaagagtgagctgggacaagaaaccaccccttctttcaatgcaatggtcgtgaacaacctgaccctccagattgtccagggccacattgaatggcagacggcagatgtaattgttaattctgtaaacccacatgatattacagttggacctgtggcaaagtcaattctacaacaagcaggagttgaaatgaaatcggaatttcttgccacaaaggctaaacagtttcaacggtcccagttgg

SEQ ID NO: 1771 - DNA, 439 bp, Homo sapiens
  misc_feature 4, 160, 195, 198, 199, 203, 238, 246, 247, 272, 277, 280,281, 291, 294, 300, 302, 303, 306, 308, 312, 315, 333, 342,343, 345, 363, 365, 371, 385, 409, 412, 426: n = A,T,C or G
actnctatagggcgaattggagctccccgcggtggcggccgaggacttttttttttttttttttttttttttttgagaggaaaacccggtaatgatgtcggggttgagggataggaggagaatgggggataggtgtatgaacatgagggtgttttctcgngtgaatgagggttttatgttgttaatgtggtgggnganntganccccattgtgttgtggtaaatatctaaagggagtntagggctnngactagtatgttgagtcctgtaagncgganagnnacattcgatnaanaaaacntnnttncnaccncanagagttctcccagttggnctaaataanngngggtataggccaggttancnacgctngcttgaattcatcnaaaatctatttttggcagtccganttntaaggccctgatanaggattatgattc

SEQ ID NO: 1772 - DNA, 438 bp, Homo sapiens
atacgactactatagggcgaattggagctccccgcggtggcagctctaacgctgtggaagccttaattaaaaagggtgcagacctaaaccttgtagattctcttggatacaatgccttacattattccaaactctcagaaaatgcaggaattcaaagccttctattatcaaaaatctctcaggatgctgatttaaagaccccaacaaaaccaaagcagttgagtgatgtctcttccccaagatcaataacttcgactccactatcgggaaaggaatcggcattttttgctgaaccacccttcaaggctgagatcagttctatacgagaaaacaaagacagactaagtggacagtacctcggccgctctagaactagtggatcccccgggctgcaggaattcgatatcaagcttatcgatacccgtcgacctcgagggg

SEQ ID NO: 1773 - DNA, 436 bp, Homo sapiens
  misc_feature 3: n = A,T,C or G
tancactacttagggcgaattggagctccaccgcggtggcggccagaccaagaccgagacttggagacctgattgagatttctcgctttggctatgcacactgggccgtctacgtgggagatggctatgtggtccatctggctccggcaagtgaaattgctggagctggtgcggccagtgtcctgtctgccctgaccaacaaagccatagtgaagaaggaactgctgtctgtggtggctgggggagacaactacagggtcaataacaagcacgatgacagatacacaccactgccttccaacaaaatcgtcaagcgggcagaggagttggtggggcaggagttgccttattcgctgaccagtgacaactgcgagcacttcgtgaaccatctgcgctatggcgtctcccgcagtgaccaggtcactggtgcagtcac

SEQ ID NO: 1774 - DNA, 414 bp, Homo sapiens
  misc_feature 5, 82, 98, 136, 164, 165, 204, 215, 226, 245, 256, 267, 284,293, 302, 308, 318, 325, 339, 340, 351, 382, 388, 389, 404,414: n = A,T,C or G
cactnctatagggcgaattggagctccccgcggtggcggccgcccgggcaggtacttttttttttttttttttttttttttngctccaataagttaanaatttttagttcactggaaaaaacagatctttgatatntggactattcagcattttctatgtctgnnggggaacaggcccccaaatctggccataaacaaaatctntgcagcactgngacatgttcgngatggccatgatgtccacnctgaaagttgngggtttattanaatgagggcaaggaacncctgacccncccagggcngaaaanaacttaaggngttcctnaaccacaaacaatnncatgaggcatntgtgccttaagggacatgctcctgggtacanataacnngccagagcccatccntttgttttan

SEQ ID NO: 1775 - DNA, 412 bp, Homo sapiens
  misc_feature 3, 203, 293, 343, 398: n = A,T,C or G
ctnctatagggcgaattggagctccccgcggtggcggccgaggtactacgctgcatccttttctatgctctccctgctggtgataatgggagatacagacagtaaaacggacagctcattcataatggactcggaccctcgacgctgcatgaggcaccactatgtggattctatcagtcacccattgtacctgcccgggcggncgctctagaactagtggatcccccgggctgcaggaattcgatatcaagcttatcgataccgtcgacctcgagggggggcccggtacccancttttgttccctttagtgagggttaattgcgcgcttggcgtaatcatggncatagctgtttcctgtgtgaaattgttatccgctcacaattccacacaacatacnaagcccggggagct

SEQ ID NO: 1776 - DNA, 412 bp, Homo sapiens
  misc_feature 14, 61, 66, 67, 74, 78, 85, 121, 159, 170, 177, 219, 223,243, 249, 256, 268, 272, 293, 296, 302, 337, 341, 380, 385,386, 390, 403, 412: n = A,T,C or G
actactatagggcnaattggagctccccgcggtggcggccgaggtacgcgggggccttggnattgnngaatgancaancattganagcacatgagatactcccatcagaatccatacacanggactactgaagaaagtccttgggattctgagagtctntgtgagactgnttcacanaaggatgtgtgtttacccaaggctacacatcaaaaagaaatngatnaaataaatggaaaattagangggacncctgttnaagatggtcttntganggctaactgcggaatgaaagnttntattcnaactaaagccttataattgatggacatgcaaactntcanagcagagcctgccgagaagccatctgccttcgggcctgncattnnaatncaaaagtctgttncaaattaan

SEQ ID NO: 1777 - DNA, 451 bp, Homo sapiens
  misc_feature 2, 3, 4, 5, 10, 11, 14, 17, 20, 218, 233, 313, 336, 374,382, 406, 411, 419, 428, 442, 446, 450: n = A,T,C or G
gnnnnggttnnccntancantccactactatagggcgaattggagctccccgcggtggcggccgaggtactttgcaccaactgtatcttcagatacacagcaagtttcctccaagcctttatgctaccaggatttctaaagcacaccaagaggaaatagcaggtgctttcctagtggacactgggatccacttatcaagtcagctggcttcacatttnaagcctttcatgcanggtggttttggacagtaaattaagacctgccatgtgaactgcagtttccacaatgtcttcttctggttgttgtcatgganaaacctgccattttaagcctaanggaagtgcaaaccctggggggtgcacaagacaggccangtcttaanaaaccacaacccagggatattttntactnacaaaccngttttttanaaagttttgaaccnatgnttcnt

SEQ ID NO: 1778 - DNA, 413 bp, Homo sapiens
  misc_feature 14: n = A,T,C or G
actactatagggcnaattggagctccccgcggtggcggccgcccgggcaggtacgcgggattccaccaaagtgattctaaatccctaccacgtttttaaagttttcttttaagcttgttaagaaatagtaagagaaggggcttccttttcgatccgccatctgcggtggagccgccaccaaaatgcagatttccataaaaacccttacggggaagaccatcaccctcaaggttgaacccttggatatgatagaaaatgtaaaggccaagatccaggataaggaaggaattcctcctgatcagcaaagactgatctttgctggcaagcaactggaagatgggatgtacctcggccgctctagaactaggtggatcccccgggctgcaggaattcgatatcaagcttatcgatac

SEQ ID NO: 1779 - DNA, 404 bp, Homo sapiens
  misc_feature 10, 22, 27, 78, 146, 169, 171, 177, 202, 215, 219, 270, 288,293, 294, 298, 316, 367, 383, 397: n = A,T,C or G
actactatanggcgaattgganctccnccgcggtggcggccgcccgggcatggtacgcggggcacaatgaaatcaatnctcagagaaggcagataattctccacgaagccagaaaactaataaatgaacaacttgggtgaaatgtnccaccagacggtgtgatatttantngcccanaaagctgccaaggggttgaatgacnctatctgaagatntganccagtttgctctccatagggaggatttcatcaacaggaaacagatgcctgnaaggcattggatttgctnagtgnntatnccatatgattctgctgtntgcgtttgatttataatgctgagctgactcaaagtcaaactattgctgggnctcatcaaagaccttntagggatgaaaacncctgaat

SEQ ID NO: 1780 - DNA, 421 bp, Homo sapiens
  misc_feature 2, 160: n = A,T,C or G
tntcactacttagggcgaattggagctccccgcggtggcggccgaggtagaagacaatgccgaggtgctggtgaccctgggggtctgagtggatgattggggctgctgcgctcagaggcctgcctccctgccttccaatgcatataaccccacaccccanccaatgaagacgagaggcagcgtgaacaaagtcatttagaaagcccccgaggaagtgtaaacaaaagagaaagcatgaatggagtgcctgagagacaagtgtgtcctgtacttttttcttttttttttttagtagattaatgaatgactcactttacttacttgaaatattaggaactgagttaaaggcaactccttacagatggagttcttgttgttataactggagtgcagtgggttgtttacaggccgtgatcatagt

SEQ ID NO: 1781 - DNA, 976 bp, Homo sapiens
  misc_feature 2, 3, 4, 12, 20, 24, 26, 33, 35, 36, 38, 45, 300, 354, 405,462, 471, 501, 504, 506, 523, 526, 538, 539, 541, 546, 547,549, 551, 552, 558, 559, 563, 569, 572, 578, 586, 588, 595,603, 606, 614, 621, 624, 636, 638, 644, 649, 650, 656: n = A,T,C or G
  misc_feature 662, 697, 698, 702, 707, 708, 719, 727, 729, 739, 753, 762,765, 770, 772, 785, 786, 792, 793, 800, 805, 809, 812, 816,817, 820, 824, 828, 835, 836, 838, 845, 849, 851, 852, 854,856, 860, 866, 867, 868, 882, 883, 888, 889, 890, 894: n = A,T,C or G
  misc_feature 904, 906, 908, 915, 917, 922, 924, 934, 937, 946, 955, 958,961, 962, 965, 966, 970, 971, 972, 973, 974, 975: n = A,T,C or G
gnnnaagtttancgctactntggncnatcgggngnntngcatttncaccgcggtggcggccgaggtacgcgggggagtcctgagctgcgtcccggagcccacggtggtcatggttgccagagcgctctgcatgctggggctggtcctggccttgctgtcctccagctctgctgaggagtactgtggcgctccgtgaaattagacgttatcagaagtccactgaacttctgattcgcaaacttcccttccagcgtctggtgcgagaaattgctcaggactttaaaacaagatctgcgcttncagagcgcagctatcggtgctttgcaggaggcaagtgaggcctatctggttggnctttttgaagacaccaacctgtgtgctatccatgccaaaacgtgtaacaantatgccaaaaagacatccaagctagcacgccgcatacgtggagaaacgtgcttaaanaatccactnttgaatggggaaacattttattcccaaaangantnttaaatctaaaatatangtncctgcccgggcnngncgggnntnannactagnnggancccctnggntttcanggaattgnanattaaangctttatncanacccgatnaaactcnaangggggggcccgntncccaanttttnnttcccntttaangaggggttaaattagccccccttgggggaaataanngggnaaaanntgttttctggngtgaaaantngttattccgnttaacaaatttcanaacgaaatnacnaagcngnggagcctaaaaannttaaanncctgggnggccncccnggntggnnatnaaantatnttaaatnngnggtgggntgananntntncgtntttttnnntgggaaaccctttnngcccnnnctcntaaataaatncncnccccccncncgtgntnaggaggttanttnttatttggnccttatatnagnttnnatnngtannnnnng

SEQ ID NO: 1782 - DNA, 914 bp, Homo sapiens
  misc_feature 15, 526, 528, 531, 532, 533, 534, 535, 536, 537, 538, 539,541, 543, 544, 545, 546, 547, 548, 572, 589, 595, 604, 615,619, 626, 628, 635, 656, 667, 680, 685, 690, 695, 697, 701,710, 715, 726, 727, 736, 737, 741, 742, 745, 751, 753: n = A,T,C or G
  misc_feature 754, 755, 756, 759, 764, 765, 780, 781, 783, 785, 790, 795,807, 808, 810, 811, 813, 814, 818, 824, 827, 833, 834, 835,836, 837, 838, 839, 841, 847, 851, 856, 857, 859, 860, 861,862, 863, 865, 871, 872, 873, 874, 875, 876, 877, 880: n = A,T,C or G
  misc_feature 884, 885, 891, 895, 896, 898, 900, 903, 909, 910, 912: n = A,T,C or G
agcgtatcgctatcnactcactatagggcgaattggagctccccgcggtggcggccgaggtacgcgggaagaactgaaatttttaattaaaatttatttcccctattaggctgggcgcagtggctcacgcctgtaatcccagcactttgggaggctgaggcgggcggatcacctgaggtcaggagttcgagaccagcctggtcaacatggtgaaactctgtctctgctaaaaatacaaaaattagccaggcctggtggcacacgcctgtaatcccggctactcgggaggctgaggcaggagaatcacttgaacccaggaggcagaggttacagtgagccgagattgcgccctgcactccagcctgggtgacagacaagactgtctcaaaaaaaaaaaaaaattatttcccctatttactattttaaattcccaatctgtatgatttagaatttccatgcattaaaagaaacagcaatgtttttaagaacaagggaatggcaaagacttacagtggtgttgtgaaananaannnnnnnnntntnnnnnngtcctgcccgggcggcccgtttanaactagtgggatccccnggctgnaggaattcnattcaagcttntcgnataccgncnaccttcnagggggggcccgggaccccantttttgttccntttatgaagggtnaatgnccccnttggngnaaanattggtcanacttntttcctgggtnnaaaatgttnntccnnttncaattncnnnncantatannaaccctggagctatnnantntaaanccctnggtttcctaatnnanngnncctnacttanttnaatttnnnnnnncncatttncctnttttnntnnnnngnaaactnnnnnnncantttnnttaatntatnngncnacncccggnnangg

SEQ ID NO: 1783 - DNA, 919 bp, Homo sapiens
  misc_feature 1, 4, 6, 7, 661, 666, 672, 715, 733, 748, 753, 765, 769,770, 773, 778, 784, 790, 792, 816, 823, 826, 835, 836, 844,845, 852, 875, 878, 882, 896, 899, 900, 901, 913, 918: n = A,T,C or G
ntgncnnatcgcgcgtaatacgactcactataggggcgaattgggagctccaccgcggtggcggcccgaggtacctgttacgaactgaatgtttatgtccccccagtcagcaatgtgatggtgtttggaggtggagccttcagaaggtaattaatgcccttgtaagaagaggccagagagcttgcgcaccttcttctgcatgtgaggagccaagaagccggctgtctgcaacctgcaagaggaccctcactagaagctagccatactggcatcctcatcttggctttccaacttccagaactgtgagaagtatatgtttgtggtttagtcaatggtctatggtaatttttttatagcaagtcccagccaagacagtgcctcatttactacataccatttatattattatataggctcctttcagaaacccatgttcaaataaagagataagatactgaaacacataacaccttcactagttttttaagtatacaaatattgagaaatagtttgttattaactatctcatccaagaaatgcagattcatgttggttctaattttttatattaaattgacaaaatgaagaaacttaacaccatcctaaattttagctgcccaaaaaaaaaaaaaaaaaaaaagtccctgcccgggcgggccgnttttnaactantggatccccccgggcttcaggaattcgatatcaaagcttatcnattccgtccaacctcganggggggggcccggtncccanctttttgtcccnttanngangggtnaatgcncccttngncggtaatcatgggcattagcttgnttctgtntgnaaattggtnntcccgttnnaaattcnccaaaataccaaccgggagcatnaangggnaaaccctgggggcnaannngggcctactccnattant

SEQ ID NO: 1784 - DNA, 913 bp, Homo sapiens
  misc_feature 1, 2, 4, 5, 6, 532, 575, 583, 610, 617, 620, 648, 661, 662,665, 668, 670, 679, 705, 708, 726, 728, 743, 744, 748, 749,760, 780, 785, 790, 793, 794, 798, 799, 810, 818, 824, 827,834, 846, 855, 857, 858, 862, 864, 867, 868, 872, 873: n = A,T,C or G
  misc_feature 876, 881, 885, 886, 892, 893, 896, 899, 902, 904: n = A,T,C or G
nngnnnggcgcgcgtaatacgactcactatagggcgaattggagctcccccgcggtggcggcccgaggtactttttttttttttttttttttttttggaaaaaaataagaatagttggagaatgttaaaacattattgaaaaacatatcgactaaaaaagataaaaacaatcccaaatcactttaatactttaaataaattcacaatagaattctactcagtgttaaaatactggagaaggctgggtgcagtggctcatgactgtaatctcaatactttgggagcctgagaccggaggattgcttgagcccaggaattcaagaccagcctcagcaacatggcaataccccatctctacaaaaaaaattttaaaaattagctgggtacagctggcacagtggctcatgtctgtaatcccagcactttgggtggctgaggtgggtggaccacttgaggtcagttcaaagaccagcctggccaacatggtgaaacctcatcttcactaaaacaaaacacaaaaattagatgggtntggtgatacacacctgtaatctcaactactcgggaaggctgangccagganaattgctttaaccctgaaagggcaaancttgcantgnagtcaaaaattgccaccacttccctttnaccttaggggccnnagntangngagactccntcttaaaaaaaaaaaaaaaaaaaaanttnaagttccttgccccggcngncggtttaaaaacttnnggannccccgggcctnaggaattcatttcaagcttntctantcccnccnncttnnaggggggcccngtccccanttttgnttncttttantgagggtaaatncccccttgngnnaatntnggnnaagnntgntcctngggnnaaaatnnatnccnacnantttctcact

SEQ ID NO: 1785 - DNA, 824 bp, Homo sapiens
  misc_feature 571, 610, 622, 631, 632, 633, 635, 636, 637, 638, 639, 640,641, 642, 643, 644, 645, 646, 647, 648, 649, 662, 667, 668,669, 670, 671, 672, 674, 675, 676, 677, 678, 679, 680, 681,682, 684, 685, 687, 688, 689, 690, 691, 692, 693, 694: n = A,T,C or G
  misc_feature 695, 696, 697, 698, 699, 700, 701, 702, 703, 704, 705, 706,707, 708, 709, 710, 711, 712, 713, 714, 715, 717, 718, 719,720, 721, 722, 723, 724, 725, 726, 727, 728, 729, 730, 732,733, 734, 735, 737, 738, 739, 740, 741, 742, 743, 744: n = A,T,C or G
  misc_feature 745, 746, 747, 748, 749, 750, 751, 752, 753, 754, 755, 756,757, 759, 760, 761, 762, 763, 764, 765, 766, 767, 768, 769,770, 771, 772, 773, 774, 775, 777, 778, 779, 781, 782, 783,784, 785, 786, 788, 789, 790, 791, 792, 793, 794, 795: n = A,T,C or G
  misc_feature 796, 797, 799, 800, 801, 802, 803, 804, 805, 806, 807, 808,809, 810, 811, 812, 813, 814, 815, 816, 817, 818, 820, 821,822, 823, 824: n = A,T,C or G
gactcactatagggcgaattggagctccccgcggtggcggcccgaggtacatgctacaccacttctccagacttgacctctatcaaagggcatttgggtatggcccgagatgggagtaacctctcttttcagctgtgtcaaattcttacaccatgttcttttgttttttcctcataatacaaggccaagcacatctgcaaaaaagacattgctggaggaggtgcaaagagctggaaaccaagtctccagtcctgggaaaagcagtggtatggaaaagcaatggaaagagcattttgaaaatgccattccactgttttctggcctttatgatttctgctgagaaatccactgttagtctgatggggtctccttcatagcaccaatgacctgaagagccttgttgaaggaagactccatctgatgactcagagcaagtattttttagtgtgttattgttattagcagaaagagggccataaaatacatggggcaagatgaatatatcttaggcaaaagaagaaaatattcaaattcttatgttattttatctaattattttatctctttttgngtgtgacttataatggtgtgtattgtattaataaaagtntataaacatgtngttcaaaannnannnnnnnnnnnnnnnaaaggtcccctgncggcnnnnnntnnnnnnnnntnntnnnnnnnnnnnnnnnnnnnnnnnnnnnnntnnnnnnnnnnnnnntnnnngnnnnnnnnnnnnnnnnnnnnntnnnnnnnnnnnnnnnnntnnntnnnnnnannnnnnnnnntnnnnnnnnnnnnnnnnnnnntnnnnn

SEQ ID NO: 1786 - DNA, 838 bp, Homo sapiens
  misc_feature 696, 750, 772, 790, 803, 805, 828: n = A,T,C or G
tagggcgaattggagctccaccgcggtggcggccgcccgggcaggtactaatttacattcccaccaacagcatataaacattaatttttatcacattcttaactgtgtctattattttttgtcttttttaaagtataataatttttaaaaagtaaagaagaaaagaaagaaaaaaaattgataggatcttgctttgtcccccaggcaggaatgcaatggcactatcatagcttactgcagccttgaacttctggacccaagtgatcctcctgcctcagtcctctttgtagctggaaccagaagtgtgtaccactatgcctggctaatatttttatttttttatttttgtagagacagggtcttgttatgttgcccaggctgttctcaaactcctatcctcaagccatcctcccatctcagccactcaacttgctggaattaccagcggaagccactgtgcccagcccagactcccttttacctagtatatcatgtctaatttctaacaaaaaattaaaaaaacattgtaagaggaaaaaaagaaaccctaaaacaaacaagcaaacaaaaaacccaaaacaacaaaaagtttcaagaaacagagctagctgacaggaactatattcagaaatgggcaggtatatttagaaattatcggattggtaattttaaaccaactatgactaatatgggaangaggggataatgggaaaaaatagaccaatttggcaagaaccggatcagttaatntaagccggagaaatggaaaggnttagaaaggaatccaatnaaaatttcttgangncaagaaacttaacaaaaatgaancatgggggtg

SEQ ID NO: 1787 - DNA, 832 bp, Homo sapiens
  misc_feature 473, 479, 616, 624, 631, 648, 661, 667, 669, 676, 677, 678,692, 698, 712, 716, 729, 732, 738, 747, 751, 759, 770, 773,779, 781, 784, 785, 789, 790, 791, 796, 798, 801, 808, 810,813, 815, 816, 820, 823, 829, 832: n = A,T,C or G
gactactatagggcgaaattggagctccaccgcggtggcggccgcccgggcaggtacgtccatcttccagctgcttgccagcaaagatcagtctctgctgatcaggaggaattccttccttatcctggatcttggcctttacattttctatcgtatccgagggttcaacctcgagggtgatggtcttccccgtaagggttttcacgaaaatctgcattttggtggcggctccaccgcagatggcggatcgaaaagccccgcgtactcgccagtccagccgctcctgcacacacattcaccacagtcacagtcgccgttacctccgcagagcagccctttgtgtctcacgcaggagaaattgtcacactggcaatcccgcgtacctcggccgctctagaactagtggatcccccgggctgcaggaattcgatatcaagcttatcgataccgtcgacctcgagggggggcccggnacccancttttgttccctttagtgagggttaattgcgcgcttggcgtaatcatggtcatagctgtttcctgtgtgaaaattgttatccgctcacaattccacacaacatactagccgggagcataaagtgtaaagcctggggngcctaatnaggtganctaactcacattaattncgttgcgcttcantggccngntttacannngggaaaacctgtcnggccanctgcattaatgaantcgnccaacgccccggnaanaaggcngttttatgnattngggcgctnttccctttctnggntcactnanctnncttnnnttggncntcnggttacncnaangnntaanaanctaacntcn

SEQ ID NO: 1788 - DNA, 839 bp, Homo sapiens
  misc_feature 316, 349, 362, 369, 393, 395, 397, 400, 403, 405, 411, 412,414, 418, 419, 439, 469, 475, 505, 521, 542, 544, 568, 585,593, 606, 608, 615, 620, 682, 684, 690, 715, 721, 724, 726,729, 740, 756, 773, 780, 781, 784, 786, 791, 792, 795: n = A,T,C or G
  misc_feature 796, 806, 812, 814, 815, 817, 820, 823, 826, 827, 829, 832,836: n = A,T,C or G
tcactatagggcgaattggagctccccgcggtggcggccgaggtacgcggggagtcctgaaagggtgggcaaatgtgcagctctccctcagggtcgtgggatctgggtccaacagtctggcctttcagccttcaggctgttttaggcttgaagtttcgtgtggctgatcaaagaaagaaggcatacgcagatttctacagaaactacgatgtcatgaaagattttgaggagatgaggaaggctggtatctttcagagtgtaaagtaatcttggaatataaagaatttcttcaggttgaattacctagaagtttgtnactgacttgtgttcctgaactatgacacatgantatgtgggctaanaaatagntcctcttgataaataaacaattgncnantantananttcaannanaaanngtacctgcccgggcggccgntctagaactagtggatcccccgggctgcangaattngatatcaagcttatccataccgtcgacctngaagggggggcccggnacccacttttgttccctttantngagggttaaattgcgcgcttggcntaattcatggtcaatancttgtttnctgtggggaaatngntattcgnttcanaattccccacaacattacgagcccgggagccttaaagttgtaaagccctggggtgccctaangngtgaanctaactcacattaatttcgttgcgnttcctngcncnttntccagccgganaaaccttgccttcccngctttttttaattaaantgcccannccncnggggnnagnngttcgccttntttggncnntnttnccnttnntnggnttantta

SEQ ID NO: 1789 - DNA, 878 bp, Homo sapiens
  misc_feature 559, 567, 595, 598, 602, 618, 620, 638, 655, 725, 729, 756,790, 791, 805, 806, 807, 859, 861, 868, 872, 877: n = A,T,C or G
cgactactatagggcgaattggagctccaccgcggtggcccgcccgggcaggtacgcggggagatttttgatatctcaatctgcagccattcttcaggtcgtagcatttggagcaaaaaaaaaaaaaaaaaaaaaaggagtttgcttttgtcgggagattgaaagatgtttttgtttctttctttgtaaaggccttggatattgaaaaataccaaggcagaacagttggacaatctatttcttgagccaaatttaattattcttatttttgtaatcagtcattggcttcttatctggatgaaggcttttggaggagaaccaaaacgacaagttccaagaagaagatgaagctccgcctccgccgcttagtcccaaccctgcccaggaagaagggcccgtggggctttgcctgtgcccgtccaccaaaggctgtcatgtgtctcgaaatcagcagccctccccatcccaatcccaggcagcttgtgtgtacctcggccgtctagaactagtggatcccccgggctgcaggaattcgatatcaagcttatcgatacccgcnacctcganggggggccccggacccaagcttttggtnccnttantggagggttaattgcncncttggcgtaaatcatggncatagctggtttcctgngtgaaattggtattccgttcacaatttcccacaacatacgaacccgggagccttaaagtgtaaaagcccngggnggcctaatgagtgggcctacctcacanttaattgccttgcgctcacttgccccttttcaanncgggaaaacctgtnnngccaacttgcattaattgaatcggcccacccccccgggaaaggcggtttgcntnttgggcncctnttccnt

SEQ ID NO: 1790 - DNA, 887 bp, Homo sapiens
  misc_feature 436, 457, 461, 464, 471, 481, 487, 508, 520, 526, 527, 533,564, 577, 588, 615, 646, 664, 667, 669, 678, 689, 695, 712,716, 726, 732, 735, 740, 741, 746, 757, 758, 766, 772, 777,781, 785, 789, 792, 794, 798, 805, 808, 810, 822, 836: n = A,T,C or G
  misc_feature 840, 843, 845, 847, 848, 850, 865, 866, 872, 874: n = A,T,C or G
cgaattggagctcccccgcggtggcggccgcccgggcaggtactgtaactctcagtctgagaccgaaagcctcaagacctggggggcctctggtgtgtaagtcctggaatccaaaggctagtgagcctggagttctgatgtccatggtggcagaagtctgtcccagctctcagagaaagaccagcttgccttctgtatctgttctctctgggcccctggctgattggatggtgcccatcaacaatgagggcagatcttccccacctcatccactcacgctgacacattaatcttctctagaaacactctgagacgtgccccaaataatgctctattaggtttctaggtattccttaatccagtcatgttgacaccctaaaattaagtctacaggtctaccccttgcaacttggcacccatatgcatgtttttaaanccgtattttaaaattttccanaatnaangacaatnaccaagggtnatattnataattttctcccggacatgnatataacctatncctgcnntccaanccaaaaaatgcccctatattccttccctagnaatttgggctttntagggaattcnaacatttggggattttaatatttttanaatttattaattttggggacctttagatggnttggggatttttaacccnctnangggattttnggtcttttatngaattntccaaaatttggggaantacnacctatttgngaactnttntcctnntgggnatttataattnncacccggntttttnggcanccgngccnggtnctntnttangctattnagncntttttaaaccanttccctttgaaaanttanttntntnncntttaaacatttggtnnccaaangnccttccttttatt

SEQ ID NO: 1791 - DNA, 900 bp, Homo sapiens
  misc_feature 142, 143, 144, 176, 212, 215, 279, 332, 345, 361, 369, 385,445, 453, 455, 466, 479, 485, 508, 513, 518, 532, 536, 559,560, 571, 572, 585, 586, 587, 591, 594, 612, 617, 625, 628,633, 642, 653, 655, 664, 669, 678, 689, 693, 728, 755: n = A,T,C or G
  misc_feature 763, 775, 785, 786, 794, 802, 804, 812, 815, 820, 823, 845,848, 855, 861, 869, 883, 884, 887, 891: n = A,T,C or G
gcctatcgactactatagggcgaattggagctccaccgcggtggcggccgcccgggcaggtacgcgggggtgcctgcctaccagacacccattcttgcacgatcaccattaaaattctctcttccattgttaaaaaaaaaannncaaaataaaaaaaagtaccttggccgctctanaactagtgatcccccgggctgcaggaattcgatatnaancttatcgataccgtcgacctcgagggggggcccggtcccaacttttgttccctttaatgagggntaattgcgcgcttggcgtaatcatggtcataactgtttcctgtgtgaaattgntatccgctcacanttccacacaacatacnaacccggnagcataaagtgtaaancctggggtgcctaatgagtgagctaactcacattaattgcgtttgcgctcacttgcccgnttttccantngggaaaccttntcgtgccagcttntattantgaatcggccaacgcccgggganaggcngtttncgtattgggcgctntttncgcttcctcgcttacttgactanntggactcgggnngtttcggttgagnnnaacnggnattaaacttacttaaaangcggnaataccgnttntcccnaaaattcangggataacccnangaaaagaanatttnatccaaaangcccacaaaanggcnaggaaccgtaaaaaaggcccgcgttgctggcgttnttcaataaggctccgccccccctgacnagcattgnaaaaaatcgacncttaagttannaggtgggnaaaccccncnggattttnaanaaacnagngttttcccctggaagatccttntgnccctttnttttcnacccttcngtttaccagaaacnntgncccnttttcctta

SEQ ID NO: 1792 - DNA, 882 bp, Homo sapiens
  misc_feature 487, 549, 579, 588, 589, 597, 604, 616, 622, 646, 658, 662,664, 665, 670, 674, 680, 703, 706, 708, 724, 729, 763, 767,781, 790, 793, 806, 807, 810, 811, 818, 819, 826, 844, 847,848, 849, 850, 851, 852, 864, 879, 880: n = A,T,C or G
tcctatagggcgaattggagctccccgcggtggcggccgaggtacctatttgggagagccaagtggaactcttgaagcaaaataagtgtttcccagccttcacatcctaacactgtcaatgaactctcttaagttgagtgaagtggaagcgtgctgagttactgaagtgccaggtctttaatccaatcagctcacaacctctttcctgacttttgcaatatagattgtcaataaaggttagctgtcccttgaatgctcatggcaaagaaggtacttttttttttttttttttttttggaaatgcttatgtctccatttattttattttatttttttataaaaaagcaggcataaaatacaattacattactacgaagatgcaacaaaattttaaaaaagaaaaaggggtgcaatttttttcagagaggacagctgatcaaatatttataattttctaaaccatgcagttcattacttattacaattncaaacaaaactcattattatggggatgggagtcagggagaggcccccccccaaacatgaatntccagccgctgcacacaggggcttatgttnaaagtgctnncaaatggnggttttncacaagcattangggaancttgaagccttttttccagggaanggagagggggantcantnncagtntccnttgcanacctcaaaaagcttcggcagtgnacntngttcaaaatcaagatntttanaccccatttaaaagcattgttttccccggcgtanctgnccgggccggccggnttttaaaanaantggatcccccggnntgnngggaatnntttcaangcctattcattcccgccnccnnnnnnggggggcccggncccatttttggtccnntt

SEQ ID NO: 1793 - DNA, 893 bp, Homo sapiens
  misc_feature 17, 67, 86, 98, 102, 104, 120, 123, 136, 167, 179, 258, 263,275, 292, 301, 302, 303, 307, 314, 319, 328, 329, 331, 357,361, 366, 367, 368, 376, 378, 380, 384, 397, 404, 409, 442,445, 456, 468, 473, 481, 488, 492, 503, 512, 525: n = A,T,C or G
  misc_feature 534, 551, 573, 575, 579, 590, 595, 599, 600, 611, 617, 635,636, 645, 659, 664, 671, 676, 678, 688, 695, 698, 702, 723,730, 737, 738, 742, 746, 747, 752, 755, 765, 767, 771, 775,785, 786, 791, 802, 804, 820, 825, 826, 828, 831, 837: n = A,T,C or G
  misc_feature 843, 844, 847, 851, 852, 870, 874, 878, 882, 883, 892: n = A,T,C or G
ctactatagggcgaatnggagctccccgcggtggccggccgcccgggcaggtactttttttttttgnttcactcaattgggcaatnaacatggagagncacntnctctgatggtatctcnganaatactggttgtnggactggccaatagtgccttcgggactgggngcacccccaggnctgcggcagttgtcacagcgccagccccgctggcctccaaagcatgtgcaggagcaaatggcaccgagatattccttcngccantgttcacctacntggtatgtcttcccatnatcgcccgnnnaccncggccgntctanaactaggtnnancccccgggctgcaaggaattcaatancaanctgannngataccgncnanctcnagggggggcccgntacccanctttngctccctttagagagggggaattgcgcgctagncgntaatcatgggncataggatgagncctgngtagaaanttgttanccgntcacaaatccnaaacaacanacgaccccgggancaataaaantgtgaaaccctgggggngccttaatgaagtggagctaancntcanaattaattggngttgngctnnctgggccgcgntacaangcggggaaaccctgttcnnagccatctngacaattaatgaanccggncaaaacncaggngnaaagggcatntttagcntantgangcgacattttacgattcattngacaccngactcgnntggnctcnngccgnacngctggcgcgnangcgngatnaggccccacnncaaangccggtaaaancngtgatcccacgaaaanaaagnngnttnccgcgngaaaannaanaggnntgcccaaaagggcgaaanaaanggcnctanncccgtatang

SEQ ID NO: 1794 - DNA, 840 bp, Homo sapiens
  misc_feature 589, 602, 617, 627, 638, 640, 643, 661, 673, 694, 717, 727,728, 743, 744, 760, 777, 795, 818, 838, 839: n = A,T,C or G
actactatagggcgaattggagctccccgcggtggcggccgaggtacccaaagccatatttgttagagtaatcaacccatttggtgacccactgaaatgatgtgctcagctgctctttgggaatgcaatcagcttccggcatgttttccagacatccccgaagaacccttgcctgtgtctgcaacacttcccatggtacagatggattcagttcaaaacctggctttactaccccgcgtacctgcccgggcggccggctctagaactagtggatcccccgggctgcaggaattcgatatcaagcttatcgataccgtcgacctcgagggggggcccggtacccagcttttgttccctttagtgagggttaattgcgcgcttggcgtaatcatggtcatagctgtttcctgtgtgaaattgttatccgctcacaattccacacaacatacgagccgggagcataaagtgtaaagcctggggtgcctaatgagtgagctaactcacattaattgcgttgcgctcactgcccgctttcagtcgggaaacctgtcgtgccagctgcattaatgaatcggcaacgccccggganaggccggtttgcntattgggcgctcttncgcttcttgnttactgacttngntgngctcgggccgttcggtgnggcgagccggtnttagcttacttcaaaggcggnaatccggttattcacagaatcanggggataacnncaggaaagaacattnnaaccaaaaggccagcnaaaaggccaggaacccntaaaaagggcccgtttgntggcgttttttccataaggctcngcccccctgacaagcattannt

SEQ ID NO: 1795 - DNA, 847 bp, Homo sapiens
  misc_feature 507, 574, 640, 676, 712, 728, 759, 771, 775, 779, 781, 795,798, 811, 828, 847: n = A,T,C or G
gactcctatagggcgaattggagctccaccgcggtggcggccgcccgggcaggtaccaattaatgacaagaggttagatagaagtatgctagatggcaaagagaaatatgttttgtgtcttcaattttgctaaaaataacccagaacatggataattcatttattaattgattttggtaagccaagtcctatttggagaaaattaatagtttttctaaaaaagaattttctcaatatcacctggcttgataacatttttctccttcgagttcctttttctggagtttaacaaacttgttctttacaaatagattatattgactacctctcactgatgttatgatattagtttctattgcttactttgtatttctaattttaggattcacaatttagctggagaactattttttaacctgttgcacctaaacatgattgagctagaagacagttttaccatatgcatgcattttctctgagttatattttaaaatctatacatttctnctaaatatggaggaaatcactggcatcaaatgccagtctcagacgggagacctaaagcccatttctnggctggagctacttggctttgcgaccctatgggggaggcataagtgccctggagtttggggttggncttttttgtaaaatggaggggttggccttaatcagngattttcattagccttaaaaattttttggaagaacnagaacctttttttttnaaaaccggttggatgccaccctttttttttnaacccgacccgntccnggtngngcttaccttggctnaanaaaagggatggangggtttttaaaccgggnccttcatttttcccttaan

SEQ ID NO: 1796 - DNA, 862 bp, Homo sapiens
  misc_feature 3, 4, 5, 67, 68, 87, 100, 131, 160, 204, 219, 224, 227, 269,272, 292, 306, 320, 395, 398, 416, 485, 586, 608, 683, 689,700, 710, 718, 724, 725, 730, 733, 749, 801, 840, 845, 850,851, 861: n = A,T,C or G
agnnntatcgactactatagggcgaattggagctccccgcggtggcggccgcccgggcaggtacttnnttttttttttttttttttntttttacagtctnataggtagaaggaacttgccttgagtctcanatgagacttgggacttaggacttttcagnggaggctggaatgaattaagacttttggggactattggaaaganatgattatattttgnaatgnganaagagcatgcaatgttgggggctggaggggaatgatgtaatntanatatttgacccttccaaatntcatgttgaaatgngacccccattgttnaaggtggaagctgatgggaggtgtttgagtcatgcaagaagatcttcatgaatggattcatgctgttttggtggnagngagtgagttcttgctctnaattcaagcaaaatctggttgtttaaagagtgtggaatgcccctctgtctctagctcctttctcaccgngatatatgctggctccccttaaacctccaacatgattttaagccttcctgatgtcctcatcagaagcagatgtcacattatgcttcatatatagcctgcanaaccatgagccaaataaacctnttttttttataaattaccaagccttaggtattattttatagcaatgccaatgttcctcggcccgtttaaaactangggganccccgggctgnagggaattcnaaataaanctattnntcccnccnccccgggggggggccngacccactttttgttccttaatgagggtaaatgccccctggcgaaaaaaggncaaacttgtttctgggggaaatttttccctccaaatccnccaanatacnngccggggcana

SEQ ID NO: 1797 - DNA, 898 bp, Homo sapiens
  misc_feature 627, 657, 662, 668, 670, 714, 736, 746, 755, 779, 782, 796,808, 830, 841, 861, 862, 864, 882, 884, 892: n = A,T,C or G
gccgtatcgactcctatagggcgaattggagctccccgcggtggcggccgcccgggcaggtacgcgggaatcattttgcttccaaccccatttagcctgccattgaaatgcaaaagtctgttccaaataaagccttggaattgaagaatgaacaaacattgagagcagatgagatactcccatcagaatccaaacaaaaggactatgaagaaagttcttgggattctgagagcctctgtgagactgtttcacagaaggatgtgtgtttacccaaggctacacatcaaaaagaaatagataaaataaatggaaaattagaagagtctcctgataatgatggttttctgaaggctccctgcagaatgaaagtttctattccaactaaagccttagaattgatggacatgcaaactttcaaagcagagccttccgagaagccatctgccttcgagcctgccattgaaatgcaaaagtctgttccaaataaagccttggaattgaagaatgaacaaacattgagagcagatcagatgttcccttcagaatcaaaacaaaagaacgttgaagaaaattcttgggattctgagagtcttccgtgagactgtttcacagaaggatgtgtggtgnaccttggcccgctctagaactagtgggatnccccnggctgnanggaattcgatatcaagccttatcggataccgtccgaacctcganggggggggccccggtaccccancttttggttncctttaagngagggtaaattgcccccttggcgnaancaatgggccatagntgtttcctgtgngaaaatgtttttcccttcacanttccccacaanataccaaccggggcataaanngnaaaccctgggggcctaangngggggctnactcct

SEQ ID NO: 1798 - DNA, 887 bp, Homo sapiens
  misc_feature 2, 566, 624, 625, 626, 646, 667, 682, 691, 696, 707, 710,713, 718, 726, 727, 730, 743, 748, 750, 752, 753, 756, 759,762, 772, 777, 779, 800, 803, 810, 816, 817, 820, 822, 830,831, 832, 834, 837, 838, 848, 853, 858, 865, 866, 868: n = A,T,C or G
  misc_feature 874, 876: n = A,T,C or G
cncgtatacgactactatagggcgaattggagctccaccgcggtggcggcccgaggtaccgcggggagaggccacttccttccccaatccttccgtttcagctgggagaatgggacaagattcaggtgcccccaatggggagagggcgtggatgcggctggcttcctgctataaaaacacagagcagcctaccctctacctggttgatctggtagtgtcttctgctatggcgtgcaggcagagaggaggctcttggagtccctcaggctggttcaatgcaggctggagcacctacaggtcgatttctctcttcttcgcccttgtgacttcagggaactccatagatgtttctcagttggtaaatcctgcctttccaggcactgtcacttgcgatgaaagggaaataacaagtggagttcccaagcagtcctggcaccaagaaatggcatgcatctgtggtggatcctcttggtctcgacatgcccgaactgcacttacatcctgggacccaaaaaaagcttaccctgagggctacctatgataactgtacctgcccgggcggccgntctagaactaagtggatcccccgggctgcaggaattcatattaagcttatcgatccgnnnacctcgagggggggcccggnacccacttttggtccctttantgagggttaaatgcncccttggcnaaatnatgggcatagntgnttncctgngggaaaanngtnttccattaacaanttcancnanncantanaanccgggagcanaaagntntaagacctggggtgccttatnagntgacctnactccnnttnanttggtttnnntnaannggcccctttntcagnggganaaactannangccccntncattaagaaat

SEQ ID NO: 1799 - DNA, 888 bp, Homo sapiens
  misc_feature 2, 500, 538, 588, 660, 672, 682, 683, 720, 731, 736, 741,743, 758, 771, 786, 800, 838, 841, 845, 863, 868: n = A,T,C or G
cntatacgactcactatagggcgaattggagctccccgcggtggcggccgaggtacctgtatccccaataatacagcccctgatgtaactatcactaagggtctataaggcctcaccactctaggaaatgaactagctgaaaattcgggaatgaatgatccctttacaggtgtaatggaaaaaatggtttggtagatggaaaggactaatggcctctattctcacctcccttgtgatcataataggggtgctcattctcttagggtgctgtattataccctgtgtctgcggactagttcaaaagctcatagaaacagcccttaccaagacctcccacaactctcccccaccctattcagataaacgtttatttctaagcaaccaagaagagcagtgaagccagatcctgttagaaatatatgaagaggaaggactacaaaatcaaaaggggaaaattattagacaaaatgagttgctctacaaaggtccaacttcgttgncctttgttctggaacctttgttctgtaaactgcccttnccgcaaaaactgtctttcccgccgaccaaaactgctcttcactatcctgnaatccatacccctactctatttgaaactgccaatcgggaatcaagcttacattgggggtgggtcaacccccnccccatggaggnaaaaaacccnnaaagccaaagcttttgatgccattaggggtaaaaaanccctttctttncctgnccaangngctcttgaaaatggntacaggcccagcnagcccccttttgcanaaaataaaccttgnctttgttggaacaaaaaaaaaaaaaaaaaagtacctgnccnggcnggcggttttaaaaaaggngggancccccggctgcaggaattct

SEQ ID NO: 1800 - DNA, 888 bp, Homo sapiens
  misc_feature 2, 3, 4, 5, 6, 7, 8, 9, 11, 550, 588, 597, 624, 632, 685,686, 699, 701, 705, 706, 709, 710, 714, 715, 716, 717, 722,729, 733, 737, 738, 744, 748, 752, 753, 763, 765, 773, 775,782, 783, 784, 788, 807, 824, 826, 844, 868, 873, 888: n = A,T,C or G
gnnnnnnnncnctaatcgactcactataggggcgaattggagctccccgcggtggcggcccgcccgggcaggtacagaaggtagatttagaggtgaggggcaataagtaaatgactcgcacagatggtgttcatgctcaatgtttctcttctgaacaattttcagatttggtgttaaagcaccttctggccaggcgtggtggtttatgcctgtaatcccatcacttcgagaggcggagtcgggtggggattgcttgaggccaggagttcaagactaccctaggcaacatagtgagatgctcgtctctattaaaaaaaaaaagaaaaaaaaaggggacccaaggccatatatctgtttcattcctagaaactctccacagtgtcagatgaagactgcaaatccagtggtcctacattcacagataattcctagcctttggttagtgaggagaatgggatgggaggacacaaaatgaggacttttttgtggtatgctcaattcgtatctggcagtacccttggcccgcttctaaaactaagtggatcccccnggctgcaggaattccatatcaagcttatcgatccgtcnaccctcganggggggccccgtacccaacttttgttncctttaantgaggggttaaatgccccccttggcgtaaacatgggcataactgttttcctgnntgaaaatgttttncntttnncanncccnnnncaaancaccttntctnaaanngctaancccngggnncctaataggngncctacctncnataattnnnttgncctactgccccttttcaantcgggaaacctgtctgncnacttcatttaatgaaatngcccaccccccgggggaaggcggnttgcntttgggccctttccn

SEQ ID NO: 1801 - DNA, 857 bp, Homo sapiens
  misc_feature 61, 69, 72, 73, 76, 85, 90, 137, 138, 232, 270, 299, 438,539, 552, 592, 595, 638, 666, 686, 701, 713, 714, 723, 724,728, 731, 744, 753, 759, 770, 773, 781, 786, 792, 812, 814,819, 821, 824, 829, 831, 838, 845: n = A,T,C or G
gactcactatagggcgaattggagctccccgcggtggcggcccgcccgggcaggtactttntttttttnttnnttnttttttttnggggngatacataaagttttgcattttccaataaatgatgactgtgattcanngaaatatggcatatgtgtaattaaaaaccactttttataaaaactatctttgctgcatgctgctctatgacattttctgtgtgttattttattncttttccttttaatgctggtcactgctacccatttagncaacttggaccaccctctagaggggcttnaactgttattttcaatacattgtcacagggacagaggagggtgttagggaactctgtgactaaagagttttccataaatgggtggacctcagtttacaagccttaagttattgggccaggagggggaacagatcatgantaggagagtggaaaagaaagatgacaaatcactttaagtcagacaaacctctttctgtactagctcccttacttactaatcataaaaccggggatatattnttaaaaattttanggggctttagtttcctacttggaaaacactgacaaagctnctncattaaaagctgtggcaacatgaccagttaaaagggtaaagcnctgacctggggccctgatgtattaagcnctcaataaatcggggcaatnatgacatttgggganggatgacactcnntaacctggnngggngtntttttaaaagganaaaaaccgnttgttncctgggccgtntanaaactaanggatncccccngggtgggggaattccatttnanccttntngancccgncncccccanggggggncccgtcccccct

SEQ ID NO: 1802 - DNA, 891 bp, Homo sapiens
  misc_feature 320, 363, 415, 537, 575, 578, 581, 604, 609, 611, 614, 625,630, 636, 638, 639, 648, 649, 651, 655, 658, 659, 667, 677,682, 684, 695, 700, 709, 712, 721, 725, 731, 736, 737, 739,746, 751, 755, 768, 773, 774, 795, 797, 800, 801, 803: n = A,T,C or G
  misc_feature 806, 813, 815, 818, 819, 822, 829, 830, 838, 841, 845, 847,849, 853, 858, 877, 883, 886, 887, 888: n = A,T,C or G
ggcgaattggagctccaccgcggtggcggccgaggtacacttctctttccctgaatatgacttgcctctggtgaacagaattttgcagatgtagttaagctctaaaatcagttagtgtttggctcatcagtagggaaattatcctgagtgagcctgatatacactgatatgacaggctattcttgctgacttgatgaagcaagcagccatgttgaggaaatccacatggctaagaactgtgaccagcctctaggaactgtaggcaacatttagggcctgagattacccagctaaaagtcaggagataggcttgggatttnagtcatactgtcataaaaacatacatttttgccagcaaacttnatgaccttggaagcagactctttcccagtcaagattccaaatgaaaattcancccagcttgacacgctctagaactagtggatcccccgggctgcaggaattcgatatcaaagcttatcgataccgtcgaccttcgagggggggccccgggacccagcttttgtttccctttantgaggggttaattgccgcgctttggcgtaaacaatggncanaantggtttacttgtgggaaaatttnctatncnttnaccaatttccnaccancaaacncnngccgggggnntnaagntgnnaagcccgnggggggcctnatgangngagctaacttncatantaatttggngtncggtacatncccntttttnaaganngnaaaatgntgtgncccncttcattaaatanaatannccacacctggcgtgaaggggngnttnngntantggggcncnatnnccnatgctannttacagancanattncncnaggncgatnatgatgacgacgcagacgngatcanacnnnaca

SEQ ID NO: 1803 - DNA, 876 bp, Homo sapiens
  misc_feature 3, 9, 11, 18, 20, 35, 36, 37, 38, 42, 95, 99, 112, 113, 124,129, 196, 200, 206, 207, 228, 244, 245, 247, 249, 256, 269,278, 289, 293, 297, 308, 309, 335, 339, 346, 348, 349, 350,383, 391, 398, 408, 426, 451, 455, 482, 492, 495: n = A,T,C or G
  misc_feature 527, 530, 533, 544, 545, 554, 569, 570, 585, 596, 606, 619,620, 621, 647, 648, 654, 666, 672, 700, 711, 712, 718, 720,725, 730, 740, 755, 760, 767, 771, 777, 786, 794, 797, 803,808, 813, 814, 815, 816, 817, 822, 829, 831, 832, 833: n = A,T,C or G
  misc_feature 840, 843, 846, 865, 866, 869: n = A,T,C or G
agnaagcgncnattttcnanttcgactactatagnnnnaatnggagctccaccgcggtggcggccgcccgggcaggtactttttttttttttttnttanaactttttttttnntattttttatnccatnattccatctttttcttcttccacttgacctgcgattcaccaacattggtccagacaccatgcatgtnaacngggctnnacccccatccattgatttaancaacttcctggtgcgnnantnacctgtnaaaaatgaggaanatgtggganagttgtcaatntctncttnatacaatgcannggtcttaacaaatctcctgcctggtncctnggcccgntnnnaaactagtgatcccccgggctgcaaagaattcnatatcaancttattnatacccgtcnacctcgagggggggcccngtacccaaacttttgttccctttantganggttaattgcgccttggcggtaatatnggtcataaantgntttcctgtgtgaaattgttatccgcttacaanttncanacaacaatacnnaaccgggancaataaattgtaaannccttgggggtgcctnaatgaagtgancttaaacttnaaaatttaattgnnntggagcttaaattgcccctttttaanntaaggnaaaacttgtttngcaacntggatttaattaattaggccaacccccngggaaaaaganntttgcntnttagnccctnttcagtttanttataaaataaattntttgnctaaganattngttttnagtaagggntataaatnaanaaaaanggggnaaaannnnntttcnaacaaantnnnggttttncanagnaaaaaaatttatacataanngcnctaaaat

SEQ ID NO: 1804 - DNA, 883 bp, Homo sapiens
  misc_feature 1, 2, 4, 5, 6, 7, 9, 655, 659, 713, 744, 763, 774, 785, 795,803, 805, 814, 823, 833, 835, 837, 840, 844, 857, 866, 870,882: n = A,T,C or G
nngnnnntntcgactcactatagggcgaattggagctccaccgcggtggccggccgcccgggcaggtacttggttaatctagcatttgttagccaatgatgtcctttggtattcatcaaatttaccacagcatgggggggcctttatattcaggttttgcccaagagttagcttatctgcttgttgtgctagcagggctgttgctgccaaggccctcaaacatgagggccaacacttagaaaccctgtctaattgtttagagagataggccaccagctttggccagtgtcccacagtctgggttaaaactattaactatcatttttttttctgacacatattgtgtaaaaaaaaaaaaaattataaaaaaagtacctcggccgctctagaactagtggatcccccgggctgcaggaattcgatatcaagcttatcgataccgtcgacctcgagggggggcccggtacccagcttttgttccctttagtgagggttaattgcgcgcttggcgtaatcatggtcatagctgtttcctgtgtgaaattgttatcccgctcacaattccacacaacatacgagccgggagcataaagtgtaaagcctggggtgcctaatgagtgagctaactcacattaattggcgttgcgctcactgnccgntttccaatccgggaaacctgtcgtgcccagctgcattaatgaatcggccacgcncggggagaggcggtttgcgtattgggcgctntttccgctttcttgctcantgactccttgncctcggcgttnggctgcgggngagcggtntnaacttactnaaaagcggnaataccggtntncncanaatnaggggataccccnggaaaaacntttnaccaaaaggccnt

SEQ ID NO: 1805 - DNA, 916 bp, Homo sapiens
  misc_feature 1, 473, 562, 565, 566, 574, 590, 591, 594, 629, 667, 676,683, 713, 714, 728, 749, 769, 782, 789, 793, 796, 799, 802,804, 807, 814, 815, 817, 818, 827, 829, 830, 831, 842, 844,846, 852, 853, 857, 860, 861, 863, 868, 878, 883, 893: n = A,T,C or G
  misc_feature 900, 902, 907, 908, 909, 911, 912: n = A,T,C or G
ncgcgctcctatagggcgaattggagctccccgcggtggcggccgcccgggcaggtacgcgggacatcatgtctctctgaagaacagttaaagtgtcttctggatgaatgcatacttaaacaaaaatccatcattaaactttcttcagaaagaaaaaaggaagacattgaggacgtaacacctgtgttcccccagctttccaggtccatcatctctaaattgctaaatgaatcagaaacaaaggtccagaaaactgaggtagaagatgcagatatgcttgagagtgaagaatgtgaagcttctaaaggctactatctcactaaagccttgactggacataacatgtcagaagctcttgtcactgaagcagagaatatgaaatgccttcaattttccaaggacgttattattagtgacacaaaagactattttatgtcgaagactcttggcattgggagactgaaaaggccctncttcttagatgatccactgtatggtatcaagtgtgagcctttcatcagaagaccaacatctgaaactcaagtcttcagagaatacaatngcnngatgagcnggagactaaagatgcnncangaagaatgtaaagaaccctaatcaaggacttgctnggtgtgcttttcaaaaaagttggtaatggaagttaaantaaaatttnttattgnattatttggaaattcaatggatgccccggnnaaactattctttantggtttttgacctttgggggncctctttgggggatatattnccttgaaattttnagacctngggnggnaantgntnaangggtttnncnnaataaaaantnnngggaccatggntntnaaattnntggnaanntnccggntttgggatcnttttnaaaacccccnttttaangnttccnnntnnggga

SEQ ID NO: 1806 - DNA, 893 bp, Homo sapiens
  misc_feature 19, 20, 24, 290, 291, 292, 580, 589, 590, 591, 592, 593,594, 595, 596, 597, 598, 599, 600, 601, 602, 603, 604, 605,606, 612, 613, 614, 615, 623, 624, 625, 626, 627, 628, 629,630, 631, 632, 633, 638, 640, 641, 642, 643, 644, 645: n = A,T,C or G
  misc_feature 646, 647, 648, 649, 650, 651, 652, 653, 654, 655, 656, 660,674, 682, 694, 709, 719, 720, 721, 725, 727, 731, 732, 739,748, 750, 754, 758, 767, 770, 777, 778, 784, 790, 794, 796,798, 799, 804, 809, 814, 815, 816, 819, 829, 831, 838: n = A,T,C or G
  misc_feature 843, 845, 846, 849, 851, 852, 853, 854, 859, 864, 875, 876,877, 892: n = A,T,C or G
cgcgcgactcactatacgnngagncgaatcggagctccaccgcggtggcccggcccgcccgggcaggtacgcgggaagaaatggaaattctcttgaagctggatttcccacttgctgcgggtgtgtgctttgcttaacatgttaaaacctgcaggcgtggtggctcatgcctgtaatcccaacacttcgggaggctgaggcaggaggattgcttgagcccaggagttcaagaccactctgcacaacaaaaaaacccatctctaccaaaaaaaaaaaaaagaaaaaaaaannngtccgcggggctgactgttaaggaaagagcacccacatctgctcctacttagctttttttctgtggttcttacacagtattcctttttttcttttcttgaaagagactcctcctttcttttcttttcttgaaagagttttaaacagataagatggcaaaagtgactgatctctactcccccagtttgaatggtaaaatttgaatggtaaattcccatgaacatatatggaaatgtctttatcctactttctccaataaaggctgttcttagcttttcaaatgcagaanaaaaaaaannnnnnnnnnnnnnnnnnggcccnnnntttttttnnnnnnnnnnnaaaantnnnnnnnnnnnnnnnnntttnaaaaaaaaattttnttggaaanttttttttttanaaaaaaaccttacanattttaaaannncccnantttnnttttttnaaaaatggnanaaangggncccctaaanttnaaatttnngggggnaaaaantaancncnngcccnttttnaaacnnnggncccccgggtngngggaatntattncnnttntnnnnccccnccccngggggggcccnnnccccctttttttctnt

SEQ ID NO: 1807 - DNA, 909 bp, Homo sapiens
  misc_feature 2, 6, 11, 523, 563, 624, 628, 700, 760, 792, 815, 841, 851,895: n = A,T,C or G
tnatgnctatncgactcactatagggcgaattggagctccccgcggtggcggcccgtgggcgatctgggggccaggttcgggatgagtatcggcaggactacgatgctgggagaggaggctatggaaaactggcacagaaccagtgagtggtgagagctctgtcagtgacaaacactcctttggcctgttgaatttgctgaagaacatcacctaaagtctgcacacgagcccatttttaccaagatttgatcagtgtctttactgagctggaagcctctgaaagttattaaaggacagaatccaaaagaatgcctttaattcttgtctgagaatcttggccatgtgtcagattatcagaacaattttgttaccaggtcagaaattgtgttctttgacaacagattggatctgtaatgttgattagtctttagccataaccactacacttttagaaagacagaaaaatgtaaagaatttgtttttaccataatgagtcttaagtaggttcatgatctacattgnggcctgggattatttttttaatttaagtttgcatgaaatngcctaataaatggaggtggggccaggcatggtggcacacacgttgtaatcccaacactttnggangctgaggaggaaggatagcttgaggccagaatttgagactagactggcaacatagcaagaccccgtcttttncaaaccaaaacgaaaaacaacaaatggagttgtgctatgttttattgctttgcacaaaantaggaaccaggtgtttggacaattgaatttgntttctggggaattctaacctttnaaggcttccttaaaggtcaaggaccnttctgtgtanttggtgcaaaaacaattttcaaaggacagcactggtttcatgcnttataacattaagg

SEQ ID NO: 1808 - DNA, 911 bp, Homo sapiens
  misc_feature 595, 669, 755, 815, 816, 817, 818, 819, 820, 821, 822, 824,825, 826, 827, 828, 829, 830, 831, 832, 833, 834, 835, 836,837, 838, 839, 858, 866, 898, 908, 909: n = A,T,C or G
gccgtatcgactactatagggcgaattggagctccccgcggtgggcggccgcccgggcaggtaccctttctgattgtagagaaccttgtttctgcaggaagcctagctccaagcacgcagtctgtagacatttttgcctttgcccttgaaatgcttgcaaaatactttgttaacaaaagctgcaaagagagaacatgccgtgtgcctttagttagcacagcgggcagcctcagtgaaactcttaggttaagcagttaagtcctggaacccagagctgctgtgtatttcgagcgggcaagtttatcttttgctatacttattttcaattcaattacaccacgattcaaataattcccctcctaaaaccaaaaaggagggaaaccgtcaactccattgcaattacttatcttcctcttctatctctggtatacgccggggcatagaatgctcgtatacatctctttaacaaccacaaaccttaagccatgtagatgaaagttagtgcatcaacgggatacagttccatattgccttaaacctccttggtttagacacactaacatttataccaaattgcagattattctgcagaganggaattgcatgttgggttggatatttagtatgaacttttttcagaatataatatttcttagttatcaaaagtangttggaaaacatttgcaagactatgaaacatagaattgctggttttatattttaactggcagaatggggaatttcactggccttanattaatttaatttctggaaacaaaagaaggatttttcaattaaacttctggaaaattccnnnnnnnnannnnnnnnnnnnnnnnggtccttgggcggttttanaacttagnggatcccccgggctgggaggaaattcgaattnaagctttcgnnct

SEQ ID NO: 1809 - DNA, 886 bp, Homo sapiens
  misc_feature 4, 10, 27, 34, 68, 88, 134, 302, 686, 691, 697, 713, 716,726, 734, 738, 748, 752, 764, 777, 780, 792, 826, 828, 831,853, 863, 864, 877, 879, 883: n = A,T,C or G
aagnccattntaaactcccggcgaatnggttttncaacgcggtggcggccgcccgggcaggtacagtngcacaatcatagcttagtgnagcctcattcttttgggcacaagcgctcctcagcctccctcctcancctcccagttgctggaacttacaggtgcaccaccataaccagctagtttattttttgtagagacagaagtctcactttttttcctagactggtctgaaatagaccattctatttgctagaatggtctcaaaccatccttctgcctcagcctcccaaattgctggaatntcaggcataattcatcatgcctagccatttcttttttctgctgcattgcagagttaagaaccaatttcatttgtcctgcactgagaatgtgcattcccagcagatcatggttgagctcaagcacacctgcaactcagccagcctctttgaagggtgcacaagttactaactgtcaacgttgcacaagccacctttagcaggtatgttcaagaacttacattcccaccctttctaaaacagctcacagtaacaagaagaacgggatttaacttttggacatgcacactcatgaaaaccaatggattttggaaaagccaaaattggttgaaaagaataagggggggattctggactactagtatttttacaaatctggattggcgntgcanggtttnggtttaattttgtggnggnaatgccgaanagtggganaatnaattgggaanattngcctcttggggntcttttggcttgnaanatggcaaggggncccaattttcctttaattaaaaattaaaggtggngnccnggggttctgggggtaaaaaaantgaaactttnngcaataaaggttntngganagg

SEQ ID NO: 1810 - DNA, 926 bp, Homo sapiens
  misc_feature 10, 31, 36, 42, 65, 66, 88, 97, 98, 101, 126, 132, 231, 238,387, 413, 485, 512, 557, 592, 597, 598, 621, 637, 648, 677,682, 684, 686, 694, 704, 718, 726, 727, 731, 746, 748, 765,766, 770, 783, 797, 799, 812, 817, 820, 833, 840: n = A,T,C or G
  misc_feature 842, 856, 860, 861, 872, 876, 883, 887, 888, 894, 896, 901,910, 912, 919, 925: n = A,T,C or G
ttgtccattntaaactcccggcgaatggttntcaangcggtnccggccgcccgggcaggtacgcnntcaaagttaatggggtggtttnatctcacannttnagaactcgttcacctccaagcattncatganaaagctgcttcttattaatcatacaaactctcaccatgatgtgaagagtttcacaaatctttcaaaataaaaagtaatgacttagaaaaaaaaaaaaanaaaaaangtcctcggccgctctagaactagtggatcccccgggctgcaggaattcgatatcaagcttatcgataccgtcgacctcgagggggggcccggtacccagcttttgttccctttagtgagggttaattgcgcgcttggcgtaatcatggncatagctgtttcctgtgtgaaattgntatccgctcacaattccacacaacatacgagccgggagcataaagtgtaaagcctggggtgcctaatggagngagctaactcacattaattgcgttgcnctcactgcccgctttccaatcgggaaacctgtcgtgcccagctgnattaatgaatcgggccaaacccccggggaaaggcngtttnncgtattggggcgcctctttccgntttccttggattaacntgactcgcttncgcttcgggcgttccgggttgcggggganccggntntnagctcacntcaaaaggcngggaataccgggtnttccacannaatncagggggaataaccncngggaaaaaaaacattgnngaancaaaaaggccccnccaaaaagggccgngnaacccgaaaaaanggccncgnttgcttggcgttntttccananggcccccccccctngccnngccttacaaanaaantaccctncaanntaaaangnggggnaaaccccgncnggacttnataaant

SEQ ID NO: 1811 - DNA, 743 bp, Homo sapiens
  misc_feature 1, 3, 4, 7, 8, 11, 12, 13, 19, 22, 23, 26, 30, 32, 33, 45,48, 49, 50, 52, 54, 55, 56, 59, 64, 69, 71, 73, 76, 79,80, 84, 87, 90, 95, 101, 102, 104, 107, 114, 119, 120, 125,128, 296, 335, 353, 358, 360, 376, 379, 383, 388, 389, 429: n = A,T,C or G
  misc_feature 431, 452, 454, 456, 479, 492, 502, 505, 509, 519, 528, 530,547, 550, 555, 559, 561, 563, 574, 584, 585, 590, 593, 595,606, 616, 621, 635, 654, 657, 676, 677, 685, 689, 707, 722,729, 739, 740: n = A,T,C or G
ntnntannatnnntctatntannacntatntnntaattcagatcnatnnntnannnttnatttnatatntntnacnatnnatanctncanatttngtagtnnanttncagatcnggttnntcctntcnatcactatagggcgaattggagctccacccgcggtggcggagcataaagtgtaaagcctggggtgcctaatgagtgagctaactcacattaattgcgttgcgctcactgcccgctttccagtcgggaaacctgtcgtgccagctgcattaatgaatcggccaacgccncgggggagaaggcggtttgcgtatttgggcgctcttccngctttcctcgctcactgnactcncntgcgcctcggtgcgantcnggtnttgcnngctgaagccggttatcaagcctcacttcaaaaagggcggnanattaccgggcttatcccacangnanattcaagggggggaattaaacgnccagggaaataanaaaccattgntgnaaanccataaaaanggggcccangnccaaaaaaagggccccnatnggaanaacncngntaaaaaaaaanggggcaccgnncggtntgncntttgggcccgntttttttttncccanttaagggggccttncccgacccccccccccttnganccggaagggccaattttannaaataaanaaanttccgaaaccgccttttnaaaaggttttccaangaagggntttggggccnnaat

SEQ ID NO: 1812 - DNA, 871 bp, Homo sapiens
  misc_feature 2, 89, 102, 103, 450, 461, 479, 570, 574, 589, 594, 596,600, 609, 610, 647, 649, 650, 656, 657, 665, 672, 679, 690,693, 695, 697, 701, 710, 722, 725, 728, 731, 736, 739, 741,742, 743, 750, 758, 761, 762, 763, 766, 770, 773, 775: n = A,T,C or G
  misc_feature 781, 786, 788, 792, 793, 794, 796, 797, 799, 801, 804, 806,807, 810, 811, 812, 813, 816, 819, 822, 824, 826, 828, 832,834, 837, 839, 840, 841, 847, 849, 850, 853, 855, 856, 857,860, 861, 862, 865, 867, 868, 869, 870: n = A,T,C or G
tnttccattttctactatagggcgaattggagctccccgcggtggcggcccgaggtacttttttttttttttttttttttttttggggngcttaaaacaacnnccattttatttaatatctcatgattttgtggtcaggaatgtggacagagctcagctgggagattgttccactccatgtagcatcagaagacaggtctcttggtgatattcagctggagaataagttaatatgcagagttcaagatggtttcactcacattgacaccttggcagggatggctggagggctgggctcagccagatcagttaactggcgtgcctgcatatgcactctccaccatggtggtctctagaattgctcaaatctagaattggcgatgcatcccgtcagtcagcagctgtttacggaacaccagctgcaggccagcaccgtgctgcaaggcgtanatatgttgctnaacacgactcccttccanatgttcaggatttaacaggccagttaacagagggtcagagaaggcactcagcactgccttatgacatcagggaggattgctaaaggaaagngatncctaaacccccctgngatcntnatgnaatgggatnnagggggtaaacaagaacctgttttcctaacggtcctnanntttacnngttccccnttagganttttganctttttctggnaangntnggtnaacctttgnagaatttttaanccnaanagntgacnggntnnnaactgcntttttttngcnnnacntcgnctntngggtanaaaanancccnnntnncntnccngnnggnnnnttnaanttntngntncccngnctncnnnaatttntnnaanannnttnnnatncnnnnc

SEQ ID NO: 1813 - DNA, 463 bp, Homo sapiens
  misc_feature 4, 416, 448: n = A,T,C or G
actnctatagggcgaattggagctccaccgcggtggcggccgcccgggcaggtacccgggcgtgtgaggtgtcagtctgcccctacttgggggtgcctcccagttaggctactcgagggtctgggacccacttgaggaggcagtctgtccgttctcagatctccagctgcgtgctgggtgctgggagaaccactactctcttccccgcgtacctcggccgctctagaactagtggatcccccgggctgcaggaattcgatatcaagcttatcgataccgtcgacctcgagggggggcccggtacccagcttttgttccctttagtgagggttaatttgcgccgctttggcgtaatcatggtcattagcttgttttcctgtggtgaaaaatttgttatcccgcttcaacaaattttncaacacaaaccattaccgaagccccgggggangcattaaaaagttgt

SEQ ID NO: 1814 - DNA, 867 bp, Homo sapiens
  misc_feature 259, 262, 475, 597, 625, 635, 650, 652, 655, 658, 661, 667,672, 696, 707, 711, 730, 733, 734, 744, 748, 752, 753, 769,771, 774, 779, 780, 781, 782, 783, 784, 785, 786, 788, 791,799, 803, 821, 823, 826, 829, 832, 833, 834, 835, 842: n = A,T,C or G
  misc_feature 844, 853, 856, 857, 863, 864, 866: n = A,T,C or G
gactactatagggcgaattggagctccccgcggtggcggcccgaggtacgcaacatgacattggctggtgtaaagatcttacaattatttttaaagtttcattgtattcatttgattatataagtttcttgccatcacaacaaacactcctattcatgtctaattcgatacctggtgagtccacataagcatttgggtccccactgatgagagcaccatggccaggtcacccacttgatcaggttctcttgctttttgntgngcatctcatcttattgtaggcattcaaactgtgggctcaggcgagcctttccagtgtgatcatattaattttatattttatgtgttaacatgcgcctccaataacttgctttccttgctcaccatgggtgatgcatttttcctactttatgtcctcgctcattgattatgatgaagctgctgactatttgaacctggtacctgcccgggcggnccgctctagaactaagtggatcccccgggctgcaggaattcgatatcaagcttatcgataccgcgacctcgagggggggccccggacccagcttttggtccctttagtgaggggtaattggnccctggcgtaatcatggggcatagctgntttccttggntgaaaattggtaatncnctnacnaanttccanacaanataccaacccgggagcataaaagnggtaaagcctngggngcctaaatgagtgagctanctnncattaattgnggtnggcnnactggcccctttccantnggnaaacnnnnnnnncnctngaattaangaantggccaacccccgggggnanggnggntgnnnnttgggcncncttcccttnctnnttaatnnanc

SEQ ID NO: 1815 - DNA, 489 bp, Homo sapiens
  misc_feature 151, 216, 221, 276, 277, 285, 296, 316, 331, 339, 344, 346,349, 350, 353, 360, 366, 369, 375, 383, 392, 393, 395, 397,409, 413, 415, 416, 423, 427, 429, 447, 451, 464, 470, 485,489: n = A,T,C or G
ctactatagggcgaattggagctccaccgcggtggcggccgcccgggcaggtacccgggcgtgtgaggtgtcagtctgcccctacttgggggtgcctcccagttaggctactcgagggtctgggacccacttgaggaggcagtctgtccgntctcagatctccagctgcgtgctgggtgttgggagaaccactactcccccgcgtacctcggccgntctanaactagtggatcccccgggctgcaggaattctattatcaagcttatcgataccgnngacctttnaggggggggcncggtacccaacttttgttcncttttaatgaagggnttaaattnccgcncnttnnccntaaattnaatggntanaattanaacttgtntattcactnntngntggaaaaatttngttntnnttactgntttnanaatatttttccaaccaantaanccatttaccttantccctngggaaagccaattanaatn

SEQ ID NO: 1816 - DNA, 432 bp, Homo sapiens
  misc_feature 351, 396, 408: n = A,T,C or G
tatagggcgaattggagctccccgcggtggcggccgaggtacgcgggtatatctgaaaacctaatttctttctttttttgataaggaaatcttttccatctccatcctaacatgcacaacctgtgaagagaattgtttctatagtaactggtctgtgatcttttgtggccaagagaatagcaggcaagaattagggccttgacagaatttccacgaagctctgagaacatgtttgtttcgaatgtctgattcctctttgtcatcaatgtgtatgctctgtccccatccttcactcctcctcaagctcacaccaattggtttggcacaggcacagagctggtccctagttanagtgggcatttatgttaaaaaaaaaaatagttcagaaatctcagncttttctttggnggtcatcaaaaaccagctttaaga

SEQ ID NO: 1817 - DNA, 736 bp, Homo sapiens
  misc_feature 1, 2, 4, 10, 13, 14, 15, 25, 33, 35, 36, 42, 48, 54, 57,60, 61, 62, 64, 68, 71, 82, 87, 91, 94, 96, 100, 105, 117,118, 121, 258, 274, 293, 305, 338, 351, 370, 401, 402, 421,437, 444, 447, 459, 465, 469, 494, 524, 535, 544, 548: n = A,T,C or G
  misc_feature 568, 573, 575, 576, 580, 588, 589, 599, 606, 610, 613, 619,636, 640, 658, 668, 704, 709, 711, 714, 736: n = A,T,C or G
nntntatttnttnnntattattctntaaaaatntnntttaantttctnatttantanctnnntnatanttnttactttattnttaanattntcntnttanactangttatggttttnnccnatacgactcactatagggcgaattggagctccaccgcggtggcggccgcccgggcaggtacgcggggattgggacagccgtgggaaggacagttatgaaacgagtcagctggatgaccagagtgctgaaacccacanccacaagcagttccanattatataaagcggaaagncaaatgatgagnagcaatgaagcattccgatgtgatttgatatgncatggaacctttncaaagtcagtccgttgaanttccaccagcccattgtaattttacaacagnncattgaaagtatattgctngggtttgttaagaacnccccaanaangttaacgggaanggaagnattntaaccacccttggaaaaattttccngttatttttttctccaatggaaattttagnaattaggattngccaattcntatntttggtaggggtttcaaaantttanannaaanggggaggnnaaaaaaaaanaatttanccanaantttttnctttccaaccttttttngccnaattttttaaggtttccnaaaaaaaagnaaaaaaaaaaaaattgggcctttttttaatttaagncccananaanattgtgataaaagctaagtaan

SEQ ID NO: 1818 - DNA, 873 bp, Homo sapiens
  misc_feature 632, 644, 717, 719, 750, 771, 773, 799, 803, 817, 841, 843,845: n = A,T,C or G
gcgtatcgactcctatagggcgaattggagctccccgcggtggcggccgaggtactcgcccgacgggtcagtgctgacagttgcttgtgaacaaactgaagttctgctttttgaccctatatcttcaaagcacataaaaacactttctgaagctcatgaagactgtgtaaataatatcagattcttgataaccggctgtttgctacctgctctgatgacactacaatagcactatgggatctgagaaaattgaacaccaaagtatgcactttacatggtcacactagctgggtgaagaacatcgaatatgatactaatacaagactcttagtaacatcaggatttgatggaaatgtcattatttgggacactaacaggtatacagaagatgggtgtccacataagaaattctttcacacacgttttctcatgcgaatgaggttaacaccagattgttccaaaatgttgatttcaaccgtcctctggatatctcttaattttgcatgaccttgacttaactaagtctttagaagtaggcagctatcccattttaaggagcaagaagaactacttcaagttcagatttgaccacttcatcaagttcatctggtcctagagtttctggctcaccntgccatcatagngattctaattcttcttgagaaacacatgtcacgagccctttcaaagaagaaggagtttcacccacgaaaatantnttggaagccgaaccccctgaagttctttggngagagggaaccccggaactgnantacgtccttacagctggaccccaaanggtngggccctctttttngggcttcaagccacaaggatgaanangnggggacctggccgggcggccgttttaaa

SEQ ID NO: 1819 - DNA, 436 bp, Homo sapiens
  misc_feature 185, 363, 366: n = A,T,C or G
ggcgaattggagctccccgcggtggccgagcggccgcccgggcaggtaccaactagaggatttctgtgaccttctcaaactctaaaatttttggcactggactgttccactttgaagggtcaagaaagaaatctggaggttgcagaaatcagggtcaggcgcacatacacgcacgcacacacacncacacacacacacacagatccagcagcatccttggaacatcctgaagtcaagaaaggcacagcactgtctgccccgatagaaggaattccagaaaacagccaccgaggttgggccacagaatttccaaagagagcaatctacaaactgggggttgatttcccagtacctggatctaancantcaaacacaccgagaagggatttttttttttgaaagctgcccaccttccaatttttgaaataattcccca

SEQ ID NO: 1820 - DNA, 1011 bp, Homo sapiens
  misc_feature 1, 3, 8, 14, 17, 18, 19, 23, 24, 25, 28, 29, 30, 31, 32,34, 35, 36, 37, 38, 39, 40, 46, 48, 49, 51, 53, 55, 56,64, 68, 69, 70, 71, 72, 73, 75, 80, 81, 82, 83, 84, 85,86, 88, 92, 95, 98, 212, 239, 245, 260, 372, 374, 379, 440,443: n = A,T,C or G
  misc_feature 458, 464, 475, 483, 484, 490, 502, 507, 530, 533, 535, 536,556, 563, 569, 571, 575, 576, 579, 581, 591, 592, 599, 607,608, 614, 668, 678, 713, 721, 745, 746, 750, 770, 771, 773,775, 788, 791, 792, 794, 797, 799, 803, 838, 859, 864: n = A,T,C or G
  misc_feature 868, 887, 891, 894, 895, 899, 905, 909, 910, 914, 919, 920,940, 947, 948, 956, 957, 958, 966, 970, 975, 982, 983, 990,992, 996, 1006, 1009, 1010: n = A,T,C or G
ncntctanactaangtnnntaannnatnnnnntnnnnnnntaatancnntnanannaaatacangttnnnnnnantttannnnnnngnaggntanctntcttcggcgaatggactccccgcggtggctaaacatttgaaaaaaaaaaaaaaaaaaaaaaaaaaaaagtacctcggccgctctagaactagtggatcccccgggctgcagganttcgatatcaagcttatcgataccgcnacctcnagggggggcccggtncccagcttttgtccctttagtgagggttaattgcgcgcttggcgtaatcatgggtcatagctgtttcctgtgtgaaattgttatccgctcacaattccacacaaccataacnanccggnagcataaagtgtaaagcctggggtgcctaatgagtgagctaactcacattaattgcgttgngcncactgccccgctttncaaacnggaaacctgtnatagccanntccatnactgaaatcggncaacnccccggggagaaggcggtttgcnatntnnggcgctcttccccattactngtttaantggacnantttnnaantntggacgttcnncttcggnaagcgganntcaacntcactcaaagggcgggtaaataccgtttattcacaagaatcagggggataaccncagggaaaanaacattgtgaagcaaaaaggccaaccaaaaggccnggaaaccntaaaaaggccccgttggctgccgnntttncataggctccccccccctgnncnangcatcacaaaaantcnncnctnantcanaggtggcgaaaccccgcagggactataaagatccnggccgtttccccctggaagcntcccnttgngcgctttttttgttaccancctnccnnttanccgganaccnntccngcttnnttcttttggaagggtggcgncttttannagatcaannntggaggtncttnatttngggtaanntcgttcntnaaantggcttgttnccnnt

SEQ ID NO: 1821 - DNA, 1066 bp, Homo sapiens
  misc_feature 2, 5, 7, 8, 9, 10, 13, 14, 15, 18, 20, 21, 22, 24, 25, 27,28, 29, 30, 31, 32, 33, 36, 37, 40, 43, 45, 46, 47, 48,49, 51, 52, 54, 56, 61, 63, 70, 72, 74, 76, 77, 78, 79,80, 81, 82, 83, 84, 85, 86, 88, 89, 91, 96, 97, 161, 165,166: n = A,T,C or G
  misc_feature 168, 169, 230, 459, 490, 516, 536, 595, 615, 641, 642, 659,667, 673, 701, 704, 723, 752, 753, 761, 766, 767, 769, 771,772, 776, 779, 787, 790, 794, 795, 807, 809, 814, 818, 821,827, 828, 835, 840, 845, 850, 855, 856, 859, 860, 861: n = A,T,C or G
  misc_feature 862, 866, 873, 875, 878, 886, 888, 891, 902, 903, 905, 909,916, 919, 923, 924, 934, 935, 939, 945, 949, 952, 954, 956,968, 971, 972, 974, 975, 977, 978, 979, 983, 986, 990, 991,992, 993, 995, 996, 997, 1002, 1003, 1004, 1008, 1011: n = A,T,C or G
  misc_feature 1014, 1015, 1017, 1019, 1022, 1033, 1040, 1041, 1050, 1052,1053, 1055, 1060, 1062, 1064: n = A,T,C or G
gntantnnnntgnnngtnannntnnannnnnnnttnnaanttnannnnnanngnanatgtntntttgaantnantnnnnnnnnnnntnnangagannagctattaggcgaatggactccaccgcggtggcggccgaggtactttttttttttttttttttntttnntnnaggatacagggtcttgctctcttgcccagcctggactgcagtgacaggtcactgtagcctnaaactcccgggttcaagtgatcctcttacttcagtttcccaagagctgatattacaggtatgcaccaccatgcccagttaatttttaaatttttctattgctgtctgtattttcatatcaagataaaagcacaagtttagatttacctttttttttaaaaaaataatcttttactgggaggtggcaagagacccatttcttcagaattcctgtatggctcatattctgngtcagggatttggggggaaaagacaattccngggatagatgaacccccgcactcatntctttcaaacttaaactctncaatgccacaatttttaaaacagggaagttagaaaacccagaaaataatcccaacccanaaagtgtgccccagctcaangatcacaagttgcttgcaagaaacannaagtgaccccgtttganttattctntctttnaaaaaatggggccaatgcaatttttatnaanggcattcattttcactacncccaaagcaaccagtacccttgccgggcnntccttttnatccnngnanntcangtntctgagtntancaanntataaattcccntnaaggnaatnatnattttnnaataaanatganaccangcgcnttttnntcnnnnctcnactcccntntanatctaggnantgntggtattacannancccncgctttntantatnnttttttattnntatnaatgcncctncgntntntgaatatacaantanntnntnnncttnttnatannnntnnntaatnnntttntanatnnanancantaagagttttnctagatnngctgtagtncnnantatcnancncg

SEQ ID NO: 1822 - DNA, 886 bp, Homo sapiens
  misc_feature 24, 441, 516, 568, 621, 630, 635, 683, 707, 709, 728, 729,735, 738, 743, 769, 780, 781, 791, 794, 806, 811, 812, 814,828, 836, 841, 842, 846, 847, 853, 861, 863, 868, 876, 878,879, 882, 885: n = A,T,C or G
tatagggcgaattggagctccacncgcggtggtcgagcggcccgcccgggcaggtacgcgggcatgatcaaagagcaacatctgagtgtgtcctgagtgaagttctgtaaagataagaagcaggacttgccaccgcattgcaagagaaagtttaccagcatcaattaattaaaatagaaggcagccaatcggcattgggcacaagggaatgatgcttgtattggagcatgatgaagagatgtcagctttgtctcagcaccaacatcactattaacacttgctatctgtcaccaatcagcaatctgttcctgatgtaatcgagagttccaaagcacagctcaattcttccacctctctgagaagaagtgggtgtgtaggccttctgacagtgggagaaagttgcactctttgggactcagtttcttctcaaaactcattcangaaatcatcacgtgtcactgttagctaggtccaggatgtttgaataagaattgtggttatattatagtaaattgngtaaaaaatcagttaagttatgggtaataggtatggcaagttccatgtgccnaagaatcttataaagttttttacatttagtaattcatttaagtctcacagtanccctacaangtatnattttccttattttaaagaggcaaaactgaggtccctcgcccgctctnaactagtggatcccccggctgcangnattcgatttcaagcttatnngtcccnccnacctncaggggggccccggtccccacttttngttccctttanngagggttaantgnccccttggccgnaaatnntnggcatagctgtttncttttggnaaatnntttnngctccnaatccccncnaaatnctagccgngnngcntant

SEQ ID NO: 1823 - DNA, 893 bp, Homo sapiens
  misc_feature 441, 454, 486, 488, 515, 517, 521, 546, 556, 581, 622, 627,646, 691, 728, 734, 771, 775, 777, 778, 793, 794, 796, 805,806, 820, 826, 839, 840, 855, 857, 865, 874, 878: n = A,T,C or G
gaattggagctccacccgcggtggcggccgggcgcagtggctcacgcctgtaatcccagcactttaggaggccaaggcgggtggatcaattgaggttgggagttcgcgaccagcctgacggatatggagaaaccttgtctctactaaaaatacaaaattagccaggcctggtggtgcacacctgtaatcccagctactcgggaggctgaggcaggagaatcgctggaacccaggaggcagaagttgcggtgagccagattgcaccattgcactccagcctgtgcaacaagagtgaaattcttgcctcaaaaaaaaaaaaaaaaaagtacctgcccgggcggccgctctagaactagtggatcccccgggcttgcaggaattcgatatcaagcttatcgatacccgtcgacctcgagggggggccccggtcccagcttttgntccctttagtgangggttaatttgcgcgcttggcgtaatcaatgngncataagcttgtttcctggtgtgaaatngntatncgttcacaaattccacacaacatancgagcccggnagcataaagtgtaaaagcctggggngccttaattaggtgaggctaacctcacattaatttgcgttngcctnactggccgctttccaattngggaaacctgtcgtgcccgctgcattaatgaatcggcccacccgnggggagaggccggtttgcgtatttgggccgctctttncgtttnctcgctttaatgaatcgcttgggcttcggcattcggntgcngnnagcggtttagcctanntnaaaggcggnnaatccggttttccnagattngggggataacccnngaaaagacatgtgancnaaaggccncaaaggccngganccgtaaaaaggccct

SEQ ID NO: 1824 - DNA, 894 bp, Homo sapiens
  misc_feature 6, 10, 15, 17, 19, 21, 27, 32, 39, 68, 69, 72, 87, 91, 92,106, 143, 183, 226, 247, 338, 376, 407, 415, 454, 463, 497,508, 509, 543, 586, 588, 603, 610, 614, 624, 642, 648, 653,669, 682, 683, 692, 704, 717, 738, 746, 757, 759, 785: n = A,T,C or G
  misc_feature 800, 809, 813, 814, 819, 827, 828, 854, 869, 874, 876, 882,887, 893: n = A,T,C or G
tggggncgtnactantngngnatggcngctcnccgtggnggcggccgccgggcaggtacttttttttnntgnttttttttttttttntttnncagagacagctttntattctgtcacccaggctggagtgcaggggcacaatntcagctcactgcagcctccacctgttgggctaaatccatntccacttcagcctcctgagtagctgggaccacaggcacgcatnaccactcccggctaattttgnttttcatagcacattacattaccgatttcccagtttataagtaaccaagatgctcaaacaagcaaatattttccttgagtatgacttactncaaaaaagagaaagaacagagaaattggttctgaaagngcatttttctaaagcccatttcagtatttgntagctcanatcatatacaagttttaatcaaaatgctaaagaatattntattaatantcttctattccatcctttccttcagtatttcatnaattatttagnnaaaatgggattttttaccatgttttctgaaatgncattggattttaatccacctgagaagtcattacccctatctgngntgagaaataaattgnctttaanggtnaaatagtagnccttattattgaaatttncctttnaaccnctattttttggatgcncctttataagggnnttttttttnggaaaaaaaganaattcccgggaanttggatttcatttgcaacccncccccttnttaaccggaancngtctttttaaaaaacattttggcttnggttccaacaaattnaaggcccgnaaanngggtngggggttnnttttaaagggtttagcttggcccaanggccctttagctttnaaaantngccccnccacntaaatng

SEQ ID NO: 1825 - DNA, 896 bp, Homo sapiens
  misc_feature 72, 187, 205, 257, 328, 429, 432, 519, 548, 564, 608, 623,647, 660, 690, 692, 731, 739, 748, 755, 766, 798, 807, 808,809, 811, 812, 813, 815, 830, 832, 879, 895: n = A,T,C or G
ctactactatagggcgaattggagctccaccgcggtggcggcccgaggtacgcggggagacctgacgctggnaggagatgctgccacctaggttacttgtaggaccctatacggcaacctcctttgccaggaactatttataaacatcctgcaggaaaatgagtctatatgtcagaatacacatttnccaccttgcccaacagtngaaaaacatatgaagagaaaaacattaaaaaatgacaaggaagttaatggangtcagcaatgtgatggtgtttggaggtggagccttcagaaggtaattaatgcccttgtaagaagaggccanagagcttgcgcaccttcttcctgccatgtgaggagccaaagaagcccggctgtctgcaacctgcaagaggaccctcactagaagctagccatactggcatnctnatcttggctttccaacttccagaactgtgagaagtatatgttttgtgggttagtcaatggcctatggtaatttttttatagcaggcncaaccaaaacagtggcttatttacttacntaccatttatattatnatataggctcctttcagaaacccatgttcaaattaagagatgangattctggaaccccntacccctttactagtttttaagtntacaaaatattgngaaaataattttgttattaaactatctcantncaaagaaaatgcagaatccatggtggttctaaaattgtntataaatnaattgacanaatgaanaaaccttaccnccttcctagaatttagctgcttcaaaaaaaanaaaaaaaannnannntnaaagttccttgcccngnccggccgctttaaaaactaagggatcccccgggctgccggaattcgntttaaagctttttgant

SEQ ID NO: 1826 - DNA, 876 bp, Homo sapiens
  misc_feature 6, 7, 61, 650, 746, 793, 813, 827, 837, 866, 876: n = A,T,C or G
ttgtcnnctctttttacgactcactatagggcgaattggagctccccgcggtggcgcggcncgcccgggcaggtacgcggggacaattggttcatttttataggtgttgaccgttatgcctataaataagcctcctatagacatacagaaatcatatcctgtggaattagaatataagacttggtaaaagagatttcaaagtattttacttaacttgtatacttgaaatcatttaatccagactgaagttgtaaaagccagccagtgttttcaatatagacttccatgtttgaccatctgaaaatgaaaaacactaaaaacatcacatgctgtttaggagctggaaattttaatatttgacttcaagtagatggtttttaactcctgaaatcgaactacgtttaagtttgtatgtttattacctgtttgagcacttaagtgcaattgtgggagcggggatgtcaagttcatttatgtgactctttggctcaacttacataatctttgttttgatatcacagttgtctaattattttactttgtagcttaaggcaggctgaattgttgataaaatggaaaaagtagtatattgttatataagcttctgaggtgtgttttgttgtataagccctggagggtaaaaagtcatnccttatgtatagtagttaaaggcataaaactgtgacttttagatattcaccagaaccagacttatttggatggggataataacccaatggattaancatttggttgcttttggtttaatttatccgggtcatttttactcttnccatgtacatgaaacaaggnggtggcgtgtaaanaaccaccggncctggtttattggtaaatggactcctttngttccagggn

SEQ ID NO: 1827 - DNA, 876 bp, Homo sapiens
  misc_feature 475, 578, 620, 623, 634, 641, 683, 706, 719, 758, 769, 775,795, 796, 810, 821, 846, 853, 858, 875: n = A,T,C or G
tagggcgaattggagctccccgcggtggcggccgcccgggcaggtacgcgggtaaacatgattgagctagaagacagttttaccatatgcatgcattttctctgagttatattttaaaatctatacatttctcctaaatatggaggaaatcactggcatcaaatgccagctcagacggaagacctaaagcccatttctggcctggagctacttggctttgtgacctatggtgaggcataagtgctctgagtttgtgttgcctcttttgtaaaatgagggtttgacttaatcaagtgattttcatagcttaaaatttttttgaagaacagaactttttttaaaaacagttagatgcaaccatattatataaaacagaacagatacaagtagagctaacttgctaaagaaaggatggaggctctgaagctgtgacttcattatcccttaatactgctatgtcctctgtagtacctcngccgctctagaactagtggatcccccgggctgcaggaattcgatatcaaagcttatcgatacccgccgacctcgagggggggcccggtacccagcttttgttncctttaagtgagggttaattgcgccccttggcgtaaatcatnggncatagcctggnttcctgnggtgaaattggtatccgctcacaattccacaccaacattacnaacccgggagccataaaggggtnaagccctgggggngcctaatggagtggagctaactcactttaattggcggtnggcgcccactngcccgnttttccagtccgggaacctnnccgggccccgcttngattaatgaantcggccaaccccccggggagaggcnggttgcntattnggcgcctcctcccctcnc

SEQ ID NO: 1828 - DNA, 881 bp, Homo sapiens
  misc_feature 1, 661, 674, 689, 701, 711, 720, 723, 773, 779, 799, 816,818, 819, 821, 836, 837, 841, 846, 848, 850, 854, 855, 856,860, 861, 862, 869, 870, 871, 874, 876, 879, 880, 881: n = A,T,C or G
ncgcgtatacactcctatagggcgaattggagctcccccgcggtggcggccgaggtaccgcggggaatacaaaacaaataagccatcacgcctgcccttccttgatattgcacctttggacatcggtggtgctgaccaggaattctttgtggacattggcccagtctgtttcaaataaatgaactcaatctaaattaaaaaagaaagaaatttgaaaaaactttctctttgccatttcttcttcttcttttttaactgaaagctgaatccttccatttcttctgcacatctacttgcttaaattgtgggcaaaagagaaaaagaaggattgatcagagcattgtgcaatacagtttcattaactccttccctcgctcccccaaaaatttgaattttttttcaacactcttacacctgttatggaaaatgtcaacctttgtaagaaaaccaaaataaaaattgaaaaataaaaaccataaacatttgcgccacttgtggcttttgaatatcttccacaagagggaagtttaaaacccaaacttccaaaggtttaaactacctcaaaacactttcccatgaagtgtgatccacattggtaggtgctgacctagacagaagatgaactgaggtccttggtttggtttggtcataatacaaaggngctaattaatagnatttcagatacttgnagaatggtgatngggctagaanaatttgganaanaaatactcctgtattgagttgtatcgggtgggggattttttaaaaaattngattancattcatattttccatcttnttcccaattaaaagttncnnantttttgcccaaagtnncctnttttnanantcannnttgnnntttgccnnnctnanttnnn

SEQ ID NO: 1829 - DNA, 860 bp, Homo sapiens
  misc_feature 1, 490, 516, 518, 632, 723, 754, 762, 783, 787, 820, 846,853, 855: n = A,T,C or G
ntttctactatagggcgaattggagcttcaccgcggtggcggccgcccgggcaggtacttggaatgctgtgtggagtcctttttctacttttgttcctgagaaagagagattcacaaacttcccacattcttccagtggcatctaaggatcccttcctaaatggcctttctcccagccaatagactgagcaaaccatgtccctgatgcttcctgcccaccaccatccattcttccaaccaacagcttctccggcctttcacgtgccatgcactttgctaagagcttgagggaaatacagcaatgaagaagagatgattctgtttggaccagtgctcagggattcctcctattagaaatcaaagaaggcttccaaaagccctacaattttttccctgtactaaagaaaatagcttctcaatggtactaaattttatctcatacgcaaattggaatgtataccccttcactctgaattgcttggaaatattncaggagaaataaatcaactctgtgtnanggtcttctaaaaaagcagaagtcaaaggtcaccagaaagacctttaaaatcaactatgtttctgacaatgttgctttcgaaactggtaccccacttccgcaaaatcaccattgnaaaatcctttgtggtgtaattaagaataatcatgaatgccctgaatggtcaaaaatgagtggttttggttttggtggataaagtgggaagntacaggtagcaaaaatgcctggaccctcggncggtctanactaatggatcccccggctgnaggnattcaatttaagcttatcgatcccgtcaacttnaggggggcccgggccccactttggtnccttaangnggtat

SEQ ID NO: 1830 - DNA, 855 bp, Homo sapiens
  misc_feature 6, 33, 279, 346, 386, 418, 423, 434, 465, 507, 526, 554,567, 589, 591, 626, 653, 664, 667, 672, 674, 684, 719, 722,723, 724, 725, 727, 729, 732, 735, 736, 737, 738, 741, 742,744, 745, 776, 781, 787, 800, 801, 808, 809, 816, 822: n = A,T,C or G
  misc_feature 823: n = A,T,C or G
ttgccntttctactatgggcgaattggagcttnccgcggtggcggccgccgggcaggtacgcgggttatttcatttactagcattttaggatccagaagaattccaccagattgcatgagttagattgggaaatgggagtgggagataatattgggaggtatctattttaagtcaggggcttactaccgatttagttctcacaataaccatgtggagaagctgtgacatttttaatttacaacctttctggggctcagacataaagttacctatccaangttgcagttgggtagtggtgggaccagcatggacaactcattggccctgcctcaaaagccatacctnttctcctgctatgcagaatctgtttctcctgaatctctgngatgctggtgggaattgtttgcatagaggaangacantaaccctgccntcgtgagttaatgtccgggctggtcacaagnggttcatgcctgtaatcccaacactttgggagtccaaggcangcatatcatttgaggtcangagtttaagaccaacctgctaacatagngagaccctgtttntactaaaaatacaaaaataagncnggtgtggtggtgcatgactgtaatccactactcancaggagaagcacttgacccaggaaacngaggcgcattnaanccaanantgtgccctgnacttcagcctgggcgacagaggggaactccttttnggnnnnangnaanggnnnnaannannggtccctcggccgttttaaactaagggggtnccccnggctgngggaattcatttnnacttatnnttcccgntacctnngggggggcccggacccacttttgttcctttaa

SEQ ID NO: 1831 - DNA, 860 bp, Homo sapiens
  misc_feature 12, 16, 28, 449, 600, 627, 629, 652, 665, 672, 687, 694,700, 703, 711, 734, 750, 764, 775, 779, 783, 784, 793, 795,801, 818, 819, 832, 833, 839, 840, 858, 859: n = A,T,C or G
cctttccttcanttcnccttccggcganttggatttcccgcggtggcggccgaggtacatcaacaatgactgcttcttatttctctttgaatctccaatacctgtcaccaatgtttggcacacaataggcattcgataaatatctgttgagtgaacgcaagaaagaataaactcccacgaacatctaaaacaacagtcctgcaaacagagagttagcatacaacaaaccatgtgtcaacattccctcttgttagtccctgcagatcttagagactggaaagcggggggatatagaaggactggagggatatattccatatatcactggaaggtaataaaggtggcctggttgaaatactccattgacataactaacagtcaccaaacaagccaagtggaactctacagctaccttaaaaccctcttcacaataacttggggccctcatnctctaatctgaatcacactatttaacaggtattgagatggtgccagaacacttaatgccttgcccacagatcacccagactcatgctcaattaggatgggcactgaaaccaacttccacctaattactttaagccactaagataatgtctntaaaagtgggggtccaaggctgaccancnttagaatccccaagaaccgagtnttaatgccgattncaatctnacccttaacctgttnaaaatancatgtnagnacaaggtntcccattatacaagcttccaaanacttttttacaataangttgacaataccgntttcccatcanaatntttnnattccttancngttctngcaggaaaggacccttnnaaaagaatttttnntttacnnaatttttgaaggcccggnna

SEQ ID NO: 1832 - DNA, 844 bp, Homo sapiens
  misc_feature 1, 259, 499, 514, 577, 613, 617, 646, 670, 701, 731, 744,755, 756, 774, 822, 827, 830, 833, 838, 841, 844: n = A,T,C or G
ncgttcgactactatagggcgaattggagctccccgcggtggcggccgaggtacatggtttccattgcagcgaatagactaatattccttctgctggcaacctagacaagttccctaagcttatgggtaaaaatggagtcaaagagaagtgccagtatccaatcttcaaatatttcgctgaggatcacatgaatttaaaaagaaacgctccgaacaggaaaaacaattggccaagccttgggaaggaaacaagaggganggcatccagagactctggctgcctgatgtagggccttcgaggttgaacaagggtgaagggggaccctcacatgggaacagcgtgatggaggcagtctgcttatgagctgggaagtgaattgtgtaaacattattgaagtcagtttggaagttgcaagccacaaaaagccctatctgaaaacttgttgaaattaccctttgtggaaactcatctggtcatgcccacagcatgtaatttcanggcaagacggagttncctcagtcgaggttccccacccacagcttgtgctgggtcctactggaaggacgcgctcaatancagtctggccggagtgtgtgcccttcaacccccatnccantatatcacgttcccatgtgaagcctgcangggttcctaatcgcaccatctcanttcttcttatcctctgcctatataaggccantttcttccttttgggatcttcatgctacanggtttccaaggcnaaaacctgcanncctttctggcctgggcanccttttcccccacaccactaacttggcttccatggcactatttaaagnggcgnccngancctcnggnccn

SEQ ID NO: 1833 - DNA, 878 bp, Homo sapiens
  misc_feature 4, 5, 8, 9, 16, 22, 27, 32, 237, 373, 473, 500, 537, 560,582, 590, 613, 627, 645, 657, 676, 687, 689, 700, 708, 709,711, 715, 717, 728, 775, 779, 786, 795, 796, 805, 823, 839,840, 845, 865, 872, 877: n = A,T,C or G
gggnncgnnactactnctatanggcgnatcgnagctccccgcggtggcggccgaggtacaccgagaacatcacctgacttccctaaacttcagtttccttgtccttaagagaaaataaaaatatcttcctcaatgattaatttcttaaaaatcaataaaatgtgaaataatatctgggatggattgtgacaaatattatgaatgaaattaatacagtttcctttaattatttatcanagttcagagaaacacaaatgaaatcatgaatactaattaactgtgtgctttgtttagaaaatgcattacatctcttctcagtattcaagcatgccttctttttttatttgaaattatcaatagcattctaatctgncttcatactggtgctagaaattcatcacagttttaaaatctacttatataaaatgtattataatggttttcacatcattttacaaagacatggattcatnggagaaaacaattggatggtggaaaangccctaaatatctggggtctcaagaataattgccctnttaaaagttataaaaattggctnggaaattgggcctgatcatagncccgccanaaatcccggctggacatgggttnaattttaacctggnccttgcccgggcggccgnttttaaactagngggatcccccgggccggcnggaattcggtntnaagccttatcnaaaccggnnancctnangggggggcccnggcccccaacttttggtcccctttaggggggggtaaattgccccctnggcnaaaaccnggggcaaanntggttcccngggggaaattgtttcccntcccaattccccccannttccnacccgggggcataaaggggnaaccccnggggng

SEQ ID NO: 1834 - DNA, 869 bp, Homo sapiens
  misc_feature 6, 11, 519, 545, 569, 584, 627, 629, 632, 646, 677, 679,717, 719, 729, 750, 753, 780, 788, 809, 810, 811, 812, 813,814, 815, 816, 817, 818, 819, 820, 821, 822, 823, 824, 825,826, 827, 828, 829, 830, 839, 862: n = A,T,C or G
ctgccnttttncactccttagggcgaattggagctccccgcggtggcggccgaggtacgcgggtaaaaaaataaatctaccactaaatatagtaagggagttttaaactgaggtttttgaagtctttaagaatttatttagagacttcttttgttggaagtatggtggctagatgccatgaaaaacccctgaaaacaagtgtaagtgctaggtaatatgttgaaacatatcttttgaaatgtattactgagctggcaagaaagtatgccattgtagagagtgaaaataagtgaaggcagaatcctgggaggtaagccagcctgaagatattgatgacactggatggccttaagtttccattttgactggcatgtaatccaccaaagattcccacagaaatccgaggttccaaatggtaaatccgtggtgacattggggtgacccgagaaatgaactcttgtgcagaaaggaatggtaacaacacttgtctcgtcaactttggctctaggtaggggaaangaaaacagctttctagagaaatggtnaccccaagctagccctcatgaganattcagctagggatngatgctatctgtgtagtgccaaaaaaaaaaaaaaaaaatcctnanccngaatttgtgctttnatgtggacctagggcaataatgactgcaaancnaaaacaatggctcaccctgtaatcccacccttttggangnccaaggaggngggatccctttgaggtcaggnttnaaaaccaccctggccacattggggaancctttttnttcttaaaatgccaaaaaaannnnnnnnnnnnnnnnnnnnnnggtccttgnccgggcggccgttttaaaatagnggatcct

SEQ ID NO: 1835 - DNA, 873 bp, Homo sapiens
  misc_feature 15, 22, 39, 681, 683, 719, 722, 726, 732, 734, 735, 739,743, 747, 765, 770, 775, 776, 778, 782, 787, 796, 806, 811,819, 833, 837, 845, 847, 861, 864, 866, 870: n = A,T,C or G
cttcccctcctttcncactatngggcgaattggagtttnccgcggtggcggccgaggtacgtggcgtagcattccatgttcagctttgacatttattttctcatatcaaccctttttacacgtgaaacacaatctcgctcttgaagtcttaactgcatgatctgtgaaacctgtatttatattttcttcaggtattcttgtcgtgtgtgtgtcctaaacaaaccaaaagaaaactttccaaatctaaagtattcattctccaattggagcaagaggagtcagttagatactatcacggcattcatttgtggctggcttgtcatatttacttatgattgataataaatctattttgctttttagagcctcccgagaagccatctgccttcgaggtatttaagtttcatgatttcattttgaatgacttattaactatgtattttgtgaaagtatacattctttattaatcattttgcttccaaccccatttagcctgccattgaaatgcaaaaagtctgttccaaataaagccttggaattgaagaatgaacaaacattgagagcaggtaaattttttaatggaactatgccaagaccaatatttcaatattggacattttgatggtccttctattcccaatgctttattttttttcaactttgatgaaaagattgatctangnaaaggccatactggggattggaggtttgaaaaagcnggnattncaagcncnngaantttnaatntctttttttaaaaaaggnggctnaatcnnanaagnttctncctttggantcccgaaacnggaanggttttantttgaacttctggntttnttaagggntnagaaggggatggtnaancnccanttc

SEQ ID NO: 1836 - DNA, 898 bp, Homo sapiens
  misc_feature 2, 4, 12, 14, 15, 38, 40, 44, 45, 76, 109, 137, 143, 279,311, 346, 401, 406, 421, 435, 454, 471, 479, 480, 486, 487,488, 490, 498, 501, 507, 510, 511, 518, 522, 525, 526, 527,541, 550, 554, 557, 558, 559, 560, 561, 562, 563, 564: n = A,T,C or G
  misc_feature 565, 566, 568, 569, 570, 571, 572, 573, 575, 576, 579, 580,581, 582, 589, 591, 595, 596, 597, 598, 602, 605, 606, 608,611, 612, 615, 618, 619, 620, 621, 622, 625, 628, 629, 630,631, 632, 633, 634, 635, 637, 638, 641, 644, 645, 646: n = A,T,C or G
  misc_feature 648, 649, 652, 658, 659, 661, 662, 665, 668, 670, 671, 673,674, 677, 678, 679, 680, 681, 683, 684, 686, 691, 692, 693,694, 695, 696, 697, 698, 704, 708, 712, 713, 714, 715, 716,717, 719, 721, 722, 723, 724, 726, 727, 728, 729, 731: n = A,T,C or G
  misc_feature 732, 736, 739, 740, 741, 742, 743, 744, 745, 746, 747, 748,749, 750, 751, 752, 753, 756, 757, 758, 759, 760, 761, 762,763, 764, 765, 766, 767, 768, 769, 770, 771, 772, 773, 775,776, 777, 778, 779, 781, 783, 785, 787, 788, 789, 791: n = A,T,C or G
  misc_feature 792, 793, 794, 795, 796, 797, 798, 799, 801, 805, 806, 807,808, 809, 810, 811, 812, 813, 814, 815, 816, 818, 819, 820,821, 822, 823, 824, 825, 826, 827, 828, 832, 833, 834, 835,836, 837, 838, 840, 841, 842, 844, 845, 846, 847, 848: n = A,T,C or G
  misc_feature 849, 850, 851, 852, 853, 854, 855, 856, 857, 859, 860, 861,862, 863, 864, 865, 866, 867, 868, 869, 870, 872, 874, 875,876, 877, 878, 879, 880, 881, 882, 883, 884, 885, 886, 887,888, 889, 890, 891, 892, 893, 894, 895, 896, 897: n = A,T,C or G
cntnccccccantnngaaactacccggcgaattgatcngnaaannggtgccccgcccgggcaggtacgcgggtatnggagacgattgaaaaaggatttgaagaaaggantattgccaagtctccactttctcagggnctgaantgaacttttgctcacagcaggtgaacacaggctccctcccacactgagacttcctcccctgccggtgtgcaagtctgttaagtaaacagagacgttatactgagaaaggaacatttctctattttggctatgagtnggtatttttaaagatcatcctccaaacatttncccctatccttggttattttttcactagaaagaanatgaactgcttaaaaaaaaaattcaactccatgacaagaaaaacccacttctagnatggnctccccactcaatgncaatggagcccttnggggggagcactctggcanccacacattgggcaagnatacctcnnggaaannncngctgggcntcnataganccnncatgcanccanaannncaaaagccaaagcnaaaagcgcntggnaannnnnnnnnngnnnnnngnnaannnnaaaaggncnaacnnnncccnggnnanaannccnggnnnnnaanaannnnnnnnannggnaannncnnaangggganncnnagnggngnncnnaannnnnanncnaaggnnnnnnnnaaaaanaaancccnnnnnnanannnnannnngnnaaanggnnnnnnnnnnnnnnnaannnnnnnnnnnnnnnnnnannnnngngngnannnannnnnnnnncnaaannnnnnnnnnnngnnnnnnnnnnngggnnnnnnnannngnnnnnnnnnnnnnngnnnnnnnnnnnnanannnnnnnnnnnnnnnnnnnnnnnng

SEQ ID NO: 1837 - DNA, 898 bp, Homo sapiens
  misc_feature 7, 9, 253, 480, 548, 549, 563, 613, 636, 650, 662, 672, 675,676, 678, 679, 680, 681, 682, 686, 687, 690, 715, 738, 742,750, 766, 796, 804, 809, 812, 816, 817, 827, 830, 831, 832,845, 846, 847, 859, 860, 862, 865, 875, 876, 880: n = A,T,C or G
  misc_feature 881, 885, 888, 892, 898: n = A,T,C or G
gtgtgcncntttatactactcctatagggcgaatttggagctccccgcggtggcggcccgaggtacattctgagcgatctgcatttggtgatgatggaagccatggacatgcactagattgtcttgtgggagaatatggagtagtaagagaaggagaagacctaggattgagccctgagcacctctggcttaatgttggatggaggaaattgaatctgtaaacaataccgggaggctgcagcctgagaggcanaaggaactggggtgtttgggattatggaagccaagggaaaaagcctgtctcacagcgggaagggaggtatcaacattgtaagctgcttcagataggttatgtaggatgccgactgaaaaatatctgtaaaatttggcaaccccgattcattggtaatcctagggaagttgcttttttggggtaactaaggtggaaaacagattggtgtgggttgagcaatgctaganaggtgaaaaaaaaggagatttcatgtgccaacctttcttagttcacttgggaccaagggataaaaatnnaaaatggaagtttngaaaaccatgtggggccaagggaaactttttttattgggacaagtcttcncatgtgaaccaaagcccatggantaaggggccttttnaggggaaaaagnggtcattccnccnngnnnnnaaannaangaggggttattattaaaataccggnaaccaccaccaacatttttttgngggntttttttnttccgggggaactttnggaaactcctaacccgcatttttccatttnaatttttnaaaanctngggnnggggggggtnccnnnattccctttaaannnccgggggggaannanaantttaaaattnngggnncttntcnaaantttccn

SEQ ID NO: 1838 - DNA, 939 bp, Homo sapiens
  misc_feature 5, 311, 376, 455, 542, 630, 689, 695, 699, 700, 706, 713,720, 760, 773, 775, 779, 780, 786, 791, 799, 800, 806, 809,818, 820, 830, 835, 855, 863, 871, 875, 886, 887, 901, 915,916, 929: n = A,T,C or G
cacgntactactactatagggcgaattggagctcccccgcggtggcggcccgaggtaccacctgaagttcagggagtgggcatggggcctaaggcaggccagtgagaactcagaggcactaagatgtatgttcccacttgcagaagaggtgcatgctcacccagtagttgctaaaaaggctgaaggtaggtgtagagatgcttttggggccatggttaccacccttgaggtaaggagggagggtgagtctgcctaaaaatgaaccaaatcgagagtgcaaccacaactgcactaaatggaaagaaacaganataagagagatgggctcctctcacaacacatttggggacctgaactcagccccgcctcaccctangtacctgcccgggcggccgctctagaactagtggatcccccgggctgcaggaattcgatatcaagcttatcgataccgncgacctcgagggggggcccggtacccagcttttgttccctttagtgagggttaattgcgcgcttggcgtaatcatggtcatagctgnttcctgtgtgaaattggtattccgctcacaattccacacaacataccgagccgggagcataaaatggaaaagcctggggtgcctaatnagtgagctaactcacattaattgcggtgcgctcactgccgctttccagttggggaaaanctgttngccnncttccntttatgnatcgggncaacaccccggggagaggcggtttgcgtattgggcccctnttccgctttcttngnttanntacttngttgncctcgggnnttcggnttnggcaaccgntntcagctcacntcaangccggaataccggtattccnaaaatcangggatacncagnaaaaacctttnnacaaaaggccgccnaaggccagaacccnnaaaaggccctttntgctttttct

SEQ ID NO: 1839 - DNA, 935 bp, Homo sapiens
  misc_feature 557, 623, 664, 690, 721, 753, 762, 763, 781, 796, 803, 825,844, 846, 875, 905, 915, 921, 928, 934: n = A,T,C or G
ccgtatacgactcactatagggcgaattggagctccccgcggtggcggcccgaggtacagtagggtattacacagcaaaaaagccttcctgctggaatatttcagcatttcagttatttattacattagctttatggcatatcacaacctatttgagacaggtagagtgaacccttttctgccacacagaggcacattaagtggccatcatgactggtgagacttaattgttttacaccgggcagttctctgtcgtgatttaaatccctcgtaaagcagctgaccccagttctcaggatgatttggatcccccgctaacttggaaaatcagagccagctgagagttggcttgcacattttagcatctggtaaaagcgtgcaagctagtgagatgtgcagggaaggagtcattggcaattgtatgtgaaaacacttaattaattgtttatctcttttaatttggttaaatgatcataaaattgctcgcattattttgaagatgtcttcatgtttataaaactgtcttcatgtcttcacatatttataaaacaaagttncaatcatttaccaactcattggttatgattaagaacgtaatggtgcaaaaccagattaacaatgcnttttgtattccaaattcaaaatgccaagtgctttttggctnttaattgcaggtcctgcccggccggncgctctagaactagtggatccccccggctgnaggaattcgatattaagcttattcgataccgnccaacctcnngggggggcccgggcccanctttggtcctttagngagggtnaatgccccctggcgtaaacatngggcatagctggttcctgngngaaatggtttcccgttacaattcccccanataccaaccgggacctaaaggggaaagccngggggcctantggggngctaccnctttant

SEQ ID NO: 1840 - DNA, 940 bp, Homo sapiens
  misc_feature 3, 7, 461, 479, 509, 522, 523, 525, 530, 536, 565, 566, 569,573, 582, 602, 610, 618, 620, 653, 664, 670, 676, 685, 689,700, 716, 717, 720, 732, 733, 740, 742, 746, 762, 782, 795,806, 807, 808, 811, 822, 828, 832, 833, 844, 845: n = A,T,C or G
  misc_feature 853, 867, 874, 879, 880, 897, 902, 910, 915, 918, 928, 929,930, 933, 934, 936, 939, 940: n = A,T,C or G
cangctnctatagggcgaattggagctccccgcggtggcggccgccgggcaggtacgcgggtgttcagggaattacagcatagatatgaaagatgtctgaaaaattggaaatatcaaataaaaattaagaagcctaaaactacatcagattaatatgtagtatagtctttcacatctggccatgatggatggagcaatgggattatatatacattctcacagtaaacagttttcagatattgaacaacaaaaagtaggcagtgctagccagagattccttggagccaaaaaacaaaacaaaacaaacaataaaaattggtaatctctatattgctccagtttgctgcttggagaaagttctcaggctgcagctcagagaggaaaaatccagagctcagtggtctgaatgaagttaaagaggatttggggcagcaaatgccaatttagaattcacaggccanaagtgagaggaagtgtanagatggagaggggtgtgcctgagggaaganagagaagagccannanaggtngaactnccgagagaacaagttgcaaagtaaaaaannaantaangactggggngctgcagacaggtttcaggntttaagtntggatccngngccccccatgtgaggaaccttcagggcaaatancttctggaaangaagcngattgnacaatgctnaatnggacagaaaangggttaaaaataattnnctnggcctcctaatnngccaagntnggcnccttaattttccccanaggttggggaaattaccccnaaagggtttggcntaataccaggnnnctngcccgttttanaactangggnncccccggcctnnaggaattngattaaacttttcnttcccgnaactnnggggggcccggccccanttttntcctttanggggntanaggccctggnnnaanntngtnn

SEQ ID NO: 1841 - DNA, 914 bp, Homo sapiens
  misc_feature 1, 2, 525, 535, 561, 604, 659, 665, 677, 721, 728, 741, 742,744, 770, 788, 804, 810, 811, 813, 822, 834, 851, 865, 883,885, 886, 889, 900, 912: n = A,T,C or G
nnctactatagggcgaattggagctccccgcggtggcggccgcccgggcaggtacttgtcgaatgtagaagtgaataaatagcaagacagagtcacccggctggcttggacctggactggccaagctggtggtctacaccatgatttgctggataatccatgcagctttccctgcatagacacagatgcagcccctctgtccaaacatgatgctccctctgtcattgatgggaaccagatggagtcgcgcctgtaacatgactgagcactgatttcagtaaagtaaatgaattaccaaattgtagtcattataatctatcttcatcttagtgacacacttgactggctgctataaaccaggatttgaagagtgaatgtggatttacagacctctcatctctgcccacaggatccaaatctggcagaattgtcatctctcccgcgtacctcggccgctctagaactaagtggatcccccgggctgcaggaattcgatatcaagcttatcgatccggcgacctcganggggggcccngtcccaacttttgttcctttagtgangggtaattgccccttggcgtaatcatggcatactggttcctgngggaaaatggtattcgctcacaattcccacaacataccaacccggagcctaaagngtaaanctggggtgcctnatgagtgagctaactccattaatttgcgtgggctcactggccgntttcaancgggaaacctgcnngncacttcattaatgaatcggccacccnccgggagaggcggttggnttttggggcttttccntttctnntnaatgactcnttggcttgggcnttcggttggggagcggnttaacttactcaangggggatacggttttccncnnatngggggtacccnggaaaaactttngg

SEQ ID NO: 1842 - DNA, 942 bp, Homo sapiens
  misc_feature 1, 515, 571, 603, 619, 632, 644, 653, 657, 668, 673, 676,703, 708, 713, 726, 732, 745, 753, 754, 756, 764, 777, 783,790, 792, 807, 811, 824, 825, 827, 836, 838, 843, 847, 860,864, 866, 869, 871, 873, 875, 877, 887, 892, 898, 904: n = A,T,C or G
  misc_feature 905, 912, 919, 925, 926, 927, 928, 931, 932, 935, 937, 942: n = A,T,C or G
nacgtatacgactactatagggcgaattggagctccccgcggtggcggccgcccgggcaggtacgcggggaaaacaaaccatatctaaaccatagcagtggcatcctttgaactcacggatccagtcataactgaagttccatctacacctggggtcttcagacccaggctctggaaaagatcctgttacttacaagcaaaagaaattctgcctcttaccctcagcatgtgagtacctcggccgctctagaactagtggatcccccgggctgcaggaattcgatatcaagcttatcgataccgtcgacctcgagggggggcccggtacccagcttttgttccctttagtgagggttaattgcgcgcttggcgtaatcatggtcatagctgtttcctgtgtgaaattgttatccgctcacaattccacacaacatacgagcccgggagcataaaagtgtaaagcctggggtgcctaatgagtgactaactcacattaattgcgttgcgctcactgnccgcttttccagtcgggaaacctgtctggccagctgcattaatgaatcggccaacncccggggagaggcggtttgcgtattgggcgcnttttccgctttcttgnttaactgacttgnttgggcttcggnccgttcggnttgnggggagcgggnttaanctnactcaaaaggcgggaataccggttatncacanaattngggggataccccnggaaanaacatttgaaccnaaaaggcnncnaaagggcnggaaccgtaaaanggcccngttggtngnggtttttcatagggntccnccccctgacaagnntnaaaaaaatngnccttnaatnaaaaggggggaancccncnggntntnanancccggcgttnccccnggaaantccttnnggccttnttttccnaccttnnnnttnncgnancctgn

SEQ ID NO: 1843 - DNA, 942 bp, Homo sapiens
  misc_feature 4, 27, 386, 455, 519, 550, 571, 572, 584, 595, 603, 604,631, 643, 650, 655, 657, 660, 661, 664, 672, 673, 674, 676,683, 687, 690, 691, 692, 693, 694, 703, 707, 708, 710, 711,712, 713, 714, 723, 726, 727, 730, 734, 735, 737, 740: n = A,T,C or G
  misc_feature 745, 747, 749, 756, 757, 760, 765, 766, 769, 772, 777, 778,788, 789, 792, 795, 796, 797, 798, 799, 800, 805, 806, 807,809, 817, 823, 825, 827, 832, 833, 834, 838, 839, 841, 843,844, 845, 846, 853, 854, 862, 867, 868, 869, 870, 873: n = A,T,C or G
  misc_feature 874, 876, 877, 880, 882, 884, 887, 888, 889, 891, 894, 898,899, 900, 902, 909, 912, 913, 914, 915, 916, 919, 920, 923,925, 928, 929, 931, 932, 934, 940: n = A,T,C or G
ccgnatacgactcctatagggcgaatnggagctccccgcggtggcggcccgaggtacatggtttccattgcagcgaatagactaatattccttctgctggcaacctagacaagttccctaagcttatgggtaaaaatggagtcaaagagaagtgccagtatccaatcttcaaatatttcgctgaggatcacatggaatttaaaaagaaacgctccgagcaggaaaaacaattggccaagccttgggaaggaagacaagagggaggcatccagagactctgggctgcactgatgtagggcctttcgaggttgaacaaggtgaagggggaccctcacatgggaacagcgtgatggaggcagtctggcttatgagctggggagtgaatngtgtaaacatttattgaagtcaagtttggaaagttggcaagccacaaaaagccactatctgaagagctngttgaaatttaaccctttgtggaaactcatgtggtcatgcccacagcatgtaatttcagggcangacggagttccctcagtcaaaggttccaccncccccagcttgtgcttgggtnnctaactgggaanggccccccttnaatagccnntctggcccggaatgtttgcccctcaancccaactaccgnttttttncccgntnccnngtnaaaccctnnnangggttcnttantcnnnnngccatttantatnntnnnnncccctctgnccnnaanatanngnccnttttntncnctttgannttnccttnntcncangaatnncaagggcccnntcnttnnnnnncttcnnncntgggtaancctttncnangcggnnnttanntntnnnnccaaatnntttttaanggggnnnnaannannttntngnacnnntnttnaacnnngncccttanaannnnnggnnatngngcnntnntntattcncc

SEQ ID NO: 1844 - DNA, 944 bp, Homo sapiens
  misc_feature 407, 418, 431, 450, 497, 511, 532, 533, 534, 537, 538, 539,540, 541, 542, 545, 546, 547, 548, 549, 550, 551, 561, 591,609, 620, 630, 632, 658, 677, 691, 707, 769, 772, 784, 791,848, 852, 859, 861, 874, 893, 905, 916, 920, 921, 935: n = A,T,C or G
  misc_feature 943: n = A,T,C or G
ccgctactatagggcgaattggagctccccgcggtggcggcccgaggtctgatcaagctaggtcatgtgctggaccctgggaaagcggacacaaatatcctgcccttactggctgaatacgtaatgagggggacccaacatgggaacatataaatgtgcaatttcaattttttttaaaaaaacaccctgataagaaatcaaaatgtgcagtttcaaagtgtggcaaagccatgcaagaaatgaccgggcacggtggctcacacctgtaatcccagcactttgggaggccggggcggggggatcacttgaggtcaggcattcgagaccagcctgccaatgtggtaaaatcccatctctactaaaaatacaaaaattagctgggtgtgatggtgcatgcctgtagtccnagattattcangaggctgaggcangagaatggcttgaacccangaagcaaaaggttgcaatgagccaagatggcaccacttgcacttcancctgggcgacaganggagactcttgtcaaaaaaannnaannnnnnggnnnnnnngttcctgccnggccggccgttttaaactagtggatccccnggctggaggaattccatnttaagcttatngataccgtcnancttcaagggggggcccggtacccacntttggttccctttagtgangggtaatttgcccncctgggcgtaaacatnggccatagctggtttcctgggggaaaattggtattccgttccaattccccacaaacttccanccnggggccttaaantgtaaancctggggggcctaatgagtgaacctaactcacatttaattgggttgcccccacttgnccgntttcaancngggaaacctgtcngccacttgttttattaatnggccaccccccngggaaaggcgnttgnnatttggcccttttncccttccnc

SEQ ID NO: 1845 - DNA, 453 bp, Homo sapiens
gaatcactactatagggcgaattggagctccaccgcggtggcggccgaggtacgttgttcctctctatgtgtccattaaaatccagtcaagtacaaaccatgagattccatgattcacaatgccccagaacaccctccaaaaaaagaaaataaaataccatttttataataaatcactataagataaatgcattgaacactaaaagcatcataaatattttattggccatgaaatcttgttaaattagcaactaccttcccgtgtaaaatgagggctgatgtggagtgacaccaccgttacctgagccaggatgataagggggtcctctgtgctttacctctttaaggaaagtaactctgaaacaaccaatcactttttgttctttttctgttttctttagcccttttctgccaataaagctaacccccctctgctcagcttattgaagagca

SEQ ID NO: 1846 - DNA, 485 bp, Homo sapiens
  misc_feature 208, 238, 264, 369, 415, 421: n = A,T,C or G
ggcgaattggagctccccgcggtggcggccgaggtacattcgctagaaacagttaagtaacaatacaaagcgcccctgagtctagttgctggggaggccaaatgtgaactggctctagaaagatctgggtgggctgagagaccatgtggtaatagcataagcgaagacagagtggacatgagtctgggctgctttgcaggtcagacgngacagaagaaggtacccaagggcagggtanagggaaagaaaggacactttggcttntgtagaaagtcggtgagtttgtcgggggagatttgggatcagggaaaatgagaatggattaaatttgtaatttttattagggcctgcttggggtagaaaaggttntggggacctttttccttttcatgcccctggaggatagccattgttngcccangcccgggggatggggacattcctttcactattccctaccccccccatatttcttcagaacttta

SEQ ID NO: 1847 - DNA, 934 bp, Homo sapiens
  misc_feature 366, 378, 381, 383, 402, 434, 443, 451, 453, 460, 462, 477,486, 498, 500, 505, 513, 515, 528, 531, 545, 551, 554, 558,560, 565, 572, 576, 579, 588, 595, 596, 597, 598, 599, 600,601, 602, 603, 604, 605, 606, 607, 608, 609, 610, 611: n = A,T,C or G
  misc_feature 612, 613, 614, 615, 616, 617, 618, 635, 638, 650, 660, 663,669, 671, 672, 678, 679, 685, 688, 714, 718, 725, 727, 730,732, 734, 736, 737, 742, 748, 755, 762, 763, 764, 768, 773,792, 798, 801, 816, 817, 826, 835, 837, 838, 845, 875: n = A,T,C or G
  misc_feature 888, 898, 908, 911, 923, 929: n = A,T,C or G
acgtatcgactactatagggcgaattggagctccccgcggtgggcggcccgggggccattgagactgccatggaagacttgaaaggtcacgtagctgagacttctggagagaccattcaaggcttctggctcttgacaaagatagaccattggaacaatgagaaggagagaattctactggtcacagacaagactctcttgatctgcaaatacgacttcatcatgctgagttgtgtgcagctgcagccggattcctcttaacgctgtctatcgcattcttgcctggggcaagtcaccttccctgggatgtccctggacaaaagacaaggagaaaggccttaaggatctactggggggagtccgganggaccagtcttnttntntcccctggaaccccatggnccacttgaagttccttatgctcttttactggnccttccttntgaaaatncncccttgnanaaattcctttgaaanttgcaaggnaggaaggcattntnggggntttccccntnaaataaacttttngtngctgggaccatttngccttntangggncnggttnctccttnaccnaanccaaatttnaaaaaannnnnnnnnnnnnnnnnnnnnnnngggcccttgggccgttntanaaataggggaancccccggccnganggaatncnnattcanncttttnaancccccccctcaagggggggccccggncccncttttgntnccntnangnngggtnaattgncccttgnggaaaannngggnaaagntgttccctggggaaaattntttccnttnaattcccacaaaaannaaacccggngaaaaaaangnnaaacccnggggccctaaaggggcccccccctatttgngggggcccccccnccttttaaangggaaacttntgncccccttttttntaaatnccccc

SEQ ID NO: 1848 - DNA, 436 bp, Homo sapiens
  misc_feature 5, 378: n = A,T,C or G
ggagntccccgcggtggcggccgcccgggcaggtacagtggcacaatcatagcttagtgcagcctcattctcttgggcacaagcgctcctcagcctccctcctcagcctcccagttgctggaacttacaggtgcaccaccataaccagctagttttattttttgtagagacagaagtctcactttttttcctagactggtctgaaatagaccattctatttgctagaatggtctcaaaccatccttctgcctcagcctcccaaattgctggaatttcaggcataattcatcatgcctagccatttcttttttctgctgcattgcagagttagaaccaatttcattttgtcctgcactgagaatgtgcattcccagcangatcatggttgagctcagcacacctggcaactcaagccagcctctttgaagggtgcac

SEQ ID NO: 1849 - DNA, 678 bp, Homo sapiens
  misc_feature 2, 6, 9, 12, 13, 18, 21, 26, 27, 29, 35, 36, 37, 38, 40,42, 44, 45, 51, 62, 63, 71, 72, 87, 90, 92, 95, 98, 99,101, 106, 107, 111, 114, 117, 122, 125, 395, 435, 440, 484,508, 558, 586, 606, 629, 640, 676: n = A,T,C or G
tnttcnctntannttttntcnaaaanntnatatcnnnnantntnntattanattttttatanntttttttnntaaatttttttttanatntnttntannanagatnntggntanttncacgnaangatcactatagggcgaattggagctccaccgcggtggcgataacgcaggaaagaacatgtgagcaaaaggccagcaaaaggccaggaaccgtaaaaaggccgcgttgctggcgtttttccataggctccgcccccctgacgagcatcacaaaaatcgacgctcaagtcagaggttggcgaaacccgacaggactataaaggataccaggccgtttccccctgggaagcttccctcgttgccgcttctcctggttccgacccttgcccgcnttacccgggataccctgttccggccttttctcccctttcnggggnaaagcggtgggcgccttttcttcataagcttcacggctggttanggtattcttcaagttttcgggtgntaaggggtacgttttccgcctccaaaggccttgggggcttggttggttgncaccggaaaccccccccccggtttcaancccccggacccgcttgccgncccttttaatccccgggttaaancttattccggntctttggaaggtcccaaaaccccccggggttaaaangg

SEQ ID NO: 1850 - DNA, 477 bp, Homo sapiens
  misc_feature 1, 313, 326, 340, 341, 347, 350, 358, 361, 367, 374, 380,385, 396, 398, 400, 403, 405, 415, 417, 426, 440, 444, 446,470: n = A,T,C or G
nctactatagggcgaattggagctccccgcggtggcggccgaggtacagctgcatgccatactgcagaataaataaataaaacacattcccaccacttttactactctgataatctatgaaaatcaacactttcatcaattatacaatataaatataaaaacaattaaagcaaacaagtaaagcaaccaaaattttgaaagatgaacttttagtgccctgcaacaatacatttaaaaagacaattgaagtcttttacttggacctacaacttaaggtccagctcaccagtactggccccggtcaatatgcccnaggctatgacaanagttcattggacannttatanggnggtacacnccntcggtnccttttntacctngggcncgttttttagnancntgngngattcccccngnggctttaanggaaattttttatnatananctatatttggaaatacctgctcanacttctg

SEQ ID NO: 1851 - DNA, 475 bp, Homo sapiens
  misc_feature 3, 272, 377, 382, 412, 444, 463: n = A,T,C or G
gtntggccctatcactcctatagggcgaattggagctccccgcggtggcggccgaggtacccacagaacctcaaaagtgggatatggagggagagaaggagaatgagagaaggcacagaggcaggaagaacaagtccggtttggctggcaggaggccatctgtgagaagccatctgtgaagccaaattcttgatttctaaaaagaaaagattccttactctggtgggtaaagctggagggcagagggcagaaccaccaaaggctttgtgcanagaacaaaactgaagccgtgctagagaaaaaccatacagtgttgggcaggacagatgacaggacaaacggtctgaagcttaggaagcttgacttcaccaagcccngtgcncacgttgcaagcatttcctatagaaacacngttctttgacccaacatgccaaaaaccatagntttctgtcttacagaaatnaagggcttttca

SEQ ID NO: 1852 - DNA, 471 bp, Homo sapiens
  misc_feature 3, 4, 6: n = A,T,C or G
gcnntngccgcgtaacactcctatagggcgaattggagctccccgcggtggcggccgcccgggcaggtacaaggtatttttgctaactgtaacttcccacttaatcaacaaaaacaaaaacactcatttctgaacattcagtgcattcatgattaatcttaattacaccacaaaggtatttttcaatggtgattttgcgggagtggggtaacagtttcgaaagcaacattgtcagaaacatagttgattttaaaggttctttctggtgactttgacttctgcttttttagaagaccttacacagagttgtatttatttctcctggaatatttcaagcaattcagagtgaaagggtatacattccaatttgcgtatgagataaaatttagttacattgagaagctattttctttagtttacaggggaaaaaattggtagggggcttttggaagcctcttttgatttctaata

SEQ ID NO: 1853 - DNA, 462 bp, Homo sapiens
  misc_feature 2, 3, 4, 5, 6, 10, 11, 12, 13, 419, 462: n = A,T,C or G
gnnnnnaggnnnntttgacgcaattactactatagggcgaattgtagctccccgcggtggcggccgaggtacatgtggcctttcagctagtgcagaggatggaaaccagagtgggctgatgattggatgccaggcctgagccaggtgagtcctgttctcattatactgtaaagtgagctgctccaagcctccctgattcttagcactcccagtccctgcaggggtccctgagaaggttaatcttgcattaggccctctgctgttttccctctgtaagccttactccactttgcagtgagttctagtataacttctattccagtaagatcaaatggttaaggactccaaaaaagaaatttggtgaacacaaagggtttgtcatactttaacttttgtccctttcccaggtgggcgcatgncttctaggccaagccctcccaattcctagcttgcttcatgccn

SEQ ID NO: 1854 - DNA, 852 bp, Homo sapiens
  misc_feature 45, 176, 492, 614, 651, 661, 673, 697, 704, 709, 716, 733,734, 753, 758, 762, 789, 796, 797, 816, 826: n = A,T,C or G
ctatcgactactatagggcgaattggagctccccgcggtggccgnccgccgggcaggtactagctgtttttgcgacttttaataataacacctactagttactgagtgtcatcatcaccaatgtcatgattgccacgatttattgagtgcctactacatgcaggccccaggtcagngctttacactcttactgtcatgttgacaacagctctgaatgacaggagctctgttcagtgttttacaagtgagaaaactaaagacactaataatttttaaaaatatatccacagttctatgattagtaagtaagggagctagtcctcggccgctctagaactagtggatcccccgggctgcaggaattcgatatcaagcttatcgataccgtcgacctcgagggggggcccggtacccagcttttgttccctttagtgagggttaattgcgcgcttggcgtaatcatggtcatagctgtttcctgtgtgaaattgntatccgctcacaattccacacaacatacgagccgggagcataaaagtgtaaaagcctggggtgcctaatgagtgagctaactcacattaattgcgttgcgctcactggccgcttttcagtcnggaaacctggtcgtgccaactgcattaatgaatcggnccaccccccngggagaggcggnttgcgtattggggcgctcttcccntttctcncttanttgactncttggcctcgggcgttnnggttgggggggaggcgggnttaanttanttcaaaggcgggaataccggttttccncaaaatnnggggataacccccggaaanaaaatgtggnccaaaaggccccaaaaaggcccggat

SEQ ID NO: 1855 - DNA, 880 bp, Homo sapiens
  misc_feature 2, 3, 4, 5, 6, 7, 8, 9, 10, 622, 629, 647, 682, 695, 737,755, 780, 811, 832: n = A,T,C or G
gnnnnnnnnngacgcgcgtaatacgactcactataggggcgaattggagctccaccgcggtggcggcccgaggtactctcacccctagctcattttcattccctggctgacctaccagcagaacctccgcccccctgcggcccgataccatcatttttaatgaagttaatttttatttttatttttatttttactattttgataaccactttctgtgaaataatagttttttttttcaaaacttggctcatatctccttttatgttagcagtcatggcatagaaaagctgcccacagaatgacatacatcaaaaacagttttctgtttagacggatagctttaagtgtgtgcaaacaggtgcctctatgtgtggaaggaagacatgctagattatttggggtccacctgcagaggaatgagctaatttacagaagagtgaagcaggctctgcactgaaggccagggttaaggcatatagctaatgataaaataaatgaatgtgactttctaaaaatgtcatgggggagaagaaaatgaggaggaagggaaaactggcttctataatcttgtaatggtacaaatagaattgccatgtgactcaaatcttctcagaaggtaaanggcatanggcactttttttagtggngcatctttgtcattaaaccaaaaataatttggganggaaatgatttcnccccaaaagtttaaaattcctcggtcactggcctcaattttntttccttaaaatccctanggaatcttcctggggaatgaaaatngggagccctgtgccatttttcctaaaagttngggccttttttggggggtttngggtttgggaaacctaatgggggtggcttcttttttgggggacaaaaa

SEQ ID NO: 1856 - DNA, 865 bp, Homo sapiens
  misc_feature 604, 618, 647, 691, 693, 712, 772, 780, 793, 808, 824, 832,833, 843, 852, 860, 862, 863: n = A,T,C or G
tatacgactactatagggcgaattggagctccccgcggtggcggccgaggtacatgtggcctttcagctagtgcagaggatggaaaccagagtgggctgatgattggatgccaggcctgagccaggtgagtcctgttctcattatactgtaaagtgagctgctccaagcctccctgattcttagcactccagtccctgcaggggtccctgagaaggttaatcttgcattaggccctctgctgttttccctctgtaagccttactccactttgcagtgagttctagtataacttctattccagtaagatcaaatggttaaggactccagaaaagaaatttggtgaacacaaagggtttgtcatactttaacttttgtccctttcccaggtggcgcatgcttctaggccagcctcccaattcctagcttgcttcatgctcctggcctttgcctactcaaaacaatctgtcctcccaccctgtcatctctgttcaaaagtaaatacctccctccctctgcttttgccctaaagttcttttttcaactcacctaacatctaacttggctttgcagctctgtttcttcaaaaccctctctgcctgtttnctccaagctatctntgaccagtgccagaaaccaaaaaatcttnttggaagctgcactctttgcttctctttccctctcctttatccntncactttgggaatctctctncttctaacctggcttttatctgggtgcaaatcctgttcaatcttttccaaggtaccctgncccgggcngggccggttttanaaactaagtgggatnccccccgggctggganggaaattnnatttttaaanccttattgnaaacccgncnnct

SEQ ID NO: 1857 - DNA, 802 bp, Homo sapiens
  misc_feature 309, 399, 561, 582, 642, 648, 685, 718, 723, 726, 732, 747,753, 765, 777, 780, 784, 787, 794: n = A,T,C or G
cgcgtatcactcactatagggcgaattggagctccccgcggtggcggcccgcccgggcaggtacgcgggagaggggtcttgccctcatcccctgccctgtctctgagacgtgtccagtaaacctgaggtcagcacctcaggaatgaaataatgtcttttgcagcaacttgaatgaagctggaggccattattcagtgaaataactcaggaattaaaaatcaaatgccatatgttctcacttataagttggagctaagccatgcgtatgcaaaggcatgtggggtgacataatggactttggagactcanacatgagggtggcaggtggatgaaggatgaaaaaactacctgttgagtacctcggcccgctctagaactagtggatcccccgggctgcangaattcgatatcaagcttatcgataccgtcgacctcgagggggggcccggtacccagcttttgttccctttagtgagggttaattgcgcgcttggcgtaatcatggtcatagctgtttcctgtgtgaaattggtatcccctcacaatttcacacaacatacnagccgggagcataaaagtgtnaaacctggggtgcctaatgagtgagctactccattaattgcgttgcctcctgcccctttncaatcnggaaacctgtctgccactgcttaatgaatcggccacncccgggagagcggtttggtattggcgctttccnttctnctnctgctnctggctcggcgttgnttcggnagcgggttactnactcaaagcggnatncgtntcncaaatanggatacct

SEQ ID NO: 1858 - DNA, 834 bp, Homo sapiens
  misc_feature 5, 18, 19, 23, 41, 61, 64, 101, 107, 111, 113, 114, 119,144, 557, 582, 587, 604, 614, 622, 651, 658, 673, 693, 697,708, 731, 738, 740, 742, 761, 770, 786, 795, 798, 799, 822: n = A,T,C or G
ccgcnaacgatcactatnnggcntttggagctccccgcggnggttttcgaaaactgcccgnganaggcggtttttttttggaggttgaatgcagggttttnttgagnggtntnngtggntctctgaaggatggatgcagagctngaagcggggatggcacgggaagataatcttcctactgggtggcaaacctctccgaccaccctcggctgaactcctctcggcgttcaaatgttcctcttctctctttctctgctgtatcgtttcaccattcatctgcttgtctgggatggtgaagacaactgtttgcccatttgcttggcgataggtgattgtctcgccgctcagctataggcgatggtctcaccactcggtgataggcgattgtcccatctaggtcgccaaaatgtgtctggaattggtgggttcttcgtctcactgacttcaagaatgaagcccgcggacactcgcagtgagtgttgcagttcttaaaggcggcatgtctagagtttggtccttctgatggtcggaagtgttcacagaatcttccttctggnggggtccgggggctccctggctcangaggngaagctctagaactagnggaacccccnggctgcanggattcgatatcaagcttaatcaaaccgncacctcnagggggggcccgggncccacttttggtccctttantgangggtaaatgcnccctggccgaaacatgggcatanctggttncngnggggaaaaatggtatccgntcacaaatncccaaaaaaataccancccgggagncannaaaaggggaaaaccccggggggncccaaagaagga

SEQ ID NO: 1859 - DNA, 800 bp, Homo sapiens
  misc_feature 138, 165, 433, 470, 554, 557, 561, 587, 600, 620, 624, 662,678, 686, 689, 690, 700, 720, 766, 769, 775, 781: n = A,T,C or G
gcctatcgactactatagggcgaattggagctccccgcggtggcggcccgcccgggcaggtacgcgggtggcccgaagttagatagatgaggagggtatttatctgagacaaacactgggaggaaatttcaaccaganggaatattagcatgtgagaaggcatanaatcataaaaggcatgttgtgttaaggagctacaagtagcacaatttggctaatgtgtacagtgagaagagagttgtgggcagataggttggaaaagaagccgtgagttagatcatgaagagcctcggtaaggagtttgttttaaaaacaattactgaaagattcggagcaaacacaatatttataggttggaaatattgccagaatggaaaaaacacccttaccaaaccgttcctcggcccgctctagaactagtggatcccccggnctgcaggaattcgatatcaagcttatcgataccgtcnacctggagggggggcccggtacccaacttttgttcctttagtgagggttaattgcccgcttggcgtaatcatggtcatagctgnttnctgngtgaaattgttatccgcttacaattncacacaacatacnagccgggagcataaagtgtnaagnctggggtgcctaatgagtgagctactcccattaattgngttgcgctacttgccnttttcagncgnnaaactgtcgngccacttaataataatccgncacccccgggaggggggttgctatggcctttccttcttctaatatnctncctcgncgtcgntggggacgtttactaataa

SEQ ID NO: 1860 - DNA, 857 bp, Homo sapiens
  misc_feature 1, 6, 18, 19, 32, 35, 175, 176, 179, 181, 183, 187, 198,203, 316, 494, 564, 610, 666, 677, 708, 766, 782, 817, 850,856: n = A,T,C or G
ntcccntcttttactatnnggcgaattggagnttnaccgcggtggcggccgcccgggcaggtacctcatctctgatgattagtgatgttgagcgtttcccatgcctgttggaatggcaatccgttggaaatgtcttctcagttactacccatatgtatgttgctcaggccactgnntantncnagcnctgtcgtttgnatagntacttggggattgtttgtcgttgttagccaagacaaatgttacactgctgttcctacagtgagtagtgggagtggggtatggggacatatgcttatgcccacagttccatcanaaatcccactgccttaagacagtctcacgggaacccattcccaccttgcagcactgggtagccctgtggcattttgactttggatgtatctgcattgttgaagtcactcagcatgttgccatgcatttatccacttaggtcaatgttaagggaaagttcatcgcctctgcttcttcantaactgatgtctggtgcatcaactgaatgcatttcacgcttttaagcagttcccacggatctatggggtnaaaaaaggctttcaccatgcccacctactcagtgagtgaccaatgnctcattggtagtgcatttgatgcacaaaagtttaatggtcttgaggggaaggtcantcccccaagcnaaagattggaaatcacatttgggatttacantaataactttttctacagcttgggttccttggcaggggtttcacactatttaagttcnggaatggaatccttgnaattacttttactttggctaccaagggtttcaaanaaactttgtaaaacttgttttaattaacccaanctattnt

SEQ ID NO: 1861 - DNA, 459 bp, Homo sapiens
  misc_feature 2, 3, 4, 5, 18, 23, 27, 38, 40, 44, 45, 46, 52, 53, 204,206, 237, 250, 346, 454: n = A,T,C or G
gnnnnaggttcgacgcantttcnacancgggcgaattntngctnnnccgcgnnggcggccgcccgggcaggtacccccctattagggaaaagggctccatccttttccctaaaacttactcctttctgcctctggaaaaagaaggttcagcccattcttcactccagtccactgcttgtgtgatcactacagaccactgcttgngngattttcccatttataaatgatactttcatntcctttctaactnttacttttgctcactttttaaagccaagatgtagccatctagcccctccatgatgtcttccccagtgctcccatctctgcctgtctctgctcttanatatctttccatacagtgctgattgaatgtgtatgctctaaaaccaaactttctgggtttaaatgctggggccttcactaactaacttatttacccttactatgtctnaagtt

SEQ ID NO: 1862 - DNA, 751 bp, Homo sapiens
  misc_feature 15, 553, 561, 570, 671, 734, 739, 745: n = A,T,C or G
cgctatcactactangggcgaattgagctccccgcggtggcggccgccggcaggtacttggggcggcaggtggagttataattatagcttagaaaaaagcagcatcagcagctgttgcttctgtttgttcccagctataactgtcatcagtgggtaaactggcataaacaggcctctacaagtggaaaaacatttaacccctgttcttgtcacactctgggtcctctcagtggccagagaacagaaagaaaatctgactgtgcacgagcgaagggtgacaccgggcgtgcagcaccgacctgaaggcacctcttcgggggagccagaaatttgaagattctctttcctgtcggagactacaaaccaaataaatagggttttatgttactctggtagtgaaccgatggtggaaccagtttgtgaatttgccctgccagacaggctaatgttcctcatctctagcagtgttcacggaagcgacgagcacgggcgcctgcttaaaaggacgctgatgcgctcgtcaatctcaccttcctgcttatctttcctcggngagcctgntgtgtcctnggccgctctaaactagtggatccccggctgcaggaattcattaacttatcatccgtcactcaggggggccggtcccactttgtccttagtggggtaatgcnccctgcgaactgcatagtgttctgggaatgttcgtacatccacactacaccggactaatgaanctggngctatnggctat

SEQ ID NO: 1863 - DNA, 817 bp, Homo sapiens
  misc_feature 6, 15, 18, 19, 20, 27, 29, 174, 520, 564, 569, 572, 575,579, 580, 582, 583, 584, 590, 592, 593, 594, 595, 598, 599,600, 601, 602, 603, 604, 605, 606, 612, 618, 620, 623, 630,639, 667, 681, 693, 712, 715, 726, 728, 760, 762, 764: n = A,T,C or G
cgctancactactanggnnnaactgantntacggcgaattggagctccccgcggtggcggccgggggccattgagactgccatggaagacttgaaaggtcacgtagctgagacttctggagagaccattcaaggcttctggctcttgacaaagatagaccactggaacaatganaaggagagaattctactggtcacagacaagactctcttgatctgcaaatacgacttcatcatgctgagttgtgtgcagctgcagcggattcctctgagcgctgtctatcgcatctgcctgggcaagttcaccttccctgggatgtccctggacaagagacaaggagaaggccttaggatctactgggggagtccggaggagcagtctcttctgtcccgctggaacccatggtccactgaagttccttatgctactttcactgagcatcctatgaaatacaccagtgagaaattccttgaaatttgcaaggtaggaggcatcttgggtattactctcacattaactntgttgctggagctctgtgcttctagggacgtgtacttctaaacnaaacnaanttncctnnannnaaaaangnnnnaannnnnnnnngtcctnggccgntntanaactaanggatccccnggctgcaggaattcgatataacttatcnatccgtcccctcangggggcccgganccacttttggtcctttaanganggttaattgcncncttggccgaaaacatggcatacttgtttctgngngnaaatggttttccctccaattcccaaaaaataccaacccggaacataaatgtat

SEQ ID NO: 1864 - DNA, 848 bp, Homo sapiens
  misc_feature 13, 15, 21, 501, 587, 605, 676, 686, 716, 719, 722, 745,774, 781, 830, 840: n = A,T,C or G
agcgtatcgacgncncgcgtnatacgactcactatagggcgaattggagctccaccgcggtggcggcccgaggtactaacagtcaggaacaaatagaacacatagagaggacagtgggaggtccccctggctaaagcagagggtgtattgagagaaggaaacctttgcctcaatggatcgtaggcaaactgagaaggaccataacaccttgctgagaagtttgaatgtgattccttggtgaccacagcaggaggtcctgaagtccctgtccttcagatgcaaacaaggaggctgtcccatacagactatcagggaaaaaatgcactgtttatcaaaagatatgaatgttcttgacaggcaaagccctgctcaaatgaaatggcagtgcagggagatgatattcagtgtgatgcagctgtgagtacctgcccgggcggccgctctagaactagtggatcccccgggctgcaggaattcgatatcaagcttatcgatccgtcnacctcgagggggggcccggtcccaacttttgttcctttagtgagggttaattgcgcgcttggcgtaatcatggtcatagctggttnctgtgtgaaattgttatncgctccaattcacacaacatacgaaccgggagccttaaatgtaaaacctggggtgcctaatgagtgagctnactcacattnattgcgttgcgctcactggccccttttcantcnggnaaacctgtcgtgcccacttgcantaatgaaatcggccaacccccccgggaanaggcggntttccttattgggcccttttttccgctttcttcgcttaaattgaattcnttgggcttcngggcgttt

SEQ ID NO: 1865 - DNA, 449 bp, Homo sapiens
gttttagggcgccgaatacactactatagggcgaattggagctccaccgcggtggcggccgaggtacccgcttgtgtggtttccatgatccttcttctgcctggaatgaggctcctcttgagtcctgagagcttcatttctgtctgtcttttgggctgtgccaaagcccctctgccttcgtggactccccactgattcattaccaattttcctctcctctgggctcttcttagattgcaaatggtgcctctggattgggtacctgcccgggcggccgctctagaactagtggatcccccgggctgcaggaattcgatatcaagcttatcgataccgtcgacctcgagggggggcccggtacccaacttttgttccctttagtgagggttaattgcgcgcttggcgtaatcatggtcataagctgtttcctgtgtgaaaattgttatccc

SEQ ID NO: 1866 - DNA, 444 bp, Homo sapiens
  misc_feature 1, 4, 11, 18: n = A,T,C or G
nggngccgcgnatcactncttagggcgaattggagctccccgcggtggcggccgcccgggcaggtacatgggtttgtcacagagaaaaattatgatgctttaaaaacacacacagagaaataataggttttatgcaaatgtcaagacattataaataaagaaaataatgttatttgttatgcaggctaaacactgaccaactcactcaatatattctggaagtggcaaaataaaattggaaaagtagaacaagtaatttaacatactacacttatcttcatataaattactgcaatgaggcgccatcaccatcaccatcaaaaaaagaagaattcctacaatcaatatgtgggattttagctaaaaaagaaaagtctatttagaagtcagtcacagccacatggttacctcaagccttacctcatcactgctccacccggtttg

SEQ ID NO: 1867 - DNA, 447 bp, Homo sapiens
  misc_feature 3, 9, 22, 24, 27, 28: n = A,T,C or G
agntcccgncctctacttaagncnaannggagctccccgcggtggcggccgcccgggcaggtacgcggggagtgcttctggtttcagcacacatggagatatagaattgaaattgctctgctttctttacaaatgactcagagtgtgcttgtccttccctaaaatgttgccagcatgtaaaggattttcaatgagcagtgcaataagccagcaactgggaaggcttggagcggcactgatataacgtggtgctgtcacacagataatcagggctggagccaagtctcggtagcgctgtgcattatcctggtcacatactggaagttttgtttatccaacttggttgctcttgaagctggtgagagccctaccaggatgtggagtggacttcctagcagaggcagtacctcggcccgctctagaactagtggatcccccgggctgcaa

SEQ ID NO: 1868 - DNA, 443 bp, Homo sapiens
  misc_feature 1, 7, 19: n = A,T,C or G
nagggcnttgccgctatangactactatagggcgaattggagctccaccgcggtggcggccgttcctagtcacatctgttgttgcagcatgttatcagtagagcctccttttactcttaaaaatgccctggtttggatgattgatcatacctgcccccatccccaccccaccacccaaaaagtgcagccaccctgtggtgtgcggtgtacctcggccgctctagaactagtggatcccccgggctgcaggaattcgatatcaagcttatcgataccgtcgacctcgagggggggcccggtacccagcttttgttccctttagtgagggttaattgcgcgcttggcgtaatcatggtcatagctgtttcctgtgtgaaattgttatccgctcacaattccacacaacatacgagccgggagcataaagtgtaaagcctggggtg

SEQ ID NO: 1869 - DNA, 483 bp, Homo sapiens
  misc_feature 2, 3, 4, 5, 320, 346, 358, 364, 373, 375, 406, 411, 463,464, 474, 477, 480, 481, 483: n = A,T,C or G
gnnnnaagtcgccgcatcactactatagggcgaattggagctccccgcggtggcggccgcccgggcaggtaccagagactcctatttatttataccagtaagggccctcccactgcctttgtctccagtaggtcagctgcatcatcagctttaaaagcccccaaatattgctgagcttgcttttttaaaacttctcttgcaaactttataaatttgtttcagagcactataataaaatatttcttgcaaacatggactataagtgccagagacactggagaaatctgagggtggggagaaaggataatctatcagcttgnaagctccaaagcactgtctttagtanccgctattggtnatgggnggttttgantngctttttttaaggggcaagggtcccccgggnttccnttggggccggttttaaaaaactagggggaattccccccggggctttgcaaannaattttcttnttnttnncn

SEQ ID NO: 1870 - DNA, 456 bp, Homo sapiens
  misc_feature 2, 3, 4, 5, 9, 10, 11, 12, 13: n = A,T,C or G
gnnnnaggnnnnnggcgccgaatacgactactatagggcgaattggagctccaccgcggtggcggccgaggtacaggatgcaaacacttctaaaattgtcttctgggatttctgtagataaaagctagtaaaagacctgagaagagatttttattgagcctatagcaatttggtttcataccctgagtagtaacagatattacattcaaagatgcttaattaccttcacaaagtatgaaattccaagcctacaaattgaatcagcaattcaaacttgaatttggaacttttcattatttatgtggacattctattagcagagaaccagctatacttcttatttccataggagagaaaagagcacaaagcagaacaagaggattccctacaggtgtggaaagaaatatttccgcttggatattcctacagttacaggaagaacaaccttagggaagg

SEQ ID NO: 1871 - DNA, 432 bp, Homo sapiens
  misc_feature 65: n = A,T,C or G
ggcgtttggagctccccgcggtggcggccgcccgggcaggtacaaatggcagggcaggactcaanggcaggccagtctaactatatagctttccctttccagccacttccctgattcttatgtcattgtcatacctggggtttgtagtgcctgcaatgaaaactccccacttggagtagaggcaaagcgaaaatacactaagcttaaatacaggttagttttcaatgtctgtgcctcatgccttctttctcatttttgctaccccttttctcccttggcatagtgacatcgatagttctttctaatgacactaattgcttcctttacaacccttaccagaaactttgaaagttggatgttttcctgaggcagagatttgagtacctcggccgctctagaactagtggatcccccgggctgcaggaattcgat

SEQ ID NO: 1872 - DNA, 692 bp, Homo sapiens
  misc_feature 3, 6, 17, 21, 25, 26, 27, 31, 33, 34, 35, 40, 42, 47, 50,56, 57, 67, 68, 71, 76, 80, 81, 82, 94, 96, 97, 98, 99,103, 104, 108, 109, 110, 111, 114, 117, 122, 345, 373, 397,412, 423, 453, 459, 462, 519, 522, 532, 539, 541, 547, 558: n = A,T,C or G
  misc_feature 588, 608, 613, 616, 629, 638, 640, 649, 650, 654, 663, 677: n = A,T,C or G
tanccncactttttctnaaanaaannntttngnnnctttnantatantcnattccnnctttattttnnccnatatntttnnnatgtattattanannnntttnncttnnnnagnttngatangacgcgcgtatacgactcactatagggcgaattggagctccaccgcggtggcggctgcggcagagcggtatcagctcactcaaaggcggtaatacggttatccacagaatcaggggataacgcaggaaagaacatgtgagcaaaaggccagcaaaaggccaggaaccgtaaaaaggccgcgttgctggcgtttttccataggcttccgcccccctgaccgagncatcacaaaaaatcgacgctcaagtcantagggtggccgaaaacccgaacanggacctattaaaagnatacccatggncgtttttccccccctggggaaagccttccncttcgntgncgcctcctccttgtttcccgaccccttgccggctttacccgggataacccttggtcncgncccttttctnccctttngnggaaantcgttgggccncctttttttcattaggcttcaacggcttgnttaacggtaattcttcaaantttcnggnagttaataggttncggtttccncnttcccaaanncttngggccttgntggtggccaaccanaaacccccccccccg

SEQ ID NO: 1873 - DNA, 470 bp, Homo sapiens
  misc_feature 2, 3, 6, 8, 48, 52, 88, 100: n = A,T,C or G
gnnagngnattcgacgcatttcttactatcgggcgaattttgctccancgcnctggcggccgcccgggcaggtacctccctcatcctnatggaaagaggnttatgagagaagggagggaggcctttggcagccaagggaagacaagtttcaggagttcatgaagcaccatcccccacccccagtgaagaccctaccagaaggtcttatgttctgagttatattgagtgactgcctcattaccactccctactgttatgtggcaagtgtcagggctgtggcaagggtcaggctatcatcattggccccttcaatagactgaccctagcattagggcaaccataagtccctgtgtgcccaagacaatcctagtttacatctgaggccccagtgtcactattaatagtgacctcctttcactctcaaagttgttccagtttgggcaatgaattatatgatcaaaggccccatc

SEQ ID NO: 1874 - DNA, 437 bp, Homo sapiens
taatacgactcactatagggcgaattggagctccaccgcggtggcggccgcccgggcaggtacgcggggaggccatctcgctataggaaaggaaagtggaacagcattcatcctcaacatttttacgaagacaaaatgaagactggagtagaagactgatcagtgcaggtgtagcataaaagtgtaatcctggaagatgtggtgtgagaaggtagcacaagtgaagtagagatacaggagatagggaagggaagctggaagcagaggtcactggagggagagggagatggacacattcagggctacaaagcaagttctatgtgatttgctcacctctcaattgtgggacccctcaaaatgtgtacctcggccgctctagaactagttggatcccccgggctgcaggaattcgatatcaagcttatcgataccgtcga

SEQ ID NO: 1875 - DNA, 446 bp, Homo sapiens
  misc_feature 2, 22, 72, 85, 86: n = A,T,C or G
cntttacgactactatagggcnttttggagctccaccgcggtggcggccgaggtacccaatccagaggcacnatttgcaatctannaagagcccagaggagaggaaaattggtaatgaatcagtggggagtccacgaaggcagaggggctttggcacagcccaaaagacagacagaaatgaggctctcaggactcaagaggagcctcattccaggcagaagaaggatcatggaaaccacacaagcgggtacctgcccgggcggccgctctagaactagtggatcccccgggctgcaggaattcgatatcaagcttatcgataccgtcgacctcgagggggggcccggtacccagcttttgttccctttagtgagggttaattgcgcgcttggcgtaatcatggtcatagctgtttcctgtgtgaaattgttatccgctcacaattc

SEQ ID NO: 1876 - DNA, 445 bp, Homo sapiens
atacgactactatagggcgaattggagctccccgcggtggcggccgaggtacgcggggactctgcactgagagaagcactcaaaaccaccatcaccaatagcgctactaaagacagtgctttggagcttccaagctgatagattatcctttctccccaccctcagatttctccagtgtctctggcacttatagtccatgtttgcaagaaatattttattatagtgctctgaaacaaatttataaagtttgcaagagaagttttaaaaaagcaagctcagcaatatttgggggcttttaaagctgatgatgcagctgacctactggagacaaaggcagtgggagggcccttactggtataaataaataggagtctctggtacctgcccgggcggccgctctagaactagtggatcccccgggctgcagggaattcgatatcaagct

SEQ ID NO: 1877 - DNA, 471 bp, Homo sapiens
  misc_feature 2, 3, 4, 8, 9, 10, 26: n = A,T,C or G
gnnnagtnnngaccgcgtaatcactnctatagggcgaattggagctccaccgcggtggcggccgaggtacgcgggctaaatactgtgctctgacattgatgctaatattccatattatcagggcttctgtggtgtttaggcctctaatttttctcttcagtaaggggaataactttgctgtgtcagcgcagtgcctcaggagggttgcaatctagaaacagtgattgttaaaattgcctataaacacacaatataaacaatatgccacagacacagaggcccccagcatagtttctggaaggtgaagtctcacctctgccagagtagagtcacagtgggaattgaggcttggcatctgggtgcctctgaagctcttcctgtggctcctgttagacaattgaccccgaaacacagaagatagagattgcacattgcgttcagtaattgttgtttatttatgttatttctgaa

SEQ ID NO: 1878 - DNA, 713 bp, Homo sapiens
  misc_feature 2, 4, 8, 10, 12, 17, 18, 22, 25, 26, 29, 32, 33, 34, 38,41, 48, 49, 59, 71, 72, 75, 76, 77, 80, 82, 83, 84, 87,89, 97, 99, 101, 104, 106, 108, 113, 115, 468, 473, 475,485, 542, 546, 577, 626, 637, 654, 664, 676, 690, 707: n = A,T,C or G
cncntctntnantaatnntttnttnnatnttnnntaanctntttttcnnatttttcgtnattattattgtnnatnnngtncnnncantnttttttantntnaantngnttttngncgcctatacgatcctatagggcgaattggagctccaccgcggtggcggccgggggccattgagactgccatggaagacttgaaaggtcacgtagctgagacttctggagagaccattcaaggcttctggctcttgacaaagagacaaggagaaggccttaggatctactgggggagtcccggaggaagcagtctcttctgtcccgctggaacccatggtccacttgaagttccttatgctacctttcacttgaagcatcctatggaaaatacaccagttgagaaaaattccttttgaaaatttgccaagttgttccttgggggtttcaatgttcttaaaggccttttgttttnccagncntattcccagnaaattggccccaccaaaaggaaatttccaaaaccttggggaattccttggggaaagnaagnggaaaaaggaaaaaaccttggaattggggtnggttttaaaaccttggaaaaccccccaattttttttggaattttggganggaaacccctnaaccaaccaaggggggncttggaaatngttccaattttnccaattttgggggnaaaaaccccggccaaanccaaag

SEQ ID NO: 1879 - DNA, 433 bp, Homo sapiens
  misc_feature 35, 343, 396, 414: n = A,T,C or G
ttttggagctccccgcggtggcggccgaggtacantttgcatgcacggacttctacatacataatacttaaacagttcattgtattgaaacacgcttaaaaatggccctagcacttgctgcaatcctgctgtgtaggagttagccaggttgtgtctgctccctctagactattctatacatcaagaactaaaaaagaagagcaatcccagcatgtggctggatgcacatcaaagccaagtctgtcatgaattattttccttcctgttcctttcattcaggtcatgaagcacacatactgctacaggaaagggcaaaaggcaatgtcaagtgctgtgtaattgntgggttctttagtggcaaaggccagcaatgttgcagccaaaagggcatttaanagtacctgcccgggcggnccgctctagaactagtgga

SEQ ID NO: 1880 - DNA, 463 bp, Homo sapiens
  misc_feature 2, 3, 4, 8, 9, 10, 360: n = A,T,C or G
gnnnagtnnnggccgcgtatcactactatagggcgaattggagctccaccgcggtggcggccgaggtactttttttttttttttttttttgactggagagagagagatgttttatctttgccaaagcatgtgagagtaagtagcaaacatcatgacacttcacccctcaaatattttcccacgtatcacttaagaacaagggcattcattctgttacatgaccacaatacaatcagcacagatagatattaacattgagacaatgctctgatgtattggtatctactatgcagttcataatcaaataagggttttggtaacttgggatccataaatggtctgcaaggtcagcccctgtanacctgcacttagtgggtgccatttccctgtctcaggtgcctgctctactggtgatatttttcactggctctgttgctcacttaaaattttttctcccagctgt

SEQ ID NO: 1881 - DNA, 467 bp, Homo sapiens
  misc_feature 2, 3, 4, 8, 9, 10, 27: n = A,T,C or G
gnnnagtnnngtgcgccgaatcgactnctatagggcgaattggagctccaccgcggtggcggccgaggtacccacaagcatacgtagagctggcctacctcattaattactatatctgcagtgcctcaaatatacaaattttaaaaagaaaaaaagtcatatgctactgatggggtattgtattatctgaattaaatggtaaggaattatttaccatgcagaaatcgtataaatctttttttggtagtaggaaacgctaaatgctcattttcttagactatgaggcatgtcaaaggttgaaaaaagaaagaaagcatagcttacctccttttataagaataaaagaactaaataaaaattttttgtcaagtaagcctctttcaggaaatcaaaggatcaacacagatttaatttcaccttctgaaacatctacatctgtggtcttttacaatgagaatgtgcccaag

SEQ ID NO: 1882 - DNA, 438 bp, Homo sapiens
taacactactatagggcgaattggagctccccgcggtggcggccgaggtacaaggccactgattatctagacctggctttcttcttcagtctcatcatccatccccaccccacattctctctccccatcaggtttgtgcaaatgttgtttgggatactcttctctctttggaatccctcctgtttggaatactcttctcttcttgcctttggcatctcctcaccacgcacgttctgctaattcctaaactgcttatagattgtggcttagctttgacttttttcaggatgcctctgctaacccctaaattcaaggtaggtcccgcgtacctgcccgggcggccgctctagaactagtggatcccccgggctgcaggaattcgatatcaagcttatcgataccgtcgacctcgagggggggcccggtacccagcttttg

SEQ ID NO: 1883 - DNA, 441 bp, Homo sapiens
  misc_feature 9: n = A,T,C or G
atacgactnctatagggcgaattggagctccaccgcggtggccgagcggccgcccgggcaggtacgcggggagtgcttctggtttcagcacacatggagatatagaattgaaattgctctgctttctttacaaatgactcagagtgtgcttgtccttccctaaaatgttgccagcatgtaaaggattttcaatgagcagtgcaataagccagcaactgggaaggcttggagcggcactgatataacgtggtactgtcacacagataatcagggctggagccaagtctcggtagccgctgtgcattatcctggtcacatactggaagttttgtttatccaacttggttgctcttgaagctggtgagagccctgccagggatgttgggagtggacttcctagcagaggcagtacctcggcccgctctagaactagtgggatcc

SEQ ID NO: 1884 - DNA, 415 bp, Homo sapiens
ggagctccccgcggtggcggccgcccgggcaggtacaagcctatgccagcgtcagagctgcttttgtgcatgcccttggagatctatttcagagtatcagtgtgctaattagtgcgcttattatctactttaagccagagtataaaatagccgacccaatctgcacattcatcttttccatcctggtcttggccagcaccatcactatcttaaaggacttctccatcttactcatggaaggtgtgccaaagagcctgaattacagtggtgtgaaagagcttattttagcagtcgacggggtgctgtctgtgcacagcctgcacatctggtctctaacaatgaatcaagtaattctctcagctcatgttgctacagcagccagctgggacagccaagtggtttcggagagaaatta

SEQ ID NO: 1885 - DNA, 666 bp, Homo sapiens
  misc_feature 1, 3, 6, 12, 14, 17, 20, 22, 23, 28, 30, 31, 34, 35, 36,38, 39, 40, 43, 54, 55, 57, 58, 59, 63, 65, 67, 68, 70,74, 76, 78, 86, 89, 96, 99, 102, 103, 110, 116, 368, 373,400, 425, 426, 439, 448, 472, 481, 495, 504, 506, 519, 524: n = A,T,C or G
  misc_feature 533, 546, 550, 589: n = A,T,C or G
ncnttntattangnttnagntnntacgnannttnnntnnnatnaattattaaannannnaatnantnntntaanantntattttcnatnattttantantannggttcgncgcctntacgatcatatagggcgaattggagctccaccgcggtggcaattgttatccgctcacaattccacacaacatacgagccgggagcataaagtgtaaagcctggggtgcctaatgagtgagctaactcacattaattgcgttgcgctcactgcccgctttccagtcgggaaacctgtccgtgccagctgcattaattgaatcggccaacgccgcggggagaggccggttttgcgttatttgggcgctctttcncgctntcctcgcctcactgacttcgcctgcgncttcgggtccgtttccggcctgccnngccgaagaccggntattcaagnctcaccttcaaaagggcgggttanattaccggnttattccaccaagnaaatcaagngngggaattaaaccnccaanggaaaaagnaaacaattgttgnaagncaaaaaaaaggggcccaagccaaaaaaaggggccccagnggaaaccccgttaaaaaaaaaagggccccggcggttttggctttgggccggtttttttttcccaattaaggggcctc

SEQ ID NO: 1886 - DNA, 432 bp, Homo sapiens
atcactactatagggcgaattggagctccaccgcggtggcggccgcccgggcaggtaccttggctacatgaagaccaccagcagcagctgggacaaccagcaccctgtggaactgcacagcatgcatagaatacgtcctcccttcagttggcttgggtcagcttaggtcatgggccacttggactgatagcagtttccacagaaatgcctcaagatggtagaataatccagatctctttgcatggggcatggtgtccccgcgtacctcggccgctctagaactagtggatcccccgggctgcaggaattcgatatcaagcttatcgataccgtcgacctcgagggggggcccggtcccagcttttgttccctttagtgagggttaattgcgcgcttggccgtaatcatgggtcatagctgtttcctgtgtga

SEQ ID NO: 1887 - DNA, 756 bp, Homo sapiens
  misc_feature 1, 3, 4, 6, 8, 10, 12, 13, 14, 15, 17, 24, 28, 30, 31, 33,35, 36, 38, 39, 40, 41, 42, 44, 47, 50, 57, 58, 62, 63,64, 65, 68, 70, 74, 76, 78, 79, 80, 81, 86, 88, 91, 96,97, 102, 104, 105, 117, 119, 124, 147, 243, 253, 332, 343,377: n = A,T,C or G
  misc_feature 421, 425, 435, 436, 459, 484, 557, 576, 578, 584, 586, 587,603, 630, 645, 647, 648, 651, 698, 706, 716, 724, 728, 740,742, 747, 748, 752, 754: n = A,T,C or G
ntnntntncncnnnntntctatancaantnnantnncnnnnnanttnttntccattnnttcnnnnttntntttntntnnnnttgtnanatngtttnntatantnnttttatattttntnagctngaatcttaactatcgactcactntagggcgaattggagctccaccgcggtggcggccgcccgggcaggtaccataaatgttgtttcttaagagaatgtcaagtttcagtaaatttactntgaacttcanagtagtgtgcaataactttgataaataagccgatcttatgaaatttgaaagttaccgttttataatttatatttataanaattaaagtgnttggaatttttctggttttaaaccttacccctgnatgttcaccattattttggatttttaatttaccatttcaccagnattnttatcttttnncaaaaaagtcaacgcctttcacntttggggttttggacaatccattcnaggcctttaatttttcctttggcgaaatccctaatttttaaatctggaagtacctttttttccttggccttgntttttatttccctaaaaanantggccnannaattaaaaaattgggnccttttttccaaggccaaccaaccttngtttttttaattaangnntantttaaattaaggcccttccccttgggaaaggtttggaagttttcaangccaattntaatttcaangccttaangaangttccttccccnantgggnnctantnaa

SEQ ID NO: 1888 - DNA, 451 bp, Homo sapiens
  misc_feature 5, 7: n = A,T,C or G
gcccnancactacttagggcgaattggagctccccgcggtggcggccgcccgggcaggtacttggaatgctgtgtggagtcctttttctacttttgttcctgagaaagagagattcacaaacttcccacattcttccagtggcatctaaggatcccttcctaaatggcctttctcccagccaatagactgaagcaaaccatgtccctgatgcttcctgcccaccaccatccattctttcaaccaacagcttctccgggctttcacgtgccatgcactttgctaagagcttgagggaaatacagcaatgaagaagagatgatttctgtttggaccagtgctcagggattcctcctattagaaatcaaagaggcttccaaaagccctacaattttttccctgtaactaaagaaaatagcttctcaatgtaactaaattttatcttatacgcaa

SEQ ID NO: 1889 - DNA, 454 bp, Homo sapiens
  misc_feature 1, 3, 194, 214, 369, 374, 393, 408, 428: n = A,T,C or G
ntnaggcccgaaacactacttagggcgaattggagctccccgcggtggcggccgcccgggcaggtacttttttttttttttttttttttttttatgcgacagagtttgttttatactgcctcataattacctcttttcctttttctttctttgctaccttggtcaagtttccctttattttctctttcctattnaactttttctattaattcanaagttttaatttgcttttccagtttcctagtgtttgtattcccatcctgaacaatctctgtatttttcttttattatatcagaagtctctctgtagttcaggtgaatttatagacagtcatccttacactacctatataaaattatggaaggatntctanaggcatgcttctacttcanattaccaaaatgatnatgaccactgcgcagtgctnggatcaagtccactgggcactacact

SEQ ID NO: 1890 - DNA, 520 bp, Homo sapiens
  misc_feature 272, 280, 291, 308, 311, 316, 320, 354, 356, 363, 365, 368,369, 371, 379, 382, 384, 389, 432, 447, 452, 460, 474, 477,478, 483, 488, 489, 491, 493, 500, 502, 505, 507, 513, 516,518, 519: n = A,T,C or G
cctatcactactatagggcgaattggagctccccgcggtggcggccgaggtactgggggctcctaaaccatatatatcttgcaccattctggggatatttgccaggcctgggggatcaaaatataccccaaatattaaaccagttgaagggtgatttgagcctactttttgaacactttgtatcccctgtgtgccaaggaaattcagggtctttttcgtaacttgatcagatgtctcccaggttgggctacacacaaaaaaagttattctanatactggnagtgtacctgnccggggcgggccgtttntanaactnagtnggattccccccggggcttgcagggaaatttcgantnattaaancnttnntnggttaccngtncnaaccntctaggggggggggccccggttaccccaaattttttttgtttnccccttttatggganggggntaaaattngccccccctttggnggnnaaaanaaaanngngncaaaaanantgngnttttcnctntnng

SEQ ID NO: 1891 - DNA, 452 bp, Homo sapiens
  misc_feature 2, 3, 89, 292, 302, 386, 392, 421, 435: n = A,T,C or G
tnnacggcccgaaacatacttagggcaattggagctccccgcggtggcggccgaggtactcacagctgcatcacactgaatatcatctncctgcactgccatttcatttgagcagggctttgcctgtcaagaacattcatatcttttgataaacagtgcattttttccctgatagtctgtatgggacagcctccttgtttgcatctgaaggacagggacttcaggacctcctgctgtggtcaccaaggaatcacattcaaacttctcagcaaggtgttatggtccttctcantttgcctacnatccattgaggcaaaggtttccttctctcaatacaccctctgctttagccagggggacctcccactgtcctatctatgtgttcnatttgntcctgactgttagtacctgcccgggcggncgctctaaaactanttggatcccccgggctg

SEQ ID NO: 1892 - DNA, 457 bp, Homo sapiens
  misc_feature 2, 3, 4, 5, 357, 457: n = A,T,C or G
gnnnnagttggcgccgatacgactactatagggcgaattggagctccccgcggtggcggccgaggtaccattgactacttcatactgctacaaaatgcatttgaaattttttttctggccaaggaacctattcatccactctctccaaattaaatacttactagagaaatgttggcacttattaaccttgtaatatgaattagaaacaaacttgaccttcatatattcttttacacttatgaatctatttaactgcatgatttatctgcatgattcagaattttcttgataccatgtaactgaagtaagatttagaaatatattttcttgataccctgtaactgaagtaagatttanaaagctgaggtgacagttgtcacccataatgctgataaatataggaatgagtcgattataaatttaaaccttttgtggcattatgctaccaaaatatctn

SEQ ID NO: 1893 - DNA, 532 bp, Homo sapiens
  misc_feature 2, 3, 4, 5, 8, 9, 10, 11, 20, 23, 29, 40, 45, 46, 103, 319,332, 336, 344, 358, 365, 366, 367, 377, 389, 418, 420, 440,441, 446, 466, 473, 477, 485, 489, 496, 506, 507, 518, 520,528: n = A,T,C or G
gnnnnggnnnngacgccgtnacnactatntatgcggctanttgcnnctccgccgtggcggccgggggccattgagactgccatggaagacttgaaaggtcacngtagctgagacttctggagagaccattcaaggcttctggctcttgacaaagatagaccactggaacaatgagaaggagagaattctactggtcacagacaagactctcttgatctgcaaatacgacttcatcatgctgagttgtgtgcagctgcagcggattcctctgagcgctgtctatcgcatctgccagggcaagttcaccttccctgggatntcccttggaccangaanacagggangaagggccttttanggatttnnntttggggggnggtccccggaanggaaacagtttttttttttttgtcccccngntgggaaaacccaaatggggnnccccntttgaaaaaatttccctttnaaaggcntccnttttggcnacgngggcccnttcccctttnntaaaaaaatancnccccccgngggg

SEQ ID NO: 1894 - DNA, 443 bp, Homo sapiens
  misc_feature 2, 3, 4, 5, 8, 9, 11, 270, 296, 331, 333, 392, 436, 442: n = A,T,C or G
gnnnnagnngnggcgccgtaatacgactactatagggcgaattggagctccccgcggtggcggccgaggtactttttttttttttttttttttttttttttgcaaatttacacagttttcttaggaatgctctttctttttttttctctttggactctacattcctgtagctcctattcttcaagggcacaggggcttacttaaacataaaattttacaacttaactggaagggtgccctgcttgcaaatggaaaactgccacagagcanacttaactgcagcaagcaggtgacanagcaaggaacaggatccaaaattatgattttttgngngctactgaagtaaaagaatttaagaaggttttactcagggtcataggctgggttggaanactgggaaaagggaaatcagtagtatctatatctaattatgggngacagna

SEQ ID NO: 1895 - DNA, 508 bp, Homo sapiens
  misc_feature 2, 3, 4, 5, 8, 10, 19, 298, 345, 346, 349, 356, 363, 368,385, 424, 426, 428, 437, 438, 439, 440, 441, 442, 443, 448,449, 450, 451, 457, 461, 462, 463, 470, 473, 484, 485, 491,494, 500, 501: n = A,T,C or G
gnnnnggngngaccgcgtntacgacttatagggcgaattggagctccccgcggtggcggccgggggccattgagactgccatggaagacttgaaaggtcacgtagctgagacttctggagagaccattcaaggcttctggctcttgacaaagatagaccactggaacaatgagaaggagagaattctactggtcacagacaagactctcttgatctgcaaatacgacttcatcatgctgagttgtgtgcagctgcagcggattcctctgagcgctgtctatcgcatctgcctgggcangttcaccttccctggggatgtcccttggacaaagaaaacaaagggannaanggccctnagggatntactnggggggaagttccgggngaaaccaattttttttttttttccccccttgggaaaccncntngggcccccnnnnnnnaaaannnntttttngggnnnttttttnccngggggggggcnntttttnaanaaaaannacccccc

SEQ ID NO: 1896 - DNA, 852 bp, Homo sapiens
  misc_feature 1, 506, 530, 547, 559, 564, 581, 630, 654, 697, 700, 709,727, 736, 741, 746, 780, 792, 825, 831, 836, 840: n = A,T,C or G
ncgccgtatacgactactatagggcgaattggagctccaccgcggtggcggcccgaccccgcaggccggagcacctacagcatcggccagcaacgcaatttcgtcgtgaccaagggcgcacaggtaccgatcccggtattcggctcggtggtggcgaataccagggccttaccggccggcatctacacagacaccctgacggtgactctggattggtaaaacatgaggatggacatcatgcatgcacttgtatcgaaagcagtttttccattggtggcgctggtgtgggtatcgggcatccaggcagccaccaccgtgaccgggcagatcagctccacgctgatcctgaccaacagctgcctggtcaacggcgtgggcggtaccaccggtttgaacttcggtacgatcaatttcggcaccaccaacagccagttcaccacccagtccggccaaatgctgggcggcggcggcggcgcactgtcgatccaatgttcttcgggcacctngccggtgatcaccgtggggcgccnggtccatgacgggcaantccaccggcggnacccnggcgctgtatgaacggngtggccaattatttgccgtttacttttaacaaccgacttccggcatttnaacgcttctgggcattaacgggancattaaacgtgggccccaaccacggcgtttggccaaaccgtgnaanttttacggncaggccgtgggcaaaggngggaattgnccgcnggtancctatacccaaaccgggttccgtgcaaactgacntttttaattgcnttgaaacggccctgttgggcgggcctggcggtnattacnggttngggnaatcccttttct

SEQ ID NO: 1897 - DNA, 845 bp, Homo sapiens
  misc_feature 2, 455, 580, 584, 610, 648, 674, 694, 701, 733, 741, 752,769, 783, 806, 841, 844: n = A,T,C or G
tntggggcgcgcgtatacgactcctatagggcgaattggagctccccgcggtggcggccgaggtactctaaactcagatggcttatgactagaaaaggtcacaccttttaaagacgcagctgcgttccctcagctgtcaggcttgctattcgcaaactctgttacaagacaccatcttagaagaatgttctgaaaaaagcaagatgcaatcaaacaaatatgtcgccataaataggaagaaaagtcttagttgaaatctgatttcttgggaaacattttaaaatgtatttctttcaaaaataaaaatataacaaaacaagaaaagaactaccttcgaaataaatatactcggaaattgcagacttgatttagatttcttcctaggaaagaaaaacgtttaaaccagaatcatagacacctatagctggaagtgcccctacaactattgagcgcangtgaggaaactgaggccaaaaaggtgaagtcactggctagaatctgcacagcagacgtggaggccaggatgagatcctcgcccagtgctctcttgggtaccatgcttcctgtcctgtcctgcccnggcnggccgctctaaactagtggatccccnggctgcaggaattcgatatcaagcctatcgatcccgcnacctcgagggggggccccggacccancttttggttcctttagtgangggtaantgccccctggcgtaacatgggcatactggttnctgggggnaaatggttttncggttacaaattccccncaacattccaaccnggagccttaaatggtaaagcccnggggggcctaatgggggagcctacctaccattaantgng

SEQ ID NO: 1898 - DNA, 872 bp, Homo sapiens
  misc_feature 3, 38, 78, 97, 99, 477, 482, 525, 530, 586, 593, 605, 656,664, 671, 690, 717, 724, 728, 739, 742, 746, 750, 751, 760,778, 801, 802, 804, 823, 828, 835, 839, 843, 845, 850, 859: n = A,T,C or G
cgncgtatcgactcctttagggcgaattggagctcccnttttgtggcggccgcccgggcaggtaccagttttatcacntaaatgccgcaggaataantntgatcatttacttagattactgggctttttgttggcttctttgttcatttttaatctgcaaatataaaagattgtgttcataattctttaggttgaacatgaaatgatggaagaagacttcaacttccaggagagatttattagctagtggatactcagtgctcccaccaaaaccactagaaaaaaatgtatttaaaacaaataaatcaactagttcaaggaaatagagagctgaaaaggcaaagagaccttgcgaagtaaagactccagataaggcaacacttagtgaggtgaactgacttttaaagactttatccttggatgcatttcataattctgggcatgttttaggcagaataacagtatttaaatcctgtnaaaanggaattcagtttgcaaatgcaaataagggtggtaatcactggnccggnataggggggccccaatcttttcacctgagtcttaaaagcccgaccgcctatcttanaatttantcccaagggacnggaaaaatgccagggggaggtcaaaaaagggccaatgttgcttggtttttnaaaatccnggccagntccccttggcccgtttttnaacctagtgggatcccccgggctgggnggaattngaanttcaaaccttnttnaatnccgnncaacccttnggggggggggcccgggancccaacttttggttcccttttanngngggttaattggcccccctnggggnaaacaangggnaaancngtttncctgggggnaaattgttttcct

SEQ ID NO: 1899 - DNA, 900 bp, Homo sapiens
  misc_feature 460, 463, 495, 506, 516, 523, 528, 530, 536, 538, 554, 559,560, 568, 579, 580, 595, 624, 637, 653, 656, 658, 667, 673,676, 677, 683, 686, 698, 702, 714, 727, 734, 737, 756, 758,763, 783, 799, 807, 851, 864, 869: n = A,T,C or G
aggggcgcgcgtaatacgactactatagggcgaattggagctccaccgcggtggcggccgcccgggcaggtacaaccaccccccgggtatccataacctaacaataacaattgttaagcattcggccacacatgtttcttcagctcccccacctcctccctatcctcccaggttcccactgaattatatatcatttattcataaataattctgtatatttagttacagctcaatgaatttccacaaagtgaacatgctcatgcaaaccacacctgcactgggaaatagaaattacaaacacccggagccccctctgcaatactctctcagtcctttcctcactccttccaaaagagtagctactatcacctattgtgaaccttgcatatatggattcatagaacatgtgtatttttttggtttggctacatttgtctaacaatttccgcataccctcggncgnttctaaaactagtgggatcccccgggctgganggaattcgatntcaaagcttntcggaanccgtncnaccctnanggggggggcccgggancccannttttgttncctttaaaggnnggggtaaaatgggcnccctgggggaaaaaaaaggggaaaaaaanggtgttcccgggnggaaaaatttggtttnccncncaaaaattnccaaanaannataaanaanccggggaacaanaaangggaaaaacccnggggggccctaanggggggngcnaacctccccattaattggngntgggnccaactggcccgtttttcanttcgggaaaacctgtngtggcccncttgaattaaaggaaatcgggcccaacccccgggggaaagggcngttttggtttttnggggngctttttcggtttccttggttaattgaaatg

SEQ ID NO: 1900 - DNA, 886 bp, Homo sapiens
  misc_feature 2, 8, 17, 108, 269, 306, 355, 510, 539, 550, 551, 557, 571,575, 603, 618, 645, 651, 652, 657, 660, 662, 669, 674, 688,721, 723, 725, 730, 742, 767, 771, 776, 778, 783, 790, 799,806, 807, 814, 817, 819, 820, 821, 823, 825, 827, 832: n = A,T,C or G
  misc_feature 834, 835, 844, 848, 852, 853, 856, 857, 866, 867, 868, 871,876, 885, 886: n = A,T,C or G
tngtccanatttaaacnactcactataggggcgatttggagctccacccgcggtggcggcccgcccgggcaggtactttttttttttttttttttttttttgggagtntttaagattatctctatgttggctggctgcggtggctcatgcctgtaatcccagcactttgggaggccaaagcgggaggccaacactggggctacccaagagttgaccaaaggtgatattaatacatatgcttacttattaccttgttcgcacagttctantgtaagtcttgaaaatcaagtaaatttggaaacatanttgcacaaactctctcatgagtcacacagttaatccagaatattatttntaagttatcataaagccaacaagcaaatatgatgtacctcggccgctctagaactagtggatcccccgggctgcaggaattcgatatcaaagcttatcgataccgtcgacctcgagggggggcccggtacccagctttttgttccctttagtgangggttaaatttgccccgcttggcgtaaancattggcatanntgtttnctgggtgaaaattngttnttccgctcacaatttcacacaacaaaanaacccgggagcaatnaaagtgtaaaagccctgggggggcctnattganntgaanctnanctcacanttaantggcgttgcgcttnactggccccgttttcaagttcgggaaaacctgntntngccangctttaatttanttaatccgcccaaccccccgggganaagncgccntncgttnttggggngcttttccntttcctnnttaaatngantnnntngncntgggntnnttcgggtgngggngaannggnnttaactttnnnaanggggntataactgnn

SEQ ID NO: 1901 - DNA, 867 bp, Homo sapiens
  misc_feature 6, 16, 26, 32, 37, 101, 179, 260, 391, 408, 448, 490, 517,549, 564, 590, 593, 629, 637, 640, 644, 675, 684, 692, 708,709, 718, 724, 726, 748, 757, 760, 769, 784, 806, 821, 824,830, 832, 844, 865: n = A,T,C or G
ctatantctactatanggcgaatggnagcttnaccgnggtggcggccgaggtacgcgggtcctccagcccctcatgggagccggactccctgagactcaanaaaatgcacccgtcctgcgttcctcctgcctggggtgacccataaggaacaccccccccttctcaacaaccacagaanataaatgccaggggaccaccaacatgggcatggggctgtgatgccaatcttaagggaaaacacaagtaaaattgctccagnactgagctgggggcagcttgctctttcttgtccatgactttgaggcgggatctcgagcgtctgtctgacgggccttctgtctgctgtcctctccaggtttcagacattgaattcaggattgcagccctganggcccgcagggctcacngtgaagccctcgggaaaagccccggaggaagtcaaacctnccgatatttctccctcgagtggctgggaaaacttggcaaganaaccagaggaccaaatgcagacccttnaagtgagggcaaggcaatggctgtgccctatntttgaagaagaaagntcaattatttccttgaaaaagtcaangtnaaagaatgatgaatcttttgaatcggaaaataaatntaccttgnccnggcnggccggtttaaaaactaagtgggatcccccnggcttgganggaatttnaattttaagccttatnnatacccgtnaaactncnagggggggggcccggtacccancttttggtnccntttaatgangggttaattgggccnccttggcggaaatcatgggcanaaacttgttcctggntgnaaattntntttccctttacnaatttcccacaaaaatacaanct

SEQ ID NO: 1902 - DNA, 472 bp, Homo sapiens
  misc_feature 2, 3, 4, 5, 6, 7, 10, 11, 32, 450: n = A,T,C or G
gnnnnnnagnnggcggcgcgcgtatacgactnctatagggcgaattggagctccccgcggtggcggccgaggtaccatctctgtttctgaggaagcagcagaggagcctatgtgatccagagaacttgttcttggcttctggaagcagagatgcaggaatggaccaataaggcattaaacaaattcatttagaatctcaagaaagaaatatctaacagtataatcataataacaaaattttgatttcttcagaagcactccaatagcttcacccgcattagctaatcttgtgcagtgaggaggtgcaattccctctagtctcccgcgtacctgcccgggcggccgctctagaactagtggatcccccgggctgcaggaattcgatatcaagcttatcgatacccgtcgacctcgagggggggcccggtacccagcttttgttccctttantgagggttaattgcgcgcttgg

SEQ ID NO: 1903 - DNA, 462 bp, Homo sapiens
  misc_feature 2, 3, 4, 5, 6, 9, 10, 11, 12, 29: n = A,T,C or G
gnnnnnagnnnnggcgccgcatacgactnctatagggcgaattggagctccaccgcggtggcggccgcccgggcaggtacacagatcccagttatcaacatagccagatggctggtggtagaagcaaccctgtccctgtagcacctctctgtgtcctgctcaaaagcattaaaacatcattcttagataagaacagagacaaaggatatgtctttaacactttacagtctataaagtttttccacagccactgtctcactgaatcaacccctaagagacagaaatgaaaatcgctgtttttacaaactgagaaattacgggcctttgaagtgtttcacagccttcacagcccgctggtaagaagcagagatcaggccttggacctgggtcttgtgattccaaagcccatgatccttcggattcatcaaggctccactccaagtgcctactggggactgcctt

SEQ ID NO: 1904 - DNA, 491 bp, Homo sapiens
  misc_feature 2, 3, 4, 5, 6, 10, 21, 24, 30, 33, 70, 296, 313, 315, 319,402, 411, 440, 441, 443, 444, 449, 453, 458, 462, 466, 467,478, 480, 481, 484, 486, 491: n = A,T,C or G
gnnnnnaggnggcggcgtgcnctntgactnctntagggcgaattggagctccaccgcggtggcggccgangtacgcggggagaacaccaggtgctgttctcaacaacgtccggcgcttgaccagtgcattgagaaggttggtccccaataacatctatctcaagaccactttccacagccttttaatctcccactcccagtcctctctctttgttctctttccactctgacgaattaaatttagcccttattctttttcttgctttagaaaagttcctcgaagtttagacgtgtanaatgttagtgtcctcancntatntcgcccaaatccctccttttataggtgcagagactgaggcccacagaggttaaatgccaggctcaaggtggtaccttgccccngggtttttnaaaaattaaagggggattcccccccgggnntnncaggnaaantttgntttntaanngctttttttcnannttntnggacn

SEQ ID NO: 1905 - DNA, 449 bp, Homo sapiens
ctaatacactactatagggcgaattggagctccaccgcggtggcggccgagaaagtggcgcagcaatggaaagtgtcgcgcgaacagcaggacgcgttctccgttgaatcgcaccgccgcgccatcgccgcgcagcaagccggtttcttcaaggccgaaacgacgcccgtcgaaatcatcacgcgtacgccgaacctggccacaggccaggtggacgtatcgcgccgcaccgtcgacaccgacgaaggcgcgcgcgccgattcgacgctggagtcgctgggcaaactgaaacccgtgtttgccgccaagggcaccgtcacggccgccaacagctcgcagatgtcccgacggcgcccggtgcgctgctgatcgtcagccgaaaaaatcctgcgcgaacataacctgactccgctggcgaaaattcttctcgttcgccgtgcgccgggcgg

SEQ ID NO: 1906 - DNA, 468 bp, Homo sapiens
  misc_feature 2, 3, 4, 5, 6, 9, 10, 11, 12, 30: n = A,T,C or G
gnnnnnagnnnngagcgccgtatacgactnctatagggcgaattggagctccaccgcggtggcggccgaggtacgcgggtgactgaaaagggcacaggagaactttctgaaataataaaaatgtcctatatcttgttttgcatcgtagttacacaggtgtagacagttgctaaaacgctaaaaactaaatgtgtaagatttatgcattttagtgtatttaaattataacccccagaaagcattgcctcattttttctggagggtaaatatgctcgttaggagcataaggggatgattttgagaaacccttgccctgtcattctgtcagtaaaccgccactaacttttctggtttcaaaaaagcaaggtccattgatgaaactcctttgtgccttaagtgacaaataacattgataaggcctactgtcaacaaggagtgtggtttgttatatctttttgttttttaggt

SEQ ID NO: 1907 - DNA, 470 bp, Homo sapiens
  misc_feature 2, 3, 4, 8, 9, 14, 22, 406: n = A,T,C or G
gnnnaagnnggcgncgcgcgtntacgactactatagggcgaattggagctccccgcggtggcggccgcccgggcaggtacgcgggggctctgcttaaaactcttcagaggttcaccatcgcttccagaaaaagatcaatactcctgacgtggcaacctgtcgagactcaggaccgctaggaaatcagctcttgtttacccctctatccattacactacgatccagctgggtttaggcatcacttcctctgagcaatcctccctgatgtcatgaggcagtgctgagtgccttctctggaccctctgtttacttgcctgttaaatcctgaacatctggaagggagtccgtgttcagcaacatatctacgccttgcagcacgggtgcctggcctgcagcttgggtgttnccgcaaacagctgctgactggacgggatgcattcgaatgtgttttccaaagaacattcaggaga

SEQ ID NO: 1908 - DNA, 479 bp, Homo sapiens
  misc_feature 2, 3, 4, 5, 6, 7, 8, 10, 23, 403, 474: n = A,T,C or G
gnnnnnnngnggcggcgcgcgtntctactatagggcgaattggagctccaccgcggtggcggccgaggtacaaggcatttttgctaactgtaacttcccacttaatcaacaaaaacaaaaacactcatttctgaacattcagtgcattcatgattaatcttaattacaccacaaaggtatttttcaatggtgattttgcgggagtggggtaacagtttcgaaagcaacattgtcagaaacatagttgattttaaaggttctttctggtgactttgacttctgcttttttagaagaccttacacagagttgtatttatttctcctggaatatttcaagcaattcagagtgaaaggggtatacattccaatttgcgtatgagataaaattttagttacattgagnaagctattttctttagttacagggaaaaaattggtaggggcttttggaaagcctctttggatttctaatanggagg

SEQ ID NO: 1909 - DNA, 457 bp, Homo sapiens
  misc_feature 1: n = A,T,C or G
ngccgcgaatactactactataggggcgaattggagctccccgcggtggctctgatcctaggattttttttttccctgctttggctgcctctgttttggttcatgtgtcaagcagagacggggaaagccaaacgacacaatgagcgttctcagaaaggaaacttcttcggaatgaaaagctttggccacattggaaagggtagaagtctgagagaaactttttcatcagggagactaggtcgatgtcttagtcctttcaggctgctgtaacaaagtacctcggccgctctagaactagtggatcccccgggctgcaggaattcgatatcaagcttatcgataccgtcgacctcgagggggggcccggtacccaagcttttgttccctttagtgagggttaattgcgcgcttgggccgtaatcatgggcattagctgttttcctgtgtgaaattggtt

SEQ ID NO: 1910 - DNA, 746 bp, Homo sapiens
  misc_feature 10, 14, 17, 18, 21, 23, 27, 33, 36, 44, 45, 46, 54, 62, 70,71, 82, 87, 104, 107, 111, 112, 115, 117, 133, 325, 348,351, 363, 364, 370, 373, 386, 401, 403, 413, 425, 432, 448,459, 477, 484, 513, 517, 524, 526, 530, 539, 559, 584: n = A,T,C or G
  misc_feature 588, 592, 597, 641, 653, 667, 674, 684, 701, 728: n = A,T,C or G
tccattaatngtcnatnnatntnattnattttnttnttattatnnnttattaantatttttnactaatannattttttaatntaatnttcttatatattttaanaanttgnnttntnctatactatcatatanggcgaattggagctccaccgcggtggcggccaacgcgcggggagaggcggtttgcgtattgggcgctcttccgcttcctcgctcactgactcgctgcgctcggtcgttcggctgcggcgagcggtatcagctcactcaaaggcggtaatacggtttattccacagaatcaggggattaaccgcagtgaaagnaacatgtgtagcaaaaaggccantcnaaaaaggtccanngtaacnctntaaaaaaagggcncgaagtttgcatggncngttttttttncacaataagggncttccgnctccaccccctggacntaggccattcnaacaaaaaaaaaattccntacggcnttccaaaaggttcaagtaaggggttgggncagnaaaaacncnccgnaccaggggnaccttaattaaaaaaggaantaaccccaaggggccggttttttcncccncccnttggnggaaaaggaccttcccctctttcggttggccggcctttcttacncttggttttccncggaacccccttgnccccggncattttaacnccggggaattaaccccnttgggttcccccggccccctttttttnccttcccccctttttccg

SEQ ID NO: 1911 - DNA, 420 bp, Homo sapiens
  misc_feature 371, 414: n = A,T,C or G
tagggcgaattggagctccccgcggtggcggccgaggtacagagggcaaggaaggaatttttctgtaatttggaaaaatgggaactgtgagaaagaaggagttggaagctcatacttagggagcatctacaaggacgtctttttcacgttggttggaatatccaaatcaaggattatttcagaatcacccagatgattaaaaaactactgagatccaggttgtatttcagcagttctgacaattgctctgggtcgaagcttgaatcagtagttaagaaaaacaacaaacaaaacaaattttggggcttttctcactgatttacagttaaagctcatttactcttcctatgactttagatggaggatatttncaagtcttcaggatggagacatggaggggaagtgagactagtngatgtt

SEQ ID NO: 1912 - DNA, 431 bp, Homo sapiens
ctactatagggcgaattggagctccccgcggtggcggccgaggtacactccagtatgtagataactttttgtgtgtagcccaacctgggagacatctgatcaagttacgaaaaagaccctgaatttcctggcacacaggggatacaaagtgttcaaaaagtaggctcaaatcacccttcaactggtttaatatttggggtatattttgatcccccaggcctggcaaatatccccagaatggtgcaagatatatatggtttaggagcccccagtacctgcccgggcggccgctctagaactagtgggatcccccgggctgcaggaattccgatatcaagcttatcgataccgtcgacctcgagggggggcccggtacccagcttttgttccctttagtgagggttaattggcgccgctttgggcgttaatca

SEQ ID NO: 1913 - DNA, 428 bp, Homo sapiens
  misc_feature 10, 177, 358: n = A,T,C or G
ggcgaattgnagctccccgcggtggcggccgcccgggcaggtactgggaatgactgagtagtcacaaattcagagagctgctgggaggtagatgagttggggctgggaggtgtccatgggatttgggggcttgagggtcacggtcacctcaagacagcaggatggggtggagagcangtgaggggcgatcagagaaacaaagggagtgagtgaaggcaactctgtctttgaggggacagcagagcaagcaggctgaaggtctgggcgcagaatgtggtgcacaggaggtgggtgggagggaatttacatattcacccatctgacctgctttgtgaccttctccaatatttgttgtagnagaagaaataagagaacacgtgtggccagacaccatggctcatgcctgtaatcccagcacttttaaggga

SEQ ID NO: 1914 - DNA, 421 bp, Homo sapiens
ggcgaattggagctccaccgcggtggcggccgaggtactgttgagggactcaccatagatctgagggaggaaggagcttagatttgggaaacactggggtggatccctcttctgttgagtaggggcacttaagacaccctgctgttgtgttgttcctccagtgctagatcccagaacaaaattacttcctcccaccacctttcagatttctcctttggttgcctcttgcgttactttcagggtttacagttgaattaaacaggtgggaagaaagaggtctctgccatcttttctataccagaagtctcatacagtgtattcaataacactattaattaaaattaataatactattacaattaaaataattactttaattattattttcatctgtgtcttattttatgtgtatttttaccag

SEQ ID NO: 1915 - DNA, 523 bp, Homo sapiens
  misc_feature 263, 317, 318, 339, 360, 361, 362, 375, 385, 403, 412, 422,429, 436, 449, 473, 477, 480, 490, 523: n = A,T,C or G
ctatacactacttagggcgaattggagctccccgcggtggcggccgaggtacttaagagtgtggcctgaacccagcagggccttgggtgagatctcagctcagctacttcatagtggagacaccgtgagaaagctatgtaacttctccaggcctcagcttcttcagctgaaaatggagcttaacaaaaaagcactttcctcatagggttatcatgaagagtaaagaaatcaagtaagtttaaagtgcttagaacaagtgtctnggtgcctggtcattacttcattaaagtggttaaacctcattaaccagtttgttnnacccttgcccccggggcgggnccgttttttaaaaaactaaannngggaatccccccnggggcttggnaagggaaaatttccaaanttttcaaancctttttttncgaaaancccgtcnaaacccttttaangggggggggggccccccgggaaancccnaancttttttttnggttcccccttttaagggggggggggtttaaan

SEQ ID NO: 1916 - DNA, 428 bp, Homo sapiens
  misc_feature 5: n = A,T,C or G
cgaancactactatagggcgaattggagctccccgcggtggcggccgcccgggcaggtacaaaaatgaccgcagcagcatatttcctaagatccctgaaaacagctaagatccctgaaagcaactcaaatgtccatcaatagaatgatggatattattctaccccattgaaacatttcacacacaagttttgtgttttatttttatttatttatttatttatttttcatgtcaatgaattcaaaggaatcacacataggtttttgtatagaaacagcactacatttctgtaaggggtgctttttcaagatatctgtgttcactagttgtagcctgcgactggagggctctgtgtcaagcattccacttgctactgattcctaccatacccctctttgttcccagaacattgtacctcggccgctctag

SEQ ID NO: 1917 - DNA, 475 bp, Homo sapiens
  misc_feature 334, 364, 386, 419, 435, 437, 461: n = A,T,C or G
tatacgactactatagggcgaattggagctccccgcggtggcggccgaggtacgcgggtgtgcagccacagtgagcttctgaacatttcttctcagactaagctcttacacacagttgcagttgaaagaaagaattgcttgacatggccacaggagcaggcagcttcctgcagacatgacagtcaacgcaaactcatgtcactgtgggcagacacatgtttgcaaagagactcagagccaaacaagcacactcaatgtgctttgcccaaatttacccattaggtaaatcttccctcctcccaagaagaaagtggaagagagcatgagtcctcanatggaaacttgaagtcaggggaaaatgggnggcttcaccaaattatttttgngcatgggggttttaaagtttttttccctttggnaaaattaaaagtttcnangggtttgggctttttgggggtttnaaccccaaattaag

SEQ ID NO: 1918 - DNA, 481 bp, Homo sapiens
  misc_feature 10, 260, 292, 307, 327, 350, 358, 381, 382, 385, 390, 397,408, 413, 414, 425, 437, 440, 446, 448, 460, 461, 462, 463,466, 468, 470, 475, 477: n = A,T,C or G
tctaacactncttagggcgaattggagctccccgcggtggcggccgaggtacagccctgagctgcatcatttaaagaccaattgttaaggaccaatctgagggcctgtgcattagttaaaactccttatctggtcatagagggtggtgtggtttggacgcgttccccttgtctgtgcaattcccaacagaggcaagtgcgcatttgagacaggttgagggttcaagctgtccaatccctgctcatctgcagcacaccaanggaatgtgggacttaattgaaaaataaactgnatgcattgccaatgngccataaaactgggctgggnttttttttataatcttcacaaanaaactctntgttgaaaaaaaaaatttctggnnttntaaanccccccnctttttttganggggnnttaaagggccnaaaatcaccttnaangtttcntngggggttttttnnnnaanancncctcncnccct

SEQ ID NO: 1919 - DNA, 448 bp, Homo sapiens
  misc_feature 40, 244, 280, 290, 304, 308, 327, 339, 344, 355, 363, 374,387, 390, 407, 408, 413, 419, 425, 432, 435, 441, 442: n = A,T,C or G
cgattggagctccccgcggtggcggccgcccgggcaggtncccacacacacagggcgcacgcaggcacacactgcagacacacacacacataaacacacagagttcactagtccgagttactgattttcttaggattctcaaagtgacaacaccggaaacaaggtaattcatgttaaaacacaagggttatatcagtaagagatgggatccccgaagtaaaccgtggaatttgaatcaagcttngaagagctaaaaaaagaaattggagtttcaacattnaccttcttgnatccttaagaaatncagnaagttcaaaatagaaaacnttacagttttcnggatnccaaaaggttngaaaaccntttttgggggnatttaaccccttncantttttttaaaaaaaaanngaatnttttgnaaaaanttttccntgnggcctnnggacaa

SEQ ID NO: 1920 - DNA, 423 bp, Homo sapiens
gtatacactactatagggcgaattggagctccccgcggtggcggccgaggtactgtcttttgaaagcagaaaggtagagcaatcattagggtggcacgagggcattgagagtgctatgcattgtcatttactcaataagttgtagtattaaagacggcccacgggtgtgcatcaggctgtatgggtaggaatattctagaggtttttctttcctgggcttaattccccaaccagataaaatacctgatgtttaaaattttgggtttttaaaaaaatcaccccaagaaaccttctgtttaacaagtccctatatgtacctgcccgggcggccgctctagaactagtggatcccccgggctgcaggaattcgatatcaagcttatcgataccgtcgacctcgagggggggcccggtacccagctt

SEQ ID NO: 1921 - DNA, 450 bp, Homo sapiens
ggccgcgaatcgactcctatagggcgaattggagctccccgcggtggcggccgaggtacgcgggggagattcaaagcatagcatgtctacctgaacatcctcagatcctgctgacatcaccagtggaggtcctctgctgattgatataaatcattttcaaatccagcaatgcattgatgactgttaattccatgctcctcaaacttgcccagaaatgcctctaataggtaagggaaagagaagatacctcagtatgtatcctatggcaatgcatctcaaaaatgatacttatttaaagactctgtttttaggtaaaaagaaattattcaaatgtattctgaaaatgttattggttttaatataaaatgatatgttctccaaaatctttaagtgggggattgaaaagatcccagggaagaatgttattcttggatattcttggatcatttt

SEQ ID NO: 1922 - DNA, 458 bp, Homo sapiens
  misc_feature 2, 3, 4, 15, 420, 425: n = A,T,C or G
gnnnaggcgccggcngcgtaatacgactactatagggcgaattggagctccccgcggtggcggccgaggtacattgacagtgcttctggtttcagcacacatggagatatagaattgaaattgctctgctttctttacaaatgactcagagtgtgcttgttcttccctaaaatgttgccagcatgtaaaggattttcaatgagcagtgcaataagccagcaactgggaaggcttggagcggcactgatataacgtggtgctgtcacacagataatcagggctggagccaagtctcggtagcgctgtgcattatcctggtcacatactggaagttttgtttatccaacttggttgctcttgaagctggtgagagccctgccaggaatgttgggagtgggactttcctagccaggagggcangtacnctgccccgggacggcccgcttctagaaactaga

SEQ ID NO: 1923 - DNA, 442 bp, Homo sapiens
  misc_feature 2, 3, 369, 395, 442: n = A,T,C or G
cnnatcactacttagggcgaattggagctccccgcggtggcggccgcccgggcaggtaccaccacgcctagataactttttgtatttttaatagagacagagtttcaccacgttggccaggctggtctcaaactcctgacctcaagtgatctgcctgcctgggcctcccaaagtgctgggattacaggcataagccagcacacctggccgttaaactagttattttaatcatgctacacaaagaagacatttctccaaaggaaatatataaagggaaacactgttgaaataaatggaaagctaaaagtctcagcatagaagctataaaaagaaacaagtggaaattgtagaactgaaaatacaaataancaaaatttactggaaggtctcaacancaatgaaagattgactgaggggaaaggaggtcagttaaaatttgaan

SEQ ID NO: 1924 - DNA, 476 bp, Homo sapiens
  misc_feature 2, 3, 4, 5, 7, 16, 435, 445, 461, 463, 474, 476: n = A,T,C or G
gnnnnangccgcggcngcgtatacgactactatagggcgaattggagctccccgcggtggcggccgcccgggcaggtacaaaaatgaccacagcagcatatttcctaagatccctgaaaacagctaagatccctgaaagcaactcaaatgtccatcaatagaatgatggatattattctaccccattgaaacatttcacacacaagttttgtgttttatttttatttatttatttatttatttttcatgtcaatgaattcaaaggaatcacacataggtttttgtatagaaacagcactacatttctgtaagaggtgctttttcaagatatctgtgttcactagttgtagcctgcaactgggagggctctgttgtcaggcattccacttgctacttagtttcctaccatacccctttttttggttccccaagaanaatttggtancctttggggccccggntntttaaaaaacntn

SEQ ID NO: 1925 - DNA, 465 bp, Homo sapiens
  misc_feature 2, 3, 5, 6, 149, 254, 283, 296, 309, 321, 385, 412, 421, 446: n = A,T,C or G
gnntnngtacgccgaatacactactatagggcgaattggagctccccgcggtggcggccgaggtacaccgcacaccacagggtggctgcactttttgggtggtggggtggggatgggggcaggtatgatcaatcatccaaaccagggcntttttaagagtaaaaggaggctctactgataacatgctgcaacaacagatgtgactaggaacggccgctctagaactagtggatcccccgggctgcaggaattcnatatcaagcttatcgataccgtctacctngagggggggcccngtacccaattttngttcccttctantgagggttaattgcgcgcttggcgtaaatcataggtcatagcctgtattccttgagtgaaattnttatcccgttcaccaattttccacacnaacaatacntagcccggggtagccataaaagtgntaaaagccctggggggttg

SEQ ID NO: 1926 - DNA, 458 bp, Homo sapiens
  misc_feature 2, 3, 4, 5, 6, 13, 29, 447: n = A,T,C or G
gnnnnngccttcncgcatattctacttanggcgaattgtagctccccgcggtggcggccgaggtaccaactgaaaaataagacaaccaatcccatcatggtgccaaccactctagttgtcttgggcaagtcacttatttatccatcttggctttcttgctcaaaaatgatggatagctacacctcacagtgaggattcagtcatgtaagcaaagtgccttgaagacaggaagccagacattataggggcataatttttgccctgaaatgcatttggtatgggttgggcatcagatgtttctgatttgtgaattagtctgagaatgttagacatgcaatggtttaaggattgctaggagcaaaacagaaccatgttgtgtgtttatgggtaatcagccagtttggcaaaccacccagtgggctggaaacttgttaccctgcccggggncgggccgcttc

SEQ ID NO: 1927 - DNA, 448 bp, Homo sapiens
  misc_feature 2, 3, 4, 7, 21, 362, 436: n = A,T,C or G
gnnnagngccgcgaatcactnctatagggcgaattggagctccccgcggtggcggccgcccgggcaggtacttgtgtgggtgtcttaccttgcattagaatatcctaggcctttctaattcttcctcttgaattccctgtgtcactcatctgaggtcatctcttggatttaaatacatttggtctgaaattctcaaactgctgaataaaatgccatagtaagtccaactatatggtttcatgtagggtaaagtaaccattgtggaaggattacgataaaactgtgtgacaataaatagaataaaagatggcaaaacaatctgtaaattacaaagtgttataaaaatgcattgaatttctagnggttcttacactttcatatttctcattggcacatcaatcagaccttgcccttccttaaagtgggggagggaagnaaaaagggctgg

SEQ ID NO: 1928 - DNA, 444 bp, Homo sapiens
  misc_feature 2, 14: n = A,T,C or G
angcccgatcactncttagggcgaattggagctccccgcggtggcggccgaggacgcgggggagtgtaaaatatttatgtggcttttctcctcgcatttgctagcatgaatgcaggggcatgaaagtctgaatagggctttcaaccatcacctggggcttagaaaatgaaaatcagagtttaggataccgtcaaaaagggccacattgtagagtggatagcaatccattcaaaagctcagcactaacaaatattaaacttcagatttaaatcaattcaattattgattcaaaaaagttaatgcgaccttatcataactcctggccaaaagaaaatatcacttcttttgggaagaatatagcatcatttagatcctcaaatgaatggctacacatgggtcagaccgaaagtgttttaaccaggccaattcaaaaataattcaagt

SEQ ID NO: 1929 - DNA, 545 bp, Homo sapiens
  misc_feature 2, 6, 30, 76, 109, 198, 226, 227, 229, 235, 288, 333, 394,422, 424, 425, 438, 443, 445, 455, 457, 468, 471, 473, 477,478, 482, 483, 485, 491, 501, 532, 534, 538, 539, 542: n = A,T,C or G
gngggnaactctactatagggcgaattggntctccccgcggtggcggccgcccgggcaggtactcacagctgcatnacactgaatatcatctccctgcactgccatttnatttgagcagggctttgcctgtcaagaacattcatatcttttgataaacagtgcattttttccctgatagtctgtatgggacaagcctncttgtttgcatccgaaggacagggactnnangacctnctgctgtggtcaccaaggaatcacattcaaacttctcagcaaggtgttatggnccttctcagtttgcctacgatccattgaggcaaaggttttccttntctcaatacaccctttgctttagccaggggggacctcccactgtcctatctatgtgttcanttgttcctgactgaaagtaccttggggngnntctaaaaatagtnggatncnccgggctgcngngaattcgattntcnancctnnattnnantccgtntaacttgaanggggggcccggtaccccaaactttttttttncnttanntgnggg

SEQ ID NO: 1930 - DNA, 537 bp, Homo sapiens
  misc_feature 8, 34, 96, 420, 425, 447, 449, 456, 462, 467, 496, 506, 508,514, 519, 525, 526, 529, 536, 537: n = A,T,C or G
gtccgcgnatcttctactatagggcgaattggtnctccccgcggtggcggccgggggccattgagactgccatggaagacttgaaaggtcacgtanctgagacttctggagagaccattcaaggcttctggctcttgacaaagatagaccactggaacaatgagaaggagagaattctactggtcacagacaagactctcttgatctgcaaatacgacttcatcatgctgagttgtgtgcagctgcagcggattcctctgagcgctgtctatcgcatctgcctgggcaagttcaccttccctgggatgtccctggacaagagacaaggagaaggccttaggatctactgggggagtccggaggaagcaagtctcttctgtcccgctggaacccatggtccactgaagtttccttatgctnctttnactgagcatccttatgaaaatncnccattgnagaaanttccntttaaaattttgcaaaggtttgtcttggngtttcaatgntnttaaanctttntttccnngcntatcccnn

SEQ ID NO: 1931 - DNA, 542 bp, Homo sapiens
  misc_feature 3, 7, 397, 426, 491, 496, 515, 521, 523, 536, 539, 542: n = A,T,C or G
ggngcgnacgttacgactactatagggcgaattggagctccccgcggtggcggccgaggtacaatttgcatgcacggacttctacatacagaatacttaaacagttcattgtattgaaacacgcttaaaaatggccctagcacttgctgcaatcctgctgtgtaggagttagccaggttgtgtctgctccctctagactattctatacatcaagaactaaaaaagaagagcaatcccagcatgtggctggatgcacatcaaagccaagtctgccatgaattattttccttcctgttcctttcattcaggtcatgaagcacacatactgctacaggaaagggcaaaaggcaatgtcaagtgctgtgtaattgttgggttctttagtggcaaaggccancaatgttgcagccaaaagggcatttaaanagtacctgcccgggcggccgctctagaactagttggaatcccccggggctgcaaggaattcgatntcaanccttattcgatacccgttnacctcnanggggggggccccnganccn

SEQ ID NO: 1932 - DNA, 518 bp, Homo sapiens
  misc_feature 81, 181, 235, 259, 289, 301, 404, 431, 454, 466, 477, 480,491, 494, 495, 513: n = A,T,C or G
gcgccgctatcactactatagggcgaattggagctccaccgcggtggcggccgcccgggcaggtacgcgggggacctgacnctgggaggagatgctgccacctaggttacttgtaggaccctatacggcaacctcctttgccaggaactatttataaacatcctgcaggaaaatgtcaganatgggaagaaacaagaactttgacatgcttggtgttcttgcccaagctttgaanaagtttacaaagtctatatgtcanaatacacatttcccaccttgcccaacagtngaaaaacataanaagagaaaaacattaaaaaatgacaaggaagttaatggaagtcagcaatgtgatggtgtttggaggtggagcctttcataaggtaattaatgcccttgtaaanaagaggccagagagcttgcgcaccttnttcctgccatgtgaggagccaanaagccggctgtnttgcaacctgnaanaggaccctcanttnnaagctatgccatactggnattcc

SEQ ID NO: 1933 - DNA, 510 bp, Homo sapiens
  misc_feature 6, 7, 472: n = A,T,C or G
gccgcnnatacactactatagggcgaattggagctccccgcggtggccggccgcccgggcaggtaccctatccagagggttctaccccatgtagaacctctcttttctgttcacctgattaggtgtagaagtagccagtcaaattcatcctcgctgccactgttatttctgccccacctctaagcattttcttctttctcattcaccacttttttaaacatgtgtaatacatcagtaactaatttataatattccactccaatccatcaacctcagtaaatttaatattcacatcatcagcccttcatatccatacattacttcaaattctttattctgtttgactccatggatttgcatcacctctccacagcagcaaggccaaagacccaaacactgaaagtctctgagggctccatcttgagcctcttgagaatctctaactggaaccactgccactgccatttctttnaattccccaccacgcctgatttctactgtctctttgtg

SEQ ID NO: 1934 - DNA, 575 bp, Homo sapiens
  misc_feature 8, 394, 420, 423, 436, 440, 471, 473, 477, 480, 501, 505,513, 515, 543, 553, 560, 566, 567: n = A,T,C or G
gtgggggnatacactactatagggcgaattggagctccccgcggtggcggccgcccgggcaggtaccaccttgagcccggcatttaacctctgtgggcctcagtctctgcacctataaaaggagggatttgggcgagatatgctgaggacactaacattctacacgtctaaacttcgaggaacttttctaaagcaagaaaacgaataagggctaaatttaattcgtcagagtggaaagagaacaaagagagaggactgggagtgggagattaaaaggctgtggaaagtggtcttgagatagatgttattggggaccaaccttctcaatgcactggtcaagcgccggacgttgtttgagaacagcacctggtgttctgggcttggtgtgtttggngtcaacccccgccgtaccctatggcncgnttctagaacttantggnatccccccggggcttgcaagggaattttgantnttcnaanggctttaatcgatttccccgnttcnaccctttntngggggggggggccccggtaaccccaaanttttttggtnccttttnagtggnnggggttaa

SEQ ID NO: 1935 - DNA, 504 bp, Homo sapiens
  misc_feature 7, 15, 318, 440: n = A,T,C or G
gcctcgnatacactnctatagggcgaattggagctccccgcggtggcggccgcccgggcaggtaccttcaggcctggggcctgtgccaatagagtattactggatataggaatagctctgacacctcaaggtcaccctagaagttgaaggatttcagggctcacatattttagactcaaacttctagaacactgttctgacccagctgagctattgaagatagttttcacggcactgctatccttgattgacctcctaggggatctgtctctcttgagaataggcctcaactctaatttccttgggcccaagaccaanagtgggcaaggggagcctagcctgcaccttgccacctggtgttggccattatcagggtgccaggagctgaagtggcacatgttagtgtctacagagtgccacgtgggtagtgctaggtcttncaggagggctcagccactgatgactttaaggcatgcaggtctccaacatggcttgcagggaaaa

SEQ ID NO: 1936 - DNA, 529 bp, Homo sapiens
  misc_feature 2, 5, 9, 13, 475, 494, 501: n = A,T,C or G
gntcnacgnatcnactactatagggcgaattggagctccaccgcggtggcggccgcccgggcaggtacttgtgtgggtgtcttaccttgcattagaatatcctaggcctttctaattcttcctcttgaattccctgtgtcactcatctgaggtcatctcttggatttaaatacatttggtctgaaattctcaaactgctgaataaaatgccatagtaagtccaactatatggtttcatgtagggtaaagtaaccattgtggaaggattacgataaaactgtgtgacaataaatagaataaaagatggcaaaacaatctgtaaattacaaagtgttataaaaatgcattgaatttctagtgttcttacactttcatatttctcattggcacatcaatcagaccttgccttcctaaaagtgggaggaagaaaaaggctgcaccttgtctgggctgaaggtctgggccagaacactancaaaactttttaataaatntttcatntcaccaccccaaactcattaggggcccc

SEQ ID NO: 1937 - DNA, 494 bp, Homo sapiens
  misc_feature 2, 6, 8, 223: n = A,T,C or G
gngcgnancactacttagggcgaattggagctccccgcggtggcggccgaggtacgcgggtcgttgttgtttatatctaagaaagaaaaaaatgaataattatctgagtttcctgagctttatgaccaatagcattgtttctcaatatattttttcaatggatgggtatatcagagcaataagctaaattatgctgtagtaaccaaccacccgcttcattttnggtgaattgacataaagattcattacttgctcacactaaacttcctcctgaggtttggttctgtgctgcattttgaattgccttcactttggaacttatcatggggcagcagttactatatggatttttattgatcactgtgtatagagaaaaagaacatcagggactcttctggcaacagttaattgctccagtctggaaatgttgcacaactcattgtctggaattaggttgcaagggcaacattcaatcacaagaagggagaccaaat

SEQ ID NO: 1938 - DNA, 484 bp, Homo sapiens
  misc_feature 2, 6, 259: n = A,T,C or G
gngccnacgccgtaatacgactactatagggcgaattggagctccccgcggtggcggccgcccgggcaggtacagtgacatgatcatagctcactgcagccttgaactccctgggctcaggtgatcctctcacctcagcctcctgagtagctaggactacaggcatgcaccacgacgcctggctattttttcttcttcttcttctttttttttttttttggtggagagggggctttgccattgttgcccaggctggtangatctgtcctttttaacaaggaattagaaagggctgcttcgtatatcttcatgacacctaacaagctgttttctctctttgttccttcagaaatgcatgcagtttaatttttctttacctatacaggataactcttatcataacaaacaaacagtaaggaaaacataaatacgaaagcaaacattaccataaattcacccccaggatcacaacttggaccatttt

SEQ ID NO: 1939 - DNA, 466 bp, Homo sapiens
cgaatacactactatagggcgaattggagctccaccgcggtggctttcctccccgtgattacggcctgctggcttctccaggactgggttaaggcacagctaaagctgttctcttggccctgcagagccaaaccctggacctttccaggaaatggataaataccatttcacttcattcattcactgctgcctgtggtgcctgaatacataccctgtggcatcatctgtgagttatccacacttcccacagcagatgcatagggaggaggtacctgcccgggcggccgctctagaactagtggatcccccgggctgcaggaattcgatatcaagcttatcgataccgtcgacctcgagggggggcccggtacccagcttttgttccctttagtgagggttaattgcgcgcttggcgtatcatggtcatagctgtttcctgtgtgaaattgttatccgctcacaatta

SEQ ID NO: 1940 - DNA, 474 bp, Homo sapiens
  misc_feature 12, 20: n = A,T,C or G
ggtccgcgccgnatcgactncttagggcgaattggagctccccgcggtggcggccgcccgggcaggtacaagatgcacacagatgggaggagctgccttgagcgagaggacactgtcctggaggtgacagagagcaacaccacatcagtggtggatggggataaacgggtgaaacggcggctgctcatggaaacgtgtgctgtcaacaatggaggctgtgaccgcacctgtaaggatacttcgacaggtgtccactgcagttgtcctgttggattcactctccagttggatgggaagacatgtaaagatattgatgagtgccagacccgcaatggaggttgtgatcatttctgcaaaaacatcgtgggcagttttgactgcggctgcaagaaaggatttaaattattaacagatgaagaagtcttgccaagatgtggatgagtgctctttggataggacctgtgaccacagctg

SEQ ID NO: 1941 - DNA, 476 bp, Homo sapiens
  misc_feature 2: n = A,T,C or G
gngccgctatcactacttagggcgaattggagctccccgcggtggcggccgcccgggcaggtacctgccctagcaaactctcctaagtggagaatgaggcctgggtctcttgacaattaaagctttgctctgttcttggactaaatccagacataaccacgtcaggctcctcatctgctgggaagcagattgcactggatttcacagtcacggaaaacttttgactgtgtgtacctcggccgctctagaactagtggatcccccgggctgcaggaattcgatatcaagcttatcgataccgtcgacctcgagggggggcccggtacccagcttttgttccctttagtgagggttaattgcgcgcttggcgtaatcatggtcatagctgtttcctgtgtgaaattgttatccgctcacaattccacacaacatacgagccgggagcataaagtgtaaagcctggggtgcctaatgag

SEQ ID NO: 1942 - DNA, 482 bp, Homo sapiens
  misc_feature 4, 7, 8: n = A,T,C or G
gggnccnncgccgtaatcgactactatagggcgaattggagctccccgcggtggcagccagaggcagtcctggatgaattcaggctgcaaagtgccctgtgacctggcccttgggaagccacgctctgatgaggtttgcagatctccccgcaatccagggccaagcatgaatgaaggtgttaggcatttcaaggatgcgactaggacgtgctgctgtctcaggttcacattatactgaaataaggtcctggccagacagcaccatatagttaattgaggtgtttgggagatactcaaatgggtgttaatatttcccaggcaatattttcaaggctcagagcctctattcaaaagataactgaaaggctagcaaagggtattgcaaaggtatattctgatttctgacaggaagatcgatggatggacagtgagagtataaagaccttagggtttggggttctgatttggccttggtctgttga

SEQ ID NO: 1943 - DNA, 498 bp, Homo sapiens
  misc_feature 2, 5, 267, 348: n = A,T,C or G
gncgnaacactactatagggcgaattggagctcccgcgcggtggcggccgaggtactcacagctgcatcacactgaatatcatctccctgcactgccatttcatttgagcagggctttgcctgtcaagaacattcatatcttttgataaacagtgcattttttccctgatagtctgtatgggacagcctccttgtttgcatctgaaggacagggacttcagggacctcctgctgtggtcaccaaggaatcacattcaaacttctcancaaggtgttatggtccttctcagtttgcctacgatccattgaggcaaaggtttccttctctcaatacaccctctgctttanccagggggacctcccactgtcctctctatgtgttctatttgttcctgactgttagtacctgcccgggcggccgctctagaactagtgggatcccccgggctgcaaggaaatttcgatatcaagcttatcgatacccgtcgaccttcgagg

SEQ ID NO: 1944 - DNA, 496 bp, Homo sapiens
  misc_feature 2, 3, 7, 9: n = A,T,C or G
gnnacgnancactacttagggcgaattggagctccccgcggtggcggccgcccgggcaggtactgcctgtgcgtagctgcattaaaccaaatgatcaagaatatcaagatacatcttcctggatcttcaatcccacttaaagatttggagaacatatcattttatattaaaaccaataacattttcagaatacatttgaataatttctttttacctaaaaaccagaagtcttttaaataagtatcatttttgagatgcattgccataggatacatactgaggtatcttctctttctcttacctattagaggcatttctgggcaagtttgaggagcatggaattaacagtcatcaatgcattgctggatttgaaaatgatttatatcaatcagcagaggacctccactggtggatgtcagcagggatctgagggatgtttcaggtagaccatgcctatgctttggaacctccccccgcgttacccttcggccgctct

SEQ ID NO: 1945 - DNA, 495 bp, Homo sapiens
  misc_feature 2, 3, 4, 5: n = A,T,C or G
gnnnnattcgaccgcgttacgactactatagggcgaattggagctccccgcggtggcggccgccgggcaggtacccaacaatttgagtaacgtcacttgtcagaaggagacatttttgagtcatgccatagatttgagccctgctccatcatttacttgctgtgggactttggacctgcatccaccctctcagaacttgtgtcttcattgtgtatcacctattttacagattgttgtgagattaaacaaggtaagatacaaaagggtcctaatacactgactgttaaaactgagcagtgacttagaataatctcttgagcagtccagggcacatattgacctcttaagtctcctttagagttataatattagcataataacactgagctttaagaaaagtctttaagccagtgattcctgtgtatataccctccagagggattccaaatccccaggaactgaatgaaagtcatggttgaatgcactcgtatgcat

SEQ ID NO: 1946 - DNA, 484 bp, Homo sapiens
  misc_feature 64, 370, 393, 423, 432, 456: n = A,T,C or G
gggcggcccgtatcgactactatagggcgaattggagctccaccgcggtggcggccgaggtacncggggggagccgggctccctgagactcaagaaaatgcacccgacctgcgttcctcctgcctggggtgacccataaggaacaccccccccttctcaacaaccacagaagataaatgccaaggggaccaccaacatgggcatggggctgtgatgccaatcttaagggaaaacacaagtaaaatcggctccaggactgacctgggggcagctgctctttctgtccatgactttgaggcgggatctcgagcgtctgtctgacgggccttctgtctgctgtcctctcgcaggtttcagacattgaatccangattgcagccctgagggccgcanggctcacggtgaatccctcgggaaagcccnggaggaagncaaacctcccgatatttctccctngagtggctgggaaacttggcaagagacc

SEQ ID NO: 1947 - DNA, 500 bp, Homo sapiens
  misc_feature 7, 10, 20, 209, 211, 256, 264, 275, 303, 310, 315, 316, 321,343, 345, 355, 363, 370, 373, 376, 380, 381, 382, 383, 385,390, 402, 404, 407, 410, 415, 417, 424, 428, 430, 438, 441,448, 456, 461, 462, 468, 471, 482, 487: n = A,T,C or G
gtgcccntcngtatcgactnctatagggcgaattggagctccccgcggtggcggccgcccgggcaggtatatcatgtaactattatgagatgttctgctgtgatcacgtggcctgcctgtcatcaggaaagggagaaaatggaggggaggactcttacattccagtcaattcacgtagcctcttgatgccaaaaattagaaaggggaancntatcatatgtgtacctcggccgctctagaactagtggatcccccnggctgcangaatttcaatntcaagcttatctataccgtccacctccnggggggnccccnnacccnttttttgttccctttactgacngnttacttgccncccttggngtaatcntgntcntagnnnntntctgngtgaaattgttntntcnttnacaantncacacancatntnagccgggngcntacattntaaatggntgggnngactanctnagtgtgctaantatcnttaattgcccccc

SEQ ID NO: 1948 - DNA, 481 bp, Homo sapiens
  misc_feature 2, 3, 4, 5, 6, 8, 24, 304, 327, 366, 380, 458: n = A,T,C or G
gnnnnngntcgccgtatacgactnctatagggcgaattggagctccccgcggtggcggccgaggtacttttttttttttttttttttttttttgggatggagtcttgctgtcacccaggctggagtgcagtggcatgatctcggctcactgcaggcttcgccccctggggttcacgtgtgtttctaatttttaaggccctactttaatttctactgtcactaaataaaaaagaacaaaagctttttcttttaaaaaccctagacatcatgttcctgcttctgctggaaaaagagacaggatatnaccatctcaaaccagcacctttnagcaactgaagcctttttgtcctcaccctgagtgttaanacaatggctccctnacacatcacaggccctggaagtgctacaacagctgaatggggttttcatgggacataaaatcactttcccactacctnccacctacaaacctactttttca

SEQ ID NO: 1949 - DNA, 471 bp, Homo sapiens
  misc_feature 2, 3, 4, 6, 10, 11, 77, 413, 449: n = A,T,C or G
gnnngngccnnatcactactatagggcgaattggagctccccgcggtggcggccgcccgggcaggtacaagtttcangccactggtggtttgccaaactggctgattacccataaacacacaacatggttctgttttgctcctagcaatccttaaaccattgcatgtctaacattctcagactaattcacaaatcagaaacatctgatgcccaacccataccaaatgcatttcagggcaaaaattatgctcctataatgtctggcttcctgtcttcaaggcactttgcttacatgactgaatccttactgtgaggtgtagctatccatcatttttgagcaagaaagccaagatggataaataagtgacttgcccaagacaactagagtggttggcaccatgatgggattggtngtcttatttttcagttgggtacctcggccgctctanaactagtgggatcccccgggct

SEQ ID NO: 1950 - DNA, 459 bp, Homo sapiens
  misc_feature 265: n = A,T,C or G
tatcactacttagggcgaattggagctccccgcggtggcggccgcccgggcaggtactgtttctccagctacagtctgtcacagcttcccttggctaggaaagggaaatcccttgaccccttgcactttgtgggtgaggtgacaccctgccccagttcggctcaccctccgtgggctgcacccactgtccaaccagtcccagttgagatgaaccaggtgcctcagttggaaatgcagaaatcacctgccttctgcttcgatctcnctgggagctacagaccagagctgttcctattcagccatcttggaagcaaccaaaagactgatttttaaatggaaaaaaaatgttttcctgacagagtataaaaatataaaagagtatctaacccactgcaaagagaggtcttatgaaattcaaggggtgaaccctggctttctgtgaaaagaaaggccgtcttg

SEQ ID NO: 1951 - DNA, 459 bp, Homo sapiens
  misc_feature 416: n = A,T,C or G
actacttagggcgaattggagctccccgcggtggcggccgcccgggcaggtacctatagcacaagctgatgatatgctggcaactgaacatttggcttcaatgtcagagtaatagagtgtggcaaactgcagagctcatgctccgcctaaaaggggcagctgctgctcagctcctgccaattaccaccatgcaggaatttggcctagtgtgctcagctcctcctgtttttaccagaagctaggaatctgggtttttatgtgaaatggcctaatttttaaatgttagcatccactctgaaaaaaaagcaaaacaccgtgtgggccaaataaaacatttgctggccaaatgcagcctgatttgctctgttttcaacccctggcacagaattttgttcatttctctcttgtggtacctnggccgctctagaactaagtggatcccccgggctgcaggaattc

SEQ ID NO: 1952 - DNA, 444 bp, Homo sapiens
  misc_feature 416: n = A,T,C or G
ggcgaattggagctccccgcggtggcggccgaggtacaagtttcagccactggtggtttgccaaactggctgattacccataaacacacaacatggttctgttttgctcctagcaatccttaaaccattgcatgtctaacattctcagactaattcacaaatcagaaacatctgatgcccaacccataccaaattgcatttcagggcaaaaattatgctcctataatgtctggcttcctgtcttcaaggcactttgcttacatgactgaatcctcactgtgaggtgtagctatccatcatttttgagcaagaaagccaagatggataaataagtgactttcccaagacaactagagtggtttggcaccatgatgggattggttgtcttattttttcagttggtcctgcccggggcngccgctctagaactagttggatcccccg

SEQ ID NO: 1953 - DNA, 453 bp, Homo sapiens
  misc_feature 328: n = A,T,C or G
ctactatagggcgaattggagctccccgcggtggcggccgaggtacccagcagaattctcacatgtgcttattttgaaattaaaccaatgcaaaagtttttaccctgaggtgttgctaattcatgaacctattctcttgacagtttttccctccaatataacctatatcttattaaatgtcttttcttcttctagattgtttccaatagtagctcaattttagctttgttcaggctccaaattagaaaaacgctgagattagccaaatatttgaacactgtaaggtattaatcagtttaatctgaaaaaaaaggtataagaacacttnctacagttccagaagagtgagctgtcctggctgagggttatttcataagcacctacatgtatggacactaatggtgagtcatcaccagaggaagatgaaaaatctggactctgtatttgtgttga

SEQ ID NO: 1954 - DNA, 450 bp, Homo sapiens
  misc_feature 3, 4, 5, 6, 9, 10, 11, 15, 16, 17, 19, 23, 24, 27, 28, 29,32, 33, 43, 58, 444: n = A,T,C or G
ttnnnntannntttnnntntttnnttnnnttnnggcgcgcgtnatacgactcactgtnagggcgaattggagctccaccgcggtggcggccgcccgggcaggtacctatagcacaagctgatgatagctggcaactgaacatttggcttcaatgtcagagtaatagagtgtggcaaactgcagagctcatgctccgcctaaaaggggcagctgctgctcagctcctgccaattaccaccatgcaggaatttggcctagtgtgctcagctcctcctgtttttaccagaagctaggaatctgggtttttatgtgaaatggcctaatttttaaatgttagcatccactctgaaaaaaaagcaaaacaccgtgtgggccaaataaaacatttgctggccaaatgcagcctgatttgctctgttttcaacccctggcacagaattttgntcattt

SEQ ID NO: 1955 - DNA, 485 bp, Homo sapiens
  misc_feature 61, 397, 458, 460, 467, 484: n = A,T,C or G
ctactatagggcgaattggagctccccgcggtggcggccgaggtaccaactgaaaaataangacaaccaatcccatcatggtgccaaccactctagttgtcttgggcaagtcacttatttatccatcttggccttcttgctcaaaaatgatggatagctacacctcacagtgaggattcagtcatgtaagcaaaagtgccttgaagacaggaagccaggcattataggagcataatttttgtcctgaaatgcatttggtatgggttgggcatcagatgtttctgatttgtgaattagtctgagaatgttagacatgcaatggtttaaggattgctaggagcaaaacagaaccatgttgtgtgtttatgggtaatcagccagtttggcaaaccaccantggctgaaacttgtacctgcccgggcggccgctctagaactagtgggatcccccgggctgnangaattcntattaagcttatcgatnc

SEQ ID NO: 1956 - DNA, 513 bp, Homo sapiens
  misc_feature 2, 3, 4, 6, 9, 26, 48, 130, 216, 345, 359, 431, 467: n = A,T,C or G
gnnngngcncacgccgtatacgactnctatagggcgaattggagctcnccgcggtggcggcgctcgacaccctgtcgatgggcatgtcggccgacttgcgcgccgccgtgctggaaggcgccaccattgngcgcgtgggcagtgccatcttcggttcccgtaattactctcactgattgaatgaaagaatcaccatgacgacagaattgaacatcntcttcgtggggcggaggcaatatggccgccgccctgatcgccggcctggcaggcaaattgaccctgggcggcaatatccacgtgatcgacccccatgcgccggcgctggaaaaattgcaggcgcagttnggcgtcacgacggngactgccgccggtgaagcgctgcggggcgtgggacgtgatcgtgctggccgtgaaaccgcaaagcatgcgcnaagtggcggcgcaattgctgcccttcctcgatgganaacgggcgccattgatcctgttcgatcgcggccggcattcccacgc

SEQ ID NO: 1957 - DNA, 479 bp, Homo sapiens
tatcactactatagggcgaattggagctccccgcggtggcggccgcccgggcaggtacgcgggtaagcgaaaagctctttgcccagaccatgactcagatagttcaggtaaagatcctagaaacagccaggggaaaggagctcaccgaccagaacatgccagtggtagaaggaatgtcaaggacagtgttagtgctagtgaaagtgacctcaactgtgtacctcggccgctctagaactagtggatcccccgggctgcaggaattcgatatcaagcttatcgataccgtcgacctcgagggggggcccggtacccagcttttgttccctttagtgagggttaattgcgcgcttggcgtaatcatggtcatagctgtttcctgtgtgaaattgttatccgctcacaattccacacaacatacgagccgggagcataaagtgtaaagcctggggtgcctaatgagtgagctaactcacatt

SEQ ID NO: 1958 - DNA, 466 bp, Homo sapiens
  misc_feature 1, 2, 3, 6, 13, 328, 444: n = A,T,C or G
nnnagngcccgancactacttagggcgaattggagctccccgcggtggcggccgggggccattgagactgccatggaagacttgaaaggtcacgtagctgagacttctggagagaccattcaaggcttctggctcttgacaaagatagaccactggaacaatgagaaggagagaattctactggtcacagacaagactctcttgatctgcaaaatacgacttccatcattgctgagttgtgtgcagctgcaagccggattcctctgagcgctgtctatcgcatctgcctgggcaagtttcaccttccctgggatgtccctggacaagnagacaagggagaaggccttagggatctactgggggagtccggaggagcaagtcctcttctgtcccgctggaacccatggtccactgaagttcccttatgctacttttcactgaagnatcctatgaaatacaccaagtg

SEQ ID NO: 1959 - DNA, 456 bp, Homo sapiens
  misc_feature 235: n = A,T,C or G
tagggcgaattggagctccaccgcggtggcggccgcccgggcaggtacaaccaccccccgggtatccataacctaacaataacaattgttaagcattcggccactcatgtttcttcagctcccctacctcctccctatcctcccaggttcccactgaattatatatcatttcattcataaataattctgtatatttagttacagctcaatgaatttccacaaagtgaacatgctnatgcaaaccacacctgcactgggaaatagaaattacaaacacccggagccccctctgcaatactctctcagtcctttcctcactccttcccaaaagagtcccgcgtacctcggccgctctagaactagtggatcccccgggctgcaggaattcgatatcaagcttatcgataccgtcgacctcgagggggggcccggtacccagcttttgttccctttaga

SEQ ID NO: 1960 - DNA, 465 bp, Homo sapiens
  misc_feature 137, 306, 315, 324, 329, 336, 371, 382, 424, 426, 428, 443,444: n = A,T,C or G
aattggagctccccgcggtggcggccgaggtacgcggggaggttcgacaggttgggtgtctgctctcagcctgggctcccgcaagcgggggaagcagctccagctggggggaagcgaaaaagggacaggaccttcanagacagcccactgagggctgagtgtgcattgctgggcttctggaatctgtggtgagggccggtcccccaactaattgagcaagaaatagcccctcagaaacccacttgaggccaggccgcggtggctcacgcctgtaatcccagcaccttggggaggctgaggtgggcngatcacctnaggtcgggngtttnagaccanccttgaccaacatgggaagaaaccccgtttcttgntaaaaaaaatncaaaattagctgggccgtggtggcacatggcttttaaacccncntncttgggaaggctttnnacaggagaattctctttgaaa

SEQ ID NO: 1961 - DNA, 467 bp, Homo sapiens
gccctatcactacttagggcgaattggagctccccgcggtggcggccgaggtacatggtttccattgcagcgaatagactaatattccttctgctggcaacctagacaagttccctaagcttatgggtaaaaatggagtcaaagagaagtgccagtatccaatcttcaaatatttcgctgaggatcacatggaatttaaaaagaaacgctccgaacaggaaaaacaattggccaagccttgggaaggaagacaagagggaggcatccagagactctgggctgcactgatgtagggcctttcgaggttgaacaaggtgaagggggaccctcacatgggaacagcgtgatggaggcagtctggcttatgagctggggagtgaattgtgtaaacatttattgaagtcagtttggaagttggcaagccacaaaaagccactatctgaagagcttgttgaaatttagccctt

SEQ ID NO: 1962 - DNA, 548 bp, Homo sapiens
  misc_feature 2, 3, 4, 11, 39, 88, 138, 210, 212, 220, 235, 261, 266, 278,284, 312, 380, 390, 395, 400, 404, 424, 427, 436, 469, 480,493, 495, 513, 514, 516, 517, 522, 531, 532, 537, 542, 545,547: n = A,T,C or G
gnnnaggcccnaacactacttagggcgaattggagctcnccgcggtggcggccgaggtactaggtggttcgcctgtcactgacaccgncatctcagaatgccaaacttttggaggaaggtttgagtcttccaggctgncttcttccattcttctgtagcttcgttaccctccgtggtatatttataatctcacaaaagtgcagtttacantnaattaatncttttagggcaagcngggaaacatcctccactcaagggttncgccntttccacctacnggcgtncccccgcggtaccttgccccggggcggncccgcttcttagaaactaagttggaatcccccgggcctgcaaggaaatttcggatatcaaaagctttnttccaatacnccgtnccaancttntaaaggggggggggcccccnggnaacccccancctttttttggtttccccttttaaagtggaaanggggtttaaanttggctccccccntntgggccgttaaaatttcnntnnggggncaaataagnncttgnttttnccntng

SEQ ID NO: 1963 - DNA, 408 bp, Homo sapiens
  misc_feature 5, 7: n = A,T,C or G
gagcncnccgtaatacgactcactatagggcgaattggagctccaccgcggtggcggccgaggtacaagtttcagccactggtggtttgccaaactggctgattacccataaacacacaacatggttctgttttgctcctagcaatccttaaaccattgcatgtctaacattctcagactaattcacaaatcagaaacatctgatgcccaacccataccaaatgcatttcagggcaaaaattatgctcctataatgtctggcttcctgtcttcaaggcactttgcttacatgactgaatcctcactgtgaggtgtagctatccatcatttttgagcaagaaagccaagatggataaataagtgacttgcccaagacaactagagtggttggcaccatgacgggattgg

SEQ ID NO: 1964 - DNA, 415 bp, Homo sapiens
  misc_feature 9, 17, 61: n = A,T,C or G
gagcgctcngtaatacngactcactatagggcgaattggagctccaccgcggtggcgcggncgcccgggcaggtaccttctcagccagcagttagccattgtggaggtgccaggggagttaatgcccttaggagcaactcttggtccttggaggcaggagtcagcacccactgaacgtcagcatacatttcccaccttccagcccttccaagggatgatcctcagaagtgtgttctgctgggttcctccaaagctctcagtgagacccagctccagttgcccatagtggcaacccagctcaaccatgccctcctaacaccttttctttcttccctgacctttctgcctgcactcaagtcttttctcagtttgcaaaaccaggatacacaatatttagtatctcccaaacgtaaaa

SEQ ID NO: 1965 - DNA, 474 bp, Homo sapiens
  misc_feature 79, 176, 227, 362, 387, 405, 439, 441, 464: n = A,T,C or G
ctatagggcgaattggagctccaccgcggtggcgcggccgcccgggcaggtaccttctcagccagcagttagccattgnggaggtgccaggggagttaatgcccttaggagcaactcttggtccttggaggcaggagtcagcacccactgaacgtcagcatacatttcccaccttncagcccttccaagggatgatcctcagaagtgtgttctgctgggttcctccnaagctctcagtgagacccagctccagttgcccatagtggcaacccagctcaaccatgccctcctaacaccttttctttcttccctgacctttctgcctgcactcaagtcttttctcagtttgcaaaaccaggatncacaatatttagtatctcccaaacntaaaataagtggagtgcnacaattcaaaagaaaattcaggatgcatagtagngntttagagaacaacatggggctgncatgatataa

SEQ ID NO: 1966 - DNA, 495 bp, Homo sapiens
  misc_feature 2, 3, 4, 5, 11, 13, 495: n = A,T,C or G
gnnnntgcgcngntatcactactatagggcgaattggagctccccgcggtggcggccgcccgggcaggtacacacactctctccccatatctcatggctctgtgcataaatggagtgggcacaggggtggggcatgtgccctgatggctctttgcaagactgtcactgttctgtcttgggaggtataaggtgaacaggaccttagaaatgctgggagcaagctctagtaacaaaggctctttgtggtcaggacaacagagggtctattgccatcttctcagaacgcaggagctcccgccaacaggtggggaagaaagaggagctgatgtcagcggtgctaagctgtcatcccagggcaaatgtgaggctgaacatggtgaagtctacagcgaaccacccgggctagctgccctatggtacctcggccgctctagaactagtggatcccccgggctgcaggaattcgatatcaagcttatcgatccgtcgacctcn

SEQ ID NO: 1967 - DNA, 408 bp, Homo sapiens
  misc_feature 91, 291: n = A,T,C or G
gagcgcgcgtaatactgactcactatagggcgaattggagctccaccgcggtggcggccgaggtacttttttttttttttttttttttttnggagagagagagatgttttatttttgccaaagcatgtgagagtaagtagcaaacatcatgacacttcacccctcaaatattttcccacgtatcacttaagaacaagggcattcattctgttacatgaccacaatacaatcagcacagatagatattaacattgagacaatgctctgatgtattggtatctactatgcagntcataatcaaataagggttttggtaacttgggatccataaatggtctgcaaggtcagcccctgtagacctgcacttagtgggtgccatttccctgtctcaggtgcctgctctactgg

SEQ ID NO: 1968 - DNA, 781 bp, Homo sapiens
  misc_feature 3, 4, 7, 8, 10, 11, 12, 13, 17, 19, 20, 21, 22, 23, 25, 29,30, 34, 39, 42, 44, 46, 55, 59, 65, 69, 74, 79, 80, 81,83, 91, 93, 94, 97, 100, 112, 113, 117, 126, 194, 295, 368,402, 420, 431, 445, 475, 540, 590, 602, 604, 610, 612: n = A,T,C or G
  misc_feature 622, 645, 647, 655, 673, 680, 685, 696, 701, 702, 707, 710,714, 721, 722, 723, 725, 729, 732, 734, 738, 744, 749, 750,762, 763, 777: n = A,T,C or G
atnntanntnnnntttntnnnnncnatcnnttantttgnccntnanttactattncaantttaanttgnaaatntggtnnntntttttctnannatnccnttcaattaaggnntcgntgccgcgtntacgactcactatagggcgaattggagctccaccgcggtggcggcccgaggtacgccgggtgtgcagncacagtgagcttctgaacatttcttctcagactaagctcttacacacagttgcagttgaaagaaagaattgcttgacatggccacaggagcaggcagcttnctgcagacatgacaagtcaacgcaaacttcatgttcactgtgggcagacacatgttttgcaaaggagaacttnaggagccaaacaaagccacacttcaatgtggctnttgccccaaattttactncatttagggtnaaaatcttttcccntccctccccaaggaagaaaaaggtgggaantaggagcattggaggttccttcaccattgggaaaactttggaagttcaaggggaaaaattgggangggcctccaccccaaatttatttttgtggccattggggggtttttaaagnttttttcccttngnaaaatntnaaaagctatnccaggggttttgggtcctttttngngggttttnaccccaaattttaaattngacccancggangggttttagantttannaaaangtnattncctttannntngggnccncngcanaagaantttannttattaaacctnnttatacaaaaaagnttct

SEQ ID NO: 1969 - DNA, 758 bp, Homo sapiens
  misc_feature 2, 6, 10, 12, 17, 21, 25, 29, 30, 31, 33, 35, 41, 42, 45,48, 49, 53, 57, 58, 61, 69, 82, 89, 106, 108, 110, 116,117, 125, 135, 266, 320, 335, 352, 382, 394, 401, 406, 448,461, 467, 478, 487, 490, 494, 495, 534, 542, 559, 576, 585: n = A,T,C or G
  misc_feature 599, 632, 634, 638, 639, 648, 666, 681, 683, 690, 696, 701,704, 714: n = A,T,C or G
cntaantttncnatatntttntatntttnnntnantttttnnaantannttgnattnntanatcaaacntcattaattagantgatggnggggggggggggggggngngngtaganngagatatnaccctatacnatcatatagggcgaattggagctccaccgcggtggcgagcggccgcccgggcaggtacagtggcaaagtttctacgggcaactcgtccatgtttgcccagctgaaaacataactgcttctccctcagcctnaccacccttccccttggggaagaccaacaccccaatattgcctctagaagactnagccggccaaaatanctacttttccacctccntcccagcaacccttagctcccgctaaaagnctacaacccacncgaagtngggcnagatcaccttgaggtacctcggccgctctattaactaggtgngattcccccgggncctgcnagggaatttcnattatcaangcnttanncggatacccggtgcgaaccttccgtagggggggggggcncccgggtnacccccagacctttttntggtgtcccctttttanattggaagngggttttaaatttngccgtccgccttttgggccggttaaaattccantngggnncaattaagncttgttatttccccttgntggttggaaaaattngnttttatntcccgncttcnacnaaaatttccnacaaccaataccaattaaccggaagccccgggggaagcctattt

SEQ ID NO: 1970 - DNA, 833 bp, Homo sapiens
  misc_feature 1, 2, 4, 13, 20, 24, 28, 30, 35, 41, 43, 44, 45, 52, 53,55, 56, 69, 72, 74, 84, 90, 103, 105, 110, 111, 125, 288,292, 303, 320, 348, 368, 374, 391, 397, 437, 444, 448, 460,466, 474, 476, 482, 483, 485, 487, 502, 503, 521, 530, 535: n = A,T,C or G
  misc_feature 543, 546, 547, 553, 555, 563, 607, 611, 619, 621, 629, 637,644, 645, 651, 658, 665, 698, 703, 705, 720, 721, 731, 733,740, 742, 743, 746, 750, 765, 769, 771, 772, 774, 780, 786,787, 813, 821, 822, 824, 830, 833: n = A,T,C or G
nntnttaaatttntaatttntttntcananacttntttttntnnnttatttnncnnttttattcatcantancntttcgacatntatttnccttttcacaaangngattnnggccgatacgatcntatagggcgaattggagctccaccgcggtggcggccgaggtacccatgaacatagtttttactctttttaaaagctgtaggcactggaaggtcatgtgttcagccatgacagtggaaggtcagtgttcagccatgacaaggcccaatgtcatgggccctctgncatnatcctttgtcncgtagtgaatcccccanaacactttttgcatggctttgttttaanaacagaaaatttttttcctngcaggnttcttttttgggggagntaagcntcctttggaaaaaggtttttaaacccccccttggacaagnttttganttgnaaaaggaaaacnaagctnggaggggncntttaanngnangggccaaggggttannggccccttttttggaagncaaaaattnaaacnttctttgnagnncaaacntnggggtttngccccaatttgggttcaatgttttccccccttaacccaaaaagnttanttgggggntntttcggantttttttnaaaaaanngggganttccccncaaaaangttttctcatttttaaggggacttagggggggngttcntntttaaataaaattgnnatttttactngnttttgtncnnaangggntcatgggtaagccanaagnanntncatttnttcttnngggggaaccctttgtttggggttttnaaaagggnnantttgcnaan

SEQ ID NO: 1971 - DNA, 743 bp, Homo sapiens
  misc_feature 3, 8, 10, 17, 30, 31, 35, 41, 42, 44, 49, 53, 55, 56, 59,61, 63, 64, 68, 72, 73, 79, 80, 86, 99, 103, 106, 107, 108,113, 115, 117, 379, 413, 430, 516, 519, 537, 540, 544, 580,608, 623, 638, 647, 650, 685, 698, 704, 718: n = A,T,C or G
ttnatctntntatgtanctttattatattnnttcntttttnncnatttnatancnnctnananntacnatcnntttttnnctaatnttctttaattttntttnttnnnggggntngngcctatacgatcctatagggcgaattggagctccaccgcggtggcggccgaggtacaaagaaacagcttcaatccttttggggaatggcagggttttgcagaatatgtgttccaaatttggggtcatagcaaaacccctttataaagcaacaagggggccaagaaaatgagtcaatggagtgggccctagaaatgaaggggaaacttttgccaagttaaaacaggctcttaacaaaagctcccactcttggcatcccaaacnttcattaaagcatttttccttgtatatagcaggnaaaaaaagggcataacntgtggggaatacctaaaccccaggaaattggggatcaagaaaccccattactcagaccccattctaccttttttcaaaaaggaaanatntgtaaaccaggaggttangcncttncacaaggtggaccccaaaggcttggcccttggcaanggccaaaattaagccaaggccccacctnggtttaatttttttnaggttgggggaaagnaaaggcccnacnttaaaaaaaattcaacccccttggggggtccaaancccaccttggaanaaggtngttttaaaccttcnccaccaattcaagggttaaaagggg

SEQ ID NO: 1972 - DNA, 779 bp, Homo sapiens
  misc_feature 4, 11, 12, 13, 14, 18, 20, 22, 25, 27, 29, 35, 37, 43, 46,50, 59, 70, 71, 72, 74, 83, 86, 87, 90, 93, 100, 103, 106,107, 110, 111, 125, 289, 294, 299, 318, 329, 331, 334, 335,351, 352, 356, 375, 392, 434, 441, 451, 456, 461, 464: n = A,T,C or G
  misc_feature 480, 501, 530, 545, 550, 561, 564, 592, 607, 608, 622, 624,628, 642, 662, 667, 674, 685, 689, 703, 706, 710, 729, 744,745, 746, 757, 777, 779: n = A,T,C or G
ttanctttttnnnnattntntnatntntnctattntnttttantcntttntattaattntattattttannntnataattttnatnnagnttnggggggntanagnncannaagtattatcctanacgactcatatagggcgaattggagctccaccgcggtggcggccgcccgggcaggtacccgggcgtgtgaggtgtcagtctgcccctacttgggggtgcctcccagttaggctactcgagggtctgggacccacttgaggaggcagtctgtccgttctcagatntccanctgcnttgctgggatgctgcgaanaaccaactacntnttnnccccccgcgtaccttnnggcncgcttcttaggaactaagntgggatctccctcggancttgtcagggaatttctattattcaagccttattcggatacncgatcanacctcgaggnggggngcctnggntacccagacattttgnttccccttttaagttgaaggngttaattggcgccgccttggccgtaaaancattgggtcaataancttgnttttccttgtngtngaaaaatttggttaattcccgcttccancaaaattttctccannaccaaaaccatttncngtangccccgggggaagnccatttaaaaaagttgttanaaaanccccttnggggggtttgncccnttaaaattgtaagnttngaangccctttaaaccttccacnaatttaaatttttgnnngtttatggtgngctttcaacttgtgctccgntn

SEQ ID NO: 1973 - DNA, 526 bp, Homo sapiens
  misc_feature 3, 418, 424, 450, 458, 479, 494, 500, 514, 526: n = A,T,C or G
gcnccgtatacgactactatagggcgaattggagctccaccgcggtggcggccgcccgggcaggtacttgtgtgggtgtcttaccttgcattagaatatcctaggcctttctaattcttcctcttgaattccctgtgtcactcatctgaggtcatctcttggatttaaatacatttggtctgaaattctcaaactgctgaataaaatgccatagtaagtccaactatatggtttcatgtagggtaaagtaaccattgtggaaggattacgataaaactgtgtgacaataaatagaataaaagatggcaaaacaatctgtaaattacaaagtgttataaaaatgcattgaatttctagtgttcttacactttcatatttctcattggcccatcaaatcaaaacctttgccttcctaaantgggangaaaaaaaaaggctgcccctgtcttnggctgaanggttttggccaaaacactttnccaaaactttttaanaaaatntttattggtaccancccccaaaactn

SEQ ID NO: 1974 - DNA, 512 bp, Homo sapiens
  misc_feature 2, 3, 4, 5, 6, 468, 500: n = A,T,C or G
gnnnnngggccgcgtatacgactactatagggcgaattggagctccccgcggtggcggccgaggtacgcgggattgctatgttggatgatttggagcatgcagaggcagatacagtagtagaatcagctttctgcctccatcttttactccgctccctgtcgctctttaactcagcagtttttctctctcagtctcccaacttgtgtgagtgttttatattctacataaattgagggtggagggcaacttctggttgtgttgaatgaggagattggcagaattgacaaaagcaaaatgaaacaatctcagcattctggaaaaattgagcaggggcatacaacaatctgagaagtatttatgcctgtaactgctgaatttcaggtgagaacagtgagactgtatggcatttggcctggagctattcctatgccctctcccatctgtttggtaaagagggttctgtccanccactgtcagcctgtgaggaccaacagcttcncttgtgtgggtg

SEQ ID NO: 1975 - DNA, 784 bp, Homo sapiens
  misc_feature 2, 7, 12, 13, 17, 19, 20, 25, 28, 31, 34, 36, 37, 38, 42,43, 44, 46, 47, 55, 59, 63, 65, 70, 72, 74, 75, 78, 86,89, 90, 93, 94, 96, 97, 107, 109, 113, 119, 126, 128, 132,269, 327, 368, 377, 378, 387, 402, 405, 417, 418, 457, 462: n = A,T,C or G
  misc_feature 464, 479, 489, 493, 498, 499, 516, 525, 537, 551, 554, 571,588, 613, 615, 626, 658, 665, 686, 688, 702, 712, 728, 781: n = A,T,C or G
tnaaaanattannatantnnttgtnaancantantnnnattnnnanncttatctntttnatantnctatntnannatnatgtcctnttnnttnnanntttataattntnagtnagggtncccgtancngatnactatagggcgaattggagctccaccgcggtggccggccgcccgggcaggtactggtttgacaaccacctgtttccagctccacaagctagcatgtaattcccttggtgagagtaattcgttcaaggatgaactatncaactcaattttcatagagttgttggaataaactggcaaaaggctatcttttgcaatnaccacttgtttgcttgtaaagaaatggatagtcaagccctnggaacctgnntgggaaggntcacccattatttgnggntataatagttgnncttggcaaattaataggttttgtaaaaaaagtaaggganccccntntaggaccccaagccnttgcaaaatntttnggggnncccaccccatttttggnaggcaatanccaattttttgntaaagactccatgnggntgcaaaaccttccaccnaggaatttttttttccntccaaaatttcaattttttggaagngnaaaaaatttanaaggttttaaaacctttttttttaagcccccnaaaaggnctaatttttttttggggaatntnggccttggcccccnccttttggcnaaatttatttaaaaangaaggttcccttggaaaatgtaaaatgggccacctttaaaattttttatttancaa

SEQ ID NO: 1976 - DNA, 523 bp, Homo sapiens
  misc_feature 2, 3, 4, 5, 9, 16, 373, 431, 468, 515: n = A,T,C or G
gnnnnagcnatcactncttagggcgaattggagctccccgcggtggcggccgcccgggcaggtacacctgcattagggacaagaaatctctatgttgaacaaatactgcaggtggtgctgatgctaaacttttacaaacattggttatacaattaatcaacagttatttgatgattcagcacacaaataactctttgcaaccaggtttacgttactgggaacaaactaactaggtttccccaggtgtggagagctttcacacaatataccctaacttacataaacaaaattacccaggtaaatatttactaaacagttttaacataaatgatagtgatacacaaatttgagtaataattcaagaaaataagtngcacaattaggctgttaactgctggttatctgtttaatgtgaaatacccactagcttnccttcaccctttaccctaacttcccataaaaatcttnaacccaaggcccccaaccatataccccacccatacttggcactttgncctcaaaa

SEQ ID NO: 1977 - DNA, 467 bp, Homo sapiens
  misc_feature 2, 3, 4, 74, 382, 418, 436, 440, 459, 467: n = A,T,C or G
gnnnggcgcgatacactactatagggcgaattggagctccaccgcggtggcggccgaggtacttctgtcgtcangatgcaggtggttatgaacttggatgcagtcagtagccagagacttggccatctacactcttcagcatgggtccccctgaccctaaaaatcatacagtccctgggccaaaatggcctcatccaatccaatgtcctgtccagggcttgatctcttctattgcagttctaatggttgtccagcatcttcttgagcgtcaacatcacttgtggatcctggacgcgtacctgcccgggcggccgctctagaactagtggatcccccgggctgcaggaattcgatatcaagcttatcgataccgtcgacctcnagggggggcccggtacccagcttttgttccctttantgaagggttaattgcgcncttnggcgtaatcatggtcatancttgtttn

SEQ ID NO: 1978 - DNA, 480 bp, Homo sapiens
  misc_feature 208, 323, 333, 336, 342, 349, 470, 471, 473: n = A,T,C or G
ctaatacgactactatagggcgaattggagctccccgcggtggcggccgcccgggcatggtactcctacaaacttaacaactttagcttttcggggaacagtggtggtctccacagatagctagaatcttctaagatgaaaataaactgtttcatccagctgctttctgcctgttaacctttgccacttccattccttcaagtggtgnaaatccccagggttgtcttgtattacacacatccttgttaagtaaatataccactgttgatttcttcttccagtgcaacatttggattaaataaaaatctttagttttcaaaaanaacaacactnaanaaaaangttcctnggcccgctctagaactagtggatcccccgggctgcaggaattcgatatcaagcttatcgattaccgtcgacctcgagggggggcccggtacccagcttttgtttccctttagtgaggggtnnanttgcccc

SEQ ID NO: 1979 - DNA, 475 bp, Homo sapiens
  misc_feature 214, 265, 287, 320, 386, 413, 429, 432, 443, 444, 446, 451,472: n = A,T,C or G
ctatcactacttagggcgaattggagctccccgcggtggcggccgaggtactttttttttttttttttttttttgtttttatttttagtagagatggggttttgccatattggccaggctggtctcgaacctaaaatgtgaactataaaataagactagacagctttactgatttttgtggtttatcatatgaaaacagaatttttgaaaagcngggaaaaaatcaaaccagttcattcctttttaaaattactttgggaggccnaggcgggaggatcacctgaggncgggagtttgagaccagcccgaccaacatgganaaacccccgcctctactagaaatgcaaaaattagctgggcatggtggcgcacgcctgcaatctcanctactggggagactgaggcaggagaanccttgaacccgggaancanatgtttgcggnnanccaanaatcgcaccgttgcactccancct

SEQ ID NO: 1980 - DNA, 488 bp, Homo sapiens
  misc_feature 2, 3, 4, 5, 27, 37, 39, 40, 42, 53, 73, 75, 92, 105, 106,183, 213, 272, 322, 356, 357, 398, 441, 445, 477: n = A,T,C or G
gnnnnggatattagggagtacttctcnagggcgaatngnngntttctccccgnggtggcggccgaggtacctnanttggaaatgcagaaatnacctgcctactgnnttgatctcgctgggagctgcagaccggagctgttcctattcagccatcttgccagcaggtatttctttatagcaacncaagaacagcctaatacaatttccagtatnaacgggctgttacaagttccccctaccccttcccagtgggatggagacagtggagttgnctaaactttcaacatcgtccagaagtaaagaggccactcgctccctcttncctctggtgtcaatggaggccatgtggagaacanntaatgagacactcctattctttccaactaggatgggatcangtagaggcctagtgggggagccaaaactcctagtcccaccatncagntaacaagggaggcccccatcccttggtgccangtaaagggctt

SEQ ID NO: 1981 - DNA, 464 bp, Homo sapiens
  misc_feature 464: n = A,T,C or G
ggcggcgaatacgactactatagggcgaattggagctccaccgcggtggcggccgcccgggcaggtactcacagctgtatcacactgaatatcatctccctgcactgccatttcatttgagcagggctttgcctgtcaagaacattcatatcttttgataaacagtgcattttttccctgatagtctgtatgggacagcctccttgtttgcatctgaaggacagggacttcaggacctcctgctgtggtcaccaaggaatcacattcaaacttctcagcaaggtgttatggtccttctcagtttgcctacgatccattgaggcaaaggtttccttctctcaatacaccctctgctttagccagggggacctcccactgtcctctctatgtgttctatttgttcctgactgttaagtacctcggccgctctagaactagtgggatcccccgggctgcaggaattn

SEQ ID NO: 1982 - DNA, 482 bp, Homo sapiens
  misc_feature 3, 203, 204, 215, 217, 341, 349, 360, 417, 444, 472: n = A,T,C or G
ccntatcactacttagggcgaattggagctccaccgcggtggcggccgacgcgcaccggcgtgagctggcagtggcaacgcaggcggcggtggccgctgcgctgccgctggaacagcttagttcttgacgtgcagccagcgcgcgtgcgcggcgcgggccaggtagtctaggatgaaaccgagtatgccgatcaagcaccgannggcgggccatnanttccgaatacgcgaggcggtcgcgcgtgtcgaggatgaagtagccgaggccggccgagacgcccagcatttccgccggtaccagcacgatccagatgatgccgatggccaggcgcacgcccgtnagaatatnggccgctctanaactagtggattcccccgggctgcaggaattcgatatcaagcttatcgataccgtcnacctcgagggggggcccggtacccagnctttttgttccctttagtgaggggtttnattgcgccgc

SEQ ID NO: 1983 - DNA, 481 bp, Homo sapiens
  misc_feature 2: n = A,T,C or G
cnaaacactactatagggcgaattggagctccccgcggtggcggccgaggtactcacagctgcatcacactgaatatcatctccctgcactgccatttcatttgagcagggctttgcctgtcaagaacattcatatcttttgataaacagtgcattttttccctgatagtctgtatgggacagcctccttgtttgcatctgaagggacagggacttcaggacctcctgctgtggtcaccaaggaatcacattcaaacttctcagcaaggtgttatggtccttctcagtttgcctacgatccattgaggcaaaggtttccttctctcaatacaccctctgctttagccagggggacctcccactgccctctctatgtgttctatttgttcctgactgttagtacctgcccgggcggccgctctagaactagtggatcccccgggctgcaggaattcgatatcaagcttatcgataccgtcga

SEQ ID NO: 1984 - DNA, 469 bp, Homo sapiens
  misc_feature 2, 5, 13, 62, 76, 155, 228, 237, 342, 425, 433, 451, 462,463, 468: n = A,T,C or G
gnccnaatcactncttagggcgaattggagctccccgcggtggcggccgagggaccccgggnagttggctaaaacnctaaaaactaaatgtgtaagatttatgcattttagtgtatttaaattataacccccagaaagcattgcctcattttttntggagggtaaatatgctcgttaggagcataaggggatgattttgagaaacccttgctctgtcattctgtcagnaaaccgccnctaacttttctggtttcaaaaaagcaaggtccattgatgaaactcctttgtgccttagtgacaaataacattgataaggcctactgtcaacaagagtgtgtttgntatatcttttgtttttagtgactaaatttgtaggaatgatatttttatgggatttactcaatctcacccaccattagttgcangtgacaanaaaagcttaagtttggcnagaatgtttgnngctana

SEQ ID NO: 1985 - DNA, 521 bp, Homo sapiens
  misc_feature 202, 211, 216, 261, 328, 401, 419, 496, 499, 503, 506, 507: n = A,T,C or G
tatcactacttagggcgaattggagctccccgcggtggcggccgaggtacgcgggagctgtttctcagaggaagcaatggaggcttgctgggataaaggcatttactgagaggctgttacctagtgagagtgatgaattaattaaaatagtcgaatccctttctgactgtctctgaaagcttccgcttttatctttggaagnagcaagaanttggncactccaagggacatttatttaattaaaaaggaacaactgtccangtgcaatgaaggcaaagtcataggtctcccaagtcttaccccattcctgtggaaatatcaagttctngggcttttctctgtcatggtagcctcaacttttctctgaccgggtgcattttcttttctctggtttctaaaanttgcacagtgggccaaanttttgggatccactttactttaattatctggttaaaatttttggggaccccaacaaaaagtcttttttagccacctngtngggnggnnaaaaaaagaaaaat

SEQ ID NO: 1986 - DNA, 481 bp, Homo sapiens
  misc_feature 9, 202, 213, 271, 338, 427, 452, 468, 479: n = A,T,C or G
tatacactnctatagggcgaattggagctccccgcggtggcggccgcccgggcaggtaccatgcttttcctgtagttgaaaatctaccatcaaacatgctactacctaatgacgaattcagagaaggtaaagaaagtatgtaaacctttccctcactggtggcccttattagcttaaaaatgtagtcttcatataatatagncaaggacattnatggcaagtctaacattttttacgactaaagaaaaaagtgtaattactatattaatangaaagacttaattatctttctattccagccactgaagttattatgacagaattgttatacaaaggtnacataataacatgtagccaaaatatataggagaagatattatagaaatatattggacaattagttaataaatgttatttttcaaaatgnttatgaacattttgtgacatttggncagctttttattattntttaattaatnct

SEQ ID NO: 1987 - DNA, 492 bp, Homo sapiens
  misc_feature 194, 201, 205, 215, 272, 273, 291, 349, 355, 374, 375, 394,401, 402, 406, 420, 422, 427, 428, 432, 435, 436, 447, 448,449, 458, 465, 467, 471, 479, 480, 483: n = A,T,C or G
ctatacactactatagggcgaattggagctccccgcggtggcggccgaggtacttctgtcgtcagatgcaggtggttatgaacttggatgcagtcagtagccagagacttggccatctacactcttcagcatgggtccccctgaccctaaaaatcatacagtccctgggccaaaatggcctcatccaattcaangtcctgnacangggctttganctctttctaattgcagttctaatgggttgtccagcattcttcttgagcgtcaacatnncttgatggatcctggacncgtacctgcccgggcggccgctctagaactagtggatcccccgggctgcaggaattcnatatcnagcttatcgataccggtcnnccttgagggggggcccggnaccccanntttntgtttccttttaantnagggnnaaanttnnacccctttggnnntaattaatnggttatnancttnttttcctnngtngaaaattgg

SEQ ID NO: 1988 - DNA, 453 bp, Homo sapiens
  misc_feature 4, 380, 405, 438, 441: n = A,T,C or G
actnctatagggcgaattggagctccccgcggtggcggccgcccggcgcaggtacatacagcttcatatctgctaatggagaaaataacttaaacttggccctgccaggcaacccattttcttccagtttaaaacttagtctttttcaggttagctaggccaattccaggtgctcgtcctaccttctttctcccatttctacaccacccttcttttttgtctctccctgggagatatctgagcttaaggaaaaattcgttaagagtggggatcggagagacctctgttccactagttgccttctggacattttctggtctccactgttgatgtatccatcccttctggcctttgggtgcactgaggcatcttgctattgnctatggttatgccatagctcctagncaaaaggctcacattcttttttattattatttnttnttgacaggagtc

SEQ ID NO: 1989 - DNA, 403 bp, Homo sapiens
  misc_feature 5, 7: n = A,T,C or G
gagcncnccgtaatacgactcactatagggcgaattggagctccaccgcggtggcggccgaggtacccttaaagagccttttcagagatttcgtttttcctaattgcaaccccacacaatccataacatttgaacgctggtgatgtgctctgtagcagtgctgtgtgttgtggacccctggaagcctacgcaccattgagtatttgatattttttttgccccatcctcaaggagcagttgttgctccttaggggtaagtcgcccctgctgagaatgcatgctctcgataatgcttgcttcacattggtcattgtggaatatttttataaaagagaggatccatttccagcttcttttctgcaggaagagaacctgtggttatgtcttactcccccattttgta

SEQ ID NO: 1990 - DNA, 412 bp, Homo sapiens
  misc_feature 5: n = A,T,C or G
gagcnccgccgtaatacgactcactatagggcgaattggagctccaccgcggtggcggccgaggtacgtgtgcgcatgcatagtcttaccccactacaccactgggcacctagcccagacattgggctagatgcttacatatattatttcctcagaggacctagattaatatacatatttccaggaattatatccatttatttatttttttctagggtgaccttattttttaccctgtagccagtgaaaggtaagcctgtttttcttgacttagtgctgtaaacagccaaatgacaaagtgaccgccttgctggcacagcagtgcttgcccactgtgacatttcccctcagcttcttgatttttctgccccaaaatgcaaatactacaggactcccattaactggttgagag

SEQ ID NO: 1991 - DNA, 407 bp, Homo sapiens
  misc_feature 5, 391, 393, 398, 400, 402, 405: n = A,T,C or G
gagcnccccgtaataccgactttactatagggcgaattggagctccaccgcggtggcggccgcccgggcaggtaccctggcctagatgccagtagcatattccccagttgtcaaaaccaaatagttctcccagcaatgcaaattatcacctcatgtgtgcgtggtattgggggtggaggaacattgtcacagttggggactactgggccggaggtctgtctgtgcaaaaggggaatctcaaccatcactctgtagtcacaaaatgaaaataaaagaaaaagctatttttaacatttcatattctctctctgcttttcacattttgctttctacttgccaaactttccccattatcagagctccttgtgtttcctagccaccttcaatcatntngtgtntnantanaa

SEQ ID NO: 1992 - DNA, 414 bp, Homo sapiens
  misc_feature 271, 320, 324, 350, 370, 407: n = A,T,C or G
cgtatacgactcactatagggcgaattggagctccaccgcggtggcggccgcccgggcaggtacctgggacaccaggcagtagccctggagtaagatcaagtgggagacacatattcctcccctaatgggactgcagtgtgcattctgcctgtcaatccattcctagcatttgtgggcaaagacccaacatccccctttaaacacagattccagggtcaggcttggaagggctcagaactaggaagtcacgcttaaaacctttaagttggnctcttaaattcaacaaaaattcacaaacaaccttattttacccactctncaantaaaaaaacaaacaaaccctgtatangtttggaaaataataaaatntaattgcattcatattcgattaatattaaccaggccnggaaacc

SEQ ID NO: 1993 - DNA, 409 bp, Homo sapiens
gagcgcgcgtaatacgactcactatagggcgaattggagctccaccgcggtggcggccgcccgggcaggtacacttccccctcctcctcccccgaccatgcctgaattcagacctctagcccttggatctgttatctgacccaagaagtcttgtcaattttagaaggctatcaccttttaacagccatttctgctgcttcctgcacactttctaatttctcctctgctttccctggaaatctgatgcttgacttggacacaattcaaccctgtctccttatagagacagctgctgaatgaatgctagaaatttaaattctgcttttagcttagggttctctgccttctttaaaaaagtatttctagaaaacatatacaatatatgctgctgcagattcacctttttttt

SEQ ID NO: 1994 - DNA, 419 bp, Homo sapiens
  misc_feature 82: n = A,T,C or G
gagcgcgcgtaataccgactcactatagggcgaattggagctccaccgcggtggcggccgcccgggcaggtacatgcagganaagtcattctcaggaaaaggtgagtgtgggaccaggcagggaagccagtttctgtcctttatttggaactataatcaaggcagacaaccacagtaaagagatgcagaggcagggagtagtgtaaaaccaccttacacacagcttcctggctttcccttcactttaggttgtagctcaagttattcttgggctaaaaaataagctctgttggcccaattaaaccagaattaatcaccaattccccatctttatctggtaattttagttcaacattgctcagctgatggctcattaagccaagaactctcccaggtctcagttaccattttcagacaag

SEQ ID NO: 1995 - DNA, 405 bp, Homo sapiens
  misc_feature 405: n = A,T,C or G
gcgcgcgtaataccgactcactatagggcgaattggagctccaccgcggtggcggccgcccgggcaggtactcacagctgcatcacactgaatatcatctccctgcactgccatttcatttgagcagggctttgcctgtcaagaacattcatatcttttgataaacagtgtattttttccctgatagtctgtatgggacagcctccttgtttgcatctgaaggacagggacttcaggacctcctgctgtggtcaccaaagaatcacattcaaacttctcagcaaggtgttatggtccttctcagtttgcctacgatccattgaggcaaaggtttccttctctcaatacaccctctgctttagccagggggacctcccactgtcctctctatgtgttctatttgtn

SEQ ID NO: 1996 - DNA, 404 bp, Homo sapiens
  misc_feature 97, 143, 188, 199, 305, 322, 354, 356, 359: n = A,T,C or G
gagcgcgcgtaatacgactcactatagggcgaattggagctccaccgcggtggcggccgaggactttttttttttttttttttttttttcaatgganacagagtcttgctctgtcacccaggctggagtgcagtggcatgatnaatgagtgaatgacttgagtcagtgaacgtgaaaatgtttggtanattgtaatacnccgatattgtgtaatacgtaaaatactattaggaactacagcaatgtcttatattcccagctaggccatgcacaggaggcagtgtgccacaccacactgaaaaggnggccagccctcactcanagcctgccttcaccacctgcccgggcggccgntntanaactagtggatcccccgggctgcaggaattcgatatcaagcttat

SEQ ID NO: 1997 - DNA, 410 bp, Homo sapiens
  misc_feature 3: n = A,T,C or G
gcnccccgtaataccgactcactatagggcgaattggagctccaccgcggtggcggccgcccgggcaggtacccaatccagaggcaccatttgcaatctaagaagagcccagaggagaggaaaattggtaatgaatcagtggggagtccacgaaggcagaggggctttggcacagcccaaaagacagacagaaatgaagctctcaggactcaagaggagcctcattccaggcagaagaaggatcatggaaaccacacaagcgggtcctcggccgctctagaactagtggatcccccgggctgcaggaattcgatatcaagcttatcgataccgtcgacctcgagggggggcccggtacccagcttttgttccctttagtgagggttaattgcgcgcttggcgtaatcatg

SEQ ID NO: 1998 - DNA, 462 bp, Homo sapiens
  misc_feature 3, 190, 212, 254, 297, 310, 318, 329, 405, 432: n = A,T,C or G
ggngaattggagctccaccgcggtggcggccgaggtacgtgtgcgcatgcatagtcttaccccactacaccactgggcacctagcccagacattgggctagatgcttacatatattatttcctcagaggacctagattaatatacatatttccaggaattatatccatttatttatttttttctaggggngacccttatttttttaccctgnagccagtgaaaggtaagcctgtttttcttgacttagtgctgnaaacagccaaatgacaaagtgaccgccttgctggcacagcagngcttgcccactgngacatttnccctcagcttnttgatttttctgccccaaagatgcaaatactacagggactcccattaactggttgagaggctaacgcgcaactgcnaacttcaccaggtctttcctgtgctgnttctcttttctttccctacctttttttcct

SEQ ID NO: 1999 - DNA, 602 bp, Homo sapiens
  misc_feature 1, 4, 5, 10, 62, 98, 205, 207, 211, 217, 219, 224, 229, 232,235, 243, 249, 263, 265, 317, 327, 333, 339, 351, 355, 356,365, 370, 381, 384, 388, 390, 393, 407, 409, 415, 421, 422,423, 437, 456, 459, 462, 463, 476, 483, 486, 488: n = A,T,C or G
  misc_feature 490, 501, 502, 508, 510, 511, 516, 517, 520, 522, 529, 532,533, 542, 543, 545, 547, 548, 560, 561, 563, 565, 571, 584,589, 590, 591, 592, 594, 595, 601: n = A,T,C or G
naanntggcngcgaatacactactatagggcgaattggagctccccgcggtggccgagcggncgcccgggcaaggtaccctctctgttcccctccctncacccttcccctccttttctgtttttaagataaagtgttgatttggaattcagcaactgcaagtccatttgaaagaagtcagtttttgttagaggcctggatatgancnaatntgtttntnaaccnaaatnacnacntgaaccanttctgngggcctgaacatananaaaatttgttgcatttatttaacgtttgtgcctttcaaggtgggaatgcatnataagccacnttgggnaagtanttttgccatgangaannagcttcacntgaanaatcattattnaancttntnttntatcccaccttgtnanaatatntttttnnngaattattggatancatttccattcctcttttnaanatnntggaatacttaanaattatnaangnanctttaatattnnggtatngnntctannatnanaaatccnttnnctttaatgnnananncccccacctggnntncnatttcntctaaaaaataangggcnnnntnnataatnt

SEQ ID NO: 2000 - DNA, 406 bp, Homo sapiens
gcgcgcgtaataccgactcactatagggcgaattggagctccaccgcggtggcggccgcccgggcaggtactcaataaaataagagatactatagtaaaactcttacaggaaaaattattagaatttgtgctataccaaatcaatttcacaaaaatgaactgcctgtccactgtttttccacaaaaaatccaggccatctacaccttgctggaaggatggaacctcaactgctatactccttagattgctatacagcaatctaagtggccccatcacagctcctctccttgaacatttgttgagatcaagttgcagctgggccaggcacaatcggtcacagttagacagctgagggcattccaaagagtagtgttccttcctccacattatctgccaaagtagtca

SEQ ID NO: 2001 - DNA, 469 bp, Homo sapiens
  misc_feature 383: n = A,T,C or G
gccctatcactacttagggcgaattggagctccccgcggtggcggccgcccgggcaggtcaagactgtaatgagctatgattgcaccactgcactccagcctaggcgacagagctagattccatttcaaaaaaaaaggtgatgatggtggggcccggcatggtggtttacacctgtaatcccagcactttgggagtgctgaggtgggagaattgcttgatcccaggagttcgagaccagcctgggcaacattgaaagaccccgtctcttaaaaaaaaaaaaaaagagaggtaatggtggctccctttctctcatcaacacactctgggggatgaaaaggatgataatgtctatgtgtgtgatagattgtagaacgactgccantgtgttgagcgaagaaaaggagtatgtctgctgaacagattagcttctggtctccaatcagtatgtgtggtggcgtagggggactg

SEQ ID NO: 2002 - DNA, 465 bp, Homo sapiens
  misc_feature 233: n = A,T,C or G
gaatacgactactatagggcgaattggagctccccgcggtggcggccgcccgggcaggtacttgatcgaacacctctgatagtccgagtatggttacctcaataagtaaccattcctcttgctccaagcctgatgggaaggtaaacataagaatagaaatttcttgagctgaagtgaagtgaaggaactccctcccgaaaaccatggcatgtcacgaggaacgtttattgtangttaggcggtctggtgcctctaggggggacaatcaaatgatacaggacctcgaagagtcttactttggatttctgtggctttataatgtagtatattatgtagttcattgctgtggctttatgcttttttattatttacaagtgatttactgatttgtgagctcttgaaactgtgtcattgcatgttatgtttaccctgatagttgcatttgcttataattctttttgcttt

SEQ ID NO: 2003 - DNA, 463 bp, Homo sapiens
  misc_feature 4, 83, 200, 428, 447, 457: n = A,T,C or G
gctnatcgactactatagggcgaattggagctccccgcggtggcggccgaggtacttttttttttttttttttttttttttgntttgagatggagtctcgctctgttgcccaggggagcgcagtggcgcgatctcggctcactgcaacctccacctcctgggttcaaacaatcctccttatttttaaaaagagaaaaacnacctcaaaaaagtaaaggggatttgctcatagaacacatggaaaaccagaaaccaggaagaaaatgaacatacagttttcaaatcatgtgttttcatacaaagtatcgtatttaaaactaaaaacaattctgaaattagtaataaacccattttcacaaataaggatctaaagcttaaagaacctgcaggcatacaattagtcaacagcacaggcagaacagaaactntgagtctatgtgattctanaacccacttntcactg

SEQ ID NO: 2004 - DNA, 440 bp, Homo sapiens
  misc_feature 368, 370, 427: n = A,T,C or G
gggcgaattggagctccccgcggtggcggccgcccgggcaggtacgcgggtgctcttgagtcggcagatgttgtaagggactgtgtagatcaacctttaggacaggaggtagcacctaaaagtgaggaccagctgtggtggtggcaatagagtttatgcttgacctttgttaatcgggagaagttcttgggcatttcagatgatgggtagggccatggaactctcagtagtcctggtcccatgatctgcctctgaaacaggaggggtgggatgtggtagtgggatccactttgttctcgtgctcctgacccagtgaggctctctcctgcagtccaacaccggcagcaagtcacaagaagtttgtcttnangaccatgaaactgcctcaagcttgtaaagctttcctgcctaggtcaaaattgtggcnatcaacactaaaa

SEQ ID NO: 2005 - DNA, 444 bp, Homo sapiens
  misc_feature 3: n = A,T,C or G
ctnctatagggcgaattggagctccccgcggtggcggccgcccgggcaggtacccaacaatttgagtaacgtcacttggcagaaggagacatttttgagtcatgccatagatttgagccctgctccatcatttacttgctgtgggactttggacctgcatccaccctctcagaacttgtgtcttcattgtgtatcacctattttacagattgctgtgagattaaacaaggtaagatacaaaagggtcctaatacactgactgttaaaactgagcagtgacttagaataatctcttgagcagtccagggcacatattgacctcttaagtctcctttagagttataatattagcataataacactgagctttaagaaaagtctttaagccagtgattcctgtgtatataccctccagagggattccaaatccccaggaactgaatg

SEQ ID NO: 2006 - DNA, 429 bp, Homo sapiens
attggagctccccgcggtggcggccgaggtacagctcccaccagatactcacttggtgaattgaaagaggagctgtagtgaaaatactgtcttaggaaaaacacagctcttgattgaggctatcagcaggttaatgaataactgttttcagacaacatttcacccctagtttgagctgctcttagaatgaatgtggccaggttaatgtgaccagcagacataatgcaaaaccaaactaaggtggtaaattggcatcttggctttgttgcacatgcaggaaagatccaggactggtgtcagaggtatactgtctttggcagaagagtgcttgtccataaccagagtacctgcccgggcggccgctctagaactagtggatcccccgggctgcaggaattcgatatcaagcttatcgataccgtcgacctc

SEQ ID NO: 2007 - DNA, 470 bp, Homo sapiens
  misc_feature 2, 3, 8, 19, 20, 30, 36, 301, 323, 470: n = A,T,C or G
gnnagttngaccccgttannactactatanggcganttggagctccccgcggtggcggccgcccgggcaggtaccaactgaaaaataagacaaccaattccatcatggtgccaaccactctagttgtcttgggcaagtcacttatttatccatcttggctttcttgctcaaaaatgatggatagctacacctcacagtgaggattcaggcatgtaagcaaagtgccttgaagacaggaagccagacattataggagcataatttttgccctgaaatgcatttggtatgggttgggcatcanatgtttctgatttgtgaattantctgagaatgttagacatgcaatggtttaaggattgctaggagcaaaacagaaccatgttgtgtgtttatgggtaatcagccagtttggcaaaccaccagtggctgaaacttgtacctcggccgctctataactagtggatcccccn

SEQ ID NO: 2008 - DNA, 441 bp, Homo sapiens
ggcgaattggagctccccgcggtggcggccgcccgggcaggtacgcgggaatttagggaacgaatcatcccactttttgtattgagaacagatttggggaagtagtggcaggaaagtgtagaagttggaagatcctttagtaggaatatcctcttgcaataatacgatgttgatccaggatcttaattatggaagcattaagtagaacagatttgaagatgcacttaacacaatttgcggtgcactctgaaaaaaaaatgaaatgagagaaattaaaatgactccacagttgctgtcctgagtatctagaagaacgaagttgtaatttacttgaatggagaagacaattcggggagcacgtctgcatgaaaaatgaatcatctggtttgaataagttaggttgaagatctaagagagacaagtactcataaccatattagt

SEQ ID NO: 2009 - DNA, 485 bp, Homo sapiens
gcgctatcatcttagggcgaattggagctccccgcggtggcggccgtggcgataccgtaggcgccgtgttgagcgcccatcccgacatcgcaaaagtctccttcaccggctcaacggctgtcggcaaaatgatcctgcgtaccggctctgagaccttgaagcgcgtcactctggaactgggcggcaaatcaccggtgctgattctcgatgatgcggatctcaagaccgctgtgcccatggctctccaggccggcttcatgaacagtggccaggcgtgcattgccggcacccgaatcctggtacctgaaaatcgcctttatgaagttgaagccgctgatgatccaaggaggcggccaaagtacaagtcggtaatccccgtgagccagccaccgctgtcggccccatggtcagtcataaacagtgggagcgggtgcagcgctacattcagatcgggattgaggagggcgccaaatttattggcagga

SEQ ID NO: 2010 - DNA, 482 bp, Homo sapiens
  misc_feature 1, 5, 7, 9: n = A,T,C or G
nggcncnancactacttagggcgaattggagctccccgcggtggcggccgaggtacatacagcttcatatctgctaatggagaaaataacttaaacttggccctgccaggcaacccattttcttccagtttaaaacttagtctttttcaggttagctaggccaattccaggtgcccgtcctaccttctttctcccatttctacaccacccttcttttttgtctctccctgggagatatctgagcttaaggaaaaattcgttaagagtggggatcggagagacctctgttccactagttgccttctggacattttctggtctccactgttgatgtatccatcccttctggcctttgggtgcactgaggcatcttgctattgtctatggttatgccatagctcctagtcaaaaggctcacattcttttttattattatttttttttgacaggagtctcgctctgtcacctaggctagaagtgca

SEQ ID NO: 2011 - DNA, 491 bp, Homo sapiens
  misc_feature 2, 5: n = A,T,C or G
gnggncctatcactcactatagggcgaattggagctccccgcggtggcggccgcccgggcaggtactgatctaaccaagatatgttgtttttctcatccaccagtcactttctcagtcctttctgtatcccttgcaatttgaacaaagcttggtgaatagtgtgcacacaaaaagcacactaggtgaaagacagatacataaaaagggtaaagtcaggatattttaacaaacctatcaagctctaaatataagcctccttggtagttttctctttaaccctctctccactgttggatgaaatttgctgcattcaattccagttcccaccccaacttccttcttaacacaaggtcagggttaagccttcggtgctttaatccagagggaaaattacttattttaaaaagcagtaaaaaacaccgcattcctttggcacagggatgaagaccagctcaagctcttcaagttgttgatcattgtctattggtct

SEQ ID NO: 2012 - DNA, 822 bp, Homo sapiens
  misc_feature 548, 563, 570, 577, 596, 606, 646, 676, 703, 713, 740, 776,804, 808, 815, 817: n = A,T,C or G
gccgcgtaatacgactactatagggcgaattggagctccaccgcggtggcggccgaggtactcacaagctgcatcacactgaatatcatctccctgcactgccatttcatttgagcagggctttgcctgtcaagaacattcatatcttttgataaacagtgcattttttccctgatagtctgtatgggacagcctccttgtttgcatctgaaggacagggacttcaggacctcctgctgtggtcaccaaggaatcacattcaaacttctcagcaaggtgttatggtccttctcagtttgcctacgatccattgaggcaaaggtttccttctctcaatacaccctctgctttagccagggggacctcccactgtcctctctatgtgttctatttgttcctgactgttagtacctgcccgggcggccgctctagaactagtgggatcccccgggctgcaggaattcgatatcaagcttatcgatacccgcgacctcgagggggggccccgtacccaacttttgttcctttagtgaggggtaaatgcgccncttggcgtaatcatnggcatanctggttnctgtggggaaaatggtatnccctcacaanttcccacaacataccaacccggagcattaaagtgttaaanccgggggggcctatggagtgagcctactanatttaattggggtgcgcccactggccncttttcaagngggaaaactgttctgcccactggattnatgaatcggccaaccccccgggaaaagcggtttgcntattgggccctttttccgcttttcttgnttanctgactngntgggg

SEQ ID NO: 2013 - DNA, 494 bp, Homo sapiens
  misc_feature 180, 431, 454, 463: n = A,T,C or G
ggccctatcactacttcttagggcgaattggagctccccgcggtggcggccgcccgggcaggtacaggtgaaaattgaaccatgatcagcccggatctctgacggactatgatcagcacaatttccagccaattcttataactcttaagagggcaataatcttgagacacagatatttancgcctcttccacatccaatgttttctaccatgaaatcatgtctttgtaaaatgatgtgaaaaacattataatacattttatataagtagattttaaaactgtgatgaatttctagcaccagtatgaagacagaattagaatgctattgataatttcaaataaaaaaagaaggcatgcttgaatactgagaagagatgtaatgcattttctaaacaaagcacacagttaattagtattcatgatttcatttngtgtttctctgaactctgataanataattaanggaaaactgcattaatttcattcataatatt

SEQ ID NO: 2014 - DNA, 489 bp, Homo sapiens
  misc_feature 90, 184, 350, 360, 367, 434, 489: n = A,T,C or G
gggcctatcgactactatagggcgaattggagctccccgcggtggcggccgaggtactttttttttttttttttttttttttgcctgganagagagatgttttatttttgccaaagcatgtgggagtaagtagcaaacatcatgacacttcactcctcaaatattttcccacgtatcacttaanaacaagggcattcattctgttacatgaccacaatacaatcagcacagatagatattaacattgagacaatgctctgatgtattggtatctactatgcagttcataatcaaataagggttttggtaacttgggatccataaatggtctgcaaggtcagcccctgtanacctgcactnagtgggngccatttccctgtctcaggtgcctgctctactggtgatatttttcactggctctgttgctcacttanaattttttctcccagctgttgacattttattttctgcatagttctgaagctgcan

SEQ ID NO: 2015 - DNA, 477 bp, Homo sapiens
  misc_feature 15, 21, 37, 134, 139, 168, 176, 257, 290, 383, 417, 429: n = A,T,C or G
ggagctccccgcggnggcggncgaggtcatgtgaccnaaggaccggcccaaacgcagatgcagacagattccagactcttcagcaatccttcccttatctggggcaaaggctgtgatgcctacacagtctctgncattncatccctgatgctccagtttttaggaganaccacctngtcatgttcaaacttccagaaatggtggtcctgtggaaagaatcctaggccagcagctaggagacctgctgtgagtcccanccctgcccatcacagctatgtcaggtggttcangacatgttgggcttcaggtccccatctataatcaaaaagtttgtttctagcttcaacaatctatgactattattgccgtttactgatagagtnactaatgacttcattataggttttcaagaccagntacctcctgttntggttcaattagcaaaatgccaaacatgattgtcatttgaattattgg

SEQ ID NO: 2016 - DNA, 499 bp, Homo sapiens
gtctcgaatccactactatagggcgaattggagctccccgcggtggcggccgaggtacatgtgacccaaggaccagcccaaacgcagatgcagacagattccagactcttcagcaatccttcccttatctggggcaaaggctgtgatgcctacacagtctctgtcatttcatccctgatgctccagtttttaggagaaaccacctcgtcatgttcaaacttccagaaatggtggtcctgtggaaagaatcctaggccagcagctaggagacctgctgtgagtcccagccctgcccatcacagctatgtcaggtggttcagacatgttgggcttcaggtccccatctataatcaaaaagtttgtttctagcttcaacaatctatgactattatttccgtttactgatagagtaactaattacttcattataggttttcaagaccagttcctcctgtttggttcaattagcaaaatgccaacatgattgtcattgattttg

SEQ ID NO: 2017 - DNA, 496 bp, Homo sapiens
  misc_feature 2, 3, 9, 11, 13, 180, 188, 204, 222, 247, 248, 252, 273,294, 298, 311, 314, 322, 393, 407, 416, 417, 419, 448: n = A,T,C or G
gnngtcccnancnctacttagggcgaattggagctccccgcggtggcggccgaggtacactgatcttaaaacagctctggctgtaaaatcactttgctggagtcaatgaggtaagaggctagaacacaatactagggatctgacccctgcaggctggccatgatccatccctcaggccgncttcccanagcagaaaaatccagngagccacttaatgagacnttttctttaatgttttctttaactnngacnattgcaactgaaatttatcangagcttgtacccctccaaaancctntctctttctttcnctntgcctctntccctcttgctgctactctttttactgcttttatgcaccaaacttcatggttttttttttaatggaatgangtttcttggggaanaaaagattnnangattcatggtaacaccaatgaaaattgtnaaaaagtccaaatttaaaaagttaaaatctttggattctacttttaaa

SEQ ID NO: 2018 - DNA, 450 bp, Homo sapiens
  misc_feature 2, 8, 13, 14, 35, 364, 405: n = A,T,C or G
gncgttcncgcanntctacttagggcgaattggtnctccccgcggtggcggccgaggtacgtggcgtagcattccatgttcagctttgacatttattttctcatatcaaccctttttacacgtgaaacacaatctcgctcttgaagtcttaactgcacgatctgtgaaacctgtatttatattttcttcagtgtattcttgtcgtgtgtgtgtcctaaacaaaccaaaagaaaactttccaaatctaaagtattcattctccaattggagcaagaggagtcagttagatactatcacggcattcatttgtggctggcttgtcatatttacttatgattgataataaatctattttgctttttanagcctccccgagaagccatctgccttcgaagccctgccatnagaaatgcaaaagtctgtatccaaataaaagccttggaaattgaa

SEQ ID NO: 2019 - DNA, 429 bp, Homo sapiens
  misc_feature 4, 10, 11, 14, 15, 148, 160, 189, 217, 324, 328, 350: n = A,T,C or G
tggngcgaannggnnctccccgcggtggcggccgggggccattgaggactgccatggaatgacttgaaaggtcacgtaagctgagacttctggagagaccattcaaggcttctggctcttgacaaagatagaccactggaacaatganaaggagagaatnctactggtcacagacaagactctcttganctgcaaatacgacttcatcatgctgagntgtgtgcagctgcagcggattcctctgagcgctgtctatcgcatctgcctgggcaagttcaccttccctgggatgtccctggacatggaagacaaggagaaggcctnatgnatctactgggggagtcccagangaacagtctcttatgtcccgctggaacccatggtccactgaagttccttatgcctacctttcactgaagcatcctattg

SEQ ID NO: 2020 - DNA, 433 bp, Homo sapiens
  misc_feature 97, 198, 271, 283, 317, 322, 326, 332, 412: n = A,T,C or G
ctacttagggcgaattggagctccaccgcggtggcggccgcccgggcaggtactttttttttttttttttttttttttctgagacggagtcttgctntgtcacccaggctggagcaagactccacttgtgaaaattttcatcagtttcctccagatgtaaaagaatctcttcggcacactccagggaaggggcacccngtgatttttctccttcacgctctggaacaaccgcctcagcatcgcctgcagcatcgcctggtcctcgctgganaaatgggccatntttggggaagcaggggtccgcgaggtttcgcctntggtncctnggccgntctagaactagtggatcccccgggctgcaggaattcgatatcaagcttatcggataccgtcgacctcgagggggggcccnggtacccacacttttgttccc

SEQ ID NO: 2021 - DNA, 432 bp, Homo sapiens
  misc_feature 396, 424: n = A,T,C or G
ctacttagggcgaattggagctccccgcggtggcggccgcccgggcatggtacatatatgggacttgttaaacagaaggtttcttggggtgatttttttaaaaacccaaaattttaaacatcaggtattttatctggttggggaattaagcccaggaaagaaaaacctctagaatattcctacccatacagcctgatgcacacccgtgggccgtctttaatactacaacttattgagtaaatgacaatgcatagcactctcaatgccctcgtgccaccctaatgattgctctacctttctgctttcaaaagacagtacctcggccgctctagaactagtggatcccccgggctgcaggaattcgatatcaagccttatcgatacccgtcgacctcnagggggggcccggtacccagctttttgntccctttt

SEQ ID NO: 2022 - DNA, 492 bp, Homo sapiens
  misc_feature 2, 8, 39, 43, 44, 88, 101, 122, 123, 158, 176, 190, 207,221, 256, 273, 315, 322, 345, 359, 367, 376, 391, 405, 416,427, 439, 450, 451, 456, 462, 463, 474, 482, 486, 487, 490,492: n = A,T,C or G
gnagtganccatttgaaatccggcgaattgttttccccncggnngcggccgttcctagtcacatttgttgttgcagcatgttatcagnagagttttctttnactcttaaaaatgccctggtnnggatgattgatcatacctgcccccatgcccacccnaccacccaaaaagtgcanccaccctgtggtgngcggtgtaccttcggcncgctctagaactantaggatcccccgggctgcaggaattcgatatcaancttatcgataccggacnacctcgagggggggcccggtacccagcttttgttccctttantgagggntaattgcgcgcttggcgtaatcntggtcatagctgtntactgtgngaaattganatccgctcacaattncacacaacataccnaagcccgggangcattaaaagngttaaaagcctngggggtgcccnnaaatngaagtnnaagcctaaacncaacaatnaaanntgncn

SEQ ID NO: 2023 - DNA, 468 bp, Homo sapiens
  misc_feature 6, 7, 8, 30: n = A,T,C or G
gtcccnnnctctacttagggcgaattgganctccccgcggtggcggccgcccgggcaggtactgcctgtgcgtagctgcattaaaccaaatgatcaagaatatcaagatacatcttcctggatcttcaatcccacttaaagatttggagaacatatcattttatattaaaaccaataacattttcagaatacatttgaataaatttcttttttacctaaaaacaagagtctttaaataagtatcatttttgagatgcattgccataggatacatactgaggtgtcttctctttctcttacctattagaggcatttctgggcaagtttgaggagcatggaattaacagtcatcaatgcattgctggatttgaaaatgatttatatcaatcagcagaggacctccactggtgatgtcagccagggatctgagggatgttcaggtaggacatgctatgctttgaatctcca

SEQ ID NO: 2024 - DNA, 480 bp, Homo sapiens
  misc_feature 2, 12, 18, 38, 41, 68, 70, 78, 84, 90, 97, 106, 150, 461,473: n = A,T,C or G
gnagttgaaccntaatgnaatccggcgaatagtatttnggnaaaggccgcggccgcccgggcaggtantngctgtttngggcgnttatcnataatantttctactngttactgagtgtcatcatcaccaatgtcatgattgccacgattnattgagtgcctactacatgcaggccccaggtcagtgctttacactcttaactggcatgttgacaacagctctgaatgacaggagctctgttcaagtgttttacaagtgagaaaactaaagacactaataatttttaaaaatatatccacagttctatgattagtaagtaagggagctagtcctcggccgctctagaactagtggatcccccgggctgcaggaattcgatatcaagcttatcgatacccgtcgacctcgagggggggcccggaacccagcttttgaccctttagtgagggttaaattgcgcngcttggcgtaancatgggg

SEQ ID NO: 2025 - DNA, 448 bp, Homo sapiens
ggcgaattggagctccaccgcggtggcggccgaggtacgcgggggtagatggaaggaagaacttgtgtgcttagacctgacgctgggaggagatgctgccacctaggttacttgtaggaccctatacggcaacctcctttgccaggaactatttataaacatcctgcaggaaaatgcagtgaagtagaaagagacagggatatcccagaaggttatgcaaaacatcaagaaaagatgagaggtcagagatgggaagaaacaagaactttgacatgcttggtgttcttgcccaagctttgaagaagtttacaaagtctatatgtcagaatacacatttcccaccttgcccaacagtagaaaaacataagaagagaaaaacattaaaaaatgacaaggaagttaatggaagtcagcaatgtgatggtgtttggaggtggagccttcagaa

SEQ ID NO: 2026 - DNA, 464 bp, Homo sapiens
  misc_feature 6, 10: n = A,T,C or G
gtcccnaacnctacttagggcgaattggagctccaccgcggtggcggccgaggtaccctaatcccacggaacttcccttgaaccaatacattgccacctccccactgagagatgccagactcttctcccaactctcccaaccaccttaaccaagtcagcccctcccacatagtccctagttaagatcagaatgagctttatctgctttcttaaactttgttgttcctacctctgcaatccctcttaggctatggaactactgcgggatgaattcaccaagccgcagctgggactgcctttgtacctgcccgggcggccgctctagaactagtggatcccccgggctgcaggaattcgatatcaagcttatcgataccgtcgacctcgagggggggcccggtacccagcttttgttccctttagtgagggttaattgcgcgcttggcgtaatcatggtcatagcg

SEQ ID NO: 2027 - DNA, 452 bp, Homo sapiens
  misc_feature 414: n = A,T,C or G
gtccctatcactacttagggcgaattggagctccccgcggtggcggccgaggtacagggaactattggagcacctaagaggagcacctaccttgaatttaggggttagcagaggcatcctgaaaaaagtcaaagctaagccacaatctataagcagtttaggaattagcagaacgtgcgtggtgaggagatgccaaaggcaagaaagagaaagagtattccaaacaggagggattccaaagagagaagagtatcccaaacaacatttgcacaaacctgatgaggagagagaatgtggggtggggatggatgatgagactgaagaagaaagccaggtctagataatcagtggccttgtacctgcccgggcggccgctctaggaactagtggatcccccgggcttgcagggaattngaatatcaagccttatccgatacccgtccgacctcgag

SEQ ID NO: 2028 - DNA, 476 bp, Homo sapiens
  misc_feature 2, 150, 199, 237, 259, 260, 267, 275, 365, 382, 415, 437,449, 464: n = A,T,C or G
gnccctatcactacttagggcgaattggagctccccgcggtggcggccgaggtacaccgcacaccacagggtggctgcactttttgggtggtggggtggggatgggggcaggtatgatcaatcatccaaaccagggcatttttaagagtnaaaggaggctctactgataacatgctgcaacaacagatgtgactaggancgggccgctctaaaaactagtggatcccccgggctgcnggaattcgatatcaatcttatnnataccgnccacctcnagggggggcccggtacccagcttttgttccctttagtgagggttaattgcccccttggccaaatcatggtcatattttgtttcctgtgtnaaattgcttattcgctnacaatttccacacaaacataccagccggagaancattaaaggtgtaaagcctggnggtgccctaatnaagtgaacctaactnacaatttaattg

SEQ ID NO: 2029 - DNA, 456 bp, Homo sapiens
  misc_feature 7, 8, 9, 11, 12, 15, 16, 18, 40, 67, 83, 384, 388, 449: n = A,T,C or G
gaggttnnncnnttnnantactataggattgttttagctnaaccccggtggcgacctctgtctaaanttctgaatcccctccnacaaagacccattacagcagcatggccatgcagctgtgctcacatctcacccctgcactggccaggaacacatctatctttcctttgggtagggtcacccaactgctctgccacttccagctgtgaaaagggcatctatgtgacagacccctctgcagtttgaaactgtgtgacaactttaacacccaactcagcatctgcatgggtttctgagaattacctatatcttttgtggtctctttgctgattctctgtttcattaaaaaaaaaaaaagtgactcgtgatccctgagttcctatntagncaattttacttcactagctaaaggaaacactgggatttaaaatgacaaacctagcaacaanttaggca

SEQ ID NO: 2030 - DNA, 734 bp, Homo sapiens
  misc_feature 2, 3, 4, 5, 6, 7, 8, 9, 10, 11, 12, 13, 14, 15, 16, 17, 19,21, 22, 25, 27, 28, 31, 32, 34, 35, 36, 38, 39, 40, 41,42, 43, 44, 46, 47, 49, 50, 52, 53, 57, 58, 60, 61, 62,63, 65, 66, 69, 72, 76, 77, 78, 80, 82, 84, 91, 92, 93,95: n = A,T,C or G
  misc_feature 106, 107, 109, 110, 112, 113, 115, 116, 118, 119, 123, 124,133, 134, 136, 139, 142, 143, 144, 145, 146, 149, 150, 151,163, 165, 172, 199, 225, 264, 285, 342, 346, 350, 354, 357,394, 402, 412, 447, 464, 467, 473, 475, 496, 506, 512: n = A,T,C or G
  misc_feature 549, 554, 560, 564, 576, 583, 625, 638, 646, 647, 657, 660,675, 682, 683, 690, 711, 714, 718, 719, 721, 724: n = A,T,C or G
cnnnnnnnnnnnnnnnntnanntanannaanntnnntnnnnnnntnntnntnnaatnntnnnntnntanttntctnnnantntnttattannntntaatatttttnntnntnntnntnnttanntagtaggtnngngcngcnnnnntannncgagtcgaatcncnaccgcancggcgggggctgtaccaaaagaatgtncatagcagcattattatgtcatagtnaagagctggaagcaacccagttgtgcatcaatgggtagnaatggatgactaaattgcagngtattcttacaataaaatactatagagcaatgaaaataaataaaactattggtgttnttantgcnaaancanaccattgggataaaattcttttaccaaccaaattgtntcaggacnaaaattgttngcctcaaaaccccaaaaaaaattacagcatggtcncctattgatatccccantantaatgncnacagggtttccacgaaataanggtggattcngcttangtcttaccttccttttttgggggaaaagggaagttgnagggnaaaaangggnaccttgtagtangaagttntttggccaaaaagcggggggccatccccgcggggtggtgttnggtaaaatttttncttatttnntcccccaggnggnccagcgttggttggntttttgnnattggangccattgctttcacctttttngtngggnnanatnttcaatctgg

SEQ ID NO: 2031 - DNA, 463 bp, Homo sapiens
  misc_feature 5, 7, 11, 211, 350, 355, 371, 372, 377, 387, 390, 392, 396,412: n = A,T,C or G
ggtcncnaacnctacttagggcgaattggagctccccgcggtggcggccgaggtacccgcttgtgtggtttccatgatccttcttctgcctggaatgaggctcctcttgagtcctgagagcttcatttctgtctgtcttttgggctgtgccaaagcccctctgccttcgtggactccccactgattcattaccaattttcctctccctctngggctcttcttagattgcaaatggtgcctctggattgggtaccaagacttgcagtgccttattttgataccactaatatgagaccatgttatatgcctcttgagatatcattccctttctagcaatagacagtgataangcatngccgtatagaggggtnnaacgntacggacttntgnangttnattccattctcaatangacaaaaagtaaaaaggtatgctaaatttcaatcctttcacacagttaaat

SEQ ID NO: 2032 - DNA, 525 bp, Homo sapiens
  misc_feature 16, 36, 41, 63, 94, 225, 317, 433, 477, 483, 494, 497, 503,525: n = A,T,C or G
gtggccttcgaaagcncgaattggatttccccgcgntggcngccgaggtacaaggcatttttnctaactgtaactttccacttaatcaacattnaacaaaaacactcatttctgaacattcagtgcattcatgattaatcttaattacaccacaaaggtatttttcaatggtgattttgcgggagtggggtaacagtttcgaaagcaacattgtcagaaacatangttgaatttaaagggttctttctggtgactttgacttctgcttttttagaagaccttacacagagttgtatttatttctcctggaatatttnaagcaattcagagtgaaagggtatacattccaatttgcgtatgagataaaatttagttacattgaggaagctattttctttagttacagggaaaaaaaatttgtaggggctttttnggaagcctctttgattttctaatagggagggaaatccctggagncacctnggtcccaaacnagnaaaatncatcttctttccttcatttgcn

SEQ ID NO: 2033 - DNA, 453 bp, Homo sapiens
  misc_feature 267, 359: n = A,T,C or G
actacttacgggcgaattggagctccccgcggtggccggcccgcccgggcaggtactaacttggtcagggcagggtgacacataaaattaaccatcacagggaagggtagggctggagaggcagactgtggccaggttacaatgcgctgaggctaaggagactgtgtttatcctgtacgccaagtgggtcttacctctgaaagtcttttggggtggggacattcatggacttcaagagacctgtgaatgccctaagattataaagtnaaatctgtgagtctgtaactaaagctaaagctatttttctggggcccaccatctaaagaagattctgaagccttagggtagccgtggagganacatgaaggtccattttgcatggtagaaccctgcctggctcttgctacagtgtgggaggaccaggttttgcaatgtggaggtgtggcacgcatg

SEQ ID NO: 2034 - DNA, 511 bp, Homo sapiens
  misc_feature 189, 219, 230, 233, 234, 235, 239, 266, 273, 309, 351, 439,469: n = A,T,C or G
ggcgaattggagctccaccgcggtggcggccgaggtacgcgggggtacgatggaaggaagaacttgtgtgcttagacctgacgctgggaggagatgctgccacctaggttacttgtaggaccctatacggcaacctcctttgccaggaactatttataaacatcctgcaggaaaatgagtctatatgtnagaatacacatttcccacctttgcccaccngttggaataanaannntaanaacaaaaaaggttccttgcccggggcnggcccgntcgagcaaaaaggccagcaaaaaggccaaggaaacncgtaaaaaggcccgcgttgctggcgtttttccataggctccncccccctgaccgagcatcacaaaaaatcgacgctcaagtcagaggtggcggaaaacccgacaggactataaaagataccaggcgtttnccccctggaagcttcccctcggtgccgctntcccttggtttcccgaacccctggcacggcttttaacccgga

SEQ ID NO: 2035 - DNA, 855 bp, Homo sapiens
  misc_feature 5, 11, 15, 19, 20, 22, 23, 25, 27, 28, 29, 34, 36, 40, 42,46, 52, 55, 56, 60, 63, 67, 71, 72, 77, 86, 87, 88, 89,93, 95, 98, 110, 171, 308, 334, 337, 344, 357, 370, 395,431, 433, 437, 454, 465, 481, 488, 492, 518, 531, 539, 541: n = A,T,C or G
  misc_feature 545, 575, 595, 599, 624, 646, 648, 657, 664, 665, 674, 679,682, 753, 783, 804, 834, 835, 854: n = A,T,C or G
tatancatttntttnttanntnnantnnnctatntntctntntatnttattntannttanatnttanttannttatntaattgttnnnntatntnatntaggtaacatcntatagggcgaattggagctccaccgcggtggcaggaattcgatatcaagcttatcgatacncgtcgacctcgagggggggcccggtacccagcttttgttccctttagtgagggttaattgcgcgcttggcgtaatcatggtcatagctgtttcctgtgtgaaattgttatccgctcacaattccacacaacataccnagccggggagcataaaggtgttaaanccntgggggntggccttaaatgnaggtggagctaanctcacaatttaaatttggccgtttngccggcttcaacttgcccccgctttttcccaagttncngggnaaaaacccctggtccgntggccccaagncttggccattttaaantggaaantacnggggctcaaaactgcccgccgggggnggaggaaggggcngggttttntnggcnggttaaatttgggggggccggccttccttntccccggccttttccccttncggnctttcaaccttggaacctttccggnctttggccggcccttccggggntnccggttttnccggggnnctttggccnggggnccngaaaggcccggggttaatttccaaaggccttttcaaacctttccaaaaaaagggggccgggggttaaaaantaaacccgggggtttttaattttccccaanccaagggaaaaaatttctaangggggggggggaaattaaaacccggccaannggggaaaaaaaataaaaant

SEQ ID NO: 2036 - DNA, 437 bp, Homo sapiens
  misc_feature 3, 183, 342: n = A,T,C or G
ctncttagggcgaattggagctccccgcggtggcggccgcccgggcaggtaccaggttcaaatagtcatgcacgctcatcataatcaatgagcgaggacataaagtaggaaaaatgcatcaccatggtgagcaaggaaagcaagttattggaggcacatgttaacacataaaatataaaattnatatgatcacactgggaaaggcttgcctgagccccagtttgaatgcctacaataagatgagatgcacaacaaaaagcaagagaacctgatcaagtgggtgacctggccatggtgctctcatcagtggggacccaaatgcttatgtggactcaccaggtntcgaattagacatgaataggagtgtttgttgtgatggcaagaaactatataatcaaatgaatacaatgaaactttaaaaataattgtaagatctt

SEQ ID NO: 2037 - DNA, 443 bp, Homo sapiens
  misc_feature 1, 4: n = A,T,C or G
nagngccctaacgactacttagggcgattggagctccccgcggtggcggccgaggtacaaaaatgaccacagcagcatatttcctaagatccctgaaaacagctaagatccctgaaagcaactcaaatgtccatcaatagaatgatggatattattctaccccattgaaacatttcacacacaagttttgtgttttatttttatttatttaatttatttatttttcatgtcaatgaattcaaaggaatcacacataggtttttgtatagaaacagcactacatttctgtaggaggtgctttttcaagatatctgtgttcactagttgtagcctgcgactagagggctctgtgtcaagcattccacttgctactgattcctaccatacccctctttgttcccagaacattgtacctgcccgggcggccgctctaagaactagta

SEQ ID NO: 2038 - DNA, 447 bp, Homo sapiens
  misc_feature 9, 11, 20, 211, 226, 334, 389, 392, 402, 403, 406, 421, 441,446: n = A,T,C or G
ttcgcgctntnctactatanggcgaattgttctccccgcggtggcggccgcccgggcaggtacgcgggtggcccgaagttatgatagatgaggagggtatttatctgagacaaacactgggaggaaatttcaaccagaaggaatattagcatgtgagaaggcatagaatcataaaaggcatgttgtgttaagggagctacaagtagcacantttggctaatgtgtncagttgagaagagagttgtgggcagataggttggaaaagaagccgtgagttagatcatgaagagcctcggtaaggagtttgttttaaaaacaattactgaaagattcnaagcaaacacaatatttataggttggaaatattgccagaatggaaaaaataaaanaanaataaaaaanngtncctcggccgctctanaactagttggatcccccggngctgna

SEQ ID NO: 2039 - DNA, 466 bp, Homo sapiens
  misc_feature 61, 106, 183, 225, 228, 233, 235, 256, 291, 295, 305, 307,316, 319, 348, 387, 396, 399, 407, 410, 421, 422, 424, 427,436, 448, 450, 458: n = A,T,C or G
ctactatagggcgaattggagctccccgcggtggcggccgaggtacaccgcacaccacacnggtggctgcactttttgggtggtggggtggggatgggggcaggtntgatcaatcatccaaaccagggcatttttaagagtaaaaggaggctctactgataacatgctgcaacaacagatgtnactaggaacggccgctctagaacttgtggatcccccgggctncangaatncnatatcaagcttatcgataccntccacctcgagggggggcccggtacccagcttttnttcnctttagtgangnttaattgcnctnctaggcgtaaatcatgggtcataatctgntttcctgtgtgaaattgttatccgctcacaattcccacntacatatcntanccgcggtngcntaaagttgtannanctntgcgggttncctaatgagttnanctaactcncattaaat

SEQ ID NO: 2040 - DNA, 836 bp, Homo sapiens
  misc_feature 3, 5, 10, 12, 16, 17, 18, 20, 24, 25, 27, 30, 33, 34, 35,37, 39, 44, 54, 66, 67, 71, 80, 82, 87, 92, 93, 100, 104,105, 106, 108, 109, 120, 121, 136, 249, 338, 353, 364, 365,378, 381, 382, 387, 392, 395, 406, 409, 444, 454, 465: n = A,T,C or G
  misc_feature 479, 498, 514, 516, 522, 527, 533, 543, 561, 579, 598, 605,606, 608, 618, 623, 626, 629, 630, 632, 640, 647, 657, 663,664, 669, 674, 675, 687, 688, 689, 698, 700, 702, 703, 704,713, 717, 718, 726, 729, 730, 736, 737, 744, 745, 756: n = A,T,C or G
  misc_feature 766, 773, 775, 788, 791, 793, 795, 796, 805, 806, 808, 816,817, 825: n = A,T,C or G
ccnanctttntntttnnntnatcnntnctnaannnantnttttnctacttttcnaaattctatttnntttnttcgtcatntngtttntattnntattttntctnnntnnttcttttcttnntttggtaggggctcnacgactcactatagggcgaattggagctccaccgcggtggccgagcggccgcccgggcaggtactttactcacccttcctctgacagaaaaggatgaagtcaagggcctggtngaggcaccactaagaaaggcatttgaaaggaccaaagagagtgaccagcaagcattttttgcaaggctggagggagctgacaagcttcncatgaaagggctggnactcaccccanntggttggaaaaangcnntccantcctnggngtttacctttngtngccttgccccattaaaaatcaccaacccatcaagnaacatttggnttggaactttnaaaatacccaaacnagcaattaattttttatcnctttccttctacccananttctcnttggnggaagnggcctttggncaaaagattcttggccanatttccaacccgtggttngccccaaggccaattgggntttcaanngngtttttcctnggggnagntannangggccccnttctccnttttgcctcnttcttnnaaacntcggnntgggtgggcctnnnttttgcttntngnnnggcccaatngggnncatgtaanaanntaatgnnaaggccnntttgtaaaccntaaggtcccnccctccntntaccttgggtacnccncntnnattttaaannanaagggggnncacccctnaaatttccccc

SEQ ID NO: 2041 - DNA, 469 bp, Homo sapiens
  misc_feature 3, 194, 299, 414, 444: n = A,T,C or G
ctnctatagggcgaattggagctccaccgcggtggcggccgcccgggcaggtacacttctagattgctcaatgaaaagaactctcaatccaaaatttatgtctagcaaagatatccttccagagtgaaagagtaataaaaagagtctcagatgaagcaaagctgctttaaaagaattgctttaagagagttagntagaagagaaatgataccagaagaaaacttgatatattaggaattatagaacagcaataatgtatatacctgggtaaacataatagatgatgagttcttctaagnaactttgaaaattgaaagcagaaattttaacatcattttaaaacaatttatttcaaaataatagaagaaaagcatgaaactggcagattggaggcatcgttagcatgcccccccnacttggaaagaaaatattaatagtgtgtangagattcaccctgaactttttccaa

SEQ ID NO: 2042 - DNA, 475 bp, Homo sapiens
  misc_feature 2, 3, 4, 7, 8, 9, 10, 24, 27, 437: n = A,T,C or G
gnnnggnnnnttcggcgcatactnctnctatagggcgaattggagctccccgcggtggcggccgaggtacctggagtcatggtgaaaaaggaatcgtggttatgtcactggatcaaagaaaaaggagaggaaatcagaaaaatgacaataattttttccttggtatagtcccagtaaaggataaacaaaaaggaattattccccgaatgcccctcctctttatgaatacacagtatacccagctggcttgactatgatcattacacatctgcactgcatccatgcatttgcagccttttgacaatacatatggcccatatgcttcaagagagatgaaatgcttgtctcagttaatctacatgtctacttctggcttcaatcttaatctttcagatgttcacaaatcaacaagataatgtttctagagtaatgtgggnaaatcaacaacctcagatatagatacttcacagggaga

SEQ ID NO: 2043 - DNA, 481 bp, Homo sapiens
  misc_feature 2, 3, 4, 5, 13, 14, 16, 17, 21, 27, 37, 48, 74, 93, 101,333, 464, 478: n = A,T,C or G
gnnnnggtttganncnntttngaaacncctatagggntttttggagcnccccgcggtggcggccgcccgggctngtacgcggggaggttactngtaggacnttatacggcaacctcccttgccaggaactatttataaacatcctgcaggaaaatggcctctttaaatatacacttctctgtagtgtatgctagaaatggagtggctggaataaaagtggctgaatcatcttcaactctagtagctgagaccaatgatgctgacctccctcaaaagctgcatttctgaatttctgaaggcaaactgtctgcctatattgtacctcggccgctntagaactagtggatcccccgggctgcaggaattcgatatcaagcttatcgataccgtcggacctcgagggggggcccggtacccagcttttgttccctttagtgagggttaaattggcgcgcttggcgtanatcatggtcattanctg

SEQ ID NO: 2044 - DNA, 479 bp, Homo sapiens
  misc_feature 2, 9, 309, 348, 364, 410, 412, 479: n = A,T,C or G
gntccctanacactactatagggcgaattggagctccccgcggtggcggccgaggtactttgtgggttgagggtaggaggctaagactgccagggaggaggtcccggcttcctgctcctaccggggagcagcaggtgaaactctgaccacgttactgcaatcctgacatgctccagtggagtggcgacatttttcttctcgaggcagcttttggggatctgtattactttcatgtggaccacttgctagttttgatttcaatgataatttcttccttccttttttttttttcaagcctgtcttcatagngatgacaacacatttaacatttgttttgattttaccctntcctctctccccactnttagtctgcagccaggaaagcagggaccgtcctgtgcgaaactgtnanaccaccacaacccacactttggagggaagaaatgcccaatgggggaccctgtcttgcaatggcctgn

SEQ ID NO: 2045 - DNA, 474 bp, Homo sapiens
  misc_feature 6, 8, 11, 13, 16, 19, 22, 435, 452: n = A,T,C or G
actacntncantntanggnganttggagctcccgcgcggtggcggccgaggtacgcggggaagctaaagaggagatcgtttttatttcatagcgagaaatggcttccgggtgctgagtagaaggggcaggcatgtttggtagtgggctctccagccctagaagcatgcacgcagagcctctgtaggactttttttttcttttttttaagacagagtcttgctctgtcgcccaggctggagtgcaatggcgcaatctcggctcacttcagcctccacctctcgggttcaggcggttctcctgcctcagcctcccgagtggctgggattactaggcacctgccaccacacctggctaattttttttttgtatttttagtagagacagtgtttcgccatgttggccaggctggcctcgaactcctgacctcgggtggnccgcctgtctcggcctnccaaagtgctgggattacaact

SEQ ID NO: 2046 - DNA, 491 bp, Homo sapiens
  misc_feature 2, 3: n = A,T,C or G
gnngtgcccgtatcactacttagggcgaattggagctccccgcggtggcggccgcccgggcaggtacgcgggagactcattaaagctcctaaatgtatacatatgtatcagaaaggaatgtgaactattaaggaaacttggtagacaatgaaagaatttggaaatctgaaggctttaagaggcagagttgtagatcaacccctcataccaaataatcaactccaaagtaaaactttgaatataaactaactgcaaaagaaaccttcgcgatatgtaataagatggcacacgctgtgcttctgaggacatgtgtggatgcctcccccacgtcctcggccgctctagaactagtggatcccccgggctgcaggaattcgatatcaagcttatcgataccgtcgacctcgagggggggcccggtacccagcttttgttccctttagtgagggttaattgcgcgcttggccgtaatcatggtcatagctgtttcc

SEQ ID NO: 2047 - DNA, 490 bp, Homo sapiens
  misc_feature 2, 3, 5, 47, 50, 76, 103, 106: n = A,T,C or G
gnngntatttcgacgcaatttggaatatccggcgaattgttttctcnccncggcggccggccgcccgggcaggtanttggagtgctgtgttgagtcctttttnttnttttgttcctgagaaagagagattcacaaacttcccacattcttccagtggcatctaaggatcccttcctaaatggcctttctcccagccaatagactgaagcaaaccatgtccctgatgcttcctgcccaccaccatccattctttcaaccaacagcttctccgggctttcacgtgccatgcactttgctaagagcttgagggaaatacagcaatgaagaagagatgatttctgtttggaccagtgctcagggattcctcctattagaaatcaaagaggcttccaaaagccctacaattttttccctgtaactaaagaaaatagcttctcaatgtaactaaattttatctcatacgcaaattggaatgtataccctttcactc

SEQ ID NO: 2048 - DNA, 481 bp, Homo sapiens
  misc_feature 481: n = A,T,C or G
ggccctatcactacttagggcgaattggagctccccgcggtggcggccgcccgggcaggtacatggcaactgaggcaaagagctcttaagttacttatcgaagaatatccaataagtaggtggtagagctaggatttacacccagcagtcagctttattttcaaccatgcaatgcctccttaacaaaggagataggttaggaaaggcagatctgggcaagtgttgtattatacaacaataaaaaggctgtggggtcaaaagctatggctgttaaaaggttagggtaacagccagaagaatcacccttaggaaggttaaaatttaggacaacatctatgatccttcccaaaccttaaatcttcatgcttttaaaaagaatttcctgcccaggcgtggtggctcacgcctgtaatcccagcactttgggagggggaggcgggccggatcacctgaggtcaggaattccagaccaacctggccn

SEQ ID NO: 2049 - DNA, 471 bp, Homo sapiens
  misc_feature 2, 10, 18, 71, 85, 101, 102, 279, 335, 454: n = A,T,C or G
gnaaattgangcaatttngaatatccggcgaattgtttctccccgcggcggcggccgaggtacaggggtgngagaaagaatgctngaaagggcagcctttnnagtgttttatcctaagaccatctaaacgtgaaggaagtccattccagctagtgaggaggtgcctaacacagtggtttcaagcctgactgaccacagagttaccttggtagcatattaaaggtcctcattcctacatctcaccctagagcacctgttttcaaccttagatgcacagtngaattaactgagaaacttttaaagccatcattatccaggcccaaatgcagtattgntaaatcagaatttctggggatgttgctcaggcatcttttttaaatttaattccctgggtataccaaggattgaaacttggacactctatatactggaatcaaaagctccatgggccaantgtgtaggaaatctgta

SEQ ID NO: 2050 - DNA, 433 bp, Homo sapiens
  misc_feature 433: n = A,T,C or G
ggcgaattggagctccaccgcggtggcggccgcccgggcaaggtactctgcgttgttaccactgcttcccgggactctgcgttgttaccactgcttcccgggactctgcgttgttaccactgcttcccgggactctgcgttgttaccactgcttcccgggactctgcgttgttaccactgcttcccgggactctgtgttgttaccactgcttcccgggactctgcgttgttaccactgcttcccgggactctgcgttgtacctcggccgctctagaactagtggatcccccgggctgcaggaattcgatatcaagcttatcgataccgtcgacctcgagggggggcccggtacccagcttttgttccctttagtgagggttaattgcgcgcttggcgtaatcatggtcatagctgtttcctgtgtgaaattgn

SEQ ID NO: 2051 - DNA, 477 bp, Homo sapiens
  misc_feature 2, 3, 6, 16, 72, 87, 97, 192, 217, 219, 412, 418, 422, 453: n = A,T,C or G
tnnctntccttcggcntattgtttctccccgcggtggcggccgcccgggcaggtacctggaaagatgaacangattgcagcagattnagacaggtanaaggagagagattccaagtggaaggataaaggagagggaagagaagcaaagagtgcagcttccaagaagattttctggtttctggcactggtcanagatagcttgggaggaaataggcananagggttttggagaaacagagctgcaaagccaagttagatgttaggtgagttgaaaaaagaacttatggcaaaagcagagggagggaggtatttactctgaacagagatgacagggtggggaggacagattgttttgagtaggcaaaggccaggagcatgaagcaagctaggaattgggaggctggcctagaancatgcnccanctgggaaagggacaaaagttaaagtatgacnaaccctttgtgttcaccaaatttc

SEQ ID NO: 2052 - DNA, 422 bp, Homo sapiens
  misc_feature 6: n = A,T,C or G
gagctntgcgtaataccgactcactatagggcgaattggagctccaccgcggtggcggccgcccgggcaggtaccacatccctgtcattcaacaacttccccttccaagagggtgctgatcacagactttttactgtaatggggccaagaagagacagttacttaaactaatagagttctttttataacaagagactgcagatatcgctacagaaagaataccggttgtatgtttcctgaattattactaaaaacatttgtttaaatgtctcatatataaaggtgatggccttatctctgacaatgaattagggcctaaggagaaagcaaattggaacactgttaacattaaaaagtcagctagtctttgaaataccattataatactaccttggaagatacagcaactcaaatcttgttca

SEQ ID NO: 2053 - DNA, 646 bp, Homo sapiens
  misc_feature 5, 8, 241, 447, 480, 497, 529, 571, 619, 631, 642, 643, 644,645: n = A,T,C or G
cgtanacnactcactatagggcgaattggagctccaccgcggtggcggccgaggtactcttggttttttaagacaaagagcaaatcctcccctgccaggattgacttttggctcttttttttcaaacctcactgctttttggtttagttgtcataaaatgccaagcaccatgaacagggctccatgaaggggctcagaggtaggagggctgtgattaggagaaggcttggactgatgggcnatttgagtgctcagaattagagtgagggggtgggggtgctgcagggacagatgctggggaaagacaccctgaagggcaaagggagcaacaatggctgcagtacctgcccgggcggccgctctagaactagtggatcccccgggctgcaggaattcgatatcaagcttatcgataccgtcgacctcgagggggggcccggtacccancttttgttccctttagtgagggttaattgcgcncttggcgtaatcatggncatagctgtttcctgtgtgaaattggtatccnctcacaattccacacaacataccaagcccgggagcataaagngtaaagcctggggtgcctaatgagtgagctaactcacattaattgcgntgcgctcactgnccgctttccannnng

SEQ ID NO: 2054 - DNA, 669 bp, Homo sapiens
  misc_feature 602, 649: n = A,T,C or G
cgtaatacgactcactatagggcgaattggagctccaccgcggtggcggccgaggtacgcaacatgacattggctggtgtaaagatcttacaattatttttaaagtttcattgtattcatttgattatatagtttcttgccatcacaacaaacactcctattcatgtctaattcgatacctggtgagtccacataagcatttgggtccccactgatgagagcaccatggccaggtcacccacttgatcaggttctcttgctttttgttgtgcatctcatcttacccgcgtacctgcccgggcggccggctctagaactagtggatcccccgggctgcaggaattcgatatcaagcttatcgataccgtcgacctcgagggggggcccggtacccagcttttgttccctttagtgagggttaattgcgcgcttggcgtaatcatggtcatagctgtttcctgtgtgaaattgttatccgctcacaattccacacaacatacgagccgggagcataaagtgtaaagcctggggtgcctaatgagtgagctaactcacattaattgcgttgcgctcactgcccgctttccagtcgggaaacctgncgtgccagctgcattaatgaatcggccaacgcgcggggagaggcggnttgcgtattgggcgctcttc

SEQ ID NO: 2055 - DNA, 664 bp, Homo sapiens
  misc_feature 87, 248, 543, 563, 570, 578, 584, 592, 595, 601, 615, 624,630, 633, 641, 645, 656: n = A,T,C or G
agctcgcgtaatacgactcactatagggccgaattggagctccaccgcggtggcggccgcccgggcaggtacaagatgcacacagangggaggagctgccttgagcgagaggacactgtcctggaggtgacagagagcaacaccacatcagtggtggatggggataaacgggtgaaacggcggctgctcatggaaacgtgtgctgtcaacaatggaggctgtgaccgcacctgtaaggatacttgggnaggtgtccactgcagttgtcctgttggattcactctccagttggatgggaagacatgtaaagatattgatgagtgccagacccgcaatggaggttgtgatcatttctgcaaaaacatcgtgggcagttttgactgcggctgcaagaaaggatttaaattattaacagatgagaagtcttgccaagatgtggatgagtgctctttggataggacctgtgaccacagctgcatcaaccaccctggcacattttcttgttgcttgcaacccaagggtacctcgccgctttagaactantggattcccccgggctgcangaattcnatattaancttatncatacccntcnacctcnaggggggggccccngtaccccancttttnttnccttttantganggttaattgcnccccttgg

SEQ ID NO: 2056 - DNA, 671 bp, Homo sapiens
  misc_feature 4, 77, 79, 235, 237, 487, 566, 575: n = A,T,C or G
gtancgactcactatagggcgaattggagctccaccgcggtggcggccgcccgggcaggtactcacagctgcatcangntgaatatcatctccctgcactgccatttcatttgagcagggctttgcctgtcaagaacattcatatcttttgataaacagtgcattttttccctgatagtctgtatgggacagcctccttgtttgcatctgaaggacagggacttcaggacctccngntgtggtcaccaaggaatcacattcaaacttctcagcaaggtgttatggtccttctcagtttgcctacgatccattgaggcaaaggtttccttctctcaatacaccctctgctttagccagggggacctcccactgtcctctctatgtgttctatttgttcctgactgttagtacctcggccgctctagaactagtggatcccccgggctgcaggaattcgatatcaagcttatcgataccgtcgacctcnagggggggcccggtacccagcttttgttccctttagtgagggttaattgcgcgcttggcgtaatcatggtcatagctgnttcctgtgngaaattgttatccgtcacaattccacacaacataccagcccggagcataaagtgaaagcctggggtgctaatgagtgagctaactcacattaattg

SEQ ID NO: 2057 - DNA, 666 bp, Homo sapiens
  misc_feature 5, 118, 308, 643: n = A,T,C or G
gagcnccgcgtaatacgactcactatagggcgaattggagctccaccgcggtggcggccgaggtactttttttttttttttttttttttttggggtggagtcttgctctgtctcccangctggagtgcagtgctgctatcttggctcactgcaagctccacctcctgggttcacaccattctcctgtctcagcctcccgagtagctgggactacaggtgcccgccaccacacccgactaattttttgtatttttagtagagacggggtttcaccatgttagccaggatggtgttgatctcctgacctnatgatctgcctgtttcagcctcccaaagtgctgggattacaggcgtgagccaccatgcctggcctctcacatgccttttactcctttgtggttgctgctcatctttcaactttcctttctaatttgtcaaatgttttcctatttccagcttcattagaagctgtagcatctttgcatatttcctgttaacaattggcttggtctatttctctgtagaacacccagagtcctgaaagtagtaaagaccttggccttgaagcaggagaccagggttcaagtttcatttctgtcatttatgagatgggtagcacaggaaagttgcatctctattttangcttaattttcttacctgtaaaa

SEQ ID NO: 2058 - DNA, 649 bp, Homo sapiens
  misc_feature 78, 504, 616: n = A,T,C or G
gtatacgactcactatagggcgaattggagctccccgcggtggcggccgaggtacaaggcatttttgctaactgtaanttcccacttaatcaacaaaaacaaaaacactcatttctgaacattcagtgcattcatgattaatcttaattacaccacaaaggtatttttcaatggtgattttgcgggagtggggtaacagtttcgaaagcaacattgtcagaaacatagttgattttaaaggttctttctggtgactttgacttctgcttttttagaagaccttacacagagttgtatttatttctcctggaatatttcaagcaattcagagtgaaagggtatacattccaatttgcgtatgagataaaatttagttacattgagaagctattttctttagttacagggaaaaaattgtagggcttttggaagcctctttgatttctaataggaggaatccctgagcactggtccaaacagaaatcatctcttcttcattgctgnatttccctcaagctcttagcaaagtgcatggcacgtgaaagcccggagaagctgttggttgaaagaatggatggtggtgggcaggaagcatcagggacatggtttgcttcantctattggctgggagaaaggccatttaggaagg

SEQ ID NO: 2059 - DNA, 670 bp, Homo sapiens
gcgtaatacgactcactatagggcgaattggagctccaccgcggtggccgagcggccgcccgggcaggtacgcgggagactgagtggggtcacagcacagggcactgtcttgcctggctttatctgagccaatcacacctctcctggccactatctgtggtctagccccctttgtgcagaaagagaaagaagagccttgaggaccagcctagtcaggctgaagaaatgtcaacaattgggagttttgaaggattccaggctgcgtctctgaagcaagagggagatgaccaaccctctgagactgaccacctatcgatggaggaagaggacccgatgccaagacagatttcaaggcagtcaagtgtgaccgaatcaactctttaccccaatccttatcatcagccttatatctcacggaagtactttgctacacggccgctctagaactagtggatcccccgggctgcaggaattcgatatcaagcttatcgataccgtcgacctcgagggggggcccggtacccagcttttgttccctttagtgagggttaattgcgcgcttggcgtaatcatggtcatagctgtttcctgtgtgaaattgttatccgctcacaattccacacaacatacgagccgggagcataaagtgtaaagcctggggtgcctaatg

SEQ ID NO: 2060 - DNA, 693 bp, Homo sapiens
  misc_feature 2, 84, 85, 244, 245, 246, 319, 423, 538, 608, 637, 662: n = A,T,C or G
cnccgtaatacgactcactatagggcgaattggagctccaccgcggtggcggccgcccgggcaggtacagatgcaaaaactcanntccacaaatgtcccgtggcttatctaaagctacacagctagaaagtgtcaggacgggaatgaaacacagagagtgacctgtctctgcgcctgtgccctgtccatactttctgtccccaagagagcaacaccatagatccaaaccaaaaccccaaaaagnnnaactctaggaaatgcacaggctccacttcactcccaggagattcctatggatctatggaagaaaatgaggcantgaccgaggaatttaaactctggggtgaaatcatttcctcccaattattcttcgtctaatgacaaagatgcaccactaaaaaagtgacctatgccctctaacantctgagaagatctgagtcacatggcaattctatttgtaacattacaagattatagaggccagttttcccttcctcctcattttcttctcccccatgacatttttagaaagtcacnttcatttattttatcattagctatatgccttaacccctggcctttaagtgcagagcctgcttcactctanttgtaaattagctcattcctctgcagggnggaccccagataatctaagcatgtnttccttccacacataaaaggcccctgtttgc

SEQ ID NO: 2061 - DNA, 674 bp, Homo sapiens
  misc_feature 236, 535, 545, 608, 617: n = A,T,C or G
cgtatacgactcactatagggcgaattggagctccaccgcggtggcggccgaggacagagggtctgcaatcatggtgcagccacaagtaaaatatgagtagtatttatgcttttctacactctcatatgtattgcccagcttatttacttatttacctgtttacttattaaaaccaacccccaccttcagtggatgaatatttgccaactcaaatgacagtaaaaaacggtgcagnggctcacgcctgtaatcccagcactttgggaggctgagacaggcagatggcttggggccgggagtttgcgaccagcctggccaacatggtgaaaaccagtctctactgaaattacaaaaagtagccgggcatggtgccacatgcctgtaatcccagctacctcggaaggctggggcacgagaattgcttgaacccaggaggcagaggttgcaatgagctgagattgcaccactgcactccagcctgggtgacagagtatgactctgccaaaaaaaaaaaaaaaaaaagagtagaagganttatagcccncagaattttccagggcaattccagaggagacccaacaactgttagggactatgcccctattgntaaaatgtntatataacctctgaggctgatgactttgagaacacctacactgacttgaaaattcac

SEQ ID NO: 2062 - DNA, 676 bp, Homo sapiens
  misc_feature 5, 7, 655: n = A,T,C or G
gagcncngcgtaatacgactcactatagggcgaattggagctccaccgcggtggcggccgaggtacccatcaggaatatccggctcagaagccagggcctcagagactgttctctcactgagacctagagagggaactccctgtgttattctcactgatggcccaggaaccacccttgcaagtcatgaccaccagcatcatgtagcactggaactgatctgggcaatgacctctgtctaaacttctgaatcccctccgacaaagacccaagacagcagcatggccatgcagctgtgctcacatcccacccctgcactggccaggagcacatctatctttcctttgggtagggtcacccaactgctctgccacttccagctgtgaaaggcatctatgtgacagacccctctgcagtttgaaactgtgtgacaactttaacacccaactcggcatctgcatgggtttctgagaattacctatatcttttgtggtctctttgctgattccctgtttcattaaaaaaaaaaaaagtgactcgtgatccctgagttcctatatagccaattttactcactagctaaagaaacactgtatttaaaatgacaaacctagcaacaattaggcaagctctcatcaggactccatgcagggctgngtgattgcctaaaaaagtctt

SEQ ID NO: 2063 - DNA, 684 bp, Homo sapiens
  misc_feature 420, 421, 422, 423, 424, 425, 426, 427, 428, 429, 430, 431,432, 433, 434, 435, 436, 437, 438, 439, 440, 441, 442, 443,444, 445, 446, 447, 448, 449, 450, 451, 452, 453, 454, 455,456, 457, 458, 459, 460, 461, 462, 463, 464, 465, 466: n = A,T,C or G
  misc_feature 467, 468, 469, 470, 471, 472, 473, 474, 475, 476, 477, 478,479, 480, 481, 482, 483, 484, 485, 486, 487, 488, 489, 490,491, 492, 493, 494, 495, 496, 497, 498, 499, 500, 501, 502,503, 504, 505, 506, 507, 508, 509, 510, 511, 512, 513: n = A,T,C or G
  misc_feature 514, 515, 516, 517, 518, 519, 520, 521, 522, 523, 524, 525,526, 527, 528, 529, 530, 531, 532, 533, 534, 535, 536, 537,538, 539, 540, 541, 542, 543, 544, 545, 546, 547, 548, 549,550, 551, 552, 553, 554, 555, 556, 557, 558, 559, 560: n = A,T,C or G
  misc_feature 561, 562, 563, 564, 565, 566, 567, 568, 569, 570, 571, 572,573, 574, 575, 576, 577, 578, 579, 580, 581, 582, 583, 584,585, 586, 587, 588, 589, 590, 591, 592, 593, 594, 595, 596,597, 598, 599, 600, 601, 602, 603, 604, 605, 606, 607: n = A,T,C or G
  misc_feature 608, 609, 610, 611, 612, 613, 614, 615, 616, 617, 618, 619,620, 621, 622, 623, 624, 625, 626, 627, 628, 629, 630, 631,632, 633, 634, 635, 636, 637, 638, 639, 640, 641, 642, 643,644, 645, 646, 647, 648, 649, 650, 651, 652, 653, 654: n = A,T,C or G
  misc_feature 655, 656, 657, 658, 659, 660, 661, 662, 663, 664, 665, 666,667, 668, 669, 670, 671, 672, 673, 674, 675, 676, 677, 678,679, 680, 681, 682, 683, 684: n = A,T,C or G
gagcgcgcgtaatacgactcactatagggcgaattggagctccaccgcggtggcggccgaggtacatataccaactgtcagtctgtggtaacgtaaccttagacgctgcctgaccacaaagtttggaaattatatttaaccaaaagaaaataaataaatacagcaggttaccttgtgaagaaatgccatgtgttctaaacaaattaaacccacggtctgacatttgtatccatctatgcttttgaattgaggggattcctttagttataatgtgccaagtgagattagtaaccaacaggaggcttagaaaagcaaatccatactggttcatcacacacaagaaagaaatacctggctaaaatgaaatcactacagaagcatcgaggacattgttttttaaaatgggtacccttgcccggnnnnnnnnnnnnnnnnnnnnnnnnnnnnnnnnnnnnnnnnnnnnnnnnnnnnnnnnnnnnnnnnnnnnnnnnnnnnnnnnnnnnnnnnnnnnnnnnnnnnnnnnnnnnnnnnnnnnnnnnnnnnnnnnnnnnnnnnnnnnnnnnnnnnnnnnnnnnnnnnnnnnnnnnnnnnnnnnnnnnnnnnnnnnnnnnnnnnnnnnnnnnnnnnnnnnnnnnnnnnnnnnnnnnnnnnnnnnnnnnnnnnnnnnnnnnnnnnnnnnnnnnn

SEQ ID NO: 2064 - DNA, 655 bp, Homo sapiens
  misc_feature 369, 496, 601, 605, 615, 627, 628, 633: n = A,T,C or G
cgcgtaatacgactcactatagggcgaattggagctccaccgcggtggcggccgcccgggcaggtacgcgggagactagagggaattgcacctcctcactgcacaagattagctaatgcgggtgaagctattggagtgcttctgaagaaatcaaaattttgttattatgattatacttgttagatatttctttcttgagattctaaatgaatttgtttaatgccttattggtccattcctgcatctctgcttccagaagccaagaacaagttctctggatcacataggctcctctgctgcttcctcagaaacagagatggtacctcggccgctctagaactagtggatcccccgggctgcaggaattcnatatcaagcttatcgataccggcgacctcgagggggggcccggtacccagcttttgttccctttagtgagggttaattgcgcgcttggcgtaatcatggtcatagctgtttcctgtgtgaaattgtnatccgctcacaattccacacaacatacgagccgggagcataaagtgtaaagcctggggtgcctaatgagtgagctaactcacattaattgcgttgcgctcactgnccgntttccagtcnggaaacctgtcnngccanctgcattaatgaatcggccacg

SEQ ID NO: 2065 - DNA, 650 bp, Homo sapiens
  misc_feature 548, 621, 627, 644, 650: n = A,T,C or G
cgtatacgactcactatagggcgaattggagctccaccgcggtggcggccgaggtacgcggggcaccgggcactgttctaagccctggagatacatcagtgagccagatagacacatttcttgctttcatggaacttaaatagtatatgtaatcaacctgtttttccattttttagaacaatgaagagtagggcaggagtggaatgagggtcaaaagtaagccttggagtcctgccccaaagttttctaattagattatgaaggaaagaccttatgcaactaaattacccatttgggtcaggtgtagtggctcatgcctgtaatctcagcactttgggaggtcaaggcaggagatcacttgaggccaggagttcaagaccagcctggcaaacatagggagacctcatctctataacaaatttaaaaattggtagggcataatgatgtgcacctgtggtcccagctactcaggaggctgaggtaggaggatcatttgagactgggaagtcgaggctgcagtgagctgtgatcgcgccaccgcactccancctgagagacaaagggtcattttgtgtcctattgatatttgtaataattaatggtcttgttgccccttagggntgcttnctttttccttttccctnactctn

SEQ ID NO: 2066 - DNA, 672 bp, Homo sapiens
  misc_feature 5: n = A,T,C or G
gagcnccgcgtaatacgactcactatagggcgaattggagctccaccgcggtggcggccgaggtactcacagctgcatcacactgaatatcatctccctgcactgccatttcatttgagcagggctttgcctgtcaagaacattcatatcttttgataaacagtgcattttttccctgatagtctgtatgggacagcctccttgtttgcatctgaaggacagggacttcaggacctcctgctgtggtcaccaaggaatcacattcaaacttctcagcaaggtgttatggtccttctcagtttgcctacgatccattgaggcaaaggtttccttctctcaatacaccctctgctttagccagggggacctcccactgtcctctctatgtgttctatttgttcctgactgttagtacctgcccgggcggccgctctagaactagtggatcccccgggctgcaggaattcgatatcaagcttatcgataccgtcgacctcgagggggggcccggtacccagcttttgttccctttagtgagggttaattgcgcgcttggcgtaatcatggtcatagctgtttcctgtgtgaaattgttatccgctcacaattccacacaacatacgagccgggagcataaagtgtaaaagcctggggtgcctaatgagtgagcta

SEQ ID NO: 2067 - DNA, 643 bp, Homo sapiens
  misc_feature 589, 615: n = A,T,C or G
gcgtaatacgactcactatagggcgaattggagctccaccgcggtggcggccgcccgggcaggtaccttgccctgaggaacctacaagttagcctccctctaatcctggcattcaaagtcctccaccttccgaattacacctgttttttcaggcattgtctcccactttcctagcaagcctttggctccaggaaactgttctgttcattgacgacagaatgtattttgtcccgtatgcctcccttcaatctgaagttcatttttagtaattttttttattagcagtgactttccccatttactaatgcctttctctttagctcatttagaattccctggaagtcatcatgttttccttctgaattgctatcatattctgtctctgtgtctaatcagaaagttaggtgagctgctgtctcagctcctgtgttaatccaggtacctcggccgctctagaactagtggatcccccgggctgcaggaattcgaaatcaagcttatcgataccgtcgacctcgagggggggcccggtacccagcttttgttccctttagtgagggttaattgcgcgcttggcgtaatcattggncatagctgtttcctgtgtgaaattgntatccgctcacaattccacacaacatac

SEQ ID NO: 2068 - DNA, 612 bp, Homo sapiens
  misc_feature 605: n = A,T,C or G
cgcgtatacgactcactatagggcgaattggagctccaccgcggtggcggccgaggactagctcccttacttactaatcatagaactgtggatatatttttaaaaattattagtgtctttagttttctcacttgtaaaacactgaacagagctcctgtcattcagagctgttgtcaacatgacagttaagagtgtaaagcactgacctggggcctgcatgtagtaggcactcaataaatcgtggcaatcatgacattggtgatgatgacactcagtaactagtaggtgttattattaaaagtcgcaaaaacagctagtacctgcccgggcggccgctctagaactagtggatcccccgggctgcaggaattcgatatcaagcttatcgataccgtcgacctcgagggggggcccggtacccagcttttgttccctttagtgagggttaattgcgcgcttggcgtaatcatggtcatagctgtttcctgtgtgaaattgttatccgctcacaattccacacaacatacgagccgggagcataaagtgtaaagcctggggtgcctaatgagtgagctaactcacattaattgcgttgcgctcactgnccgcttt

SEQ ID NO: 2069 - DNA, 629 bp, Homo sapiens
  misc_feature 620, 625: n = A,T,C or G
gtatacgactactatagggcgaattggagctccccgcggtggcggccgcccgggcaggtacgcgggtctacgtggtggttggagctgccaagggcacccaacctggtcaacaaattagtgtgctcagccagaggcagtcctggatgaattcaggctgcaaagtgccctgtgacctggcccttgggaagccacgctctgatgaggtttgcagatctccccgcaatccagggccaagcatgaatgaaggtgttaggcatttcaaggatgcgactaggacgtgctgctgtctcaggttcacattatactgaaataaggtcctggccagacagcaccatatagttaattgaggtgtttgggagatactcaaatgggtgttaatatttcccaggcaatattttcaaggctcagagcctctattcaaaagataactgaaaggctagcaaagggtattgcaaaggtatattctgatttctgacaggaagatcgatggatggacagtgagagtataaagaccttagggtttggggttctgatttggccttggtctgttgaatgattgattcattcattcaacaaatatttatacaacacccacagggggcaggcattgtgctgactgnggaanatca

SEQ ID NO: 2070 - DNA, 640 bp, Homo sapiens
  misc_feature 640: n = A,T,C or G
cgcgtaatacgactcactatagggcgaattggagctccaccgcggtggcggccgcccgggcaggtacttagcacatgccaggaactgttctaaaccccttctgtgcgttagcccatttaatcctcatagtaactcagtgctatctctgatatccctgtgttacagttgagggaactgaagtatagagaaggttgagcaatggcatgcagggcatagagaagggtaaggacgactgtaaacaggtcaagaagtggaaggtcagataatttaccctgattgcacaactggtaagtagtggtaccagattgaggctcaagtcttcactctcacagcagggtactttctgcaacttcagtttcttattaccatttctgccactagcatgcagaagacgctagatgattattgaatcagtgagtttctcataggtaagatggaaatgattcttagtagggttttgtgagaataaaattggaaattgtacatttctttaacatattttgggtagtaatagctattatgatgctagtggataacacaagagttcaaaggtgaccagttagatgtggaggagggaaagagttgtgtaaaagatgatgagtgttctagcctgatggtgagaggacagtattaatggaan

SEQ ID NO: 2071 - DNA, 644 bp, Homo sapiens
gagcgcgcgtaatacgactcactatagggcgaattggagctccaccgcggtggcggccgaggtacgcggggagactagagggaattgcacctcctcactgcacaagattagctaatgcggaagccaagaacaagttctctggatcacataggctcctctgctgcttcctcagaaacagagatggtacctgcccgggcggccgctctagaactagtggatcccccgggctgcaggaattcgatatcaagcttatcgataccgtcgacctcgagggggggcccggtacccagcttttgttccctttagtgagggttaattgcgcgcttggcgtaatcatggtcatagctgtttcctgtgtgaaattgttatccgctcacaattccacacaacatacgagccgggagcataaagtgtaaagcctggggtgcctaatgagtgagctaactcacattaattgcgttgcgctcactgcccgctttccagtcgggaaacctgtcgtgccagctgcattaatgaatcggccaacgcgcggggagaggcggtttgcgtattgggcgctcttccgcttcctcgctcactgactcgctgcgctcggtcgttcggctgcggcgagcggtatcagctcactcaaaggcggtaatacg

SEQ ID NO: 2072 - DNA, 656 bp, Homo sapiens
  misc_feature 480, 489, 490, 491, 492, 493, 494, 495, 496, 497, 498, 499,500, 501, 502, 503, 504, 505, 506, 507, 508, 509, 510, 511,512, 513, 593, 607, 613, 644, 656: n = A,T,C or G
cgcgtatacgactcactatagggcgaattggagctccaccgcggtggccggccgcccgggcaggtacagaaagaggtttgtctgacttaaagtgatttgtcatctttcttttccactctcctaatcatgatctgttccccctcctggcccaataacttaatgcttgtaaactgaggtccacccatttatggaaaactctttagtcacagagttccctaacaccctcctctgtccctgtgacaatgtattgaaaataacagttgaagcccctctagagggtggtccaagttgactaaatgggtagcagtgaacagcattaaaaggaaaagaaataaaataacacacagaaaatgtcatagagcaacatacagcaaagatagtttttataaaaagtggtttttaattacacatatgccatatttcactgaatcacagtcatcatttattggaaaatgcaaaactttatgtatcacccagaangaaaaaaannnnnnnnnnnnnnnnnnnnnnnnngtccctcggccgctctagaactagtggatcccccgggctgcaggaattcgatatcaagcttatcgataccgtcgacctcnagggggggcccggnacccancttttgttccctttagtgagggttaattgcncccttggcgtan

SEQ ID NO: 2073 - DNA, 573 bp, Homo sapiens
  misc_feature 396, 398, 404, 412, 419, 428, 429, 437, 439, 442, 446, 448,452, 455, 458, 460, 462, 464, 465, 470, 475, 477, 479, 481,485, 488, 489, 490, 491, 494, 496, 497, 499, 500, 505, 506,511, 512, 514, 515, 518, 520, 521, 524, 526, 528, 529: n = A,T,C or G
  misc_feature 530, 533, 534, 535, 537, 540, 542, 543, 544, 545, 546, 548,549, 550, 551, 554, 555, 556, 557, 558, 559, 560, 561, 565,566, 567, 568, 569, 570, 571, 572: n = A,T,C or G
agcgcgcgtaatacgactcactatagggcgaattggagctccaccgcggtggcggccgtgccttgtagcggcagccgggtcgggaacaaggtgtagttctggttgccgtcgccagccacgccgtccgccgtgccgccggctgtgcccgcgccggcgggctggccgtacagcgcgggcggcccggccgcgtagatgccgtccgcgcccgtgatctggtccacgccgtacaccaccacggcgccagcggcaaaggccggccccagggtggtcagcagctgctgtcgcatggtggcggccgcgctgaagcgcgtggcttcgtccgccgcgctgctgctgagcacgggactgaccgtggcgctgatggcgtcggccagcgtctgtttcgccttgagtacnangcccanctggccgntctgcancggatcggnnatgccttnangcnatcnangatntangcngncngnncatangtggncnanangaanttnnnnatngnntnnaaaannttttnnanncanannttnangnnnaannntnttnannnnnannnnatnnnnnnnnattnnnnnnnna

SEQ ID NO: 2074 - DNA, 763 bp, Homo sapiens
  misc_feature 7, 9, 12, 15, 18, 20, 24, 25, 26, 27, 31, 32, 33, 35, 39,45, 47, 51, 185, 214, 232, 240, 255, 277, 283, 299, 305,310, 314, 327, 329, 334, 336, 342, 367, 380, 381, 383, 392,398, 401, 412, 413, 417, 423, 434, 442, 444, 445, 446, 454: n = A,T,C or G
  misc_feature 460, 464, 466, 467, 470, 471, 476, 480, 483, 484, 485, 486,493, 494, 498, 509, 510, 518, 526, 527, 530, 531, 536, 538,541, 544, 547, 548, 552, 555, 558, 568, 569, 576, 577, 579,580, 581, 583, 585, 586, 591, 592, 594, 595, 601, 605: n = A,T,C or G
  misc_feature 607, 608, 613, 616, 621, 622, 627, 628, 632, 634, 637, 638,639, 640, 643, 646, 647, 652, 653, 655, 660, 662, 665, 674,676, 678, 682, 683, 684, 688, 692, 695, 696, 697, 699, 702,703, 708, 710, 711, 712, 715, 719, 726, 729, 731, 739: n = A,T,C or G
  misc_feature 743, 744, 745, 746, 748, 753, 754, 756, 760, 761, 762: n = A,T,C or G
acgactntnaanganttnanttcnnnntttnnncnaaanggggcntntacnactcatttagggcgaattggagctccaccgcggtggcggccgcccgggcaggtaccttgccctgaggaacctacaagttagcctccctctaatcctggcattcaaagtcctccaccttccgaattacacctgtnttttcaggcattgtctcccactttcctancaagcctttggctccagnaaactgcntctgttcattcgacnacagaatgtattttgtcccgtntgcctnccttcaatcctgaagntcattnttagnaatnttttttattagcngngactntncccatnttactaatgcctttctctttagctnatttagaattccnngnaagtacatnaagttnacnttatgaattgnntatncatatnactgtagtgtntgtctaantnnntaaaaggngaggtnaagntnntgnnctaantctnacnnnngtttaanntaangaaaaccttannccgattanagaacctnntgnnacccnancgntcnttnnaagnaantanatattgaagnntaatcgnnannnancnncaccnncnnaggganagcngnntaacnaancttannttacnnattncntcnnnnatntanncccgnntnggatncnatnattgataanantngatnnncccnttcnaannnanatnnattcncnnncantatncccgatngtngntaacaaanatgnnnncnttaannanaggnnnc

SEQ ID NO: 2075 - DNA, 640 bp, Homo sapiens
  misc_feature 296, 297, 299, 300, 301, 302, 303, 304, 305, 306, 307, 308,309, 310, 311, 312, 313, 314, 315, 316, 317, 318, 319, 320,321, 322, 323, 324, 325, 326, 327, 328, 329, 330, 331, 332,333, 334, 335, 336, 337, 338, 339, 340, 341, 342, 343: n = A,T,C or G
  misc_feature 344, 345, 346, 347, 348, 349, 350, 351, 352, 353, 354, 355,356, 357, 358, 359, 360, 361, 362, 363, 364, 365, 366, 367,368, 369, 370, 371, 372, 373, 374, 375, 376, 377, 378, 379,380, 381, 382, 383, 384, 385, 386, 387, 388, 389, 390: n = A,T,C or G
  misc_feature 391, 392, 393, 394, 395, 396, 397, 398, 399, 400, 401, 402,403, 404, 405, 406, 407, 408, 409, 410, 411, 412, 413, 414,415, 416, 417, 418, 419, 420, 421, 422, 423, 424, 425, 426,427, 428, 429, 430, 431, 432, 433, 434, 435, 436, 437: n = A,T,C or G
  misc_feature 438, 439, 440, 441, 442, 443, 444, 445, 446, 447, 448, 449,450, 451, 452, 453, 454, 455, 456, 457, 458, 459, 460, 461,462, 463, 464, 465, 466, 467, 468, 469, 470, 471, 472, 473,474, 475, 476, 477, 478, 479, 480, 481, 482, 483, 484: n = A,T,C or G
  misc_feature 485, 486, 487, 488, 489, 490, 491, 492, 493, 494, 495, 496,497, 498, 499, 500, 501, 502, 503, 504, 505, 506, 507, 508,509, 510, 511, 512, 513, 514, 515, 516, 517, 518, 519, 520,521, 522, 523, 524, 525, 526, 527, 528, 529, 530, 531: n = A,T,C or G
  misc_feature 532, 533, 534, 535, 536, 537, 538, 539, 540, 541, 542, 543,544, 545, 546, 547, 548, 549, 550, 551, 552, 553, 554, 555,556, 557, 558, 559, 560, 561, 562, 563, 564, 565, 566, 567,568, 569, 570-640: n = A,T,C or G
cgcgtaatacgactcactatagggcgaattggagctccaccgcggtggcggccgcccgggcaggtaccagcacgtgcagaaaagaaagagtctccgcttgtctttgtctgattctcctgtcctctccatggaagttacattttctgtaaaggatgagctgaaaattctcctggtcgttgccagttgaacttctgctgtgctctgggaaggcattctcactctgtttatgttgtctaaagtgcagacatggatgtgcaggtttgctagaacctcctgaggatgtgcaattggggggnntnnnnnnnnnnnnnnnnnnnnnnnnnnnnnnnnnnnnnnnnnnnnnnnnnnnnnnnnnnnnnnnnnnnnnnnnnnnnnnnnnnnnnnnnnnnnnnnnnnnnnnnnnnnnnnnnnnnnnnnnnnnnnnnnnnnnnnnnnnnnnnnnnnnnnnnnnnnnnnnnnnnnnnnnnnnnnnnnnnnnnnnnnnnnnnnnnnnnnnnnnnnnnnnnnnnnnnnnnnnnnnnnnnnnnnnnnnnnnnnnnnnnnnnnnnnnnnnnnnnnnnnnnnnnnnnnnnnnnnnnnnnnnnnnnnnnnnnnnnnnnnnnnnnnnnnnnnnnnnnnnnnnnnnnnnnnnnnnnnnnnn

SEQ ID NO: 2076 - DNA, 664 bp, Homo sapiens
  misc_feature 455, 479, 537, 612: n = A,T,C or G
gtaacgactcctatagggcgaattggagctccaccgcggtggcggccgcccgggcaggtacacagcaccccctggagttggcaatgcggaggctctggctgttgatcccaaagaagatttaaattgcagtccattatatttttctctcagacttctgtttctttgaatattccaaatagattaaaatataatctggaatcttaagtgccttagtcctatttaggtaacaatactatctaagaaaaactctagaagaattcacaacaaattgctaactatagttatctctggcagaggaagtagcatgggaaaggcgtgggaaaattttttactttgacttttttttcacctggtgtcctcggccgctctagaactagtggatcccccgggctgcaggaatttcgatatcaagcttatcgataccgtcgacctcgaggggggggcccggtaccccngcttttgtttcctttagtgagggntaattgcgccgcttgggcgtaatcattgggtcatagctgtttcctgtgtggaaattgntatccgcttccaatttccacacaacattacgagccgggagccataaagtgtaaaagccctggggtgccctaatgnggtgagcctaactcacatttaaattggcgttgcgctcactggcccgcttttc

SEQ ID NO: 2077 - DNA, 699 bp, Homo sapiens
  misc_feature 210, 249, 268, 285, 292, 298, 299, 305, 327, 340, 383, 432,433, 434, 466, 469, 480, 481, 482, 484, 499, 500, 510, 526,536, 538, 574, 584, 585, 599, 617, 624, 626, 634, 635, 642,645, 646, 652, 661, 663, 664, 670, 673, 683, 687, 690: n = A,T,C or G
  misc_feature 692: n = A,T,C or G
agcccgcgtaataccgactcactatagggcgaattggagctccaccgcggtggcggccgcccgggcaggtacgcgggggagatgctgccacctaggttacttgtaggaccctatacggtaacctcctttgccaggaacctatttataaacatcctgcaggaaaatgcagtgaagtagaagagacagggatatcccagtaaggttatcgcnaaacatcaagagaagatgagaggagtctatatgtcagantacacatttcccaccttgnccaacagtagaaagaanaaaaaanaaaaannaaggtnccctgggccgctctagaactantggatcccccggngctgccaggatttcaatatacaaagcttaatcgataacccgtncgacctccgagggggggggccgggttcccagctttttgtttccctttannngaggggttaattagccccgctttggcgtattnatngggtcatagcnnntntcctgtgtagaaatnngtatccgctnacattccccacgacanacaagccggngncataaaagtgtaaagcctggggtgcctaattgagtnagcttacttnnattaattgcgttgncctcactgccccctttcnaatccgngnaacctgtnntgccagntgnntttatnaatccggcnanncccggnagnaggcggtttncgtnttngngcgcctt

SEQ ID NO: 2078 - DNA, 721 bp, Homo sapiens
  misc_feature 239, 248, 279, 280, 287, 291, 334, 356, 363, 377, 381, 397,426, 438, 448, 466, 475, 480, 483, 485, 487, 490, 492, 495,505, 526, 538, 544, 549, 553, 556, 558, 562, 563, 567, 568,580, 584, 601, 602, 617, 625, 638, 646, 668, 677, 683: n = A,T,C or G
  misc_feature 685, 691, 696, 700, 701, 707, 711, 714, 715, 719, 720: n = A,T,C or G
gagcgcgccgtaataccgactcactatagggcgaattggagctccaccgcggtggcggccgaggtacaggggtgggagaaagaatgctggaaagggcagccctgaagtgttttatcctaagaccatctaaaccgtgaaggaagtccattccagctaggtgaggaggtgccctaacacagtggtttcaagcctgactggccacagagttaccttgggtagcatatttaaagtcctcattnctacatctnaccctaagagcaccctgttttcaacccttannatgcccnagtnaaattaactgaaaaaccttttaaaagcccttcatttatccaangccccaatggcaagtattggtnaatcagnaaatttttgggggntggntgcttcaaggccttcnttttttaaaatttaattcccttggggatnccccagaattgnaactttgacncctctatattctcgaatnaaaaagctnccctnggncnanggngnagngaaatcttgnattttttttaaattacccatnctttgagccggnccgccngggcnaggnacncngggnntctnntttttttttaangggnattttcaactttttgannaatcaaaaaaaaganttttggtngaaaaactttacnggtttctnaaggggtttggaggaaaaaaanaaccccgcnatcacntntttggnattgncttnntttttncggngtnnaaannt

SEQ ID NO: 2079 - DNA, 679 bp, Homo sapiens
  misc_feature 243, 376, 557, 564, 621, 626, 639, 646, 656: n = A,T,C or G
cgcgtaatacgactcactatagggcgaattggagctccaccgcggtggcggccgaggtacaggggtgggagaaagaatgctggaaagggcagccctgaagtgttttatcctaagaccatctaaacgtgaaggaagtccattccagctagtgaggaggtgcctaacacagtggtttcaagcctgactgaccacagagttaccttggtagcatattaaagtcctcattcctacatctcaccctanagcacctgttttcaaccttagatgcacagtagaattaactgagaaacttttaaagccatcattatccaggcccaaatgcagtattgttaaatcagaatttctggggatgttgctcaggcatcttttttaaatntaattccctgggtataccaagattgaaacttgacactctatatactgaatcaaaagctccatgggcaaggtgtaggaatctgtattttttaattaccatctcccaaatctacttagttttgtggagcagcgtttgaaatggacttgtgacaggtatggatgaagtgaacaagagacagtanaaatcangcgtggtggggaattgaaagaaatggcagtggcagtggttccagtttagagattctnaagangctcaagatgganccctcanagactttcantggtttgggtcttggccttgctg

SEQ ID NO: 2080 - DNA, 647 bp, Homo sapiens
actactatagggcgaattggagctccaccgcggtggcggccgcccgggcaggtacttttttttttttttttttttggagtctttaagattatctctatgttggctggctgcggtggctcatgcctgtaatcccagcactttgggaggccaaagcgggaggccaacactggggctacccaagagttgaccaaaggtgatattaatacatatgcttacttattaccttgttcgcacagttctagtgtaagtcttgaaaatcaagtaaatttggaaacatagttgcacaaactctctcatgagtcacacagttaatccagaatattatttctaagttatcataaagccaacaagcaaatatgatgtacctcggccgctctagaactagtggatcccccgggctgcaggaattcgatatcaagcttatcgataccgtcgacctcgagggggggcccggtacccagcttttgttccctttagtgagggttaattgcgcgcttggcgtaatcatggtcatagctgtttcctgtgtgaaattgttatccgctcacaattccacacaacatacgagccgggagcataaagtgtaaagcctggggtgcctaatgagtgagctaactcacattaattgcgttgcgctcactgcccgc

SEQ ID NO: 2081 - DNA, 664 bp, Homo sapiens
  misc_feature 111, 147, 183, 491, 608, 620, 635, 664: n = A,T,C or G
gagcgcgcgtaataccgactcactatagggcgaattggagctccaccgcggtggcggccgaggtaccatctctgtttctgaggaagcagcagaggagcctatgtgatccanagaacttgttcttggcttctggaagcagagatgcangaatggaccaataaggcattaaacaaattcatttanaatctcaagaaagaaatatctaacagtataatcataataacaaaattttgatttcttcagaagcactccaatagcttcacccgcattagctaatcttgtgcagtgaggaggtgcaattccctctagtctcccgcgtacctgcccgggcggccgctctagaactagtggatcccccgggctgcaggaattcgatatcaagcttatcgataccgtcgacctcgagggggggcccggtacccagcttttgttccctttagtgaggggttaattgcgcgcttggcgtaatcatggtcatagctgtttcctgngtgaaattgttatccgctcacaattccacacaacatacgagccgggagcataaagtgtaaagcctggggtgcctaatgagtgagctaactcacattaattgcgttgcgctcacttgnccgctttccagncgggaaacctgtcgngccagctgcattaatgaatcgggccaacn

SEQ ID NO: 2082 - DNA, 665 bp, Homo sapiens
  misc_feature 447, 473, 543, 553: n = A,T,C or G
gcgtaataccgactcactatagggcgaattggagctccaccgcggtggcggccgaccttggcgccaagccgcgccagaccttcatgcaagtgattttgccgctgtcggtgccggggattgcggcgggttcgatctttacgttctcgctgaccctgggggacttcatcgtgccgcagctggtgggccccgccgggttacttcgtcggcggtatggtctacgcgcaacaaggcgctatcggcaacatgcccatggccgctgcattcaccttggtgccaatcgtgctgatcgcggtttacctgtccatcgtcaaacgtctgggggccttcgatgcactctgaaaaagcttcgtggagtctaaaaatcgcggcctggggccgggttggttttcctgcacttcccgatcctgatcatctttcctctacgccttcaacaccgaagaaagcggngttcagcttttccaccccagggcttnacccctgaagtggtttcagcgtggccttctcgcggccggacgtgctggaagccatcaaagctgtcgctgnaaatcgccgncatcgccacgctgattgcgatggtactcggcaccctggcgtcggcggcgttgtatcgcccgggagttcttcggcaagcaaggcatcttcgcttgatgctgatcctgcccgat

SEQ ID NO: 2083 - DNA, 669 bp, Homo sapiens
gagcgcgcgtaataccgactcactatagggcgaattggagctccaccgcggtggcggccgaggtaccagtaaatgctgcctcatcacctacacccttggtttacttctcagataaactcaggaagtttaaatggcattctgagaatctgtagctgcaacatagtgagcccaggagtcccggtccagcagctagtattaaattctctgttgctagcttggacctctctcgatatctaggaattgtctgcagtgtggggtggcacagtaacaaccatttgtttctcaacaagaatctgataatgttgcttgaacctcctgaaccagtgctgcatgctctgcttcttcatatgtttgtccttagatttgaccaaaaacaataactgataatgtaatacagattccccagctccctgtgagctgggttgagcccaggaagtctgtacctgcccgggcggccgctctagaactagtggatcccccgggctgcaggaattcgatatcaagcttatcgataccgtcgacctcgagggggggcccggtacccagcttttgtcccttttagtgagggttaattgcgcgcttggcgtaatcatggtcataagctgtttcctgtgtgaaattggtatccgctcacaatttccacacaacatacgagccgggagcataaag

SEQ ID NO: 2084 - DNA, 650 bp, Homo sapiens
  misc_feature 5, 354, 360, 366, 382, 409, 411, 412, 415, 421, 425, 426,428, 430, 439, 441, 446, 448, 453, 454, 469, 472, 474, 475,478, 479, 481, 484, 488, 489, 490, 495, 496, 497, 500, 502,503, 505, 509, 511, 512, 513, 514, 515, 516, 517, 518: n = A,T,C or G
  misc_feature 519, 523, 524, 525, 526, 527, 528, 529, 530, 531, 532, 533,534, 535, 536, 538, 539, 540, 541, 542, 543, 544, 545, 547,548, 549, 550, 551, 552, 553, 554, 555, 556, 557, 558, 559,560, 561, 563, 564, 565, 566, 567, 568, 569, 570, 571: n = A,T,C or G
  misc_feature 573, 574, 575, 576, 577, 578, 579, 581, 582, 583, 584, 585,586, 587, 588, 589, 590, 591, 592, 593, 594, 595, 596, 597,598, 599, 600, 601, 602, 603, 604, 607, 608, 609, 610, 611,612, 613, 614, 615, 616, 617, 618, 619, 620, 621, 622: n = A,T,C or G
  misc_feature 623, 624, 625, 626, 627, 628, 629, 631, 632, 633, 634, 635,636, 637, 638, 639, 640, 641, 642, 644, 645, 646, 647, 648,649, 650: n = A,T,C or G
gagcncgcgtaataccgactcctatagggcgaattggagctccaccgcggtggcggccgaggtacagggaactattggagcacctaagaggagcacctaccttgaatttaggggttagcagaggcatcctgaaaaaagtcaaagctaagccacaatctataagcagtttaggaattagcagaaccgtgccgtggtgaggagatgccaaaggcaagaagagaagagtattccaaacaggagggattccaaagagagaagagtatcccaaacaacatttgcacaaacctgatggggagagagaatgtggggtggggatggatgatgagactgaagaagaaaagccaggtctagatnatcagnggcctngtcctgcccgggcggncgctctagaactagtggatcccccggncnngcnggaatncganntnangcttatcgntncccgncnacctnnagggggggcccgggnccnannttnngntcntttnnnagggnnnatngnncncttngnnnnnnnnntggnnnnnnnnnnnnnngnnnnnnnngnnnnnnnnnnnnnnncnnnnnnnnncnnnnnnngnnnnnnnnnnnnnnnnnnnnnnnngcnnnnnnnnnnnnnnnnnnnnnnntnnnnnnnnnnnntnnnnnnn

SEQ ID NO: 2085 - DNA, 672 bp, Homo sapiens
  misc_feature 13, 231, 234, 494, 577, 607, 633, 645, 667: n = A,T,C or G
ggttttcgtgtancactcactatagtttgaattggagctccaccgcggtggcggccgcccgggccggtactaacagtcaggaacaaatagaacacatagagaggacagtgggaggtccccctggctaaagcagagggtgtattgagagaaggaaacctttgcctcaatggatcgtaggcaaactgagaaggaccataacaccttgctgagaagtttgaatgtgattccttnttnaccacagcaggaggtcctgaagtccctgtccttcagatgcaaacaaggaggctgtcccatacagactatcagggaaaaaatgcactgtttatcaaaagatatgaatgttcttgacaggcaaagccctgctcaaatgaaatggcagtgcagggagatgatattcagtgtgatgcagctgtgagtacctcggccgctctagaactagtggatcccccgggctgcaggaattcgatatcaagcttatcgataccgtcgacctngagggggggcccggtacccagcttttgttccctttagtgagggttaattgcgcgcttggcgtaatcatggtcatagctgtttnctgtgtgaaattgttatccgctcacaattncacacaaacataccaacccgggagcntaaagtgtaaancctggggtgcctaatgagtganctaac

SEQ ID NO: 2086 - DNA, 715 bp, Homo sapiens
  misc_feature 219, 266, 277, 318, 334, 344, 380, 390, 409, 411, 433, 451,453, 471, 480, 508, 518, 528, 534, 551, 553, 572, 575, 586,600, 605, 631, 634, 636, 643, 658, 672, 673, 674, 676, 679,691, 696, 697, 699, 702: n = A,T,C or G
cgcgcgtaataccgactcactatagggcgaattggagctccaccgcggtggcggccgctctagaactagtggatcccccgggctgcaggaattcgatatcaagcttatcgataccgtcagacctcgagggggggcccggtacccagcttttgttccctttagtgagggttaattgcgcgctttggcgtaatcattggtcataagctgtttcctgtgtgnaattgttatccgctcacaattccacacaacataccgagccgggagcntaaagtgtaanagcctggggtgcctaatgagtgagctaactcacattaattncgttgcgcttcactgnccgctttccnagtccgggaaacctgtcgtgccagcctggattaatnaatcgcccancgccccgggggagagggcngntttgccgttatttgaggcgctnttccgctttcctcgcttnanttgacttcgcttgcgctncggtccgtncgggcttgcgggcgaagccggtattcancttcactcanaaaggcgggnattacnggttatccacagaattnangggataaccgcaggaaaanaancatgtgaagcnaaaaggccagcaanaaggnccaggaacccgtaagaaaggcccgcngtngnttggcgntttttccataagctnccgcccccctgagnnncnatnacaaaaatcggncgctnnangtngagaggggggcgg

SEQ ID NO: 2087 - DNA, 656 bp, Homo sapiens
  misc_feature 512, 559, 588, 594, 596, 605, 613, 626, 627, 644, 646, 648: n = A,T,C or G
gagcgcgcgtaatacgactcactattagggcgaattggagctccaccgcggtggcggccgcccgggcaggtacctggataatggtgactgaatgattgatggaactgactttttgctttccttttttctttctccactggtggccctatgttcctattaagagaatcttccagccaggcgtggtggcacacgcctgtaatcccagactttgggagactgaggcaggcagatcacgaggtcaggagattgagaccatcttggctaacacggtgaaaccctctctctactagaaatacaaaaaattagccaggtgtggtggcacgcgcctgtggtcccagctactcgggaggctgaggcaggagaatcgcttgggccgaggaggcggaggttgcagtgagccgagatcccgccactgcactccagcctgggtgacagagcaggactctgtctcaaaaaaaaaaaaatctttctgcctgttttttgaaatagccgcaggagtgaggcaatctcanctcctgctcacacatctttttgtagaatttccatcacaaagaatggntattagaatctctactcttggcccaaagngtctgntngcttttctnccaatcangaaatcacactgnnggatcttgatcttaatntntnggacatgc

SEQ ID NO: 2088 - DNA, 679 bp, Homo sapiens
  misc_feature 24, 32, 46, 52, 399, 407, 424, 431, 434, 441, 446, 449, 450,451, 452, 453, 455, 458, 459, 460, 461, 466, 467, 473, 474,475, 477, 482, 483, 484, 489, 492, 493, 496, 497, 500, 501,502, 505, 508, 511, 514, 515, 516, 517, 524, 525: n = A,T,C or G
  misc_feature 526, 528, 530, 534, 535, 536, 540, 541, 543, 547, 548, 552,553, 554, 557, 559, 560, 564, 566, 567, 568, 571, 572, 576,578, 582, 583, 587, 591, 594, 595, 597, 598, 599, 601, 604,605, 607, 608, 609, 611, 613, 614, 615, 621, 623, 627: n = A,T,C or G
  misc_feature 631, 634, 636, 638, 640, 641, 642, 643, 645, 648, 654, 655,657, 658, 659, 664, 665, 666, 667, 670, 671, 673, 674, 675,678: n = A,T,C or G
gagccccgcgtaataccgaccttnactaatangggccgaattgganctccancgcggtggcggccgcccgggcaggtactctgcgttgttaccactgcttcccgggactctgcgttgttaccactgcttcccgggactctgcgttgttaccactgcttcccgggactctgcgttgttaccactgcttcccgggactctgcgttgtcaccactgcttcccgggactctgcgttgttaccactgcttcccgggactctgcgttgttaccactgcttcccgggactctgcgttgtacctcggccgctctagaactagtggatcccccgggctgcaggaattcgatatcaagcttatcgataccgtcgacctcgagggggggcccggtacccagcttttgttnccctttantgagggttaattgcgcncttggcntantcatggncatanctnnnnncntgnnnnaaaannttattnnntntaaannncacanaanntannaannnaanaanaanaannnntaaaatnnngnantttnnnaaannanttanncaannnatnannaatntnnnaannaatnanaatnntatnattnaannannntntcnntnnnantnnnataaanantttnttanaanantntnnnnantanattttnnannntaaannnnatnnannnttnt

SEQ ID NO: 2089 - DNA, 672 bp, Homo sapiens
  misc_feature 360, 372, 379, 386, 395, 400, 403, 404, 411, 412, 413, 414,415, 419, 420, 426, 429, 431, 434, 436, 439, 442, 444, 446,447, 448, 449, 450, 451, 452, 457, 459, 460, 461, 462, 463,464, 465, 466, 468, 469, 470, 471, 472, 473, 474, 476: n = A,T,C or G
  misc_feature 477, 478, 479, 480, 481, 482, 483, 484, 485, 486, 487, 488,489, 490, 491, 492, 493, 494, 495, 496, 497, 498, 499, 500,501, 502, 503, 505, 506, 507, 509, 510, 512, 513, 514, 515,516, 517, 518, 519, 520, 521, 522, 523, 524, 525, 526: n = A,T,C or G
  misc_feature 527, 528, 529, 530, 531, 532, 533, 534, 535, 536, 537, 538,539, 540, 541, 542, 543, 544, 545, 546, 547, 548, 549, 550,551, 552, 553, 554, 555, 556, 557, 558, 559, 560, 561, 562,563, 564, 565, 566, 567, 568, 569, 570, 571, 572, 573: n = A,T,C or G
  misc_feature 574, 575, 576, 577, 578, 579, 580, 581, 582, 583, 584, 585,586, 587, 588, 589, 590, 591, 592, 593, 594, 595, 596, 597,598, 599, 600, 601, 602, 603, 604, 605, 606, 607, 608, 609,610, 611, 612, 613, 614, 615, 616, 617, 618, 619, 620: n = A,T,C or G
  misc_feature 621, 622, 623, 624, 625, 626, 627, 628, 629, 630, 631, 632,633, 634, 635, 636, 637, 638, 639, 640, 641, 642, 643, 644,645, 646, 647, 648, 649, 650, 651, 652, 653, 654, 655, 656,657, 658, 659, 660, 661, 662, 663, 664, 665, 666, 667: n = A,T,C or G
  misc_feature 668, 669, 670, 671, 672: n = A,T,C or G
gagcgcgcgtaataccgactcactatagggcgaattggagctccaccgcggtggcggccgcccgggcaggtaccttgagtaacattgggaaggaccactcattgaatgaaccatcaatcaaatgatacatactgcatccttccagaaaacatctcaaagcactttgcagatgttaacattaaagttaaactgagtgtaagggagccttacaaaataggccagcttgaatgccttatccaaaaatgtagaactgcttcaaggcaggtgtcagtgttttaaagaaattgaagcatcttgggttgaaagaaaaataagaaaatctctatggatgtaaagatcattcccagttcaaaagctaangatgggcagcanggtccgngtcctgnaaaattgtnaactntgnnaaatttnnnnnccannatccangcntnctncntgntgnangnnnnnnnctttntnnnnnnnnannnnnnntnnnnnnnnnnnnnnnnnnnnnnnnnnnngnnntnntnnnnnnnnnnnnnnnnnnnnnnnnnnnnnnnnnnnnnnnnnnnnnnnnnnnnnnnnnnnnnnnnnnnnnnnnnnnnnnnnnnnnnnnnnnnnnnnnnnnnnnnnnnnnnnnnnnnnnnnnnnnnnnnnnnnnnnnnnnnnnnnnnnnnnnnnnnnnnnnnn

SEQ ID NO: 2090 - DNA, 730 bp, Homo sapiens
  misc_feature 18, 26, 190, 196, 211, 215, 222, 231, 232, 239, 243, 247,248, 253, 256, 260, 261, 263, 266, 268, 276, 283, 286, 288,290, 292, 298, 299, 302, 304, 310, 317, 318, 335, 337, 338,340, 341, 343, 347, 348, 357, 359, 360, 371, 374, 377: n = A,T,C or G
  misc_feature 379, 381, 392, 394, 396, 397, 399, 403, 408, 417, 422, 423,427, 428, 432, 440, 446, 447, 448, 451, 469, 473, 474, 478,481, 486, 488, 489, 492, 495, 507, 508, 509, 515, 516, 521,528, 529, 530, 535, 551, 553, 554, 558, 559, 570, 571: n = A,T,C or G
  misc_feature 574, 578, 579, 581, 583, 584, 586, 593, 599, 608, 614, 615,618, 620, 622, 624, 628, 637, 643, 645, 646, 649, 652, 654,656, 661, 665, 667, 669, 670, 674, 681, 687, 694, 697, 698,700, 718, 719, 722, 725: n = A,T,C or G
gagcgcgcgtaatacganttcactantagggcgaattggagctccaccgcggtggcggccgcccgggcaggtacgcgggggggcaatagtgaatgaatgggaccatctgcgtgggtccctacacgagatgcttggaggggctggaggtggtgagggctgcaggaatggcctaaggtttggagaatcccanccctgnttcctccctgcctgnctgncccaccnaccatctgnntattgtnttancttnngtcanttntatnncnaantngaattttnttttttnatntntnanttccannaanantatttnttaaatnnactataaaaaataagantnntnntntttnntttttaatntnntttttttatanttnttntntnattttttttcntncnncntttnatttntttttttanaattnntatnnattncttttttnttttannnttnaattatttttttaaaatntcannatanaantatantnnttnttntttttagttttnnntttttnnttaantatcttnnntaatnataatttatataattntnnatcnnttttttctttnnttnttanntntnncntcttttnatttanaattttttnttcttnntantntntntttntatctactntttttntnntanctntntnaaaantaananannaatnttcttancaactnttatttnganntntttttctattcacactgnnttnatnttttt

SEQ ID NO: 2091 - DNA, 654 bp, Homo sapiens
  misc_feature 460, 478, 502, 503, 517, 518, 525, 526, 527, 532, 533, 547,548, 553, 554, 560, 561, 562, 569, 570, 573, 576, 577, 578,580, 581, 583, 584, 586, 588, 589, 591, 592, 593, 594, 595,596, 597, 598, 599, 600, 602, 603, 604, 605, 606, 607: n = A,T,C or G
  misc_feature 608, 609, 610, 611, 612, 613, 614, 615, 616, 617, 618, 619,620, 621, 622, 623, 624, 625, 626, 627, 628, 629, 630, 631,632, 633, 634, 635, 636, 637, 638, 639, 640, 641, 642, 643,644, 645, 646, 647, 648, 649, 650, 651, 652, 653, 654: n = A,T,C or G
gagccccgcgtaataccgacctcactattagggcgaattggagctccaccgcggtggcggccgcccgggcaggtaccagagactcctatttatttataccagtaagggccctcccactgcctttgtctccagtaggtcagctgcatcatcagctttaaaagcccccaaatattgctgagcttgcttttttaaaacttctcttgcaaactttataaatttgtttcagagcactataataaaatatttcttgcaaacatggactataagtgccagagacactggagaaatctgagggtggggagaaaggataatctatcagcttggaagctccaaagcactgtctttagtagcgctattggtgatggtggttttgagtgcttctctcagtgcagggtgagccaggtttctcagtggcattagatatatactccatgacattgggactccccccgcgtacctnggccgctctagaactagnggatcccccgggctgcaggaattnnatatcaagcttatnnataccgnnnacctnnagggggggcccggnncccannttttgnnncctttannganggnnnanngnncncnngnnnnnnnnnngnnnnnnnnnnnnnnnnnnnnnnnnnnnnnnnnnnnnnnnnnnnnnnnnnnnnn

SEQ ID NO: 2092 - DNA, 662 bp, Homo sapiens
  misc_feature 643: n = A,T,C or G
gagcgcgcgtaataccgactcactatagggcgaattggagctccaccgcggtggcggccgaggtacaaggcatttttgctaactgtaacttcccacttaatcaacaaaaacaaaaacactcatttctgaacattcagtgcattcatgattaatcttaattacaccacaaaggtatttttcaatgggtgattttgcgggagtggggtaacagtttcgaaagcaacattgtcagaaacatagttgattttaaaggttctttctggtgactttgacttctgcttttttagaagaccttacacagagttgtatttatttctcccggaatatttcaagcaattcagagtgaaagggtatacattccaatttgcgtatgagataaaatttagttacattgagaagctattttctttagttacagggaaaaaattgtagggcttttggaagcctctttgatttctaataggaggaatccctgagcactggtccaaacagaaatcatctcttcttcattgctgtatttccctcaagctcttagcaaagtgcatggcacgtgaaagcccggagaagctgttggttgaaagaatggatggtggtgggcaggaagcatcagggacatggtttgcttcagtctattggctggganaaaggccatttaggaaggg

SEQ ID NO: 2093 - DNA, 657 bp, Homo sapiens
gcgtaatacgactcactatagggcgaattggagctccaccgcggtggcggccgcccgggcaggtacttggaatgctgtgtggagtcctttttctacttttgttcctgagaaagagagattcacaaacttcccacattcttccagtggcatctaaggatcccttcctaaatggcctttctcccagccaatagactgaagcaaaccatgtccctgatgcttcctgcccaccaccatccattctttcaaccaacagcttctccgggctttcacgtgccatgcactttgctaagagcttgagggaaatacagcaatgaagaagagatgatttctgtttggaccagtgctcagggattcctcctattagaaatcaaagaggcttccaaaagccctacaattttttccctgtaactaaagaaaatagcttctcaatgtaactaaattttatctcatacgcaaattggaatgtataccctttcactctgaattgcttgaaatattccaggagaaataaatacaactctgtgtaaggtcttctaaaaaagcagaagtcaaagtcaccagaaagaacctttaaaatcaactatgtttctgacaatggttgctttcgaaactgttaccccactcccgcaaaatcaccattgaaaaataccctttggg

SEQ ID NO: 2094 - DNA, 703 bp, Homo sapiens
  misc_feature 319, 321, 340, 353, 374, 377, 390, 396, 404, 406, 408, 414,416, 421, 423, 426, 427, 429, 431, 433, 435, 437, 440, 443,455, 456, 458, 459, 460, 462, 464, 465, 466, 470, 471, 474,478, 481, 484, 485, 489, 491, 492, 494, 496, 501, 502: n = A,T,C or G
  misc_feature 504, 509, 515, 516, 517, 518, 519, 520, 521, 524, 526, 527,528, 531, 532, 536, 537, 541, 542, 543, 544, 545, 546, 547,548, 549, 550, 552, 553, 554, 555, 556, 561, 565, 566, 567,570, 571, 573, 574, 576, 577, 578, 579, 581, 582, 583: n = A,T,C or G
  misc_feature 584, 586, 587, 588, 589, 590, 594, 595, 596, 597, 598, 599,604, 605, 607, 608, 609, 610, 611, 613, 615, 616, 617, 618,619, 620, 621, 622, 623, 625, 627, 628, 629, 633, 635, 636,637, 638, 639, 640, 641, 642, 643, 644, 645, 646, 647: n = A,T,C or G
  misc_feature 649, 650, 651, 652, 654, 656, 657, 659, 660, 661, 662, 663,664, 665, 666, 667, 668, 669, 670, 671, 672, 673, 674, 675,676, 677, 678, 679, 680, 682, 685, 692, 697, 698, 700, 702,703: n = A,T,C or G
gagcgcgcgtaataccgactcactatagggcgaattggagctccaccgcggtggcggccgcccgggcaggtacgcgggatttttatacaattaatgatattctcaatagtaatctttgtgtgtgtatatatatagaaataaattctaaatgtaagttaatatatttattatttttctaaacatatataaatatatatatgcacacaggctatttaattttattagatgatgctattttaattcagaaaaaaatgacatttatattttgatttaggttagtataagcccttagaggtgttttgacaactctcttaatttngnggtttttactgtttatttngattttatataanctaaaataccattggtttttnacnaagcatttaattnggcaantgaaagancntntgacanangtatngntanncnanangncnaanctncacactttattnnannnancnnntacnngtntccnttnatnnaaantnntntnaaacnntnttttntttttnnnnnnnccntnnnttnngccnnttannnnnnnnnnannnnnttttntttnnnttnntnntnnnntnnnntnnnnnttcnnnnnntttannannnnntntnnnnnnnnntntnnncacntnnnnnnnnnnnnntnnnncntnnannnnnnnnnnnnnnnnnnnnnntnttnttttttnttccnncncnn

SEQ ID NO: 2095 - DNA, 680 bp, Homo sapiens
  misc_feature 619, 642, 667: n = A,T,C or G
gagcgcgcgtaataccgactcactatagggcgaattggagctccaccgcggtggcggccgcccgggcaggtacctagcaccaaaacgtgttttgccacattatgaggagaaattaagacacatgcaaatggcccagagtttggtggtttggcagtcacaaggaggaaagaaatgtgtgactccaataagagtccctctatagtcatttggttccctcggcccagaaagacaaaggggagtttattcagagtgacataaaagaagggtcgcacaagcaaatcagtgacggggcaaagcattgatggtttgaaggaaaacatgcattatcttttcttaacggtgttcaatgaatttcctttattattcattacattggccaaccagcctctaaggactttgggcagcccaatggaaggctctcaaaggcctttgagtttagcttttgggcttacgatggttttaattagccacagggagaaaaaaagccatcctgatgtgggactcctgaagtgcgtcctactgaaagccaaatggagaactgaggaatgtcatcctctccacccagtcatgtacctcggccgctctagaactagtggatcccccgggctgcaggaattcnatttcaagcttatcataccgtcnacctcagggggggcccggtacccancttttgttccctt

SEQ ID NO: 2096 - DNA, 672 bp, Homo sapiens
  misc_feature 5, 411, 562, 580, 607, 609, 612, 618, 621, 623, 633, 636,642, 649, 653, 655, 658, 662, 669, 672: n = A,T,C or G
gagcncgccgtaataccgactcactatagggcgaattggagctccaccgcggtggcggccgcccgggcaggtacgcgggtcatcatcatagtgagcccagagagccactgcccagcagcatgctcacaccacctaccctagtgtaggtaataggtctacgctaggaccccgtgctgggctctcagcccatcatgagattttggtggatttaatggcaggtaggaacttatttatagtggactgataattgctttataattccttggtaatgacagctcagggaaggtttcacaaggtcatgatcaggagacttgaattgttactggatgtaggaattgtttcactgctcttaacttgctcaaactggggcaggttccaggaacttgaactaaaaatatctatttaagcctntctctctttctctcctccccaacttttttctgaaagccttgatttctgcagacagaactatggtttttggcatgttgggtcaagacgtgtttctataggaaatgcttgcacgtggcacttggcttggtgagtcaagcttcctgagcttcanaccgtttgtcctgtcatntgtcctgcccaacactgatggtttttntntancacggnttnanttttgttctntgnacaaancctttgntggntntgncctntgccctncan

SEQ ID NO: 2097 - DNA, 702 bp, Homo sapiens
  misc_feature 5, 287, 344, 514, 538, 570, 611, 679, 688, 689, 690, 693,701, 702: n = A,T,C or G
gagcnccgcgtaataccgactcactatagggcgaattggagctccaccgcggtggcggccgcccgggcaggtacaaggccactgattatctagacctggctttcttcttcagtctcatcatccatccccaccccacattctctctccccatcaggtttgtgcaaatgttgtttgggatactcttctctctttggaatccctcctgtttggaatactcttctcttcttgcctttggcatctcctcaccacgcacgttctgctaattcctaaaactgcttatagattgngggcttaagctttgactttttttcaaggatgcctctgctaaccccctaaaattcaanggtaggtgctcctcttaaggtgctccatagttccctgtacctcggccgctctagaactagtggatcccccgggctgcaggaattcgatatcaaagctaatcgataccgtcgacctcgaggggggggcccggtacccagcttttggttcctttagtgaggggtaattggcncgcttggcgtaaatcatgggcatnagcttggttcctgggtgaaattggtattccgntcacaattccacacaacataccaagccgggagcattaaagnggtaaagcctggggtgcctaatgagtgggcctaacttacaattaattggcgttgcgcttaactggccngtttccaannnggnaaacccgnn

SEQ ID NO: 2098 - DNA, 401 bp, Homo sapiens
  misc_feature 12: n = A,T,C or G
tactctagggcnaattggagctccaccgcggtggcggccgaggtacacactgaggacctttcatccagcacgtgtggaggctcctcgaggggactcggagtgaagacagacttggtctctgccccctcgggtcttacagtcaagctccagttgaagtgtggtcattactacagtaaatgaagcacaacccattattatctctgcctcaggggatcaagaggaagtttctagagtaggagacatttcaatcagggcttggggagcctgccaaagggaatgagggcacgtcccacatgaagcaaaggcatctgagttcatggccccgctggggattggcaggcatgagttgcagctgcagggcaataagcgtaggggagtgagtggagaaacccaggtggggc

SEQ ID NO: 2099 - DNA, 667 bp, Homo sapiens
  misc_feature 572, 592, 602, 611, 614, 616, 627, 628, 632, 639, 647, 650,653, 654, 660, 661, 663, 665: n = A,T,C or G
cgcgtaatacgactcactatagggcgaattggagctccaccgcggtggcggccgaggtacacacagtcaaaagttttccgtgactgtgaaatccagtgcaatctgcttcccagcagatgaggagcctgacgtggttatgtctggatttagtccaagaacagagcaaagctttaattgtcaagagacccaggcctcattctccacttaggagagtttgctagggcaggtacctgcccgggcggccgctctagaactagtggatcccccgggctgcaggaattcgatatcaagcttatcgataccgtcgacctcgagggggggcccggtacccagcttttgttccctttagtgagggttaattgcgcgcttggcgtaatcatggtcatagctgtttcctgtgtgaaattgttatccgctcacaattccacacaacatacgagccgggagcataaagtgtaaagcctggggtgcctaatgagtgagctaactcacattaattgcgttgcgctcactgcccgctttccagtcgggaaacctgtcgtgccagctgcattaatgaatcggccaacgcncggggagaggcggttgcgtnttgggcgctnttccgcttnctngntcactgactcnnttgngctcggncgttcggntgnggnnagcggnntnanct

SEQ ID NO: 2100 - DNA, 643 bp, Homo sapiens
  misc_feature 255, 477, 481, 542, 567, 619, 624, 627, 635: n = A,T,C or G
ggagctccaccgcggtggcggccgcccgggcaggtacgcgggacagcagccagccgggacagccaagtggttcggagagaaattgctaaagcccttagcaaaagctttacgatgcactcactcaccattcagatggaatctccagttgaccaggaccccgactgccttttctgtgaagacccctgtgactagctcagtcacaccgtcagtttcccaaatttgacaggccaccttcaaacatgctgctatgcaganttctgcatcatagaaaataaggaaccaaaggaagaaattcatgtcatggtgcaatgcatattttatctatttatttagttgcattcaccatgaaggaagaggcactgagatccatcaatcaattggattatatactgatcagtagctgtgttcaattgcagggatgtgtatatagattattcctgagtggagccgaagtagcagctgtttgtaactatcggnaatnccaaattcatctcccttccaataatgcatcttgagaacacataggtaaaatttgaactcangaaagtcttactagaaatcagtggnagggacaaatagtcacaaaattttaccaaaaaaaaaaaaaaaaaaaaaaagnacctnggncgctctanaactaggg

SEQ ID NO: 2101 - DNA, 690 bp, Homo sapiens
  misc_feature 5, 7, 423, 455, 508, 555, 598, 617, 625, 628, 640, 642, 643,666, 672, 674, 683: n = A,T,C or G
gagcncnccgtaataccgactcactatagggcgaattggagctccaccgcggtggcggccgaggtaccttgcctttggttaccccttctctttacaagggcagggtaaaatatggggctcagctaggctgtgggaatagggaatggtgtgggagaagcttgggcctaggagcaacatctgtgggactcttccttctatgcccttctgaatctattgagaaggatcagctaactctttggtgctatgctattagaaacccggaattaaaatagaatatttcttaaaatggaagggcttgcagttaactcaggtctgtacctgcccggccggccgctctagaaactagtggatcccccggcctgcaggaattcgatatcaagccttatcgatacccgtcgacctcaaggggggccccggacccancttttggttcctttaagtgagggttaattgcncgcttggcgtaatcatgggtcatagctgtttcctgtgtgaaatgttattccgntcaaatttccacacaacataccaacccgggaccataaagtgtaaaancctgggggtgcctaatgaatggagctaactcacattatttgcnttgcccctcacttgcccgnttttccantcnggaaaaccttgncnngcccactgcattaatgaaatcgnccaccncncggggaaanggcggtt

SEQ ID NO: 2102 - DNA, 679 bp, Homo sapiens
  misc_feature 624, 625, 632, 639, 643, 644, 646, 648, 651, 653, 654, 656,661, 662, 664, 665, 666, 669, 672, 673, 674, 675, 677, 679: n = A,T,C or G
gagcgcgcgtaataccgactcactatagggcgaattggagctccaccgcggtggcggccgaggtacatttttagctagttaccacatggtgccaaaaccctgtagcactccgttaagaccatctgttaaaatggctgtcaggtatcatgtagataattgactggttttctcaccttttaattagttattttgtcattgtgttgacgcaacttaggtgaaaggtttttctttcctaagaactcataggtcatttgcacttactcagttacaaatggctatttggggggcactgacgtcatgaatgatttcatcttacaggtcagagctatcctatctcccaaaacaactttttcatcttctaagatgatgaaggtctaattaatcttggccttcacaactgctctctcagcactggaaagagccattctcctttatactgcatctaagcaatttacattaaaataaatacgtttcaaagctctatattcatactgaggttttgaatgaaaacagggaagagagaaccacttctttataatggacaatgaactcactgaatcatgtgctggactttttaaagggtaacaaatcaaccctaaaaatgatttaaaaaatcttataccnnattggangcttggntatnncncnttncnnanaaagnntnnnaancannnnancn

SEQ ID NO: 2103 - DNA, 399 bp, Homo sapiens
cgtatcgactcactatagggcgaattggagctccaccgcggtggcggccgaggtacaagtctgaagccaaccttgatttttttgaagggatatacactaaattatagaaaattattttaatatcaagaacaaatggctaaggggacaggatttactgcatgagttttagcactgagtttttctgagtcatctaggggaagggagatgggtaaaattgtaacaaatggcaaaatacacacacaaaaggttttcttaaataacaatagcactgaaaaagaggtagtccggaagccccagtcattgccttatgtctctttaaatcattcttcaagtggagatttatttcgacgccattctcctgcctcagtctcccgagtagctgggactacaggcgcccgc

SEQ ID NO: 2104 - DNA, 412 bp, Homo sapiens
cgcgtaatacgactcactatagggcgaattggagctccaccgcggtggcggccgcccgggcaggtacccattaagtagtttttcgacccataaactctcctgtcccagtagttcacagtatctgttgttcccatgtttatgtctgtgggtgctcaatgtttaggtcccactgataagggaaaacgtggtatttggttttctgttcctgcattaatttgcttaggaaggaggattttcttaaacatcagtctgccttttctctaaggctttatgatatgaggcatccgtattcattgaatatggagcttagaaatataggtattgaggggccaccacaccaggctgacttcttgatcttgaattttataaggattctaaagggcattgggtagttccaggacatctgagacct

SEQ ID NO: 2105 - DNA, 411 bp, Homo sapiens
  misc_feature 89, 112, 238: n = A,T,C or G
gcgtatacgactcactatagggcgaattggagctccaccgcggtggcggccgaggtacttttttttttttttttttttttttttttttngagcagctaaaatctaggatggngttaagtttcttcattttgtcaattatatataaaaaattagaaacaacatgaatctgcatttcttggatgagatagttaataacaaactatttctcaatatttgtatactaaaaactagtgaaggngttatgtgtttcagtatcttatctcttatttgaacatgggtttctgaaaggagcctatataataatataaatggtatgtagtaaatgaggcactgtcttggctgggactactataaaaaaattaccataggccattgactaaaccacaaacatatacttctcacagttctgga

SEQ ID NO: 2106 - DNA, 408 bp, Homo sapiens
  misc_feature 4: n = A,T,C or G
gtancgactactatagggcgaattggagctccaccgcggtggcggccgaggtactcacagctgcatcacactgaatatcatctccctgcactgccatttcatttgagcagggctttgcctgtcaagaacattcatatcttttgataaacagtgcattttttccctgatagtctgtatgggacagcctccttgtttgcatctgaaggacagggacttcaggacctcctgctgtggtcaccagggaatcacattcaaacttctcagcaaggtgttatggtccttctcagtttgcctacgatccattgaggcaaaggtttccttctatcaatacaccctctgctttagccagggggacctcccactgtcctctctatgtgttctatttgttcctgactgttagtacctgcc

SEQ ID NO: 2107 - DNA, 480 bp, Homo sapiens
  misc_feature 34, 46, 56, 60, 196, 223, 233, 303, 307, 378, 435, 476: n = A,T,C or G
aattggagctccccgcggtggcggccgggggccnttgagactgccntggaagactngaanggtcacgtagctgagacttctggagagaccattcaaggcttctggctcttgacaaagatagaccactggaacaatgagaaggagagaattctactggtcacagacaagactctcttgatctgcaaatacgacttcntcatgctgagttgtgtgcagcttgcancggattcctntgagcgctgtctatcgcatctgcctgggcaagtttcaccttccctgggaatgtccctggacaagagacangggnagaaggccttaggatctactgggggaagtcccggaggagcaagtctcttctgtcccgctggaacccatggnccactgaagttccttattgcgtactttcactgagcatcctatgaaaatacaccatgnggagaaattcctttgaaaatttgcaaggtttgctcttgggntttc

SEQ ID NO: 2108 - DNA, 892 bp, Homo sapiens
  misc_feature 3, 4, 5, 7, 9, 11, 13, 14, 17, 19, 24, 30, 33, 47, 49, 51,52, 53, 55, 61, 65, 66, 67, 68, 69, 71, 72, 73, 99, 102,103, 104, 107, 114, 130, 132, 133, 140, 182, 186, 224, 272,318, 349, 356, 357, 360, 377, 391, 397, 402, 415, 418: n = A,T,C or G
  misc_feature 424, 437, 438, 441, 444, 455, 470, 473, 478, 480, 511, 514,529, 535, 547, 549, 557, 570, 586, 598, 606, 608, 614, 629,639, 646, 652, 664, 665, 666, 667, 680, 682, 693, 713, 718,723, 752, 754, 761, 781, 791, 793, 801, 804, 818, 823: n = A,T,C or G
  misc_feature 834, 840, 845, 858, 863, 874, 881, 886: n = A,T,C or G
tannncnanangnnttntngtttnaattanttntttttttttttttnanannnanatcttntttnnnnntnnntcggcgtcttattttttttaacacgnaannnttnttttttnttttccctagtttgangnngtcgtanacgatcctatagggcgaattggagctccaccgcggtggcggncgangtacgcgggaggatggacagagtaagcacacgtgttanatagaaaagatagaaaagaattgctgtttcctgataaaagactaaatnatgagaaaacacttaaactaccgaacacctgaaaacactgaataanatttgaagccatcttttttacaaaaaaatangcctgtnngancttccaagggaaaaagnaaaaggggtaaaantgtttncaaanaacacaaaaaatnggnctcccntgttgccaagtcnnccncancaacttctacnttctactactttaanttngggtnanaaggcatccaaataaaaaaccccttaaaagnggncaatgggtttttcgntttaangcttttccctcncnctgttggngttcccaggtggngaaagttgccaatggnccctttgggtgntaattccncnccaaantcctgtttaaaaggntttcttcccnttttaanttctanaaggggtaccannnnaaaactcctttcntnaaaaaaaaagnccctccccaatttctacttncaatntaaanaattggtggggtcctatgtaactttgggngnaaaaaancaaaaaaataacctttttanctcccccaancnatgtggcnaanccttgggtgggggnaatangggaatttaancaattnaaaanttccttttgggtnttttncttggcccctnggggggnctttncccaag

SEQ ID NO: 2109 - DNA, 859 bp, Homo sapiens
  misc_feature 10, 12, 13, 14, 17, 18, 23, 31, 32, 33, 34, 35, 38, 46, 47,49, 52, 63, 64, 67, 76, 79, 82, 89, 91, 92, 98, 100, 106,115, 323, 338, 343, 364, 427, 445, 450, 484, 488, 492, 497,502, 518, 528, 538, 569, 576, 583, 588, 611, 615, 631: n = A,T,C or G
  misc_feature 656, 659, 662, 683, 698, 715, 748, 750, 817, 840, 841, 845,852, 859: n = A,T,C or G
ctttttttanannnaannttttnttttatannnnngcntttttttnnantcnggcattctttnnttntctaagaantcnttnattttananntaaatntntttttngattcgagntcctttacgatcctatagggcgaattggagctccaccgcggtggcggccgcccgggcaggtacagcatgtatggccataaaaccactcatcacactactgaaagaccctctgcctcactctatgaacagcacatggtgagccccatggttcatgtctatagaagtccatcctttggtccaaagcatctggaagaggaagaagagagtnaatgagaaaaagaanggaangtgattgcaaaaaccatcttnccaaaagaaaagttctttttttgtgaaccaggggaaaaaattcatttacaccccaccccccancagggggttccaaatatnattgnaaaaaattaacaaaaaaacctcatctggaaaccncaanattncaaanccagnaaaatttttttttaantccccttttnctcaaaaggnaattggccccaaggccttccaattttgggtnaacccangtaaaanaccantttttttttaaagcaaaaaaaanaaangtaaaaaagggggggnaaaaccctttttctaagtgcccaanacnttngggggggaaaatttccaaccnaagggaaaaattaanccccttaaaaagggggnaaaaaaaaaaccaatttttggccttccaaaggncntttccccaaggcccccttggaattaatttggggaagggggccaaccaaattttaatttcccttgggngaaggccccccacccggaaaaannaagncctttgnaaaaggn

SEQ ID NO: 2110 - DNA, 500 bp, Homo sapiens
  misc_feature 2, 3, 13, 14, 344, 497: n = A,T,C or G
gnngaggccgctnncactacttagggcgaattggagctccccgcggtggcggccgcccgggcaggtacttggaatgctgtgtggagtcctttttctacttttgttcctgagaaagagagattcacaaacttcccacattcttccagtggcatctaaggatcccttcctaaatggcctttctcccagccaatagactgaagcaaaccatgtccctgatgcttcctgcccaccaccatccattctttcaaccaacagcttctccgggctttcacgtgccatgcactttgctaagagcttgagggaaatacagcaatgaagaagagatgatttctgtttggaccagngctcagggattcctcctattagaaatcaaagaggcttccaaaagccctacaatttttttccctgtaactaaagaaaatagcttctcaatgtaactaaatttttattctcataccgcaaaattggaatgtataccctttcacttctgaattgcnttg

SEQ ID NO: 2111 - DNA, 482 bp, Homo sapiens
  misc_feature 2, 3, 4, 5, 8, 12, 13, 14, 17, 223, 241, 381, 417, 453, 478: n = A,T,C or G
gnnnnagngccnnncgnacactactatagggcgaattggagctccccgcggtggcggccgaggtacaagatgcacacagatgggaggagctgccttgagcgagaggacactgtcctggaggtgacagagagcaacaccacatcagtggtggatggggataaacgggtgaaacggcggctgctcatggaaacgtgtgctgtcaacaatggaggctgtgaccccnccctgtaaggatacttcnacaggtgtccactgcagttgtcctgttggattcactctccagttggatgggaagacatgtaaagatattgatgagtgccagacccgcaatggaggttgtgatcatttctgcaaaaacatcgtgggccagtttttgactgncggctgcaagaaaagggatttaaaattattaaacangatgagtaagtctttgccaaggatgttgggatgagntgctctttgggataggaaccttgtngacc

SEQ ID NO: 2112 - DNA, 892 bp, Homo sapiens
  misc_feature 2, 3, 5, 6, 7, 8, 12, 17, 18, 19, 20, 26, 27, 33, 35, 38,39, 47, 58, 71, 73, 82, 85, 86, 89, 91, 116, 122, 210, 345,347, 369, 399, 407, 434, 435, 438, 447, 455, 472, 482, 489,491, 493, 498, 506, 512, 521, 544, 611, 621, 635, 645: n = A,T,C or G
  misc_feature 651, 656, 661, 671, 677, 688, 690, 697, 705, 713, 717, 729,750, 764, 768, 785, 814, 839, 844, 865, 866, 879, 884: n = A,T,C or G
cnncnnnncctnttttnnnntttttnnttattntnatnnattttcanttaattttttntaattaaaaacantnttcttgttnatnntantncatttttttatatataattttatgntgtggntccgtatacgatcctatagggcgaattggagctccaccgcggtggcggcccgcccgggcaggtactacgctcttgatacgaaaaaatnttatcacgtgcccagcctctctcacagtcagaaataaccatgtgacacagttctagccaacgataacatggatcagctacatgaaagagggatgatggtattggaagcttttgttttcttttaattaggggaaantnaaaaaaattacaaagtttttcnattttttttgaattattgaaaccaaggggngaattggnggaaaaaattaaccttggggttttagnnaanggaaggccngttggggntattccccctttggggncaaaataggngccttancncnccccnctttcganaagtcnccttggggnaaaaatcccctcaagctaaaccncctttttaaaaattgggaattaaaaggaaagggtccaatattccccttggttttttttttggccaancttttggganaaaaaggttatggncccctttttnttgggnctccnttccncccaattggncccccnttccccccaantnccccttnggttaacnccttacgnggcncccggcctttcnttaaggaaaacctttaagggntggggggaatttcncccnccccgggggggcctttngccaaaggggtaaaatttttctggaaatnaattccaaaagggccctttttattnccggnaatttacccccgggttgctgnnaacctccttccgngaagngggggggg

SEQ ID NO: 2113 - DNA, 848 bp, Homo sapiens
  misc_feature 1, 4, 5, 8, 10, 17, 18, 21, 22, 29, 32, 33, 34, 42, 47, 58,61, 68, 69, 72, 79, 81, 88, 90, 94, 95, 109, 113, 114, 117,125, 137, 141, 332, 344, 349, 351, 352, 359, 366, 370, 384,391, 406, 408, 421, 424, 426, 431, 435, 436, 451, 453: n = A,T,C or G
  misc_feature 464, 468, 482, 490, 496, 504, 511, 527, 538, 542, 543, 546,552, 558, 569, 570, 579, 581, 607, 625, 642, 654, 661, 670,671, 686, 689, 691, 695, 698, 714, 729, 733, 738, 747, 757,759, 764, 787, 805, 821, 828, 830, 840, 843: n = A,T,C or G
ncannggnantgttttnncannatttttnctnnntgtgtttncgacnttattttcttntgntttcctnnttnttgatgntnttataantnatanntttactttattttnttgnnacnttagtttngggtagaccgcntgancatatagggcgaattggagctccaccgcggtggcggccgcccgggcaggtacaagccctggacctggcccattcttcatgtccccttcccaagcctccaagcccacatgggcacttgccaagatcagagctccaggggcctccagggacggggttttcagtcctttgggaccatgatccacagtagagaanattgatcctaantttgnannaacaccnagggaangccnaaccaccaatggtnaaatggnaaaccaagcccaaangncaactccccagancgnanttcanttcnntaatatgggccaaancnaagttcgcaanaaancaaccccacaatgngccggaantgccantccgttanagttggncaaaaccaaagggccnccaaaaaaccnaacnnctncaaagntttggnaattccaaatnntcttaaaantnggtccaaagaccaaaggcctcaatanatccatctccccaaagtnccgggaatttcaatttntttaaaattggnccaaaancaaaggtcnncaaaaaaaccaaacnccncnaagntcnggaatttccaatttcnttaaaaattgggccnaaanccaangaccgccanaaaaaccaancncctcnaaggtggggaaattccaatttcnttaaaatttggccaatanctaatggtttcaaaanaaccaancnccccaagttnggnatttt

SEQ ID NO: 2114 - DNA, 507 bp, Homo sapiens
  misc_feature 19, 38, 100, 103, 220, 225, 235, 236, 239, 251, 261, 262,263, 264, 274, 418, 423, 436: n = A,T,C or G
gagtttgaatccacttttnctatagcgcgaattggagntccccgcggtggcggccgaggtacccaatgaagtgaatgtgcccccacaacatttaacagtnatntcagcaggaaagggaaaacgactgcgaaaatgtaaacaattccttgcttcagctacttgttaactatggctgcagctgtctgagccagctgtccagtggtagcctgattcccagcgngcatntgggaagcanntgngaagaaatgccnataaagaatnnnnaaaggaccanatatgctagatggaaaccaactaaccatgctaaggcttccacctccatatgtgtggagggaaagccctaactctgcctcctgggaatgccagtgtctccttcttagtcagttaatttttacaacctttccttgttgcttccagntcatnctgtcttcttaanctctttgcttgtgtttcccaaaaactttattttttttttcataaaatcattaatattgcttttcccactta

SEQ ID NO: 2115 - DNA, 871 bp, Homo sapiens
  misc_feature 5, 6, 9, 11, 15, 17, 19, 23, 24, 25, 28, 33, 36, 41, 42,46, 51, 54, 55, 65, 66, 69, 74, 77, 82, 84, 85, 88, 93,97, 103, 104, 105, 107, 108, 109, 110, 111, 112, 113, 116,118, 119, 122, 238, 253, 275, 280, 285, 286, 330, 337, 355: n = A,T,C or G
  misc_feature 357, 368, 371, 387, 392, 394, 401, 405, 409, 410, 419, 423,437, 446, 459, 468, 470, 489, 500, 502, 508, 510, 519, 527,529, 534, 547, 560, 567, 581, 582, 589, 596, 606, 612, 630,643, 646, 649, 671, 675, 676, 677, 700, 702, 703, 723: n = A,T,C or G
  misc_feature 727, 740, 765, 769, 771, 775, 790, 797, 804, 812, 819, 824,825, 837, 845, 849, 853, 861, 870: n = A,T,C or G
ccccnncantntatncntntatnnnctnatttnccnctctnntcanctctntanncttttctctnngtnttatntcnttcantnnctnttatntctntctttnnntnnnnnnnagncnnagngcctatacgatattagggcgaattggagctccaccgcggtggcggccgctctagaactagtggatcccccgggctgcaggaattcgatatcaagcttatcgataccgtcgacctcnagggggggcccggangggcagcttttgttccctttanatganggttnnttgcgcgcttggcgtaatcatggtcatagctgtttcctgtgttnaaattgntttattcccccttcaccnanttttcccccanaantcattaccggaagtcncgggngnaggccanttanaaannttgttaaanaagncccttgggggggtngccccttanattggaagatggnaggccttananccttcccaccaattttaanaattttggccngnttttgncnggcctttcnaccttggncnccccnggcctttttttancccaagatttccngtgcggnaaaaaaaccccctnngtttccnggttggncccccaacgncccttngcccaattttaaaaattngtaaaaaatttcnggnggnccccaaaaacccggcctgtccngggnnntggtaaggaaagggggcccgggntnnttttggccccggtttaattnttgngggggcccggccnttccttttttccccggccttttttncccntncggncctttccaacccttnggaaacntttccgnccctttgnccagccntttcnngggggtacccgnttattccngggngccnttggtccntgggcccgnt

SEQ ID NO: 2116 - DNA, 481 bp, Homo sapiens
  misc_feature 2, 3, 4, 11, 12, 23, 24, 29, 30, 137, 216: n = A,T,C or G
gnnnagtgccnnacactacttanngcganncgaagctccccgcggtggctcgcccgggcaggtacgcggggtggggggaaaatgtgtatgtgagaatgataaaatacattgtatgcatatatgcactgggtcactgnaatatgtatttcctactgtggatcatggccaacagagtttgaaaacctccattctttgaggtagaaaagctgactggantatctaccctgggtggttggaagctgccaagggcacccaacctggtcaacaaattagtgtgctcagccagaggcagtcctggatgaattcaggctgcaaagtgccctgtgacctggcccttgggaagccacgctctgatgaaggtttgcagatctccccgcaatccagggcccaagccatgaatgaaaggtgttaggcattttcaagggatgccggctaggaccgtgcctgcttgtcttcaagggtttcacaatttatacttgga

SEQ ID NO: 2117 - DNA, 436 bp, Homo sapiens
  misc_feature 189, 213, 221, 325: n = A,T,C or G
attggagctccccgcggtggcggccgcccgggcaggtacagaagaatttgaaaaacacagctgctgaagaacatgttgctcaaggagatgccactcttgaacattccacaaatttagactcctcaccatccttaagttcagtgactgttgtgcctctgagggaatcgtatgatccagatgtaattcctntggttggccaaaagaactgttttnggaaggtngcacagccagcacctcccctgcggatcactctgctctccctaaccaaagtctgactgttagggaatcagaagtccttaagacaagtgacagcaaagaaggtggngaaggtttcacagtagatacaccagcaaaagcaagcatcactagcaaaaggacacattccagaagctcaccaggctactttattggatggtaaacaagggaaaggtaattc

SEQ ID NO: 2118 - DNA, 481 bp, Homo sapiens
  misc_feature 9, 14, 18, 21, 212: n = A,T,C or G
tttgaaccnctttnggcnaancggagctccccgcggtggcggccgaggtaccctgttactgaggcaatacctttctgggtaattttctcaatcctctgggtatattgaggttgcctactgtggctgatgaggaggccagctattatttctagccttctctgtccattgagcattgttctatctgcttcttttcagtagttatttgccctgtnagtttcctcacatgtgtgcactgatcaatacttaagcctgaaactgtctgcagcactccagatctttatttctcttttactttgcaacttgttctctctgtagttctactctcttcgctctctctctcttccctcagcacaaccctctccatctctacacttcctctcacctctgccctgtgaattctaattgcatttgctgtcccaaatcctctttaactcattcagaccactggagctctggatttttcctctctgagctgcagccc

SEQ ID NO: 2119 - DNA, 441 bp, Homo sapiens
  misc_feature 3, 53: n = A,T,C or G
ctnctatagggcgaattggagctccccgcggtggcggccgaggtacaatatanggcagacacgtttgccttcagaaattcagaaatgcagcttttgagggaggtcagcatcattggtctcagctactagagttgaagatgattcagccacttttattccagccactccatttctagcatacactacagagaagtgtatatttaaagaggccatttttcctgcagggatgtttataaatagttcctggcaaaggaggttgccgtatagggtcctacaagtaacctccccgcgtacctgcccgggcggccgctctagaactagtggatcccccgggctgcaggaattcgatatcaagcttatcgatacccgtcgacctcgaggggggggcccggtacccagcttttgttccctttagtggagggttaattgcgccgcttggcc

SEQ ID NO: 2120 - DNA, 437 bp, Homo sapiens
  misc_feature 209: n = A,T,C or G
ctactatagggcgaattggagctccccgcggtggcggccgaggtaccctgttactgaggcaatacctttctgggtaattttctcaatcctctgggtatattgaggttgcctactgtggctgatgaggaggccagctattatttctagccttctctgtccattgagcattgttctatctgcttcttttcagtagttatttgccctggtangttcctcacatgtgtgcactgatcaatacttaagcctgaaactgtctgcagcactccagatctttatttctcttttactttgcaacttgttctctctgtagttctactctcttcgctctctctctcttccctcagcacaaccctctccatctctacacttcctctcacctctgccctgtgaattctaattgcatttactgcccccaaatcctctttaactcattcaga

SEQ ID NO: 2121 - DNA, 523 bp, Homo sapiens
  misc_feature 59, 248, 346, 351, 367, 371, 374, 377, 390, 391, 397, 400,405, 412, 416, 418, 421, 428, 432, 437, 439, 442, 443, 444,445, 446, 448, 451, 452, 453, 454, 460, 474, 475, 478, 479,482, 485, 490, 494, 496, 502, 514, 516, 521: n = A,T,C or G
ggcgaattggagctccccgcggtggcggccgaggtacttttttttttttttttttttgnatactcaaaaaacatatatttgcatgtgccaggaaaaggtaaggaaaagggaaccttcatgtgccagcccctgtgctgagccctggagctgtagagatgagtgaggtggattttttgtctgtaaagagtttgccgatgggaccaagtctgtcatctctctttcctggcctgaccgaggacaagcacttnttagtaaccctgtgaataccgatgcatcccgtcagtcagcagctgtttgcggaacaccagctgcaggccaggcaccgtgctgcaaggcgtaaaatatnttgcngaacatgactcccttncagnatnttnagggattttaacnnggtaanttnaaccnaagaggnttcnanaanaaagggncttnaaacncnttnnnnntnttnnnnctttangggatggggttttnngtnnaanagnggaangtgnantgcccnataaacccccananttgtngg

SEQ ID NO: 2122 - DNA, 831 bp, Homo sapiens
  misc_feature 1, 7, 11, 22, 23, 25, 28, 32, 36, 37, 38, 40, 42, 50, 52,56, 60, 62, 65, 67, 69, 77, 78, 81, 88, 89, 92, 99, 100,101, 106, 111, 113, 115, 116, 119, 121, 128, 132, 136, 140,142, 145, 178, 325, 360, 365, 395, 405, 406, 425, 430, 431: n = A,T,C or G
  misc_feature 442, 474, 478, 487, 518, 519, 544, 550, 552, 593, 614, 615,638, 639, 640, 641, 651, 660, 664, 677, 689, 695, 701, 702,714, 721, 732, 751, 759, 764, 773, 777, 785, 790, 799, 803,807, 818: n = A,T,C or G
ntcttgnatantatctattaanntnatntatntatnnntntntttatctntntatntatntnttntncnatatatcnnatnttttccnnatntttattnnnttctnttttntntnnttngngtttggntccntttnattntntantcgaactccaccgcggtggcggcgctcttccgnttcctcgctcactgactcgctgcgctcggtcgttcggctgcggcgagcggtatcagctcactcaaaggcggtaatacggttatccacagaatcaggggataactgcaggaaagaacatgtgagcaaaaggccagcaaaaggccaggnaaccgtaaaaaagggcccgcgtttgcttggcgttnttttncataaggctcccgccccccttgaaccgagncatcaccaannaatccgtaccgcttcaagntcaannagggttggctnaaaacccccggacagggaacttaatataaagnatancccaagggncggtttttcccccccctggggaaaggccttnncccttcggttggccgccttccttcncttgtntntccccggaaccccccttggctccggccttttaccccggggnattaccccttggtttcccggnncctttttttccttcccccctttnnnngggggaaaangccggttgngggncggcctttttttntttccaattaangccttncaaacnngccctggttaantggttanttctttcaaangttttcggggttggttaangggtttcngtttncccgacttnccanaaagcctnggggnccttggttngttngccnactgaaaaccncccctcccggatt

SEQ ID NO: 2123 - DNA, 897 bp, Homo sapiens
  misc_feature 1, 2, 3, 5, 6, 11, 13, 14, 15, 20, 25, 31, 33, 34, 37, 38,39, 40, 42, 43, 46, 49, 51, 54, 56, 58, 61, 67, 68, 70,71, 74, 75, 76, 77, 78, 80, 82, 83, 84, 85, 89, 90, 92,94, 95, 96, 97, 98, 103, 104, 105, 107, 109, 113, 115, 116: n = A,T,C or G
  misc_feature 118, 119, 120, 124, 126, 131, 137, 139, 143, 144, 145, 308,343, 387, 410, 454, 534, 620, 628, 649, 678, 686, 691, 696,705, 736, 766, 794, 805, 856, 861, 888, 894, 895: n = A,T,C or G
nnncnntctgnannnatgcntattntatttnanntannnntnnatnttntnatntngntanaatatnntnnatnnnnntntnnnnttanntntnnnnntaaannnantntctntnnannntatnanagatncgaggntncgtnnnacgatcctatagggcgaattggagctccaccgcggtggcggcccgaggtacccaatgaagtgaatgtgcccccacaacatttaacagtcacatcagcaggaaagggaaaacgactgctgaaaatgtaaacaattccttgcttcagctacttgttaactattgngctgcagctgtctagagccacgctgtccacgtcgngtaagcctggattcccaagccgttgccatcttggggaaagccangtgggggaaaggaaattgcccanattaaaaggaaataaatgtaaaaatggggaccccaaaattaatngcttaaggtggggaaaaaccaaacataaacccattggccttaaaaggggcttttcccaccccttcccattattggttgtngggggaggggggaaaaaaggcccccttaaccttcttggcccttcccttggggggaaatggccccaaggtgggtccttcccctttcntttaaggntccaagtttttaaaatttttntaacccaaaccccttttttccccttttgntttgggcntttcnccaanttccaattnccccttggttccttttccttttaaaaggttncttttggcctttggtgggttttttccccanaaaaaacccttttaattttttttttttnttttccaattnaaatttttccaattttaattaattttgggctttttttccccccaaccttanttaanggctttctttccctttcaaccccaccntttaannag

SEQ ID NO: 2124 - DNA, 846 bp, Homo sapiens
  misc_feature 1, 6, 7, 9, 10, 12, 13, 14, 19, 20, 25, 26, 28, 29, 30, 36,38, 39, 40, 41, 47, 48, 54, 57, 59, 62, 63, 64, 73, 75,82, 85, 86, 89, 92, 93, 97, 104, 114, 117, 118, 131, 132,138, 145, 153, 158, 160, 161, 162, 207, 318, 348, 379, 391: n = A,T,C or G
  misc_feature 396, 415, 433, 444, 447, 467, 484, 491, 496, 502, 504, 515,523, 528, 531, 537, 544, 559, 562, 564, 572, 574, 587, 597,601, 603, 605, 624, 632, 637, 643, 645, 656, 659, 661, 677,681, 683, 687, 702, 703, 716, 717, 722, 724, 732, 733: n = A,T,C or G
  misc_feature 745, 760, 780, 784, 793, 805, 813, 819, 823, 824, 827, 845: n = A,T,C or G
ncccanncnntnnnacttnntctannannntaatgngnnnntattannttatanttncnttnnntcctatatntntttattntanntangcnntctntcaaatnatacatcatnatnnttacatctatagnntgcggntcgctanacgactcnctatnannntagggcgaattggagctccaccgcggtggcggcccgaggtacatngtggcctttcagctagtgcagaggatggaaaccagagtgggctgatgattggatgccaggcctgagccaggttgagtcctgttctcattatactgtaaagtgagcgtgctncaagcctccctgattcttatcactcccagnccctgcaggggtccctgagaaggttaatctntgcatttaagcncctcntgctgttttcccctctgtnaagccattactaccactntttgcagctgnagntgtctaagtattaaccttantattttcccatgtgtancattcancatgngttttnantggacctaccnattaaaanagtanaantttttngctgganaaccaacaataaagnggngnaatttggntncaataaccttttnaaaacctttntttngntnccccttttctactcccagnggttgggncccgnccaatngnccctcttcttnagngngcccaagaactccttncccncnaaanttatattcctaaagnncttttggcctttnnaaatngncctccccnnggggccgccttntttggctcctttacntttccaaaaaaagccaaaanttcntttggttgngccttacccccnccaacccncttggnaacnnatnccttccttggttttaccng

SEQ ID NO: 2125 - DNA, 992 bp, Homo sapiens
  misc_feature 1, 2, 5, 8, 9, 11, 13, 20, 21, 30, 35, 45, 46, 49, 54, 61,67, 68, 81, 83, 87, 88, 90, 93, 94, 100, 101, 103, 109,112, 121, 123, 128, 213, 224, 238, 374, 384, 425, 438, 441,452, 453, 456, 464, 477, 478, 488, 499, 516, 524, 534, 543: n = A,T,C or G
  misc_feature 549, 572, 603, 625, 654, 656, 658, 665, 684, 741, 747, 749,760, 762, 775, 780, 789, 795, 813, 869, 874, 881, 894, 896,918, 927, 930, 941, 951, 960, 962: n = A,T,C or G
nnctnctnntncnctaatanntttcttttnttttnaccttctctnntgntcttntcacgtnagtcanntttctttattttntncttnntngtnntttttnngntcgcanatnattatatantntttgngtgggcgcgcgtatacgactcactatagggcgaattgggaagctctcaccggcggtggcccgggcccgcccgggccagggtaccntccttccctantgcattcctgctgntgggggaaaggttgtgggaataacctcaccaagaatgaatggccaacagggggcaattggttattttcaaggggccaccccaaccaagtggccaagccaagttggaaaattggaaaattggaaaaggtggaaaaantggggttatntttaattccccatttttccccttggggaaaaaaggggttcnccaaggggggttnttnggggcttcctnngcnaagggggnccccaaagaaaannaaacccaagnccttttttaangcctttggttggccccnttttaaanccccccaagnttcccttgnggaagnaaaaaggccccaaagccaatggnccccggttaaaattccaacccgggggggggnaaggggaaaaaaacccccccanttccttttttttttaaaaagggggggccntncncctttcnggcctttccaaaggggttngggggtttggaaacccaaaagggggttggaaagggggttggggggttccaaattctntaattngncccttgggttncnttttttaatttcnaaggnttactttcnttgggnttcccctttaaaaaaatnaaacctttgggtggggccctttcctttggaaaccaattttgggaattggggccttnaaaantaaattntttccccatttantnttaaatttccaagggggggccntttcctttnggntgggggttggntttttttaanggggccccntnccttaaaaattttttttttccctttcctta

SEQ ID NO: 2126 - DNA, 455 bp, Homo sapiens
  misc_feature 220, 330, 453: n = A,T,C or G
ctatcactacttagggcgaattggagctccccgcggtggcggccgcccgggcaggtacagagcaccaggaagttacttaaaaacatctgcaggaggacattggtagcctttactaatacagcagtctcttttttgagtagttcattaattgttagaacacaatagcacttttgaaataaaagaaactagcatcccagattgaaagactttacttgccagntaagcacatgggctgctgttagaagaaagctaacttggctgggtgcagtggctcatgcctgtaatcccaacactttgggcggccgagacgggtggatcacctgaggtcancagttcgagactagcctagccaacatggcaaaatcccatctctactaaaaatacaagcaattagccgagccatggtgtcaccgtgccttgtaatcctagctactgggggaggctgaggcaggnaa

SEQ ID NO: 2127 - DNA, 702 bp, Homo sapiens
  misc_feature 16, 17, 18, 20, 29, 32, 97, 483, 488, 489, 490, 491, 492,493, 494, 495, 496, 497, 498, 499, 500, 501, 502, 503, 504,505, 506, 507, 508, 509, 510, 511, 512, 513, 514, 515, 516,517, 518, 519, 520, 521, 522, 523, 524, 525, 526, 527: n = A,T,C or G
  misc_feature 528, 529, 530, 531, 532, 533, 534, 535, 536, 537, 538, 539,540, 541, 542, 543, 544, 545, 546, 547, 548, 549, 550, 551,552, 553, 554, 555, 556, 557, 558, 559, 560, 561, 562, 563,564, 565, 566, 567, 568, 569, 570, 571, 572, 573, 574: n = A,T,C or G
  misc_feature 575, 576, 577, 578, 579, 580, 581, 582, 583, 584, 585, 586,587, 588, 589, 590, 591, 592, 593, 594, 595, 596, 597, 598,599, 600, 601, 602, 603, 604, 605, 606, 607, 608, 609, 610,611, 612, 613, 614, 615, 616, 617, 618, 619, 620, 621: n = A,T,C or G
  misc_feature 622, 623, 624, 625, 626, 627, 628, 629, 630, 631, 632, 633,634, 635, 636, 639, 640, 641, 642, 643, 644, 645, 646, 647,648, 649, 650, 651, 652, 653, 654, 655, 656, 657, 658, 659,660, 661, 662, 663, 664, 665, 666, 667, 669, 670, 671: n = A,T,C or G
  misc_feature 672, 673, 674, 675, 676, 677, 678, 679, 680, 683, 684, 685,686, 687, 688, 689, 690, 691, 692, 693, 694, 695, 699, 700,701, 702: n = A,T,C or G
ttacccaatttaatannncnactaattgnttntccccgctgcggcggccgcccgggcaggtactagctgtttttgcgacttttaataataacacctnctagttactgagtgtcatcatcaccaatgtcatgattgccacgatttattgagtgcctactacatgcaggccccaggtcagtgctttacactcttaactgtcatgttgacaacagctctgaatgacaggagctctgttcagtgttttacaagtgagaaaactaaagacactaataatttttaaaaatatatccacagttctatgattagtaagtaagggagctagtcctcggccgctctagaactagtggatcccccgggctgcaggaattcgatatcaagcttatcgataccgtcgacctcgagggggggcccggtacccagcttttgttccctttagtgagggttaattgcgcgcttggcgtaatcatggtcatagctgttttngggannnnnnnnnnnnnnnnnnnnnnnnnnnnnnnnnnnnnnnnnnnnnnnnnnnnnnnnnnnnnnnnnnnnnnnnnnnnnnnnnnnnnnnnnnnnnnnnnnnnnnnnnnnnnnnnnnnnnnnnnnnnnnnnnnnnnnnnnnnnnnnnnnnnnaannnnnnnnnnnnnnnnnnnnnnnnnnnnnannnnnnnnnnnnaannnnnnnnnnnnnaaannnn

SEQ ID NO: 2128 - DNA, 691 bp, Homo sapiens
  misc_feature 1, 203, 451, 462, 637: n = A,T,C or G
ngacgcgcgtaaacgactactatagggcgagattggagctccaccgcggtggcggccgaggtacgcttcatttcctccagcaccttgaagacagcttggcatagaaataattgttgaatcaacatgtgcataaataaatgactgatgcaatgggcaaaccctttgcagtgctcttccctgccttacctgtataccataacctncactgtggcagggactgtggtgacctcacttgccatggcctcccagcttattcttagtgtctgatacacagttggatgattaataaatatttgccatctcagtgagtgtatggacatggtgagtcctctgccaatcctcccaaatccatgcctgccacacctccacattgcaaacctgtcctcccacactgcagcaagagccaggcagggttctaccatgcaaaatggaccttcatgtctcctccacngctaccctaangcttcagaatcttctttagatggtgggccccacaaaaatagctttagctttagttacagactcacagattttacttataatcttagggcattcacaggtctcttgaagtccatgaatgtcccacccaaaagacttcagaataagacccactggcctacaggataaacacagtctncttagcctcacgcattgtaacctggccacagtctggctcttcagccctaccctt

SEQ ID NO: 2129 - DNA, 689 bp, Homo sapiens
  misc_feature 3, 10, 465, 540, 545, 591, 687: n = A,T,C or G
agngcgcgtnatacgacttactatagggctgattggagctccaccgcggtggcggccgaggtaccatctcaaagaacacctgtatgtatgcaacgtatttaagcagaaagaatgggctcaagataacccttgattctagttccctacagcatacatgtgaatgggaaacattcataagttcctatttgccaagggcatgtaaatgtgataaagcagatccgaagacacatgggagtgagactaggaaagtattaagaacatgggccttgaccgggcgcagtggcttacgcctgtaatcctaccactttgggaggccgaggctggtggatcacaaggtcaagagttcgagactagcctagctaagatggtaaaaccccgtttctaaaaattagctgggcacagtggcgggcacctgtaatcccagctacttgggaggctggggtcacttgaaccctggaggcggangttgcagtaagctgagatcacgccactgcactctagcctaggtgacagagccaagactctgtcaaaaaaaaattnttttnaaaaagaatgtgagccttttgactaggagctttggcataaccatanacaatagcaagatgcctcagtgcccccaaaggccagaagggatggatccatcaacagtggagaccaaaaaatgtccaaaaggcactagtggaacanag

SEQ ID NO: 2130 - DNA, 696 bp, Homo sapiens
  misc_feature 2, 3, 4, 8, 9, 15, 16, 17, 18, 20, 24, 340, 503, 530, 641,662, 668: n = A,T,C or G
gnnngttnncccgannnncntaanacgactcactatagggcgagattggagctccaccgcggtggcggccgggggccattgagactgccatggaagacttgaaaggtcacgtagctgagacttctggagagaccattcaaggcttctggctcttgacaaagatagaccactggaacaatgagaaggagagaattctactggtcacagacaagactctcttgatctgcaaatacgacttcatcatgctgagttgtgtgcagctgcagcggattcctctgagcgctgtctatcgcatctgcctgggcaagttcaccttccctgggatgtccctggacaaganacaaggagaaggccttaggatctactgggggagtccggaggagcagtctcttctgtcccgctggaacccatggtccactgaagttccttatgctactttcactgagcatcctatgaaatacaccagtgagaaattccttgaaatttgcaagttgtctgggttnatgtctaagcttgttccagctatccanaatgcccacaagaattcaactggatctggaagaggaaagaaactgatggtgttaactgaacccattttgattgagacctacacagggctgatgtcattcattggaaaccgnaacaaacttggctattccctngccgtnggagtattgggtttttgagagtcttttt

SEQ ID NO: 2131 - DNA, 691 bp, Homo sapiens
  misc_feature 1, 2, 3, 4, 5, 7, 8, 12, 17, 18, 25, 676: n = A,T,C or G
nnnnngnngcgngttanngacatantatgagggctgattggagctccaccgcggtggcggccgcccgggcaggtacgcaacatgacattggctggtgtaaagatcttacaattatttttaaagtttcattgtattcatttgattatatagtttcttgccatcacaacaaacactcctattcatgtctaattcgatacctggtgagtccacataagcatttgggtccccactgatgagagcaccatggccaggtcacccacttgatcaggttctcttgctttttgttgtgcatctcatcttattgtaggcattcaaactgtgggctcaggcaagcctttccagtgtgatcatattaattttatattttatgtgttaacatgcgcctccaataacttgctttccttgctcaccatgatgatgcatttttcctactttatgtcctcgctcattgattatgatgagctgctgactatttgaacctggtacttttacttgatcacctctacgcagtttcactcccattcatttccagtttctcttttatcagtgtcctctctcagtccttataggcctagatgttcattgtggtttcagcatctatttgatctcccctctcgtgtttcattagcatttcttcaatagtttctcagggttatttctcatgaatcaccattgnatacttcttaaaact

SEQ ID NO: 2132 - DNA, 703 bp, Homo sapiens
  misc_feature 2, 3, 4, 5, 6, 8, 9, 11, 15, 16, 39, 40, 540, 545, 550, 613,618, 649, 670, 676, 703: n = A,T,C or G
gnnnnngnncncgannccctaacgacttactatatggcnnattggagctccaccgcggtggcggccgcccgggcaggtacgcgggtgttcagggaattacagcatagatatgaaagatgtctgaaaaattggaaatatcaaataaaaattaagaagcctaaaactacatcagattaatatgtagtatagtctttcacatctggccatgatggaatggagcaatgggattatatatacattctcacagtaaacagttttcagatattgaacaacaaaaagtaggcagtgctagccagagattccttggagccaaaaaacaaaacaaaacaaacaataaaaattggtaatctctatattgctccagtttgctgcttggagaaagttctcaggctgcagctcagagaggaaaaatccagagctcagtggtctgaatgagttaaagaggatttggggcagcaaatgcaattagaattcacagggcacaggtgagaggaagtgtagagatggagagggttgtgctgagggaagagagagagagcnaaganagtanaactacacagagaacaagttgcaaagtaaaagagaaataaagatctggagtgctgcaaacagnttcangcttaagtattgatcactgcacacatgtgangaaactacagggcaaatactnctgaanaaaacagattgaacaatgctcaatggn

SEQ ID NO: 2133 - DNA, 867 bp, Homo sapiens
  misc_feature 12, 22, 27, 506, 528, 593, 622, 661, 695, 718, 728, 733,744, 758, 767, 782, 803, 805, 844, 860, 867: n = A,T,C or G
agccgcgttatngacttacttntggcngattggagctccccgcggtggcggccgcccgggcaggtactgcctgtgcgtagctgcattaaaccaaatgatcaagaatatcaagatacatcttcctggatcttcaatcccacttaaagatttggagaacatatcattttatattaaaaccaataacattttcagaatacatttgaataatttctttttacctaaaaacagagtctttaaataagtatcatttttgagatgcattgccataggatacatactgaggtgtcttctctttctcttacctattagaggcatttctgggcaagtttgaggagcatggaattaacagtcatcaatgcattgctggatttgaaaatgatttatatcaatcagcagaggacctccactggtgatgtcagcaggatctgaggatgttcaggtagacatgctatgctttgaatctccaaacttgaacgacattatgactgtgctcatagccaggcttnccttgcttgtggtcattgctgnggatcaaggttgttttgccttccatgcaatggatttgctgaggtgcttctcaatctgtatctcanaattgaaatgtatgaaaaaagattctcangaggggagagatatcctttttggggacacgaccattggnttccttggcctcattggagtaaccatggaatatngaccacggggaagaaaacggccnggactcacanggatnggctcatcagnggaagatgggggcnaaaagtganggacttaagaatccnatgaaccttggctggaactgngnccctgtgccctaaaatgcacactttagaagttattaacntttttgggcctacttncccttgn

SEQ ID NO: 2134 - DNA, 856 bp, Homo sapiens
  misc_feature 8, 25, 258, 397, 570, 575, 577, 578, 579, 580, 581, 582,583, 584, 585, 586, 587, 588, 589, 590, 591, 592, 593, 594,595, 596, 597, 598, 599, 600, 601, 602, 603, 604, 605, 606,607, 608, 609, 610, 611, 612, 613, 614, 615, 616, 617: n = A,T,C or G
  misc_feature 618, 619, 620, 621, 622, 623, 624, 625, 626, 627, 628, 629,630, 631, 632, 633, 634, 635, 636, 637, 638, 639, 640, 641,642, 643, 644, 645, 646, 647, 648, 649, 650, 651, 652, 653,654, 655, 656, 657, 658, 659, 660, 661, 662, 663, 664: n = A,T,C or G
  misc_feature 665, 666, 667, 668, 669, 670, 671, 672, 673, 674, 675, 676,677, 678, 679, 680, 681, 682, 683, 684, 685, 686, 687, 688,689, 690, 691, 692, 693, 694, 695, 696, 697, 698, 699, 700,701, 702, 703, 704, 705, 706, 707, 708, 709, 710, 711: n = A,T,C or G
  misc_feature 712, 713, 714, 715, 716, 717, 718, 719, 720, 721, 722, 723,724, 725, 726, 727, 728, 729, 730, 731, 732, 733, 734, 735,736, 737, 738, 739, 740, 741, 742, 743, 744, 745, 746, 747,748, 749, 750, 751, 752, 753, 754, 755, 756, 757, 758: n = A,T,C or G
  misc_feature 759, 760, 761, 762, 763, 764, 765, 766, 767, 768, 769, 770,771, 772, 773, 774, 775, 776, 777, 778, 779, 780, 781, 782,783, 784, 785, 786, 787, 788, 789, 790, 791, 792, 793, 794,795, 796, 797, 798, 799, 800, 801, 802, 803, 804, 805: n = A,T,C or G
  misc_feature 806, 807, 808, 809, 810, 811, 812, 813, 814, 815, 816, 817,818, 819, 820, 821, 822, 823, 824, 825, 826, 827, 828, 829,830, 831, 832, 833, 834, 835, 836, 837, 838, 839, 840, 841,842, 843, 844, 845, 846, 847, 848, 849, 850-856: n = A,T,C or G
agccgtancgactcactatagggcnaattggagctccccgcggtggcggccgaggtactaacagtcaggaacaaatagaacacatagagaggacagtgggaggtccccctggctaaagcagagggtgtattgagagaaggaaacctttgcctcaatggatcgtaggcaaactgagaaggaccataacaccttgctgagaagtttgaatgtgattccttggtgaccacagcaggaggtcctgaagtccctgtccttcanatgcaaacaaggaggctgtcccatacagactatcagggaaaaaatgcactgtttatcaaaagatatgaatgttcttgacaggcaaggccctgctcaaatgaaatggcagtgcagggagatgatattcagtgtgatgcanctgtgagtacctgcccgggcggccgctctagaactagtggatcccccgggctgcaggaattcgatatcaagcttatcgataccgtcgacctcgagggggggcccggtacccagcttttgttccctttagtgaagggttaattgcgcgcttggcgtaatcatggtcatactggnttttngnnnnnnnnnnnnnnnnnnnnnnnnnnnnnnnnnnnnnnnnnnnnnnnnnnnnnnnnnnnnnnnnnnnnnnnnnnnnnnnnnnnnnnnnnnnnnnnnnnnnnnnnnnnnnnnnnnnnnnnnnnnnnnnnnnnnnnnnnnnnnnnnnnnnnnnnnnnnnnnnnnnnnnnnnnnnnnnnnnnnnnnnnnnnnnnnnnnnnnnnnnnnnnnnnnnnnnnnnnnnnnnnnnnnnnnnnnnnnnnnnnnnnnnnnnnnnnnnnnnnnnnnnnnnnnnnnnnnnnnn

SEQ ID NO: 2135 - DNA, 888 bp, Homo sapiens
  misc_feature 1, 9, 81, 117, 129, 142, 185, 574, 624, 681, 689, 727, 745,786, 831, 888: n = A,T,C or G
nagcgcgtntcgacatagttgtggctgattggagctccaccgcggtggcggccgcccgggcaggtacttagcacatgccangaactgttctaaaccccttctgtgcgttagcccatntaatcctcatantaactcagtgctntctctgatatccctgtgttacagttgagggaactgaagtatanagaaggttgagcaatggcatgcagggcatagagaagggtaaggacgactgtaaacaggtcaagaagtggaaggtcagataatttaccctgattgcacaactggtaagtagtggtaccagattgaggctcaagtcttcactctcacagcagggtactttctgcaacttcagtttcttattaccatttctgccactagcatgcagaagacgctagatgattattgaatcagtgagtttctcataggtaagatggaaatgattcttagtagggttttgtgagaataaaattggaaattgtacatttctttaacatattttgggtagtaatagctattatgatgctagtggataacacaagagttcaaaggtgaccagttagatgtggagganggaaagagttgtgtaaaagatgatgaagtgttctagcctgatggtgaaangacagtattaatggaaataattaatttggaaaagaaaagccagttttgaagacagcnttcatgantttagcttaggaatcattggtttcaagtttatgctaanaaaacaaaattacccaanaatcttggaaccaaaccattttacattattggcatcttttngtccataccttatttgatgtaagtcaacaatggcctacaaaatcncttacttacctatgaactttctggaccttgaccaaaaacctcctttgatatgaaaan

SEQ ID NO: 2136 - DNA, 884 bp, Homo sapiens
  misc_feature 1, 4, 5, 9, 139, 153, 174, 179, 182, 198, 263, 396, 467,492, 520, 530, 562, 566, 582, 592, 593, 597, 622, 630, 694,713, 715, 718, 722, 731, 773, 780, 807, 820, 828, 837, 844,857, 860, 861, 862, 863, 867, 871, 873, 874, 875, 876: n = A,T,C or G
  misc_feature 877, 878, 879, 880, 881, 882, 883, 884: n = A,T,C or G
ntanngcgncatctactactatagggcgaattggagctccaccgcggtggcggcgcgaggtaccgtaaggggagttttgttcctactgcccatgagtctgtggtcccacatgtgttgcttttgtccatgtcatcatttncacaaggatacatntgaatgctgtatttatgcctnatttntanatacatggggaactgnaactatgtttttagctgaaggttcttacatcaaaattatgatattcctaacactgcttcccaganaagacccccagagtatgttttgttttgagacagagtcttgttctgttgcccaggctggagtgcagtggcatgatctcggctcactgcaacctctgcctcccaggttcaagcgattctcctggctccctagtanctacaggtgcatgcgtggctaatttttgtatttttagtagacacggggttttgccatgttggccaggatangtctcaaactcctgactttaagctntaaatgatctgtgcgcctggccccaaantatattttanactcaccatgttctatctacattcaaagattngtanacattttactgtgagnaatcattgtnncganaagaacaagatcactgcaatgtaantttcaaanccccaagggccgacttaatggcttcagaagcaccccccaacatttttgggttacaaccgggctnaataactgcccgggcgggngntgntctngaactaatngaatcccccggctgcaggaaatcatgtcaagcttatccaaanccgccanctcgagggggggccgggacccaacttntgttccctttaangaagggtnaaatgcgcncctggcnaatcatgggcatnaannnngttntccngnnnnnnnnnnnn

SEQ ID NO: 2137 - DNA, 878 bp, Homo sapiens
  misc_feature 7, 31, 35, 265, 371, 471, 482, 486, 525, 535, 557, 568, 594,676, 677, 678, 679, 686, 687, 688, 689, 690, 691, 692, 693,694, 695, 696, 697, 698, 699, 700, 701, 702, 703, 704, 705,706, 707, 708, 709, 710, 711, 712, 713, 714, 715: n = A,T,C or G
  misc_feature 716, 717, 718, 719, 720, 721, 722, 723, 724, 725, 726, 727,728, 729, 730, 731, 732, 733, 734, 735, 736, 737, 738, 739,740, 741, 742, 743, 744, 745, 746, 747, 748, 749, 750, 751,752, 753, 754, 755, 756, 757, 758, 759, 760, 761, 762: n = A,T,C or G
  misc_feature 763, 764, 765, 766, 767, 768, 769, 770, 771, 772, 773, 774,775, 776, 777, 778, 779, 780, 781, 782, 783, 784, 785, 786,787, 788, 789, 790, 791, 792, 793, 794, 795, 796, 797, 798,799, 800, 801, 802, 803, 804, 805, 806, 807, 808, 809: n = A,T,C or G
  misc_feature 810, 811, 812, 813, 814, 815, 816, 817, 818, 819, 820, 821,822, 823, 824, 825, 826, 827, 828, 829, 830, 831, 832, 833,834, 835, 836, 837, 838, 839, 840, 841, 842, 843, 844, 845,846, 847, 848, 849, 850, 851, 852, 853, 854, 855, 857: n = A,T,C or G
  misc_feature 858, 859, 860, 861, 862, 863, 864, 865, 866, 867, 869, 870,871, 872, 873, 874, 875, 876, 877: n = A,T,C or G
agcgctngacgcgcgtaaacgactactatanggcnaattggagctccccgcggtggcggcccgaggtacttaactagggttagcccgaggtcaggagggtggatgccttattatgggattaagtgcccttctaagagggacagtagagggcttgtccatgctctctctctccatgcacaagaaagagcacacaagtgagaaggaaagaggccctcaccagaacctgaccatgctggcaccgtgattgcaaacttccagcctccangattgtgagaagataaatatctgtggtttaagtcaccaagtctgtggtgtgttttatggcagcacaaggtaacccagatgatgcttttcaccactgggtggtccancctttcatggaagctgtcaactcctcagccttgcaaaaaatgcttgctggtcactctctttggtcctttcagatgcctttcttaatggtgcctctaccangcccttgactncatncttttctgtcagaagaagggtgagtaaagtacctgcccnggccggccgntctaaaactaatggatcccccnggctgcaaganttcgatatcaagcttatcgataccgncgacctcaaggggggccccgtcccagcttttggttcctttaatgaaggttaattgccgcttggcgtaatcatgggcataacnnnnttttccnnnnnnnnnnnnnnnnnnnnnnnnnnnnnnnnnnnnnnnnnnnnnnnnnnnnnnnnnnnnnnnnnnnnnnnnnnnnnnnnnnnnnnnnnnnnnnnnnnnnnnnnnnnnnnnnnnnnnnnnnnnnnnnnnnnnnnnnnnnnnnnnnnnnnnnnnnnnnnnnnnnnnnnnnnannnnnnnnnnncnnnnnnnnng

SEQ ID NO: 2138 - DNA, 881 bp, Homo sapiens
  misc_feature 5, 6, 7, 9, 376, 423, 438, 520, 568, 576, 625, 627, 645,685, 732, 734, 737, 739, 762, 768, 780, 806, 807, 822, 825,826, 828, 831, 840, 881: n = A,T,C or G
gagcnnngncgcgcgtaaacgactactatagggcgaattggagctccccgcggtggcggccgcccgggcaggtacaggaggcagcttttttctgctctctgttgacttctgaagccagcctcatgatcgtttctctgctagcttttgcttccatctcatggacatttatagtctcttcaagaataacaatttgtcctttcacgaattcattttctttgcgcaggtctctaagctttaaaattaaatcttcatctgatgccttgtcattcctctcatctggatccaagcagtcacgcagttgagtcagaaattcctcatgtttcctgcaattctttgaaacttgtttcttattctcctcattttcttttgaacactnttgtaatttttcatttaactctacaactttcttctttaattcctggntctccttgattgcancgtgagctgtgatttctgttctgattttagaagtggaaagtgctgctgattcttcttctagctcctgaactctgtctctcanagaggtaaggagagatgattttctggcattggtttccttgtagctctncatttcanctttcaattcttgacaagaaacttctttagaaagcatcttggatcggangncttgaaacttaaactgancccattcaaatttggaccaaagttgctgcaagttcacttngagcattttgaaccacaattcccaaaagggggttaactgctcccggngngancnggaccttccgaaagaagatcgtnaggttnttgcggggacanttgaactgaaccaattcccccatttnnggaactactgccaancanncnaancccgggggnccccattcccaggccaaagggggattttaaaccaaactggn

SEQ ID NO: 2139 - DNA, 870 bp, Homo sapiens
  misc_feature 5, 7, 14, 31, 36, 514, 535, 552, 564, 600, 626, 642, 644,664, 666, 673, 675, 676, 680, 682, 684, 685, 686, 687, 688,689, 690, 691, 692, 693, 694, 695, 696, 697, 698, 699, 700,701, 702, 703, 704, 705, 706, 707, 708, 709, 710, 711: n = A,T,C or G
  misc_feature 712, 713, 714, 715, 716, 717, 718, 719, 720, 721, 722, 723,724, 725, 726, 727, 728, 729, 730, 731, 732, 733, 734, 735,736, 737, 738, 739, 740, 741, 742, 743, 744, 745, 746, 747,748, 749, 750, 751, 752, 753, 754, 755, 756, 757, 758: n = A,T,C or G
  misc_feature 759, 760, 761, 762, 763, 764, 765, 766, 767, 768, 769, 770,771, 772, 773, 774, 775, 776, 777, 778, 779, 780, 781, 782,783, 784, 785, 786, 787, 788, 789, 790, 791, 792, 793, 794,795, 796, 797, 798, 799, 800, 801, 802, 803, 804, 805: n = A,T,C or G
  misc_feature 806, 807, 808, 809, 810, 811, 812, 813, 814, 815, 816, 817,818, 819, 820, 821, 822, 823, 824, 825, 826, 827, 828, 829,830, 831, 832, 833, 834, 835, 836, 837, 838, 839, 840, 841,842, 843, 844, 845, 846, 847, 848, 849, 850, 851, 852: n = A,T,C or G
  misc_feature 853, 854, 855, 856, 857, 858, 859, 860, 861, 862, 863, 864,865, 866, 867, 868, 869: n = A,T,C or G
agccntngacgccnttatcgacttactatanggctnattggagctccccgcggtggcggccgaggtacaagatgcacacagatgggaggagctgccttgagcgagaggacactgtcctggaggtgacagagagcaacaccacatcagtggtggatggggataaacgggtgaaacggcggctgctcatggaaacgtgtgctgtcaacaatggaggctgtgaccgcacctgtaaggatacttcgacaggtgtccactgcagttgtcctgttggattcactctccagttggatgggaggacatgtaaagatattgatgagtgccagacccgcaatggaggttgtgatcatttctgcaaaaacatcgtgggcagttttgactgcggctgcaagaaaggatttaaattattaacagatgagaagtcttgccaagatgtggatgaatgctctttggataggacctgtgaccacagctgcatcaaccaccctggcacatttgcttgtgcttgcaacccganggtacctgcccgggcgggcgntctagaactagtggatnccccggctgcangaattcgatatcaaacttatcgatccgtcgacctcnaggggggccccgtcccacttttggtncctttaatgaaggttnantgccccctggcgtaatcatngncatactngnntttncngnnnnnnnnnnnnnnnnnnnnnnnnnnnnnnnnnnnnnnnnnnnnnnnnnnnnnnnnnnnnnnnnnnnnnnnnnnnnnnnnnnnnnnnnnnnnnnnnnnnnnnnnnnnnnnnnnnnnnnnnnnnnnnnnnnnnnnnnnnnnnnnnnnnnnnnnnnnnnnnnnnnnnnnnnnnnnnnnnnnnnnnnnng

SEQ ID NO: 2140 - DNA, 874 bp, Homo sapiens
  misc_feature 3, 6, 13, 15, 24, 461, 509, 552, 560, 601, 612, 619, 643,682, 692, 695, 722, 723, 727, 729, 730, 731, 732, 733, 734,735, 736, 737, 738, 739, 740, 741, 742, 743, 744, 745, 746,747, 748, 749, 750, 751, 752, 753, 754, 755, 756, 757: n = A,T,C or G
  misc_feature 758, 759, 760, 761, 762, 763, 764, 765, 766, 767, 768, 769,770, 771, 772, 773, 774, 775, 776, 777, 778, 779, 780, 781,782, 783, 784, 785, 786, 787, 788, 789, 790, 791, 792, 793,794, 795, 796, 797, 798, 799, 800, 801, 802, 803, 804: n = A,T,C or G
  misc_feature 805, 806, 807, 808, 809, 810, 811, 812, 813, 814, 815, 816,817, 818, 819, 820, 821, 822, 823, 824, 825, 826, 827, 828,829, 830, 831, 832, 833, 834, 835, 836, 837, 838, 839, 840,841, 842, 843, 844, 845, 846, 847, 848, 849, 850, 851: n = A,T,C or G
  misc_feature 852, 853, 854, 855, 856, 857, 858, 859, 860, 861, 862, 863,864, 865, 866, 867, 868, 869, 870, 871, 872, 873: n = A,T,C or G
gcngtntcgactnantatagggcnaattggagctccaccgcggtggcggccgccgggcaggtacgcggggctgcttaaaactcttcagaggttcaccatcgcttccagaaaaagatcaatactcctgacgtggcaacctgtcgagactcaggaccgctaggaaatcagctcttgtttacccctctatccattacactacgatccagctgggtttaggcatcacttcctctgagcaatcctccctgatgtcatgaggcagtgctgagtgccttctctggaccctctgtttacttgcctgttaaatcctgaacatctggaagggagtcgtgttcaagcaacatatctacgccttgcagcacggtgcctggcctgcagctggtgttccgcaaacagctgctgactgacgggatgcatcgatgtgtttcccaagacatccaggaggggatattggcgcaaacaangccttgaaagctccatgatagagatgacagagctattagaagaaagcngcccaaatcctgagtcaccaatgtttgaagaaaaaccttccangagaaggnacctcgcccgctctaaaactaatggattcccccggctgganggaattccatnttcaacntttttgatacccgtcgaactccanggggggggcccggacccaacttttggtccctttaatganggttaattgngcnctttggcgtaatcatggcattagctgnntttngnnnnnnnnnnnnnnnnnnnnnnnnnnnnnnnnnnnnnnnnnnnnnnnnnnnnnnnnnnnnnnnnnnnnnnnnnnnnnnnnnnnnnnnnnnnnnnnnnnnnnnnnnnnnnnnnnnnnnnnnnnnnnnnnnnnnnnnnnnnnnnnnng

SEQ ID NO: 2141 - DNA, 883 bp, Homo sapiens
  misc_feature 550, 605, 612, 619, 637, 646, 676, 683, 746, 784, 802, 816,824, 828, 875: n = A,T,C or G
gccgtatcgactactatagggcgaattggagctccccgcggtggcggccgaggtaccaggctaggcagctctggagaaagcagaagtggataaataaggtgtggactcaccaaagacagttccaaggtcaatttcactctgacacactctctgtgatcttccacagtcagcacaatgcctgcccctgtgggtgttgtataaatatttgttgaatgaatgaatcaatcattcaacagaccaaggccaaatcagaaccccaaaccctaaggtctttatactctcactgtccatccatcgatcttcctgtcagaaatcagaatatacctttgcaataccctttgctagcctttcagttatcttttgaatagaggctctgagccttgaaaatattgcctgggaaatattaacacccatttgaagtatctcccaaacacctcaattaactatatggtgctgtctggccaggaccttatttcagtataatgtgaacctgagacagcaacacgtactagtcgcatccttgaaatgcctaacaccttcattcatgctnggccctggattgcggggagatctgcaaaacctcatcagagccgtggcttcccaangggccangtcacanggcactttgcagcctganttcatccangactgcctcttggctgacccactaatttgntgaccangttgggtgcccttggcagcttccacccccacgtaaaatctccggcaacttttctacttaaaanaatgggggtttgaaactctgttggccttgatccacagnaggaaatacatattgcantgacccaatgcatntttgcctncaangggtttatcattctaccttccccttttccccccaacccggttcctgnccggcggc

SEQ ID NO: 2142 - DNA, 884 bp, Homo sapiens
  misc_feature 31, 73, 113, 178, 183, 185, 228, 311, 316, 347, 376, 404,482, 557, 593, 603, 631, 657, 659, 687, 697, 700, 707, 710,714, 715, 723, 724, 725, 736, 738, 746, 748, 755, 763, 768,769, 770, 772, 775, 783, 790, 791, 795, 797, 798, 799: n = A,T,C or G
  misc_feature 800, 801, 802, 803, 804, 806, 817, 818, 819, 822, 826, 830,831, 832, 833, 834, 835, 836, 837, 838, 839, 840, 841, 842,845, 848, 849, 850, 851, 852, 853, 854, 855, 856, 857, 859,861, 865, 866, 868, 869, 871, 872, 873, 874, 875, 876: n = A,T,C or G
  misc_feature 880, 882, 884: n = A,T,C or G
gggacgcgcgtaatacgactactatagggcnaattggagctccaccgcggtggcggcccgctctagaactagnggatcccccgggctgcaggaattcgatatcaagcttatcnataccgtcacctcgagggggggcccggtacccagcttttgttccctttagtgagggttaattgcncgctngncgtaatcatggtcatagctgtttcctgacattaatttgcttangaaggaggattttcttaaacatcaagtctgccttttctctaaggctttatgatatgaggcatccgtattcattgaatatggancttanaaatataggtattgaggggccaccacaccangctgacttcttgatcttgaattttataangattctaaagggcattgggtagttccangacatctgaaaaccttgagggaaggtgcattcctctgatttttgtgcctctgcccagcagtctggcttctaacaaaantggtcaaaggaatgcctgactcacatgaaggcttcttgcaaaagtgttccaaaaggaaaaaagaaagggaccaantgtcctaacttcctccaaaaagactcataagacaancattggcttncaacctgccaaaaatggggggaaatttngtttttacaattcacccagggaaaangngaaaacccctttcccggaaaataaccangggaggcttnatnaatttanaanaaanntttttggnnncaatttaaaangnaaaaaccntnccctttngggggggnaaaannngngcngggggganaaaaggnnaaantnnnnnnnncncctaaaaaaannnttntttnaagnnnnnnnnnnnnnccnccnnnnnnnnnnancnaaanngnntnnnnnnttcnanan

SEQ ID NO: 2143 - DNA, 876 bp, Homo sapiens
  misc_feature 2, 272, 347, 365, 366, 513, 514, 538, 543, 566, 583, 584,585, 586, 587, 588, 589, 590, 591, 592, 593, 594, 595, 596,597, 598, 599, 600, 601, 602, 603, 604, 605, 606, 607, 608,609, 610, 611, 612, 613, 614, 615, 616, 617, 618, 619: n = A,T,C or G
  misc_feature 620, 621, 622, 623, 624, 625, 626, 627, 628, 629, 630, 631,632, 633, 634, 635, 636, 637, 638, 639, 640, 641, 642, 643,644, 645, 646, 647, 648, 649, 650, 651, 652, 653, 654, 655,656, 657, 658, 659, 660, 661, 662, 663, 664, 665, 666: n = A,T,C or G
  misc_feature 667, 668, 669, 670, 671, 672, 673, 674, 675, 676, 677, 678,679, 680, 681, 682, 683, 684, 685, 686, 687, 688, 689, 690,691, 692, 693, 694, 695, 696, 697, 698, 699, 700, 701, 702,703, 704, 705, 706, 707, 708, 709, 710, 711, 712, 713: n = A,T,C or G
  misc_feature 714, 715, 716, 717, 718, 719, 720, 721, 722, 723, 724, 725,726, 727, 728, 729, 730, 731, 732, 733, 734, 735, 736, 737,738, 739, 740, 741, 742, 743, 744, 745, 746, 747, 748, 749,750, 751, 752, 753, 754, 755, 756, 757, 758, 759, 760: n = A,T,C or G
  misc_feature 761, 762, 763, 764, 765, 766, 767, 768, 769, 770, 771, 772,773, 774, 775, 776, 777, 778, 779, 780, 781, 782, 783, 784,785, 786, 787, 788, 789, 790, 791, 792, 793, 794, 795, 796,797, 798, 799, 800, 801, 802, 803, 804, 805, 806, 807: n = A,T,C or G
  misc_feature 808, 809, 810, 811, 812, 813, 814, 815, 816, 817, 818, 819,820, 821, 822, 823, 824, 825, 826, 827, 828, 829, 830, 831,832, 833, 834, 835, 836, 837, 838, 839, 840, 841, 842, 843,844, 845, 846, 847, 848, 849, 850, 851, 852, 853-875: n = A,T,C or G
gncgtatacgactactataggggcgaattggagctccccgcggtggccggccgcccgggcaggtacgcgggatttgtgtgaccttccaccttaattttcatcacatgtggactctagtatcacctggattattcagattgattttcttacttaaattcagtagaaaaattgtgaatctgactatgaggggaggcagtatgaactcattaaatatgtattcctgtttggagaaatattcgctggatagctagaattttagattgggaaatcangttttacatcagcaatcaaatgaatagtagtttagaagttttattttttaacttctcattttgaaataatttcanatttacaaaaaaattgcnnaaatagaacaagccatttcagctttcccagtgttagcatttcatattaaccacagtacctcgggccgctctagaactagtggatcccccggctgcaagaattcggtttaagcttatcgataccgtcgacctcgaggggggggcccgnnccccacttttggtccctttatganggttnattgcccgcttggcgtaatcatnggcatagctggttccgnnnnnnnnnnnnnnnnnnnnnnnnnnnnnnnnnnnnnnnnnnnnnnnnnnnnnnnnnnnnnnnnnnnnnnnnnnnnnnnnnnnnnnnnnnnnnnnnnnnnnnnnnnnnnnnnnnnnnnnnnnnnnnnnnnnnnnnnnnnnnnnnnnnnnnnnnnnnnnnnnnnnnnnnnnnnnnnnnnnnnnnnnnnnnnnnnnnnnnnnnnnnnnnnnnnnnnnnnnnnnnnnnnnnnnnnnnnnnnnnnnnnnnnnnnnnnnnnnnnnnnnnnnnnnnnnnnnnnnnnnnnnnnnnnnnnnc

SEQ ID NO: 2144 - DNA, 892 bp, Homo sapiens
  misc_feature 3, 130, 141, 177, 406, 487, 493, 494, 495, 496, 497, 498,499, 500, 501, 502, 503, 504, 505, 506, 507, 508, 509, 510,511, 512, 513, 514, 515, 516, 517, 518, 519, 520, 521, 522,523, 524, 525, 526, 527, 528, 529, 530, 531, 532, 533: n = A,T,C or G
  misc_feature 534, 535, 536, 537, 538, 539, 540, 541, 542, 543, 544, 545,546, 547, 548, 549, 550, 551, 552, 553, 554, 555, 556, 557,558, 559, 560, 561, 562, 563, 564, 565, 566, 567, 568, 569,570, 571, 572, 573, 574, 575, 576, 577, 578, 579, 580: n = A,T,C or G
  misc_feature 581, 582, 583, 584, 585, 586, 587, 588, 589, 590, 591, 592,593, 594, 595, 596, 597, 598, 599, 600, 601, 602, 603, 604,605, 606, 607, 608, 609, 610, 611, 612, 613, 614, 615, 616,617, 618, 619, 620, 621, 622, 623, 624, 625, 626, 627: n = A,T,C or G
  misc_feature 628, 629, 630, 631, 632, 633, 634, 635, 636, 637, 638, 639,640, 641, 642, 643, 644, 645, 646, 647, 648, 649, 650, 651,652, 653, 654, 655, 656, 657, 658, 659, 660, 661, 662, 663,664, 665, 666, 667, 668, 669, 670, 671, 672, 673, 674: n = A,T,C or G
  misc_feature 675, 676, 677, 678, 679, 680, 681, 682, 683, 684, 685, 686,687, 688, 689, 690, 691, 692, 693, 694, 695, 696, 697, 698,699, 700, 701, 702, 703, 704, 705, 706, 707, 708, 709, 710,711, 712, 713, 714, 715, 716, 717, 718, 719, 720, 721: n = A,T,C or G
  misc_feature 722, 723, 724, 725, 726, 727, 728, 729, 730, 731, 732, 733,734, 735, 736, 737, 738, 739, 740, 741, 742, 743, 744, 745,746, 747, 748, 749, 750, 751, 752, 753, 754, 755, 756, 757,758, 759, 760-891: n = A,T,C or G
ggncgcgcgtaatcgactactatagggcgaattggagctccccgcggtggcggcccgaggtactagctcccttacttactaatcatagaactgtggatatatttttaaaaattattagtgtctttagttntctcacttgtnaaacactgaacagagctcctgtcattcagagctgtngcaacatgacagttaatagtgtaaagcactgacctggggcctgcatgtagtaggcactcaataaatcgtggcaatcatgacattggtgatgatgacactcagtaactagtaggtgttattattaaaagtcacaaaaacagctagtacctgcccgggcggccgctctagaactagtggatccccggctgcaagaattcgatatcaagcttatcgatccgtcgacctcganggggggcccggtacccagcttttgttccctttaatgaagggttaattgcgcgcttggcgtaatcatggtcatagctgtttnctggannnnnnnnnnnnnnnnnnnnnnnnnnnnnnnnnnnnnnnnnnnnnnnnnnnnnnnnnnnnnnnnnnnnnnnnnnnnnnnnnnnnnnnnnnnnnnnnnnnnnnnnnnnnnnnnnnnnnnnnnnnnnnnnnnnnnnnnnnnnnnnnnnnnnnnnnnnnnnnnnnnnnnnnnnnnnnnnnnnnnnnnnnnnnnnnnnnnnnnnnnnnnnnnnnnnnnnnnnnnnnnnnnnnnnnnnnnnnnnnnnnnnnnnnnnnnnnnnnnnnnnnnnnnnnnnnnnnnnnnnnnnnnnnnnnnnnnnnnnnnnnnnnnnnnnnnnnnnnnnnnnnnnnnnnnnnnnnnnnnnnnnnnnnnnnnnnnnnnnnnnnnnnnnnnnnnnnnnnnnnnnnnnnnnnnnnnnnnnnc

SEQ ID NO: 2145 - DNA, 866 bp, Homo sapiens
  misc_feature 24, 543, 560, 567, 576, 583, 587, 592, 615, 617, 625, 626,631, 635, 636, 637, 638, 639, 640, 641, 642, 643, 644, 645,646, 647, 648, 649, 650, 651, 652, 653, 654, 655, 656, 657,658, 659, 660, 661, 662, 663, 664, 665, 666, 667, 668: n = A,T,C or G
  misc_feature 669, 670, 671, 672, 673, 674, 675, 676, 677, 678, 679, 680,681, 682, 683, 684, 685, 686, 687, 688, 689, 690, 691, 692,693, 694, 695, 696, 697, 698, 699, 700, 701, 702, 703, 704,705, 706, 707, 708, 709, 710, 711, 712, 713, 714, 715: n = A,T,C or G
  misc_feature 716, 717, 718, 719, 720, 721, 722, 723, 724, 725, 726, 727,728, 729, 730, 731, 732, 733, 734, 735, 736, 737, 738, 739,740, 741, 742, 743, 744, 745, 746, 747, 748, 749, 750, 751,752, 753, 754, 755, 756, 757, 758, 759, 760, 761, 762: n = A,T,C or G
  misc_feature 763, 764, 765, 766, 767, 768, 769, 770, 771, 772, 773, 774,775, 776, 777, 778, 779, 780, 781, 782, 783, 784, 785, 786,787, 788, 789, 790, 791, 792, 793, 794, 795, 796, 797, 798,799, 800, 801, 802, 803, 804, 805, 806, 807, 808, 809: n = A,T,C or G
  misc_feature 810, 811, 812, 813, 814, 815, 816, 817, 818, 819, 820, 821,822, 823, 824, 825, 826, 827, 828, 829, 830, 831, 832, 833,834, 835, 836, 837, 838, 839, 840, 841, 842, 843, 844, 845,846, 847, 848, 849, 850, 851, 852, 853, 854, 855, 856: n = A,T,C or G
  misc_feature 857, 858, 859, 860, 861, 862, 863, 864, 865, 866: n = A,T,C or G
agccgtatcgactactatatggcnaattggagctccccgcggtggcggccgcccgggcaggtaccaggttcaaatagtcagcagctcatcataatcaatgagcgaggacataaagtaggaaaaatgcatcaccatggtgagcaaggaaagcaagttattggaggcacatgttaacacataaaatataaaattaatatgatcacactggaaaggcttgcctgagcccacagtttgaatgcctacaataagatgagatgcacaacaaaaagcaagagaacctgatcaagtgggtgacctggccatggtgctctcatcagtggggacccaaatgcttatgtggactcaccaggtatcgaattagacatgaataggagtgtttgttgtgatggcaagaaactatataatcaaatgaatacaatgaaactttaaaaataattgtaagatctttacaccagccaatgtcatgttgcgtacctcggccgctctagaactagtggatcccccgggctgcaggaattcgatatcaagcttatcgatccgtcnacctcaaggggggcccngtcccancttttgttncctttantganggttnattgcgcgcttggcgtaatcatngncatagctnnggttnctgnnnnnnnnnnnnnnnnnnnnnnnnnnnnnnnnnnnnnnnnnnnnnnnnnnnnnnnnnnnnnnnnnnnnnnnnnnnnnnnnnnnnnnnnnnnnnnnnnnnnnnnnnnnnnnnnnnnnnnnnnnnnnnnnnnnnnnnnnnnnnnnnnnnnnnnnnnnnnnnnnnnnnnnnnnnnnnnnnnnnnnnnnnnnnnnnnnnnnnnnnnnnnnnnnnnnnnnnnnnnnnnnnnnnnnnn

SEQ ID NO: 2146 - DNA, 493 bp, Homo sapiens
  misc_feature 304, 441: n = A,T,C or G
gcgaatacgactactatagggcgaattggagctccaccgcggtggcggccgcccgggcaggtacctggtgcagcccatatccatacacagtctaactctggatcccacactctaaaccgcgatgcagtaatacctggtttcagtgcacctcagattcgtcctcctaggctgccgctggaagactagcagctcttcattctgttttccttttcattgtcatagattatttgttacaactgtctgtggaatgaaatcagaatatttttaacaaatggatataaatcatgcgtcatttctctatggntaacatgtgtctccttaagttgaaaatgaaattccaaacggactaggctatatacatgattgttttccactctgcctcccttttaaagatgtcacaacctgccatttataatgcagagcggtttctcgctccatctntcctattttctaaccccggtaacaaaaaccctcctgcagacagcaccttttg

SEQ ID NO: 2147 - DNA, 709 bp, Homo sapiens
  misc_feature 76, 80, 84, 85, 86, 87, 88, 94, 100, 109, 127, 154, 156,159, 160, 171, 185, 189, 192, 195, 196, 208, 215, 219, 468,481, 489, 502, 512, 515, 523, 530, 535, 544, 548, 556, 562,565, 568, 576, 577, 579, 598, 599, 603, 613, 616, 619: n = A,T,C or G
  misc_feature 620, 622, 625, 628, 630, 631, 637, 643, 646, 650, 655, 656,660, 661, 665, 667, 669, 675, 676, 679, 681, 685, 687, 689,690, 691, 692, 693, 696, 699, 700, 701, 704, 709: n = A,T,C or G
gagccccgccgtaatacggactcactatgagggcgaattggagctccaccgcggtggcggccgctctagaactagnggancccnnnnnctgcangaattncatatcaancttatctataccatctanctcaaaggggggcccggtacccagctntngtnncctttactganggttaatatgctcncttngcntanncatggtcataantgttttnctgncatcctggtcttggccagcaccatcactatcttaaaggacttctccatcttactcatggaaggtgtgccaaagagcctgaattacggtggtgtgaaagagcttattttagcagtcgacggggtgctgtctgtgcacagcctgcacatctggtctctaacaatgaatcaagtaattctctcagctcatgttgctacagcagccagctgggacagccaagtggttcggagagaaattgctaaagcccttancaaaagctttacnatgcactnactcaccattcanatggaatctncanttgaccangaccccnactgncttttctgngaanacccctgngactanctnaancacaccgnnantttccaaatttgacaggcnncttnaaactgctgnttncanntntgnttntnnaaatanggaccnaangaanaaatnntatnntggngnangctatnnatntnttantnannnnnttnacnnnaangaaan

SEQ ID NO: 2148 - DNA, 708 bp, Homo sapiens
  misc_feature 61, 62, 67, 78, 89, 95, 96, 101, 130, 269, 297, 328, 368,370, 389, 390, 399, 402, 412, 415, 425, 428, 429, 430, 432,438, 439, 442, 444, 455, 459, 461, 462, 469, 472, 477, 481,482, 483, 491, 493, 495, 497, 499, 504, 505, 509, 512: n = A,T,C or G
  misc_feature 513, 517, 521, 522, 526, 528, 530, 531, 534, 535, 536, 537,539, 540, 541, 548, 549, 550, 551, 552, 553, 557, 558, 559,560, 561, 565, 569, 570, 572, 573, 574, 575, 576, 577, 579,580, 581, 582, 585, 586, 587, 588, 590, 593, 594, 596: n = A,T,C or G
  misc_feature 600, 601, 602, 603, 604, 605, 606, 607, 608, 609, 610, 612,613, 614, 615, 616, 617, 618, 620, 621, 622, 623, 626, 628,629, 630, 631, 632, 635, 636, 637, 638, 640, 641, 642, 644,645, 646, 647, 648, 649, 650, 652, 653, 654, 655, 656: n = A,T,C or G
  misc_feature 657, 658, 659, 660, 661, 662, 665, 666, 667, 668, 670, 672,673, 674, 675, 676, 678, 679, 680, 683, 684, 685, 686, 687,688, 689, 690, 691, 692, 693, 694, 697, 698, 699, 701, 708: n = A,T,C or G
gagccccgccgtaatacgactcactatgagggcgaattggagctccaccgcggtggcgggnnaattncacgcttggcntactcatggcnataggnntttcntgtcaagcttatcgataccgtcgacctcnagggggggcccggtacccagcttttgttccctttagtgagggttaattgcgcgcttggcgtaatcatggtcatagctgtgttcctggaattctattatgtgaatgtaaacctatataatatatttagccattttctcanttggatattttggttatttctatgttgncacaattttaaatcacattgaaataaactangcccctttgactcctttctttctctcttactccatgtggnanactaaatgtggctgctaannttatttctnccnctatgtcttncanccaattctanatnnnantcaatnntananaccaccatggnggananngcatatncangcacnccannnaactgatntngncnancccanncctncanncatncctnncaangngnnaannnnannnaaaccannnnnnaacnnnnntatnaacnnannnnnnannnnaannnnancannanaccnnnnnnnnnnncnnnnnnnannnnaanannnnncannnnannncnnnnnnntnnnnnnnnnnnaannnnanannnnnannnaannnnnnnnnnnnaannncnaaaaaan

SEQ ID NO: 2149 - DNA, 515 bp, Homo sapiens
  misc_feature 25, 54, 97, 106, 107, 113, 122, 352, 382, 387, 466, 500,505, 513: n = A,T,C or G
cgccgaatacgactactatagggcnaattggagctccaccgcggtggcggccgntctacaactatgtggatcccccgggctgcatgaattcaatatnaagcttatnnataccntcgacctcnagggggggcccggtacccagcttttgttccctttagtgagggttaattgcgcgcttggcgtaatcatggtcatagctgtttcctgaccttctcacaccacatcttccaggattacacttttatgctacacctgcactgatcagtcttctactccagtctacattttgtcttcgtaaaaatgttgaggatgaatgctgttccactttcctttcctatagcgagatggcctncccgcgtacctgcccgggcggccgctctanaactnagttggatcccccgggctgcaggaattcgatatcaagcttatcgataccgtcgacctcgaaggggggcccggtacccanctttttgttccctttaagtgagggtttaaattgngcgcntttggacnta

SEQ ID NO: 2150 - DNA, 492 bp, Homo sapiens
  misc_feature 23: n = A,T,C or G
gcgtaatacactactatagggcnaattggagctccccgcggtggcggccgaggtactcacagctgcatcacactgaatatcatctccctgcactgccatttcatttgagcagggctttgcctgtcaagaacattcatatcttttgataaacagtgcattttttccctgatagtctgtatgggacagcctccttgtttgcatctgaaggacagggacttcaggacctcctgctgtggtcaccaaggaatcacattcaaacttctcagcaaggtgttatggtccttctcagtttgcctacgatccattgaagcaaaggtttccttctctcaatacaccctctgctttagccagggggacctcccactgtcctctctatgtgttctatttgttcctgactgttagtacctgcccgggcggccgctctagaactagtggatcccccgggctgcaggaattcgatatcaagcttatcgataccgtcgacctcgaggg

SEQ ID NO: 2151 - DNA, 707 bp, Homo sapiens
  misc_feature 3, 4, 11, 14, 18, 31, 564, 575, 585, 588, 597, 602, 638,652, 659, 671, 677, 678, 691, 697, 698: n = A,T,C or G
gannccgcgtntangacntactatggggctnattggagctccaccgcggtggcggccgcccgggcaggtacagaaagttcacatgagaatgccaaagtatcttgtattctgcatatcttacattgtgatggaaaagaaaaattcagaaatattaaaacatatttagttttatatttaccatgattataagtctccaatttttcttcaatattctaataatcttgtcttccaaaagtaaaataataattttcacagaaaagcagccaagtactgaaaataacagctacagttgttttttgataaacataatgagaaaccattaagcaatgcatttatttaaaaaattagttaattttatgtaaagtttatccagtcaaatgagtatgtagaataatttattataacaccttcatagtcattcctgtattacagaaatctcttttaagtaatgcaaagaagttggatgatttatttttttacttttttactttccaaatataaattcttcaaaagacagtagatagtctcaccccatcaggagtctagcgtgtgcctgggcaggcnggaatgctcangtttggaacngancttcttttnctgangggtgggcttccttcacttggaaggcgacttttaanctttttcctctttntatctgngcaccttccttntcgcannattcttcactctntggaanntgctttaac

SEQ ID NO: 2152 - DNA, 863 bp, Homo sapiens
  misc_feature 1, 9, 17, 26, 30, 34, 38, 41, 48, 49, 56, 58, 59, 62, 73,443, 479, 492, 523, 529, 542, 576, 582, 583, 586, 602, 613,619, 638, 641, 643, 652, 653, 655, 675, 681, 697, 703, 705,734, 742, 743, 760, 804, 807, 819, 828, 832, 833, 838: n = A,T,C or G
  misc_feature 854: n = A,T,C or G
nagccgtancgactcgnatattcgantacntgcngctnatnggagctnnccgtggngnncgncgcccgggcangtacgcgggacaaaagcccagaacacacatgctctcagggggcccaccagggttaaagagactgaaaaaataattttggctgcgaatttaagtgaggatgaacaccacgaggagcttcatatgcagaaatgaagtcctggctttcttaaaaaaaataaaaacactaatgcctcaacaacaactacaacagaaaccctttgggtttattatttcaagccaggtcatgctagtttcacaagagtttgtgaaaatggatgcacatgaatagagcctttaaaaactcgtgattaaagagaaagatttcacaagttgatggtttggtagaatggcagtcataaaaacaattgctctttggtatatgtattgggtnaaaaaaaagtttattttcttaccgtcctgcttattnaactttttttttnaaagccacttttttttccttcattatggtcnatttcntttgaaataaaanttcaggtgcaggggaaacttttttattttttttnatttannagnttcccatgtttggaantcttttggctnggcctnaaaccaaatatttccaagnccngnccttttttnntncaaaacccttgttttttggnttatgnccttaaagcctgggantaaccnanttttttttcaaaaaaaaaaatggttgctngggccaannggaaaaaggttttttgnccatgccttttccacctggcctttccgattggagttgggggccncanggtttttacccnccaaatatntttnnttttnaaggaacattttggtntttttgcac

SEQ ID NO: 2153 - DNA, 702 bp, Homo sapiens
  misc_feature 32, 431, 539, 540, 541, 543, 547, 549, 550, 551, 552, 553,554, 555, 556, 557, 558, 559, 560, 561, 562, 563, 564, 565,566, 567, 568, 569, 570, 571, 572, 573, 574, 575, 576, 577,578, 579, 580, 581, 582, 583, 584, 585, 586, 587, 588: n = A,T,C or G
  misc_feature 589, 590, 591, 592, 593, 594, 595, 596, 597, 598, 599, 600,601, 602, 603, 604, 605, 606, 607, 608, 609, 610, 611, 612,613, 614, 615, 616, 617, 618, 619, 620, 621, 622, 623, 624,625, 626, 627, 628, 629, 630, 631, 632, 633, 634, 635: n = A,T,C or G
  misc_feature 636, 637, 638, 639, 640, 641, 642, 643, 644, 645, 646, 647,648, 649, 650, 651, 652, 653, 654, 655, 656, 657, 658, 659,660, 661, 662, 663, 664, 665, 666, 667, 668, 669, 670, 671,672, 673, 674, 675, 676, 677, 678, 679, 680, 681, 682: n = A,T,C or G
  misc_feature 683, 684, 685, 686, 687, 688, 689, 690, 691, 692, 693, 694,695, 696, 697, 698, 699, 700, 701, 702: n = A,T,C or G
gagccccgcgtaatacgactcactatagggcnaattggagctccaccgcggtggcggccgaggtactgagaggagaacacacaagcagacagatggaggtgtccacaagacagttgggagtttgagtctaaaatttgagggattgatatagatagttatatttggggtttcttcactgatcagtgttagttaatagcctaagagtaaatgatacctagattaagaagagcagcgggctgtggaccgaactttgggcacaccatcaatgacgagttacccatgaaaaagccattagaagagttgatggagcatgaggagaccatgagaggacaacgtcacaggagttgggaagagggagtgagcgacactgacaagtacctgcccgggcggccgctctagaactagtggatcccccgggctgcaggaattcnatatcaagcttatcgatacccgtcgacctcgagggggggcccggtacccagcttttgttccctttagtgagggttaattgcgcgcttggcgtaatcatggtcatactnnntncctngnnnnnnnnnnnnnnnnnnnnnnnnnnnnnnnnnnnnnnnnnnnnnnnnnnnnnnnnnnnnnnnnnnnnnnnnnnnnnnnnnnnnnnnnnnnnnnnnnnnnnnnnnnnnnnnnnnnnnnnnnnnnnnnnnnnnnnnnnnnnnnnnnnnnnnnnnn

SEQ ID NO: 2154 - DNA, 870 bp, Homo sapiens
  misc_feature 3, 5, 6, 15, 21, 22, 29, 30, 42, 50, 52, 54, 60, 71, 83,86, 95, 98, 121, 122, 135, 137, 139, 140, 186, 369, 394,546, 641, 642, 661, 671, 677, 686, 690, 692, 693, 694, 705,708, 710, 720, 725, 734, 736, 739, 740, 742, 745, 758, 765: n = A,T,C or G
  misc_feature 776, 788, 793, 800, 804, 805, 807, 808, 811, 816, 822, 836,845, 846, 850, 853, 854, 855, 856, 858, 865, 867, 868, 869: n = A,T,C or G
tgncnnaatttgacnactatnnggcgaannggaactacaccntggtggcngncncccggncaggtagcttnctgtcccagctncangcacttctnccntacttcaccagggctggaatggnnagcatggcatggncngnngggaatggtcaacatggcatcctatgttttggagtctaactggcgngggtgtcctgcctcttccatccactttgcacaagttacttatcctctctaagcttcaggtttccttttcctcatctaaagaatggaaacacgtctgttaggattctttgattgcaagcaacagaaacagattcacttttgccagaaagggtaatgtattggaataatcttagttctctgccanaaacaaaggaaaaggccttgcaaanaatggaaactaggcaactccatggatcgagatgacagaagaagtatattctcctcagcattctgacaccagaatgactccaccctaaccatttgtcatcctgggttctcacagggtaaagcttgattggcttaccttggagtcatgtgtctncactttggtaggaaggaggggtaggggatttttgactgaacaggctccggaaccacaaggaactggggcagaaggcaactacttaaagaaaaatnnggaggtgctgctttccccnaaggaggaanaccaanacaaaaganacanannnaaaaatcccgngcncnttaaaaaaanaaaanaccccccgngnggnnanaanagaaaaaaaaacnttttatntgggaaaaacnttgggggggggnggggnccccccntttnntnnttntaaanggggtnaaagggcccttggngacccccgnnttanaannnntntttttanannnc

SEQ ID NO: 2155 - DNA, 862 bp, Homo sapiens
  misc_feature 3, 9, 13, 20, 25, 579, 590, 622, 648, 662, 734, 738, 751,764, 768, 778, 806, 815, 825, 856: n = A,T,C or G
gangcgcgntatngacatantatgntggctgattggagctccaccgcggtggcggccgaggtacgcggggctgcttaaaactcttcagaggttcaccatcgcttccagaaaaagatcaatactcctgacgcggcaacctgtcgagactcaggaccgctaggaaatcagctcttgtttacccctctatccattacactacgatccagctgggtttaggcatcacttcctctgagcaatcctccctgatgtcatgaggcagtgctgagtgccttctctggaccctctgtttacttgcctgttaaatcctgaacatctggaagggagtcgtgttcagcaacatatctacgccttgcagcacggtgcctggcctgcagctggtgttccgcaaacagctgctgactgacgggatgcatcggtattcacagggttactaagaagtgcttgtcctcggtcaggccaggaaagagagatgacagacttggtcccatcggcaaactctttacagacaaaaaatccacctcacccatctctacaagcttcagggctcaacacaggggctggcacatgaaagctcctttncttaccttttnctggccatgccaatatatgttttttgagtttntaaatcaatgaatgatgaagaatttnttgcaacttccttnaaaccgacaggtccacaaaaataatcttgcttctgaccttgacaacagaaatacatttttaaaaaactctgngggncctaaatagaacntttggggaattcntttnaaaatcaacnccttccttggtagggggaactggcaatnggcaaccanttgcttaaanttttttgttcaaaggcctacctgcctcctanacctta

SEQ ID NO: 2156 - DNA, 851 bp, Homo sapiens
  misc_feature 5, 8, 13, 16, 19, 518, 560, 584, 623, 634, 636, 637, 638,639, 640, 641, 643, 644, 645, 646, 647, 648, 649, 650, 651,652, 653, 654, 655, 656, 657, 658, 659, 660, 661, 662, 663,664, 665, 666, 667, 668, 669, 670, 671, 672, 673, 674: n = A,T,C or G
  misc_feature 675, 676, 677, 678, 679, 680, 681, 682, 683, 684, 685, 686,687, 688, 689, 690, 691, 692, 693, 694, 695, 696, 697, 698,699, 700, 701, 702, 703, 704, 705, 706, 707, 708, 709, 710,711, 712, 713, 714, 715, 716, 717, 718, 719, 720, 721: n = A,T,C or G
  misc_feature 722, 723, 724, 725, 726, 727, 728, 729, 730, 731, 732, 733,734, 735, 736, 737, 738, 739, 740, 741, 742, 743, 744, 745,746, 747, 748, 749, 750, 751, 752, 753, 754, 755, 756, 757,758, 759, 760, 761, 762, 763, 764, 765, 766, 767, 768: n = A,T,C or G
  misc_feature 769, 770, 771, 772, 773, 774, 775, 776, 777, 778, 779, 780,781, 782, 783, 784, 785, 786, 787, 788, 789, 790, 791, 792,793, 794, 795, 796, 797, 798, 799, 800, 801, 802, 803, 804,805, 806, 807, 808, 809, 810, 811, 812, 813, 814, 815: n = A,T,C or G
  misc_feature 816, 817, 818, 819, 820, 821, 822, 823, 824, 825, 826, 827,828, 829, 830, 831, 832, 833, 834, 835, 836, 837, 838, 839,840, 841, 842, 843, 844, 845, 846, 847, 848, 849, 850, 851: n = A,T,C or G
gcgcntancgacntantanatggctgattggagctccccgcggtggcggccgaggtactgaactgggagggttttagtctgatagccacaattttgacctaggcaggaagctttacagcttgaggcagtttcatggtctgaagacaaacttcttgtgacttgctgccggtgttggactgaggagagagcctcactgggtcaggagcacgagaacaaagtggatcccactaccacatcccacccctcctgtttcagaggcagatcatgggaccaggactactgagagttccatggccctacccatcatctgaaatgcccaagaactcctcccgattaacaaaggtcaagcataaactctattgccaccaccacagctggtcctcacttttaggtgctacctcctgtcctaaaggttgatctacacagtcccttacaacatctgccgactcaagagcacccgcgtacctgcccgggcggccgctctagaactagtggatcccccgggctgcaggaattcnatatcaagcttatcgataccgtcgacctcgagggggggcccngtacccaacttttgttccctttantgagggttaattgcgcccttggcgtaatcatggtcatancttgttttcgngnnnnnnannnnnnnnnnnnnnnnnnnnnnnnnnnnnnnnnnnnnnnnnnnnnnnnnnnnnnnnnnnnnnnnnnnnnnnnnnnnnnnnnnnnnnnnnnnnnnnnnnnnnnnnnnnnnnnnnnnnnnnnnnnnnnnnnnnnnnnnnnnnnnnnnnnnnnnnnnnnnnnnnnnnnnnnnnnnnnnnnnnnnnnnnnnnnnnnnnnnnnnnnnnnnnnnn

SEQ ID NO: 2157 - DNA, 891 bp, Homo sapiens
  misc_feature 7, 9, 28, 444, 445, 446, 447, 448, 449, 450, 451, 452, 453,454, 455, 456, 457, 458, 459, 460, 461, 462, 463, 464, 465,466, 467, 468, 469, 470, 471, 472, 473, 474, 475, 476, 477,478, 479, 480, 481, 482, 483, 484, 485, 486, 487, 488: n = A,T,C or G
  misc_feature 489, 490, 491, 492, 493, 494, 495, 496, 497, 498, 499, 500,501, 502, 503, 504, 505, 506, 507, 508, 509, 510, 511, 512,513, 514, 515, 516, 517, 518, 519, 520, 521, 522, 523, 524,525, 526, 527, 528, 529, 530, 531, 532, 533, 534, 535: n = A,T,C or G
  misc_feature 536, 537, 538, 539, 540, 541, 542, 543, 544, 545, 546, 547,548, 549, 550, 551, 552, 553, 554, 555, 556, 557, 558, 559,560, 561, 562, 563, 564, 565, 566, 567, 568, 569, 570, 571,572, 573, 574, 575, 576, 577, 578, 579, 580, 581, 582: n = A,T,C or G
  misc_feature 583, 584, 585, 586, 587, 588, 589, 590, 591, 592, 593, 594,595, 596, 597, 598, 599, 600, 601, 602, 603, 604, 605, 606,607, 608, 609, 610, 611, 612, 613, 614, 615, 616, 617, 618,619, 620, 621, 622, 623, 624, 625, 626, 627, 628, 629: n = A,T,C or G
  misc_feature 630, 631, 632, 633, 634, 635, 636, 637, 638, 639, 640, 641,642, 643, 644, 645, 646, 647, 648, 649, 650, 651, 652, 653,654, 655, 656, 657, 658, 659, 660, 661, 662, 663, 664, 665,666, 667, 668, 669, 670, 671, 672, 673, 674, 675, 676: n = A,T,C or G
  misc_feature 677, 678, 679, 680, 681, 682, 683, 684, 685, 686, 687, 688,689, 690, 691, 692, 693, 694, 695, 696, 697, 698, 699, 700,701, 702, 703, 704, 705, 706, 707, 708, 709, 710, 711, 712,713, 714, 715, 716, 717, 718, 719, 720-891: n = A,T,C or G
agccgtntngacgcgcgttatacgactnactatagggcgaattggagctccccgcggtggcggccgaggtactttcaagccaggaagtaaatttgcattacaaaagtcaaattcctttccctggtggtagccatgcaaaagacttggccactttttcactcttgtccagggaagaaattctagaagtaggaacccatcttagtcagagtcagggccacataaaaagagcaaaaaggtcatctggcatagaccacctccctgcttcctaatgtacctgcccgggcggccgctctagaactagtggatcccccgggctgcaggaattcgatatcaagcttatcgataccgtcgacctcgagggggggcccggtacccagcttttgttccctttagtgagggttaattgcgcgcttggcgtaatcatggtcatagctgtttcctgannnnnnnnnnnnnnnnnnnnnnnnnnnnnnnnnnnnnnnnnnnnnnnnnnnnnnnnnnnnnnnnnnnnnnnnnnnnnnnnnnnnnnnnnnnnnnnnnnnnnnnnnnnnnnnnnnnnnnnnnnnnnnnnnnnnnnnnnnnnnnnnnnnnnnnnnnnnnnnnnnnnnnnnnnnnnnnnnnnnnnnnnnnnnnnnnnnnnnnnnnnnnnnnnnnnnnnnnnnnnnnnnnnnnnnnnnnnnnnnnnnnnnnnnnnnnnnnnnnnnnnnnnnnnnnnnnnnnnnnnnnnnnnnnnnnnnnnnnnnnnnnnnnnnnnnnnnnnnnnnnnnnnnnnnnnnnnnnnnnnnnnnnnnnnnnnnnnnnnnnnnnnnnnnnnnnnnnnnnnnnnnnnnnnnnnnnnnnnnnnnnnnnnnnnnnnnnnnnnnnnnnnnnnnnnnnnnnnnnnnnnnnnnn

SEQ ID NO: 2158 - DNA, 999 bp, Homo sapiens
  misc_feature 4, 10, 180, 209, 226, 244, 245, 257, 263, 283, 284, 285,302, 307, 312, 316, 328, 332, 335, 337, 344, 347, 351, 353,360, 366, 369, 371, 372, 374, 375, 377, 378, 380, 387, 390,391, 392, 393, 399, 400, 408, 412, 416, 428, 429, 430: n = A,T,C or G
  misc_feature 434, 436, 439, 444, 453, 460, 461, 463, 468, 472, 475, 484,485, 488, 491, 492, 493, 494, 499, 500, 507, 512, 513, 516,519, 524, 525, 527, 530, 531, 532, 546, 548, 550, 558, 559,564, 566, 567, 569, 574, 580, 588, 589, 591, 592, 599: n = A,T,C or G
  misc_feature 603, 604, 606, 609, 612, 617, 621, 622, 630, 632, 644, 647,649, 651, 657, 665, 668, 669, 670, 675, 680, 682, 684, 698,701, 704, 706, 711, 713, 714, 716, 719, 722, 724, 728, 729,734, 735, 738, 740, 742, 743, 747, 751, 754, 758, 762: n = A,T,C or G
  misc_feature 764, 765, 766, 768, 770, 774, 775, 780, 788, 793, 794, 800,801, 813, 817, 818, 819, 823, 830, 832, 838, 839, 841, 844,845, 848, 856, 864, 866, 868, 870, 872, 873, 876, 877, 880,881, 883, 895, 902, 910, 912, 917, 921, 927, 929, 931: n = A,T,C or G
  misc_feature 932, 949, 951, 953, 954, 956, 961, 964, 966, 968, 972, 975,976, 978, 980, 981, 983, 985, 986, 991, 994: n = A,T,C or G
gtantacgantcctatagggcgaattggagctccccgcggtggcggcccgaggtacgtggcgtagcattccatgttcagctttgacatttattttctcatatcaaccctttttacacgtgaaacacaatctcgctcttgaagtcttaactgcacgatctgtgaaacctgtatttatattntcttcagtgtattcttgtcgtgtgtgtgncctatacaaaccaaatnaaaaccttccaaatctanngtattcattctntcatanggagcaagaggagtcagttnnnatactatcactggacgnatttngtggntggntttgtcatattnactnaanantggaaantanatcnantgctggntttggnagngnnanncnnanaagtctntcnnnncatttnntcctgganttcngatngtcaataagtannnttgnanatnaaagntcttgagtngtggatnntngtganacgnganttcagtagnngtnctnnnnacatnntgcctanttgtnntcnttncgttnngnccnnntatcattattttgncngncacaattnngatgngnngntcttntttctntctaatgnncnntataggntatnngnctncgntattncgtnngtgtagangnggcgtgtgtatngtntngngctgcnagtgtgtntannntatgntatcntngnataatgtgcgtatntcnagnantcgcncnncnatntanancgcnntcgtnncgnancnncatncgtntancacntatntnnncntncatnngctcnttctagtntgtgnncacatnncgtcacatattntgcnnncgcntattgtncngagttnntngcnncanacgctaanatcgtgtntncntntnntgnnatnncncgcgtgagtacnttgcgcntttctgantntgtantagnggtgtncncnntgtgatgtgtgcatatncntnnantgtgnacntngnattnatnntntnntntnntatgntgnatccg

SEQ ID NO: 2159 - DNA, 1018 bp, Homo sapiens
  misc_feature 263, 276, 287, 294, 295, 310, 311, 313, 316, 320, 323, 325,327, 328, 337, 352, 358, 364, 365, 375, 385, 400, 406, 407,413, 414, 416, 421, 422, 423, 427, 428, 429, 430, 432, 436,438, 439, 443, 446, 450, 455, 460, 461, 462, 463, 464: n = A,T,C or G
  misc_feature 466, 469, 470, 473, 475, 477, 483, 484, 500, 501, 506, 512,513, 514, 515, 524, 526, 527, 533, 534, 536, 543, 545, 547,553, 564, 568, 572, 590, 592, 600, 604, 613, 616, 620, 624,628, 631, 633, 634, 635, 639, 645, 646, 647, 648, 649: n = A,T,C or G
  misc_feature 654, 657, 658, 659, 664, 667, 668, 674, 675, 687, 689, 697,702, 703, 704, 706, 710, 712, 716, 717, 721, 723, 731, 734,737, 740, 742, 744, 745, 748, 750, 751, 767, 768, 774, 775,777, 781, 783, 789, 794, 798, 800, 805, 808, 810, 814: n = A,T,C or G
  misc_feature 816, 817, 818, 824, 825, 828, 836, 837, 839, 843, 844, 847,849, 854, 855, 865, 867, 868, 869, 871, 880, 886, 893, 895,902, 903, 904, 906, 909, 910, 911, 912, 914, 916, 917, 921,924, 929, 935, 938, 942, 944, 946, 953, 958, 963, 970: n = A,T,C or G
  misc_feature 973, 981, 983, 985, 991, 993, 998, 999, 1000, 1002, 1003,1009, 1010, 1011, 1012, 1014, 1016, 1017: n = A,T,C or G
cgcgtaatacgactcactataggggcgaattggagctccaccgcggtggcggcccgcccgggcaggtacacaggtaaccacatttagatggactgggatgttgccacacatacaagcattgataactggcttctcattacctgaatacattcttctgtcagagcaacagactcagctatgcttctggcaaaattgttcttaattctctattgattaatttattcggtaagtatttattgggtattttctgtctgaaaagtgcnatttccaaggtgncttaatgtgtntctgttnngtggttgtataattnnangcnatanatnancnngataatatnctataattaatgttnaacttngcgtannttaatggatnttaatttganttatcagatatcttnatggtnntaatanngnactannntctnnnngnagantnntatnatnggtntatangatannnnncnaannggnananttaatnnctatgttatactaatnnttaantataannnnttatgttantnncagagnntnactgtanantncggtgntatatgatacnatantgtnttattaagttgtaatacntnctgtgtgnagcnacttgatanttntatnttcntagntgntnnnaaantgtatnnnnntcacnccnnnataanatnngatagnncactctaatgcntnatgtaccnacgannncnatantntatnnaatntncgtactantgngtntantntnnatntnntcaccattatataagnntatatnntntatntngctttnatagnaganantattntcncntgtntnnnatgtanntcnttatattnntntatnngananataanngtatctatcntnnntnttatgcgtntaattnttcagtntncataacnnnantgnnnncngnntcantanatacnattgcnatnctcncntnaataatncatgnacgcntattacnttntgtatccntnantgtgantngctgnnnannttgaannnntntnng

SEQ ID NO: 2160 - DNA, 890 bp, Homo sapiens
  misc_feature 423, 459, 468, 485, 564, 593, 598, 608, 622, 629, 641, 673,676, 678, 697, 709, 711, 713, 723, 724, 727, 735, 738, 739,741, 745, 748, 750, 780, 782, 783, 786, 788, 789, 791, 794,795, 797, 798, 801, 813, 815, 818, 821, 822, 823, 829: n = A,T,C or G
  misc_feature 830, 838, 839, 841, 842, 843, 844, 845, 846, 847, 852, 853,856, 860, 863, 864, 866, 868, 870, 874, 877, 879, 880, 881,882, 889: n = A,T,C or G
gtgccgcgtatcgactcctatagggcgaattggagctccccgcggtggcggccgaggtactaacagtcaggaacaaatagaacacatatagaggacagtgggaggtccccctggctaaagcagagggtgtattgagagaaggaaacctttgcctcaatggatcgtaggcaaactgagaaggaccataacaccttgctgagaagtttgaatgtgattccttggtgaccacagcaggaggtcctgaagtccctgtccttcatatgcaaacaaggaggctgtcccatacagactatcagggaaaaaatgcactgtttatcaaaagatatgaatgttcttgacaggcaaagccctgctcaaatgaaatggcagtgcagggagatgatattcaatgtgatgcagctgtgaagtacctgcccgggcggncgctctagaactagtggatcccccgggctgcagganttcgatatnaagcttatcgataccgncgacctcgagggggggcccggtacccagcttttgttccctttagtgagggtttattgcccgcttggcgtaatcattggncatagcctgtttcctgggtgaaattgttntccgnttacaatttnccccccaacatacnaagccgngagcataaaatngtaaagccctgggggtgcctaattgaattcanctnanctccatttaatttgcgttngcgctcactggncngnttttcaagtnnggnaaaccctnttnntnccanctngnatttaattaaatcggcccaacccccggggnannagncnntntgnnannttngggccttttttntnttnccnnngcttanntggattcnntnnnnnnnggtcnntcngctnctnnancngntttntgntnnnntcaaagng

SEQ ID NO: 2161 - DNA, 880 bp, Homo sapiens
  misc_feature 1, 2, 3, 7, 10, 15, 17, 31, 123, 148, 193, 327, 447, 450,466, 489, 556, 644, 696, 720, 725, 763, 775, 781, 782, 807,810, 816, 823, 825, 831, 846, 851, 862, 879: n = A,T,C or G
nnnatangcnccgtntnccacgtaatacgantcctatagggcgaattggagctccccgcggtggcggccgaggtaccatctctgtttctgaggaagcagcagaggagcctatgtgatccaganaacttgttcttggcttctggaagcngagatgcaggaatggaccaataaggcattaaacaaattcatttanaatctcaagaaagaaatatctaacagtataatcataataacaaaattttgatttcttcagaagcactccaatagcttcacccgcattagctaatcttgtgcagtgaggaggtgcaattccctctagtctcccgngtacctgcccgggcggccgctcgacaggggataacgcacgaaagaacatgtgagcaaaaggccagcaaaaggccaggaaccgtaaaaaggcccgcgttgctggcgtttttccataggctncgnccccctgacgagcatnacaaaaatcgacgctcaagtcanaggtggcgaaacccgacaggactataaagataccaggcgtttcccctggaagctccctcgtgcgctnttctgttccgaccctgccgcttaccggatacctgtccggcttttttcctttgcgaagcgtggcgctttcttatagcttacgcctgtangtatcttaattcggtgtaagtcgttccgttccaagcttgggcttgtgtgccnaaccccccgttcagcccgaaccgnttgcncttatcccggtaactatcgtttttgagtccaacccggnaaagaaaccganttattnncaattggccccagcccctggtaacnagnattaancaaaacnanggtttnttgccggggcttcanaattntttgaaagggngggctaatttgggttant

SEQ ID NO: 2162 - DNA, 948 bp, Homo sapiens
  misc_feature 339, 352, 361, 366, 367, 368, 395, 400, 401, 407, 408, 412,413, 418, 419, 421, 422, 429, 432, 434, 455, 460, 461, 462,467, 469, 476, 482, 484, 491, 493, 494, 498, 502, 503, 504,507, 508, 509, 513, 515, 523, 527, 528, 529, 531, 537: n = A,T,C or G
  misc_feature 539, 550, 552, 553, 554, 555, 560, 561, 562, 564, 566, 569,571, 574, 576, 577, 581, 588, 589, 590, 591, 594, 597, 598,602, 603, 610, 616, 619, 621, 626, 630, 632, 633, 634, 636,637, 639, 641, 644, 648, 649, 650, 656, 661, 670, 672: n = A,T,C or G
  misc_feature 673, 677, 679, 681, 684, 688, 689, 693, 696, 706, 708, 709,714, 715, 718, 720, 725, 728, 729, 731, 732, 734, 738, 744,751, 754, 755, 759, 767, 768, 771, 772, 777, 778, 784, 790,791, 793, 800, 810, 811, 816, 817, 818, 823, 825, 834: n = A,T,C or G
  misc_feature 836, 838, 842, 847, 848, 849, 854, 858, 866, 871, 873, 874,879, 881, 883, 888, 894, 895, 900, 907, 909, 919, 920, 921,922, 924, 927, 936, 937, 938, 941, 945, 946: n = A,T,C or G
gtaatacgactcactatagggcgaattggagctccccgcggtggcggcccgaggtacgtggcgtagcattccatgttcagctttgacatttattttctcatatcaaccctttttacacgtgaaacacaatctcgctcttgaagtcttaactgcacgatctgtgaaacctgtatttatattttcttcagtgtattcttgtcgtgtgtgtgtcctaaacaaaccaaaagaaaactttccaaatctaaagtattcattctccaattggagcaagaggagtcagttagatactatcacggcattcatttgtggctggcttgtcatatttacttatgattgatnataaatctatttngcttttaanagccnnncgagaagccatatgccttcgagcctgncattnnaaatgnnaaanntttgnncnnaataaancgntnggcagtagaattaatgaaccnaccannntagancnggtcaanacattntnaatgganannaagntaannntcnnnttcngncgggattncgtnnntnctgtancntctttatatantnnnnaatannnanantantntanannttgnaaaaagnnnnctntanntagnnttctacnattatntcncnatatnctgncnnntnncntngtnctannntctganatatnccgctcatncnntttnangnatngcgnntganganatccatcacncnntgctnntananatacngcnntnntntttncgtccnattaaanttnntatngcatcatnnatnncatanntatgcnatcctnntntaattancagtaagaanntatannnccgcntntacatatantncnttanatatnnngtgtnctcnatattatnaactncnnatgtntnanatatntataanntcaangtctacntnttacgtattnnnnantangagtgtcannnacnatgnncg

SEQ ID NO: 2163 - DNA, 549 bp, Homo sapiens
  misc_feature 6, 7, 12, 17, 20, 24, 38: n = A,T,C or G
gcgcgnntacgngtcantcnactnctatagggcgaatnggagctccccgcggtggcggcccgcccgggcaggtactcaataaaataagagatactatagtaaaactcttacaggaaaaattattagaatttgtgctataccaaatcaatttcacaaaaatgaactgcctgtccactgtttttccacaaaaaatccaggccatctacaccttgctggaaggatggaacctcaactgctatactccttagattgctatacagcaatctaagtggccccatcacagctcctctccttgaacatttgttgagatcaagttgcagctgggccaggcacaatcggtcacaagttagacagctgagggcattccaaagagtagtgttccttcctccacattatctgccaaagtagtcatctaccttcaggcagagctaacccaaggcctgtccctgaaaaaactgcctgagacttggcttctttgcactacagtcttagatcactggaaagtcagatcacctgaaaattcaagtgagatcagggcacagggctatt

SEQ ID NO: 2164 - DNA, 858 bp, Homo sapiens
  misc_feature 4, 5, 6, 7, 8, 9, 345, 346, 348, 356, 360, 365, 366, 367,369, 372, 375, 379, 380, 381, 383, 385, 386, 388, 389, 390,391, 392, 393, 394, 396, 399, 401, 403, 405, 408, 410, 412,413, 415, 418, 419, 420, 421, 424, 426, 427, 428, 430: n = A,T,C or G
  misc_feature 432, 433, 434, 436, 437, 438, 439, 442, 443, 444, 445, 446,447, 448, 450, 451, 452, 453, 455, 456, 457, 458, 459, 460,461, 462, 465, 467, 468, 469, 470, 471, 472, 473, 475, 476,477, 478, 479, 480, 481, 482, 483, 484, 485, 486, 487: n = A,T,C or G
  misc_feature 488, 489, 490, 491, 492, 493, 495, 496, 497, 498, 499, 501,504, 505, 507, 510, 511, 513, 514, 516, 517, 518, 519, 520,522, 523, 524, 526, 527, 528, 529, 530, 532, 534, 536, 537,538, 539, 540, 541, 542, 543, 544, 545, 546, 547, 548: n = A,T,C or G
  misc_feature 549, 550, 551, 552, 553, 554, 555, 556, 557, 560, 561, 562,563, 564, 565, 566, 568, 570, 571, 572, 574, 575, 576, 577,579, 580, 581, 582, 583, 584, 586, 587, 588, 591, 592, 593,594, 595, 596, 597, 598, 599, 600, 601, 603, 604, 605: n = A,T,C or G
  misc_feature 606, 607, 608, 609, 610, 611, 612, 613, 614, 615, 616, 617,618, 619, 620, 623, 625, 626, 627, 628, 629, 634, 636, 637,638, 640, 641, 642, 643, 645, 647, 648, 649, 650, 651, 652,654, 655, 656, 657, 658, 660, 661, 664, 665, 666, 667: n = A,T,C or G
  misc_feature 668, 670, 671, 674-690, 692, 694, 695, 697,698, 701,702-704, 706-713, 716, 717, 720-730,732-740,742,743,745-758,760-768,771-787,789-797,799-805,807-814,816,817,819-824,826-828,830,832-834,838,842,844-846,849-853,856-857: n = A,T,C or G
ttgnnnnnnggcgcgcgtatacgactcactatagggcgaattggagctccaccgcggtggcggcccgcccgggcaggtacagggaactattggagcacctaagaggagcacctaccttgaatttaggggttagcagaggcatcctgaaaaaagtcaaagctaagccacaatctataagcagtttaggaattagcagaacgtgcgtggtgaggagatgccaaaggcaagaagagaagagtattccaaacaggagggattccaaagagagaagagtatcccaaacaacatttgcacaaacctgatggggagagagaatgtggggtggggatggatgatgagactgannangaaagccnggtntagannntnagnggncttnnncntnntnnnnnnnanaantngngnatncncnngnctnnnngantnnntntnnngnnnnatnnnnnnngnnnnannnnnnnnggngnnnnnnngnnnnnnnnnnnnnnnnnnntnnnnngnggnntnatnngnncnnnnngnnntnnnnnangnannnnnnnnnnnnnnnnnnnnnnatnnnnnnntntnnntnnnntnnnnnnannntannnnnnnnnnngnnnnnnnnnnnnnnnnnnttngnnnnnctaantnnntnnnnantnnnnnntnnnnntnnttnnnnntnnttnnnnnnnnnnnnnnnnngnannannttnnnngnnnnnnnntannatnnnnnnnnnnntnnnnnnnnnanntnnnnnnnnnnnnnntnnnnnnnnnttnnnnnnnnnnnnnnnnntnnnnnnnnntnnnnnnntnnnnnnnntnntnnnnnnannntntnnntagntttntnnnaannnnnttnnc

SEQ ID NO: 2165 - DNA, 556 bp, Homo sapiens
  misc_feature 52, 77, 333, 351, 353, 367, 369, 375, 379, 392, 400, 402,414, 416, 419, 427, 428, 429, 431, 434, 436, 437, 443, 447,449, 457, 459, 464, 467, 473, 485, 487, 490, 497, 500, 501,505, 509, 510, 513, 516, 524, 526, 533, 539, 540, 541: n = A,T,C or G
  misc_feature 546, 550, 551, 554, 555: n = A,T,C or G
ggccgtatcgactactatagggcgaattggagctccccgcggtggcggccgncgggccaggtacagggaactattgnagcacctaagaggagcacctaccttgaatttaggggttagcagaggcatcctgaaaaaagtcaaagctaagccacaatctataagcagtttaggaattagcagaacgtgcgtggtgaggagatgccaaaggcaagaagagaagagtattccaaacaggagggattccaaagagagaagagtatcccaaacaacatttgcacaaacctgatggggagagagaatgtggggtggggatggatgatgagactgaataanaaagccaggtctaaatantnagtggccttgtacntnggccgntctngaactagtggatnccccgtgncngcaggaattctntntcnatcttatnnntnccncnnaccctnttangntggggccnanatacncancttttnttttctttttantnaanggttaanttnncccncttnnttnaanttaatttncnatagctngtttannncgtgnggannttnnc

SEQ ID NO: 2166 - DNA, 869 bp, Homo sapiens
  misc_feature 663, 733, 792, 807, 819, 841, 842: n = A,T,C or G
atgccgcgtaatacgactcactatagggcgaattggagctccccgcggtggcggccgaggtacaacaggcttgtagttctttgtgaaggatgcaggcaagagggatgtccagtttagacgggccctgacagcagcagcctcttccacatcaagtgaagtgtgattgttaacgatcattgcctgcacaaagtcatagttgcctttgaagtagtccacccaatacttcatcatgacatagcggggcaggattggggtgttcacattttgctgataagatggtgtgttaaaatctaaagcttgaagaactggataaattaaagcttgtagtttgagcttatttttttaggctggcatcttgagtaaactgttgtccaagggcagcagccagatttccaccagcactgtcaccagaaatgcaaattctgcctggatcaaccatatacttctgtaagacttctggcttcaggaaatactttgtggcccgtacctgcccgggcggccgctctagaactagtggatcccccgggctgcaggaattcgatatcaagcttatcgataccgtcgacctcgagggggggcccggtacccagcttttgttccctttagtgagggttaattgcgcgcttggcgtaatcatggtcatagctgtttcctgggtgaaantgttatcccgctcacaattccacacaacatacgagccgggagcataaagtgtaaaagcctggggtgcctnatgagtgaactaactcacattaattgcgttgcgctcactggccgcttttcaagtcgggnaaacctgtcggcccncttgcattaatnaatcggccaaccccccggggannaggcggtttgcgtattgggcccttttt

SEQ ID NO: 2167 - DNA, 544 bp, Homo sapiens
  misc_feature 137, 479: n = A,T,C or G
agggcgcgtatacgactcactatagggcgaattggagctccccgcggtggcggccgaggtacagaaggcatgaaaggcttggggcagacctattacattcctcatcttcttacagcccaagagaatataggactcanagataatgatgcagaatctagagttctcaaatctgggagaaaacctcaggctctgggatttcctgtaagccctgcaacttctttctctccactccccagcccagaaaagctaaacctcatgaaacttcatttaatgagaagacttgagaaatgaaacactcggacttggaagtatatcgtgaagattatttggtcttctttggttcaaaatcatacgatgcttcactattaccattcagagcatcacagaagatttccaagtatcttaggccaagtgtggtggttcacacctataatcccagcactttgggaggccgaggtggacagactgcctgagctcanggagttcaagaccagcctgggcaacatggtgagatctgttatacctacagcctttggacctgccc

SEQ ID NO: 2168 - DNA, 577 bp, Homo sapiens
  misc_feature 3, 5, 168, 203, 217, 222, 225, 233, 237, 241, 260, 265, 266,274, 279, 281, 282, 288, 301, 311, 312, 313, 317, 340, 341,348, 351, 352, 353, 354, 355, 356, 359, 362, 372, 376, 379,389, 396, 398, 399, 400, 406, 407, 411, 415, 416: n = A,T,C or G
  misc_feature 426, 434, 435, 439, 445, 446, 449, 456, 457, 465, 475, 481,485, 491, 499, 501, 502, 503, 504, 506, 515, 520, 521, 524,532, 536, 542, 549, 556, 557, 564, 573, 575, 577: n = A,T,C or G
tcntngacgcgcgtaatacgactactatagggcgaattggagctccccgcggtggcggcccgcccgggcaggtactgggaatgactgagtagtcacaaattcagagagctgctgggaggtagatgagttggggctgggaggtgtccatgggatttgggggcttgaggntcacggtcacctcaagacagcaggatggggtgganagcatgtgaggggntatcntanaaacaaanggantgtntgaaggcatctctgttttntaganncttcttancatgnannttattntttgatacatatnttttcatttnnngtantatttagtaatatttcttatttnnattaatntgnnnnnnttnttnatctattttnaatntantaattttttncattttntnnnttagtnntttntttnntactttcttntttatctnntttnaattannctnacttttnnatctatanaattatattntacttntcanaataanttattatnannnntnttatgtatnctatnnttntttttatncttnattaantttttantatagtnnatatatntttatattnancn

SEQ ID NO: 2169 - DNA, 567 bp, Homo sapiens
  misc_feature 280, 302, 306, 334, 341, 342, 343, 344, 351, 365, 366, 367,369, 372, 373, 380, 383, 398, 412, 418, 419, 439, 444, 465,473, 511, 512, 516, 529, 531, 534, 536, 543, 544, 555, 556,560, 565: n = A,T,C or G
ggcgcgtatacgactactatagggcgaattggagctccccgcggtggcggccgcccgggcaggtacgcgggggaatgatattttcatgggattactcaatctcacccaccattagttgcaggtgacaagaaagctaagttggcagatgtttgtgctagaagctgtgggtttacgtctcctttgtgcatgtgttccagacataccaagtggcttggtatttaaacatcatgctcaggtgtgcagggtagtttttgagttataataggtatgcaggcgctgngggattacttggttgtttatgnaaanaccattttgcactcacttctgaaatganttgttannnngaatcanctatagaggaggtnnnanggnntttgaanttnagatacctgcactgnttgcttgtaaaatnttaagnnttaaaattttaaaccaggtnattantcattttcatgccaaagaganaagttggncataaaattgattttcaggtaatcgaataaattatggnnatanccccggaatatantnttntnacttaanntggcaaattanntgcngggcnct

SEQ ID NO: 2170 - DNA, 535 bp, Homo sapiens
  misc_feature 56, 85, 158, 160, 179, 235, 239, 262, 272, 371, 372, 391,392, 401, 425, 431, 439, 462, 465, 471, 475, 481, 486, 487,498, 499, 502, 504, 507, 508, 529: n = A,T,C or G
cgctaatcgactactatagggcgaattggagctccccgcggtggcggccgcccggncaggtactaacagtcaggaacaaatagancacatagagaggacagtgggaggtccccctggctaaagcagagggtgtattgagagaaggaaacctttgcctnantggatcgtaggcaaactgnaaggaccataacaccttgctgagaagtttgaatgtgattccttggtgaccacagcnggangtcctgaagtccctgtccttcanatgcaaacanggaggctgtcccatacagactatcagggaaaaaatgcactgtttatcaaaagatatgaatgttcttgacaggcaaagccctgctcaaatgaaatggcanngcagggagatgatattcanngtgatgcanctgtgagtacctcggccgctctanaactantggatccnccgggctgcaggaattccatatnaancttatngatnccgacnacctnnagggggggccnngtncncannttttgttccctttaatgaggnttaatt

SEQ ID NO: 2171 - DNA, 851 bp, Homo sapiens
  misc_feature 2, 4, 5, 6, 7, 8, 9, 645, 692, 714, 716, 730, 742, 749, 754,776, 779, 782, 787, 789, 803, 810, 815, 823, 827, 828, 829,831, 832, 834, 840, 848: n = A,T,C or G
gngnnnnnncgcgcgtatacgactactatagggcgaattggagctccaccgcggtggcggccgcccgggcaggtacacctgcattagggacaagaaatctctatgttgaacaaatactgcaggtggtgctgatgctaaacttttacaaacattggttatacaattaatcaacagttatttgatgattcagcacacaaataactctttgcaaccaggtttacgttactgggaacaaactaactaggtttccccaggtgtggagagctttcacacaatataccctaacttacataaacaaaattacccaggtaaatatttactaaacagttttaacataaatgatagtgatacacaaatttgagtaataattcaagaaaataagtgcacaattaggctgttaactgctgtttatctgtttaatgtgaaatacccactagcttccctccaccctttaccctaactcccataaaatcctccaaccaagccaccaacatatacccaccatacttgccactctgtcctcaaactcctgtttgggcatttgctcctggttcttgaaacttcattctgacaaagctgaataaaattacctccttagaaaacagtctgttcatgattaaataactaataaaatagttgaagccnagaatcttaacgcaagccctatcaaaagcctggagtgaattgaggcnggtcactggttcttgttcttgncncagttttaaatccntacacttttttnttggtanggcanaaagccttaattttttgcttgnctnccnaattntntttgaaaaaaattnaatgggnctctntaaaattnttgnnntnnanaaggtnaccaaaanggg

SEQ ID NO: 2172 - DNA, 479 bp, Homo sapiens
cgctaatacgactcactatagggcgaattggagctccccgcggtggcggccgcccgggcaggtactagctgtttttgtgacttttaataataacacctactagttactgagtgtcatcatcaccaatgtcatgattgccacgatttattgagtgcctactacatgcaggccccaggtcagtgctttacactcttaactgtcatgttgacaacagctctgaatgacaggagctctgttcagtgttttacaagtgagaaaactaaagacgctaataatttttaaaaatatatccacagttctatgattagtaagtaagggagctagtcctcggccgctctagaactagtggatcccccgggctgcaggaattcgatatcaagcttatcgataccgtcgacctcgagggggggcccggtacccagcttttgttccctttagtgagggttaattgcgcgcttggcgtaatcatggtcatagct

SEQ ID NO: 2173 - DNA, 470 bp, Homo sapiens
  misc_feature 332: n = A,T,C or G
taatacactactatagggcgaattggagctccaccgcggtggcggccgaggtactctgcgttgttaccactgcttcccgggactctgcgttgttaccactgcttcccgggactctgcgttgttaccactgcttcccgggactctgcgttgttaccactgcttcccgggactctgcgttgttaccactgcttcccgggactctgcgttgttaccactgcttcccgcgtacctgcccgggcggccgctctagaactagtggatcccccgggctgcaggaattcgatatcaagcttatcgataccgtcgacctcgagggggggcccggtacccancttttgttccctttagtgagggttaattgcgcgcttggcgtaatcatggtcatagctgtttcctgtgtgaaattgttatccgctcacaattccacacaacatacgagccgggagcataaagtgtaaagcctggggtgc

SEQ ID NO: 2174 - DNA, 894 bp, Homo sapiens
  misc_feature 8, 9, 21, 25, 42, 66, 160, 466, 498, 529, 547, 573, 576,590, 594, 621, 625, 632, 653, 677, 681, 690, 699, 716, 746,774, 780, 785, 789, 793, 806, 808, 810, 813, 814, 816, 823,826, 829, 833, 834, 843, 855, 858, 860, 868, 869, 874: n = A,T,C or G
  misc_feature 885, 889, 892: n = A,T,C or G
tagcgcgnntcgactactatncggngaattgcagctccccgnggtggcggccgccggccaggtacncggggggacaggccatctcgctataggaaaggaaagtggaacagcattcatcctcaacatttttacgaagacaaaatgaagactggagtataanactgatcagtgcaggtgtagcataaaagtgtaatcctggaagatgtggtgtgagaaggtagcacaagtgaagcagagatacaggagatagggaagggaagctggaagcagaggtcactggagggagagggagatggacacattcagggctacaaagcaagttctatgtgatttgctcacctctcaattgtgggacccctcaaaatatgtacctcggccgctctagaactagtggatcccccgggctgcaagaattcgatatcaagcttatcgataccgtcgacctcgagggggggcccggtcccanctttttgttccctttagtgagggttaattgcncgcttggcgtaatcatggtcataactgtttnctgtgtgaaattggtatncgcttacaattccacaaaaacatacnaancgggagccataaantgtnaaaactgtggtgcctaaatgagttgancctncttcacnttaaattgcctttgcgcttanatggccgggttttaaaaacccggnaaancctgtcttnccaaattgnattaaatgaaatcgggncaacccccccgggagaaggccggtttttcntttttgggcgcctctttccggtttcctngattanatganttgnttcncctcggtccttcngntnccnncnaaccggnttnagnttcnnttaaaaggnggtataccggtnttncncagaaacnngggantaaccccctgnaaanaanct

SEQ ID NO: 2175 - DNA, 857 bp, Homo sapiens
  misc_feature 2, 194, 401, 459, 490, 571, 572, 577, 705, 724, 745, 758,765, 772, 783, 792, 797, 808, 810, 821, 822, 826, 828, 830,837, 838, 849: n = A,T,C or G
gncgctatacgactactatagggcgaattggagctccacccgcggtggcggccgaggtactcacagctgcatcacactgaatatcatctccctgcactgccatttcatttgagcagggctttgcctgtcaagaacattcatatcttttgataaacagtgcattttttccctgatagtctgtatggacaagcctncttgtttgcatctgaaggacagggacttcaggacctcctgctgtggtcaccaaggaatcacattcaaacttctcagcaaggtgttatggtccttctcagtttgcctacgatccattgaggcaaaggtttccttctctcaatacaccctctgctttagccagggggacctccactgtcctctctatgtgtctatttgttcctgactgntaagtacctgccggccggccgtctagaactagtggatcccccgggctgcaggaattcnaaatcaaacttatcgatccgtcgacctcganggggggcccggtacccagcttttgttccctttaatgaaggttaattgcgccgctttggcgtaatcatggtcatagctgttnncctgngtgaaaatggtatccgctcacaaattccacacaacataccaagccgggagcataaagtgtaaagcctggggtgcctaatgaagtgaacctaactcacattaattgcgttgcgcttactggccgctttncaatcggggaaacctttcntgccactgcattaatgaatcngccaaccccccgngagagcnggttgcntattgggcctnttccgcttnctcgntaactgactcntncctcggccttnnggtncngnaaccggnntaaactaattnaaggcggg

SEQ ID NO: 2176 - DNA, 843 bp, Homo sapiens
  misc_feature 539, 600, 640, 751, 757, 762, 781, 783, 798, 830, 841, 843: n = A,T,C or G
ctactatagggcgaattggagctccccgcggtggcggccgctcgggcaggtactagctgtttttgtgacttttaataataacacctactagttactgagtgtcatcatcaccaatgtcatgattgccacgatttattgagtgcctactacatgcaggccccaggtcagtgctttacactcttaactgtcatgttgacaacagccctgaatgacaggagctctgttcagtgttttacaagtgagaaaactaaagacactaataatttttaaaaatatatccacagttctatgattagtaagtaagggagctagtcctcggccgctctagaactagtggatcccccgggctgcaggaattcgatatcaagcttatcgataccgtcgacctcgagggggggcccggtacccagcttttgttccctttagtgagggttaattgcgcgcttggcgtaatcatggtcatagctgtttcctgtgtgaaattgttatccgctcacaattccacacaacatacgagccgggagcataaagtgtaaagnctggggtgcctaatgagtgagctaactcacattaattgcgttgcgctcactgcccgctttncagtcgggaaacctgtcgtgccagctgcatttaatgaatnggccaacgcgcggggagaggcggtttgcgtattgggcgccttttccgcttcctcgctcactggactcgcttcgcctcggtcgttccggctgcggcgagccggattagcttnctcaangcggnaataccggttattcacaanantcaggggaataaccnaggaaaaaaacattgtgaaccaaaaggcccgnaaaaagggcangn

SEQ ID NO: 2177 - DNA, 879 bp, Homo sapiens
  misc_feature 2, 7, 9, 16, 38, 443, 480, 511, 519, 545, 556, 645, 647,671, 678, 744, 756, 793, 833, 842, 865, 868, 876, 877, 878: n = A,T,C or G
gnttacncngtatttnactactatagggcgaattgganctccccgcggtggcggcccgaggtacaatttgcatgcacggacttctacatacagaatacttaaacagttcattgtattgaaacacgcttaaaaatggccctagcacttgctgcaatcctgctgtgtaggagttagccaggttgtgtctgctccctctagactattctatacatcaagaactaaaaaagaagagcaatcccagcatgtggctggatgcacatcaaagccaagtctgtcatgaattattttccttcctgttcctttcattcaggtcatgaagcacacatactgctacaggaaagggcaaaaggcaatgtcaagtgctgtgtaattgttgggttctttagtggcaaaggccagcaatgttgcagccaaaagggcatttaagaatacctgcccgggcnggccgctctagaactaagtggatcccccgggctgcangaattcgatatcaagcttatcgataccgtcnacctcganggggggcccggtcccaacttttgttncctttaatganggttaattgcccccttggcgtaatcatggtcatagctggtttctgtgtgaaaatggtattccgctcacaaattccacaacaacataccnancccgggaaccttaaagtgtaaagnctggggnggcctaatgagtgacctaacctcacaataaattgcggttggcttactggccgctttccaatccggnaacctggtctgnccacttgcattaatgaaatcggccaccccccgggganaggcggtttcgtattgggcgctttttcgctttcttcgttnattgactcncttggcttggtcctttcggttgnggnaaacggtnnnt

SEQ ID NO: 2178 - DNA, 1027 bp, Homo sapiens
  misc_feature 3, 4, 6, 7, 8, 9, 10, 14, 16, 21, 22, 26, 27, 30, 32, 37,41, 44, 47, 49, 63, 64, 65, 68, 69, 79, 84, 88, 89, 91,117, 130, 218, 221, 222, 227, 247, 251, 252, 253, 301, 366,371, 383, 430, 467, 476, 482, 525, 554, 555, 561, 568, 575: n = A,T,C or G
  misc_feature 579, 585, 593, 596, 597, 600, 604, 616, 622, 623, 633, 638,640, 641, 643, 660, 668, 671, 687, 711, 721, 727, 738, 740,743, 750, 751, 761, 765, 771, 773, 777, 781, 783, 786, 789,795, 797, 802, 805, 816, 824, 839, 847, 857, 860, 863: n = A,T,C or G
  misc_feature 870, 874, 877, 878, 881, 882, 884, 886, 887, 895, 898, 901,903, 915, 925, 926, 927, 933, 939, 942, 947, 950, 963, 966,967, 969, 970, 972, 987, 994, 998, 999, 1001, 1002, 1016,1019, 1021: n = A,T,C or G
canncnnnnnacgngnaattnngtannccnanatttnaaantcnctntntcttaatcttgatnnncanntttcgttttnttctntctnntngggctatactctcatatagggcgaanggactccaccgcngtggcggccgcccggccaggtacctggatgaaactacactagtggtggtggagatggaaagggacagattcaagacagattagagaancannggcancagagcctattgaagaacangatnnnagccatggtgaaaagaggagatatcaaggacggtgtctgtatttcggncttatacaactggctgtggatagtgctactcactccagaatgctcagggagtttaacatattctngtttngtgcatgaacanggaggctagtagtagggtagaattcttgagaaaagttggaaatggantgaagttgctaccacggagtatttgaacgagaacatngattaatanaatgtnataaagtttccttatgaaaattttgaagattggggaatcgganactatgaaatcatagtttttatcactggnnagaaanccatttnttttatncaancaaaantttacctnacnncgnaaanatagaagaaatntaatanntagaatcaancagtnannanttttaaatatcttcctngccatatngtnggacccaatagataantgtatatttttagaagttatctcntggtttaatnggagtntcaatgcctcnanccnatttgannttctaaaacngganaggccncncatntttnanganggntcaatngnaaagnaanccaaaaccctnatatcctnaaacactaaagtttnatttgggngactttacantcnatngtttctntaanatnngtnntntnnctctaacnagnaantnctacctttttgngaattaccannnaatccnatattntanttccnttngctcctctcttanaanntnntnatccccccgctcttntagggantttnntnntcaatgcttaatcntgncngttcca

SEQ ID NO: 2179 - DNA, 884 bp, Homo sapiens
  misc_feature 17, 400, 420, 668, 678, 705, 759, 771, 783, 788, 805, 810,813, 814, 835, 838, 839, 857, 858, 859, 868, 870: n = A,T,C or G
aagggtttcctctaatnttactactatagggcgaattggagctccccgcggtggcggccgcccaaagtgttgggattacaggcatgagccactgcacccagccaagttagctttcttctaacagcagcccatgtgctgactgccagtgaagtctttcaatctgggatgctagtttcttttatttcaaaagtgctattgtgttctaacaattaatgaactactcaaaaaagagactgctgtattagtaaaggctaccaatgtcctcctgcagatgtttttaagtaacttcctggtgctctgtacctgcccgggcggccgctctagaactagtggatcccccgggctgcaggaattcgatatcaagcttatcgataccgtcgacctcgagggggggcccggnacccagcttttgttcccttnagtgaggggttaattgcgcgcttggcgtaatcatggtcatagctgtttcctgtgtgaaattgttatccgctcacaattccacacaacaatacgaagcccgggagcataaagtgtaaagcctggggtgcctaaatgaagtgagctaacttacattaaattgcgttgcgctcactggcccgctttccagtccgggaaacctgtcgtgccagctgcattaatgaatcggccaacccccggggagaggcggnttgccgtatngggcgcctattccgctttcctcgcttnactgaatcgctgcgcttcggtcgttccggcttgcggcgagccggtatcaagctnaactcaaaggcnggaaataccggntatcnacaaaaatcaaggggantaacnccnngaaaaaaacatgttagcaaangcnngcaaaagggcaataaccnnnaaaaagccngntgcttgcgttttca

SEQ ID NO: 2180 - DNA, 881 bp, Homo sapiens
  misc_feature 10, 40, 615, 628, 645, 649, 663, 679, 741, 750, 764, 776,786, 788, 798, 806, 811, 818, 826, 827, 837, 844, 847, 858,862, 863, 864, 865, 866, 872, 874: n = A,T,C or G
cgggtttacncctattttactcactatagggcgaattggngctccaccgcggtggcggcccgaggtactaacagtcaggaacaaatagaacacatagagaggacagtgggaggtccccctggctaaagcagagggtgtattgagagaaggaaacctttgcctcaatggatcgtaggcaaactgagaaggaccataacaccttgctgagaagtttgaatgtgattccttggtgaccacagcaggaggtccagaagtccctgtccttcagatgcaaacaaggaggctgtcccatacagactatcagggaaaaaatgcactgtttatcaaaagatatgaatgttcttgacaggcaaagccctgctcaaatgaaatggcagtgcagggagatgatattcagtgtgatgcagctgtgagtacctgcccgggcggccgctctagaactagtggatcccccgggctgcaaggaattcgatatcaagcttatcgataccgtctacctcgagggggggcccggtacccagccttttgttccctttagtgagggttaattgcgcgcttgggcgtaatcatggtcatagcttgtttcctgtgtgaaattgtatccgctcacaattnacaccacattacnaacccgggagcataaantgtnaaagcctggggtgncctaattgagtgagcntaacttaccattaattggcgttgcgcttcacttggcccgcttttccaatccgggaaaacctntcgtgccancttcaattaatgantctgccaacccnccgggaagangnccgtttggcntattgggncgctntttcccnttccttgnntaaattggantcgttgngtntggtccgatcnggtnnnnncaaccngnattatct

SEQ ID NO: 2181 - DNA, 849 bp, Homo sapiens
  misc_feature 1, 6, 21, 507, 534, 575, 591, 615, 619, 624, 626, 627, 628,629, 630, 631, 632, 633, 634, 635, 636, 637, 638, 639, 640,642, 643, 644, 645, 646, 647, 648, 650, 651, 652, 653, 654,656, 659, 660, 661, 662, 663, 664, 665, 666, 667, 668: n = A,T,C or G
  misc_feature 669, 670, 671, 673, 674, 675, 676, 678, 679, 680, 681, 682,683, 684, 685, 686, 687, 688, 689, 690, 691, 692, 693, 694,695, 696, 698, 699, 700, 701, 702, 703, 704, 705, 706, 707,708, 709, 710, 711, 712, 713, 714, 715, 717, 719, 720: n = A,T,C or G
  misc_feature 721, 722, 723, 724, 725, 726, 727, 729, 730, 731, 732, 733,734, 736, 737, 738, 739, 740, 741, 742, 743, 744, 745, 747,748, 749, 750, 751, 752, 754, 755, 756, 757, 758, 759, 760,762, 763, 764, 765, 767, 768, 769, 771, 772, 773, 774: n = A,T,C or G
  misc_feature 775, 778, 779, 780, 781, 782, 783, 784, 786, 788, 789, 790,792, 793, 794, 795, 796, 797, 799, 800, 801, 802, 803, 806,807, 808, 810, 811, 813, 814, 816, 817, 818, 819, 820, 821,822, 824, 825, 826, 827, 828, 829, 832, 834, 835, 837: n = A,T,C or G
  misc_feature 838, 839, 840, 841, 842, 843, 844, 845: n = A,T,C or G
ngcganttactacttagggcnaattggagctccccgcggtggcggccgaggacgcgggggcttaaaactcttcagaggttcaccaaatagaactttggggaatccttttaaaaatcaaacgcatacttggtaggggaactgacaatggcaaccagttgctcagagttatttgctcaaaggcctacctgcctcctaagcctcactgttcttcatcaactgtcaggggttaaactttcaagagctactcccaaaagagctgcaggaaaattctgtctaaacagccatgcaaaagtgtctggggatcactacggacagaggatgatgacagagggcccatgacattgggccttgtcatggctgaatactgaccttccactgtcatggctgaacactgaccttccagtgcctacagcttttaaaaagagtaaaaaactatgttcatgggtacctgcccgggcgggccgctctagaactagtggatccccccgggcctgcaggaattctatntcaagcttatcgataccgtcaacctcnagggggggcccggtacccagcttttggttccctttaatgangggttaaatggcgccncttggcgtaaatcatggggcatanctgntcctngnnnnnnnnnnnnnnnannnnnnngnnnnngnggnnnnnnnnnnnnnannnngnnnnnnnnnnnnnnnnnnngnnnnnnnnnnnnnnnnnngngnnnnnnnnngnnnnnngnnnnnnnnnngnnnnnngnnnnnnnannnngnnngnnnnnggnnnnnnngngnnnannnnnngnnnnnggnnnanngnngnnnnnnngnnnnnnggngnnannnnnnnnnggac

SEQ ID NO: 2182 - DNA, 923 bp, Homo sapiens
  misc_feature 512, 578, 633, 651, 700, 725, 770, 773, 808, 823, 848, 873,874, 878, 897, 903, 917: n = A,T,C or G
cggtatcactactatagggcgaattggagctccaccgcggtggcggccgaggtacaagctccactggaataaaaaagactgtgtggaagtgaaggggctcctgcccacaagtgtgtcaccccgtgtgtccctgcactgcggtaagagtggtggaggagacgggtgcttctcagatgtcactctggcattcacctctcttcaggactgcaaggggcctactctgtcacctgtggctcttcctctcctctcaggaacaaacaacaaaaatcaaatgactctgcttttggggatgtcaccaccatcaggacaagtgtaacctttaagctaaatgaaggcaagtgtagtttgaaaaatgctgagctgtttcccgagggtctgcgaccagcactaccagagaagcacagctcagtaaaagagagcttccgctacgtaaaccttacatgcagctctggcaaagcaagtcccaagagcccccggcccgctctagaactagtggatcccccgggctgcangaattcgatatcaagcttatcgataccgtcgacctcgagggggggcccggtacccaacttttgttncctttagtgaggggttaattgcgcgcttggcgtaatcatgggcatagcttggttnctgtgtgaaaatggtatncgcttacaatttcacacaacatacgagccgggagcataaagtgtaaagnctggggtgcctaatgagtgaagctnacttacattaattgcgttggcgcttactggccccttttcaagtcnggnaaacctgtctgccagcttgcattaatgaaatcggnccaaccccccggganaaggcgggttgctaattgggccctnttccctttcttggttaaatgaattnnttgngctcggccgttcgggtggngggganccggattaacttanctcaat

SEQ ID NO: 2183 - DNA, 910 bp, Homo sapiens
  misc_feature 687, 761, 775, 780, 794, 831, 850, 862, 864, 869, 880, 891,895, 898, 908: n = A,T,C or G
ggtatcactactatagggcgaattggagctccccgcggtggcggccgaggtacgcgggcaaggcttcctctttaaaaatcatacatttaattcgggtagggaacgacttggcttctttgttcctgtgaaagaagtatataaaaatgcccccttagtaactatgcagtcagcttacttctcagcaaagtcattgtgaacttcttccctgtctcaggttggaaataggaaccaattcaaggtagattaaagacttagggccgggcgcagtggctcatatctgtaatcccaacactttgggaggccgaggtgggtggatcacgaggtcaagagatcaataccatcctggccaacatggcccgtctctactaaaaatacaaaaattagctgtgcatggtggtgggtgcctgtagtcccagctactcgggaggcaggagaaccacttgaacccgggcggcggaggttgcagtgagctgagattgcccactgcactccaatctggtgacagagccagactccgtctcaaaaaaaagaaaaaaagacttaaatgtcagacctgaaactataaaactactagaaaaacatagagaaaactcttcagaacatcgcttaagcagataatttatggatgaaatcttaaaagcccaggcaccaaaagccaaaatagttgagtgggctataacttctgcncagcaaaagaatcaaccccagtgaagagacagccctggagtgggaaaaaatatttgccaaatactcacctgcanggactaatggtgcngagtntagaagggacttanactcctcaaaagttaaaaaatcatggccttaaaaatngggccaagggccggaatanaaaccttcaatngnttaanatgtttttaanaaactgtcaanttcntgntcaggggaanct

SEQ ID NO: 2184 - DNA, 908 bp, Homo sapiens
  misc_feature 520, 564, 634, 647, 664, 671, 684, 691, 738, 743, 752, 760,762, 764, 783, 808, 835, 836, 837, 839, 851, 854, 857, 867,871, 875, 883, 887, 899, 902, 906: n = A,T,C or G
atcgactactatagggcgaattggagctccccgcggtggcggcccgaggtacgcggggggagtccccaatgtcatggagtatatatctaatgccactgagaaacctggctcaccctgcactgagagaagcactcaaaaccaccatcaccaatagcgctactaaagacagtgctttggagcttccaagctgatagattatcctttctccccaccctcagatttctccagtgtctctggcacttatagtccatgtttgcaagaaatattttattatagtgctctgaaacaaatttataaagtttgcaagagaagttttaaaaaagcaagctcagcaatatttgggggcttttaaagctgatgatgcagctgacctactggagacaaaggcagtgggagggcccttactggtataaataaataggagtctctggtacctgcccgggcgggcgctctagaactagtgggatcccccgggctgcaagaattcgatatcaagcttatcgatcccgtcgacctcganggggggccccggacccaacttttgttcctttagtgaggggtaantgcgccgcttggcgtaatcatgggcatagctggttcctggggggaaaatggtattccgctcacaatttcncacaacataccancccgggagccttaaagnggaaagnctgggggtgcctnatgaggngactaaactcacatttattgcgttgggctcactggccccttttcagncgggnaaactgcgngccactgnantnaagaatcggccaccccccngggggaaggcggttgggatttgggngcttttccctttcttcgttactgaatnnntnggcttggcgttnggntgnggggagcggntaanttanttcaaagngggnatccggttttcncanaaanag

SEQ ID NO: 2185 - DNA, 930 bp, Homo sapiens
  misc_feature 8, 369, 375, 376, 377, 385, 387, 397, 402, 407, 408, 410,414, 415, 424, 425, 427, 428, 430, 435, 437, 443, 445, 451,452, 461, 463, 464, 465, 477, 479, 491, 499, 502, 503, 504,511, 519, 537, 538, 542, 551, 552, 554, 559, 562, 579: n = A,T,C or G
  misc_feature 580, 581, 584, 586, 599, 603, 618, 619, 626, 640, 643, 651,668, 671, 679, 696, 700, 705, 708, 715, 752, 753, 783, 788,789, 792, 796, 797, 805, 817, 818, 820, 826, 828, 830, 832,840, 843, 846, 849, 852, 860, 867, 881, 889, 903, 909: n = A,T,C or G
  misc_feature 912, 918: n = A,T,C or G
tgtggacncgcgtaatacgactactatagggcgaattggagctccaccgcggtggcggccgcccgggcaggtacgcgggggacgctgggaggagatgctgccacctaggttacttgtaggaccctatacggcaacctcctttgccaggaactatttataaacatcctgcaggaaaatgcagtgaagtagaagagacagggatatcccagaaggttatgcaaaacatcaagagaagatgagaggtcagagatgggaagaaacaagaactttgacatgcttggtgttcttgcccaagctttgaagaagtttacaaagtctatatgtcagaatacacatttcccaccttgcccaacagtagaaaaaaaaaanaaaaannnaaaaaaangntccttggccngtttnaaacnnanggannccccgggcnngnngnatttnantttaancnttatgnntcccgccancnnnaaggggggcccngnaccaacttttgnttcctttnagnnngggtaantggccccntgggggaaatattggcannactngtttcttgnngnaaatngtnttccgttacatttcccnnnacntnacaacccggagcntaanggttaaagcctgggnngcttatngagggggcttaatnccnttaattgnctttgggccttacttgnccnttttccantccgggaaacctttctngccnacctnganttaaatnaattgggccaaccccccggggaaaaaggcggttttgnntttggggcgctttttcccttttcttgttanttganntanttgnnctcgggcnttcggttggggnnanccggtntnantnacttaaanggnggnaanacnggtttccncaaaatnggggttaccccggnaaaaaaanttgaccaaaggccnccaaangcnggaacnttaaaaaggcct

SEQ ID NO: 2186 - DNA, 921 bp, Homo sapiens
  misc_feature 7, 10, 17, 640, 648, 654, 746, 758, 774, 777, 782, 807, 813,844, 848, 856, 877, 889, 895, 897, 913, 921: n = A,T,C or G
acgggcncgngtatacnactactataggggcgaattggagctccaccgcggtggcggccgaggtacagacattccctcattttactccattagaattctggacctcttctgtatttctttctgggccctgctacctcctaatctgcatctggtgctgggaacccaataagcccagcacaatgccagtgtgaggcattctgagatccgggattgggttgtgagactcctgactgaattactagccttctgagcaaggctacctctttagacccttctccagtataagctgcataagctctggctcattccacaaactcctgcacctaatcatgttcctggacctcagactgtacctgcccgggcggccgctctagaactagtggatcccccgggctgcaggaattcgatatcaagcttatcgataccgtcgacctcgagggggggcccggtacccagcttttgttccctttagtgagggttaattgcgcgcttggcgtaatcatggtcataagctgtttcctgtgtgaaattgttatccgctcacaattccacacaacatacgagccgggagcataaagtgtaaaagcctggggtgcctaatgagtgagctaactcacattaattgcgttgcgctcactgnccgctttncagtcnggaaacctgtcgtgccactgcattaatgaatcggccaacccccgggaaaggccggtttgcctattgggcgctcttccgctttccttgcttanctgaatcgctgngcttcggccgttcggntgnggggnaagcgggattcagctcacttcaaanggcggnaataccggttatccacagaatcagggggatnaccncaggaaanaacatgtgagccaaaggccancaaaaagggccngaaccntnaaaaagggcgggtgtnttggggtn

SEQ ID NO: 2187 - DNA, 908 bp, Homo sapiens
  misc_feature 427, 437, 456, 458, 515, 521, 531, 554, 568, 569, 572, 608,614, 638, 643, 644, 658, 662, 665, 671, 672, 674, 680, 683,685, 698, 708, 711, 723, 733, 735, 736, 746, 750, 763, 765,766, 771, 780, 787, 799, 803, 828, 835, 836, 838, 842: n = A,T,C or G
  misc_feature 848, 849, 857, 861, 863, 864, 869, 870, 890, 896, 902, 903: n = A,T,C or G
tgtgtcgctaatcgactcactatagggcgaattggagctccccgcggtggcggccgaggtacgcggaaatgttagacaaatgtagccaaaccaaaaaatacacatgttctatgaatccatatatgcaaggttcacaataggtgatagtagctactcttttgggaaggagtgaggaaaggactgagagagtattgcagagggggctccgggtgtttgtaatttctatttcccagtgcaggtgtggtttgcatgagcatgttcactttgtggaaattcattgagctgtaactaaatatacagaattatttatgaatgaaatgatatataattcagtgggaacctgggaggatagggaggaggtgggggagctgaaaaaacatgtgtggccgaatgcttaacaattgttattgttaggttatggataccncggggggtgngttgtacctgcccgggccngncgctctagaactagtggatcccccgggcctgcaggaatttcgatatcaagcttatcnataccngtcaaccttnagggggggcccggtacccatctnttgttcccttttanngangggttaatttgccccctttggccgtaaatcatgggncattgntgtttccctgtgttgaaaattggntatcnngcttcaccaatttnacanaancatacnnancccggngancntaaaagtgtaaanctcaggggtngcnctaaatgaaatntagcttaacntnnccttaattgncgtncccctcacttgcncnnctttncaatcgggnaaacctnttagcgccaacntgcnttaaatggattcgccaatcccccgngggaagnngnttcntttggnngcttttcnttcntnncctcnntaactcccttcctccgatcnttcggnttcggnnatcct

SEQ ID NO: 2188 - DNA, 909 bp, Homo sapiens
  misc_feature 13, 473, 535, 561, 575, 625, 628, 634, 657, 670, 691, 693,702, 703, 714, 716, 725, 731, 745, 756, 758, 769, 773, 793,798, 803, 812, 824, 843, 846, 850, 855, 857, 866, 897: n = A,T,C or G
tgccgcgtatacnactactatagggcgaattggagctccaccgcggtggcggccgaggtaccctgttactgaggcaatacctttctgggtaattttctcaatcctctgggtatattgaggttgcctactgtggctgatgaggaggccagctattatttctagccttctctgtccattgagcattgtctatctgcttcttttcagtagttatttgccctgtagtttcctcacatgtgtgcactgatcaatacttaagcctgaaactgtctgcagcactccagatctttatttctcttttactttgcaacttgttctctctgtagttctactctcttcgctctctctctcttccctcagcacaaccctctccatctctacacttcctctcacctctgccctgtgaattctaattgcatttgctgccccaaatcctctttaactcattcagaaccactgaagctcttggatttttncctctcttgaacttgcagcctgagaacctttcttccaagcagcaaaactggagcaatatagnagaataccaattttaatggttggttntggtttggtttttnggcttccaaggaatcttttggctagcactggcctaactttttggtggtcnaanatctgnaaaactggttactggggagaaanggataaaataatncccattgcttccattccattntnggcccaganngggaaagactntncctccatanttaaanctggatggaggttntaagggcttcntnaatttttattntganaatttccaattttttcaagnacatnttcanatctaagcnggaaattccccngaaaacccgggtaccttgnccnggcngggcngntttaaaacnagggggaacccccggctgcaggaaatcaaantcaagcttatcc

SEQ ID NO: 2189 - DNA, 899 bp, Homo sapiens
  misc_feature 459, 534, 542, 561, 587, 589, 605, 610, 622, 623, 627, 636,656, 665, 685, 688, 699, 700, 729, 730, 772, 773, 775, 779,788, 791, 793, 794, 797, 799, 805, 812, 816, 829, 847, 850,863, 867, 870, 873, 875, 881, 887, 891: n = A,T,C or G
gtgccgcgtatacgactactatagggcgaattggagctccccgcggtggcggcccgcccgggcaggtacccattaagtagtttttcgacccataaactctcctgtcccagtagttcacagtatctgttgttcccatgtttatgtctgtgggtgctcaatgtttaggtcccactgataagggaaaacgtggtatttggttttctgttcctgcattaatttgcttaggaaggaggattttcttaaacatcagtctgccttttctctaaggctttatgatatgaggcatccgtattcattgaatatggagcttagaaatataggtattgaggggccaccacaccaggctgacttcttgatcttgaattttataaggattctaaagggcattgggtagttccaggacatctgagacctttgagggagggtgcattcctctgatttttgtgcctctgccagcantctggcttctaacaaaagtggcaagggatgcttgactcacatgaaggcttctggccaaagtgttccataaggganaaggaaanggaccagtgtcctaacttnctccagaaagactcataggacagcantnggttttcaaccctgtnaaaantgggggggaaannttgntttttcacnatcccccaagggaaaaaggntgaaacccncttttcccggaaatgaaccnagnggagggctttnnttgatttttaataaaaggattattggttnnattttaaaggttaaaaccttaaccctcctggggtccccaaannanggtngagttggtnctntnnccnancttttncccaacnaaanaaaaatttttttntaatgggctttttatccnccncaagaaaaaaccnaaangtnttngncctttntataanaccntaaaccct

SEQ ID NO: 2190 - DNA, 877 bp, Homo sapiens
  misc_feature 543, 579, 613, 634, 641, 651, 673, 689, 734, 814, 830, 832,836, 838, 851, 875: n = A,T,C or G
cgcgtaatacgactcactatagggcgaattggagctccccgcggtggcggcccgcccgggcaggtactaacttggtcagggcagggtgacacataaaattaaccatcacagggaagggtagggctggagaggcagactgtggccaggttacaatgcgctgaggctaaggagactgtgtttatcctgtaggccagtgggtcttactctgaagtcttttgggtgggacattcatggacttcaagagacctgtgaatgccctaagattataagtaaaatctgtgagtctgtaactaaagctaaagctatttttctggggcccaccatctaaagaagattctgaagccttagggtagccgtggagaagacatgaaggtccattttgcatggtagaaccctgcctggctcttgctgcagtgtgggaggacaggtttgcaatgtggaggtgtggcaggcatggatttgggaggattggcagaggactcaccatgtccataccactcactgagatggcaaatatttattaatcatcccactgtgtatcanacactaagaataagctgggaggccatggcaagtgangtcaccacagtccctgccacaagtggaaggtatngtatacaaggtaaggcagggnaagaacncttgcaaaangggtttgccccattgcattaantcatttatttatgccncatgttgattcaaccattatttcttatgccaagcttgtcttcaangggcctggaagaaaataaacctaccttgggccgttttaaacttagtggaatcccccggctgcaggaaattcgatatcaancttttcaatacccgcnanctcnangggggggcccggnccccacttttgttcctttaagggngg

SEQ ID NO: 2191 - DNA, 897 bp, Homo sapiens
  misc_feature 551, 637, 735, 753, 768, 792, 802, 810, 817, 830, 832, 835,856, 874, 889, 895, 897: n = A,T,C or G
gtaatacgactcactatagggcgaattggagctccaccgcggtggccggccgcccgggcaggtaccctatccagagggttctaccccatgtagaacctctcttttctgttcacctgattaggtgtagaagtagccagtcaaattcatcctcgctaccactgttatttctgcccacctctaagcattttcttctttctcattcaccacttttttaaacatgtgtaatacatcagtaactaatttataatattccactccaatccatcaacctcagtaaatttaatattcacatcatcagcccttcatatccatacattacttcaaattctttattctgtttgactccatggatttgcatcacctctccacagcagcaaggccaagacccaaacactgaaagtctctgagggctccatcttgagcctcttgagaatctctaactggaaccactgccactgccatttctttcaattccccaccacgcctgatttctactgtctcttggtcacttcatcccatacctgtcacaagtccatttcaaacgctgcttncacaaactaaggtagaatttgggagatggtaattaaaaaaatacagattcctacaccttgcccatgggagcttttgattcaagtanataagaggggcaaggtttcaaatctttggtatacccaggggaattaaaatttaaaaaaaagatggcctggagcaacaatcccccagaaaattctgaanttaacaatactgcatttngggcctgggataatngatgggcttttaaaaggtttcttnagttaaattntaactggngcatctnaagggtgaaaaananggngctttaaggggggagatgttnggaatggaggactttaantatgctaccaagggnaaactntn

SEQ ID NO: 2192 - DNA, 850 bp, Homo sapiens
  misc_feature 614, 709, 736, 738, 802, 807, 838, 840, 842: n = A,T,C or G
acgactactatagggcgaattggagctccaccgcggtggcggccgaggtaccatgctggagttttgcaaaagcttcccaggtgattttaatgagtgtcaagagttgagaatcctgcccaagacttactaaggggtggcaaaaccagcccatttttaaccctcactttgaaacccttcccactattatcaaaagattggggacgggaacaagggagggcatcactgggagaggtttgttctctgccttgttgggaataagcgaaccgggatttctgtctctctgcacattgatctcccttcctcggaacacccctcttccactgtgtctatgggtgaattctcaggcatttttcaaggtggaactcagtgtcaccctttcagaaagtccttccctaccttataggcagaatcgcctcacccctggtaaagcgaccagtccactgtgaggcttgttatccccgtgtattccatctcatggggtcttcaccttatgtgtgcgtcctcgtttaagaccacagctacctgaacataagcagggccgggtcctatgtgtctttttattcttcaagcctagcatagtccctctataaaaagtgctcaataaatgcttattnggatagaaaattcataatgtgactaaaatatgaattaataaatgcttaagaataccagctttgaaaaaagggattgagtcttgtcttgattaggnagtatcaacagaacattccaaatgcangnggctttatccaacaatggcttatcatcctcccacctggggggtgactgggttcaagtcctatgngggtnctgcctggagtttggtacagcaagcttggangncnaggaaagg

SEQ ID NO: 2193 - DNA, 907 bp, Homo sapiens
  misc_feature 24, 28, 29, 39, 46, 245, 326, 327, 344, 418, 419, 422, 459,471, 472, 483, 599, 602, 609, 617, 619, 626, 629, 632, 647,692, 717, 722, 727, 733, 734, 736, 747, 755, 765, 771, 776,778, 781, 800, 808, 814, 825, 829, 838, 841, 845, 848: n = A,T,C or G
  misc_feature 851, 854, 867, 879, 884, 886, 889, 894: n = A,T,C or G
gcgcgcgtatacgactcactatanggcnnttagtatacngcgaatnggagctccaccgcggtggcggccgcccgggcaggtacgcgggctttgaccaaagagtgctctgacacactgcattccctttcccctaggggtagcccatgttgagggcaagacctccagaaatcctgcagcacctccgggtcttgacagttcccctgtagttgccacggtctcagtgggttctaccgggttgtttgcangaaatcaactcacgtggagacattaagggctgagattctctgggcagaatggcagcacacagccaataaagtgcccacctnntcagcttgggtttgacngtgagggtgaatgaaactttgcgaactggcctcctgattgctctgctcccaaggactcctcaaatggccaccannagnagttcctgggctttgggggtgcagaggaactcaccancattttggcagnnagcaatcttgnggcatgtggaaaggggagcaaagaaacacccaacctactcttttatgggattaccaagttcctcagggggcatttagcttccaaaactcttgcttgccttctttttttgggccccnaantcatccnatgggttntnttgacanggnacngaaactcttcctttnatattcttacttttggcccatgatcatttacctgtaactttgggntttaatttctgaagaagaaccaagntgctnagtgnctgcanntnaattctttttnggaggctntaggaaaaanggtaantattngngangtcctttgcccgtttttanaactaagnggaaancccgggcttgnaagnaattcgaanttnaagnttntcnatnccgcaaaccttanagggggggcccnggccncnaanttttnatccctttaaagg

SEQ ID NO: 2194 - DNA, 849 bp, Homo sapiens
  misc_feature 22, 46, 47, 48, 96, 109, 111, 618, 629, 673, 675, 691, 714,785, 801, 809, 810, 811, 812, 826, 839, 849: n = A,T,C or G
gtgttttaaatccactttttanagggccaattggagctcttttgcnnnggcggccgaggtacgcgggctaaatactgtgctctgacattgatgccnttattccatattntnagggcttctgtggtgtttaggcctctaatttttctcttcagtaaggggaataactttgctgtgtcagcgcagtgctcaggagggttgcaatctagaaacagtgattgttaaaattgcctataaacacacaatataaacaatatgccacagacacagaggcccccagcatagtttctggaaggtgaagtctcacctctgccagagtagagtcacagtgggaattgaggcttggcatctgggtgcctctgaagctcttcctgtggctcctgttagacaattgaccccgaaacacagaagatagagattgcacattgcgttcagtaattgttgtttatttatgttatttctgaaaataaaagacagcacaggctgcttatctttaaaccacacagtacctgcccgggcggccgctctagaactaagtggatcccccgggctgcaggaattcgatatcaagcttatcgatccgtcgacctcgagggggggcccggtacccagcttttggtncctttagtganggttaattgccccctggcgtaatcatggcatagctggttcctgngngaaaatggtaatccgntcacaatttccacacaacatacnaacccgggaccataaagggtaaaaccctggggtgcctaatgaagtgacctaactcacaattaattggggtngggcctcactggcccntttttcannnngggaaaacctgtcnggccaacttgganttaatgaaan

SEQ ID NO: 2195 - DNA, 845 bp, Homo sapiens
  misc_feature 5, 18, 26, 30, 41, 69, 91, 99, 101, 103, 104, 574, 603, 695,702, 739, 767, 782, 799, 835, 837: n = A,T,C or G
aaagnggccatctaattncccgggcnaatngtattgcattngcggccgcggccgaggtacatcagaacnttccagtaacaggatggcgttngcagctgncntnngaatgctcagcctcgctgggaatgggtcccctcttacttgctgggtgaccatgagcatgttgatcccacctcagagcccccgcttcctcctcctctataaataggaccatggatagtagcttggagaattcaataaaatatagtgtgctgaacactcagcacgtgcactaggaagaaccaaaaatgagcaggaccctcactgatatttaatgtcccctaatttgtcaagggacattatattgcataagatttgctttaaagaaagtaaattcctttcaggcaagttgtttgagtcaccaataggtttaaatcaaaggaagtttttgtcctcacgattttgcattttttagtgcctttccacaacaaatgtataaaaggaacattatttttaagtgtaactattttggaaacttcttacttaaaagcaattttctactacaagtcaaaggattaaagcaaaaaaaaaaggngaatctgcagcagcatatattggatatgntttctagaaatacttttttaaagaaggcagagaaccctaagctaaaagcagaatttaaatttctagcattcattcagcagctgctctataangagacanggttgaattggggccaagtcaagcatcagaattccangggaagcagaggagaaattagaaaatgngcaggaagccaccanaaaatggctggtaaaangggaaagccttctaaaatgacaagacttctgggcananacaaacct

SEQ ID NO: 2196 - DNA, 844 bp, Homo sapiens
  misc_feature 1, 2, 35, 73, 104, 107, 111, 140, 696, 703, 726, 761, 763,768, 809: n = A,T,C or G
nnttcgcccgtttttaaacgacccactatagggcnttttggagctcccccgcggtggcggccgcccgggcagntacctttgctgaagtatcatacacacaaaanttncatnaccctggccctttattttccattacccanttttatttgtgtcataacgatatcaagtatataaaattgtcttatttggctctttacatgtttctcacctttattgccaataattaagagttataaaaagctcttttattattcactgtcaaaattctctttacttttaatttaaaaatctttgctgttataaatgagtaaataagctaagaattgaattatgtatttaatcaattctatgatctacattagtaaatatcttgataggtttgttataaagaccagtaagccaagaggtttggctaaaggctgatgaatgtttaactgaaatgtcttatgcaactaatgtagacgctatacgaaaaaaggaggtataataattggcaaaagcaagggcttttgtagttttcaaaatattaaaaatgggctgggcgcaatggctcacacctgtaatcccaacccttttgggaggcccaagcaggcggatcacctgaggttggagttcgagaccagcctgaccaccgtggagaaatccagtctctactaaaaataccaaaatagccaggcatgggggtacatggtctgnaatccancttacttgggaagctgaggcaanaaaaacacttgaaccctggaagtggaggtgcaatnancccanaatgcccattgcactccaacctgggaaaacaagaagggaancctgtctcaaaaggacaaagaaaaaaaaaaaaaat

SEQ ID NO: 2197 - DNA, 848 bp, Homo sapiens
  misc_feature 28, 45, 55, 63, 72, 77, 80, 93, 97, 99, 106, 109, 112, 625,645, 688, 723, 741, 747, 753, 804, 815, 843: n = A,T,C or G
gtgtttaacttttataattaaaactccngggcgtttggtaatttnaaccgctgcngcggccgngccgccatncaggnttngcgacctcgcgcncgantngcaggtncanttncgtgctcttgccagtactcgggcgcggcagggaataaaagcgctcgaatatacgttccagcgcatacgcggggatgccctcaccgcggtcgcgcacggcgatttccacctggctgccctggcgctgcgccgtcagctcgatgcagctacccggtggcgcgaagccggccgctctagaactagtggatcccccgggctgcaggaattcgatatcaagcttatcgataccgtcgacctcgagggggggcccggtacccagcttttgttccctttagtgagggttaattgcgcgcttggcgtaatcatggtcatagctgtttcctgtgtgaaattgttatccgctcacaattccacacaacatacgagccgggagcataaagtgtaaagcctggggtgcctaatgaagtgagctaactcacattaattgcgttgcgctcactgcccgctttccagtcgggaaacctgtcgtgccagctgcattaatgaatcggccaaacgcgcggggagaggcggnttgcgtattgggcgctcttncgctttctcgctcacttgactcgctgcgctcggtccgttcggntgcggcgaagcgggatcagctcacttaaaggcggnaataccggtattcaaaanaatcangggaanaccaggaaaaaaacatgtgagcaaaaaggcaacaaaaaggccaggaaccgnaaaaaggccgngttgctggcggtttttcataggctccgnccccc

SEQ ID NO: 2198 - DNA, 856 bp, Homo sapiens
  misc_feature 6, 691, 720, 748, 754, 757, 763, 777, 778, 784, 801, 804,812, 827, 836, 840, 842, 845, 849, 856: n = A,T,C or G
gtgttngcgcgcgtaattcgactcactatagggcgaattggagctccaccgcggtggcggccgcccgggcaggtacccatcaggaatatccggctcagaagccagggcctcagagactgttctctcactgagacctagtgagggaactccctgtgttattctcactgatggcccaggaaccacccttgcaagtcatgaccaccagcatcatgtagcactggaactgatctgggcaatgacctctgtctaaacttctgaatcccctccgacaaagacccaagacagcagcatggccatgcagctgtgctcacatctcacccctgcactggccaggaacacatctatctttcctttgggtagggtcacccaactgctctgccacttccagctgtgaaaggcatctatgtgacagacccctctgcagtttgaaactgtgtgacaactttaacacccaactcagcatctgcatgggtttctgagaattacctatatcttttgtggtctctttgctgattctctgtttcattaaaaaaaaaaaaaaagtgactcgtgatccctgagttcctatatagccaattttactcactagctaaagaaacactgtatttaaaatgacaaacctagcaacaattaggcaagctctcatcaggacttcatgccaggctggggtgaatggcttaaaaaagtcttncacagcggatcttggaaccttggaccatnggggcttggtggccacatttgacctaangggctnatngggggnaacccggaaggggnncacccnctggaactggggaaaanaancccctgtnggggggaactctttnccccaaaanaaantnttngtancccattn

SEQ ID NO: 2199 - DNA, 843 bp, Homo sapiens
  misc_feature 6, 14, 23, 38, 42, 43, 104, 106, 734, 766, 814, 831: n = A,T,C or G
ggtttnacccaatntatagggcnaattggagctccttngcgnnggcggccgaggtacaaagaaacagcttcaatccttttggggaatggcaggtttttgcagantntgtgttccaaatttggggtcatagcaaaacccctttataaagcaacaagggggtcagaaaatgagtcaatggagtggccctagaaatgaggggaaactttgccaagttaaaacaggctcttaacaaagctcccactcttggcatcccaaacttcattaagcatttttccttgtatatagcaggaaaaaaagggcataactgtgggaatactaacccagaaattgggatcagaacccataccaaccatctacttttcaaagaaattgaacagagtagcctcacagtgaccaagctgcctgcaggcaatagcagccactgttattttagtggaagaagccactaaaatcaccctgggtcaaccactgaaagtgttaactccacatcaggtaaggtcagtcctgggaataaaaggacatatctgaacgatgggagaaaggttaaccaaataacaggctatattcctagataatccagaggttacccttaaaacctgtaacaccctgaatccagcttcattgctgcccacaggcccagtgactgatcactcctgcagcaggtcatcacatacacatatgtcagctgacctcatttaaaagatcagccccttccaaatcagaagataactggnttacagacagcaatagctttgtgtccatgganaaagcctggctggatatgtggtagtaaaatacacatcatcattgagtnccaaaactacccaggcncatattacaaat

SEQ ID NO: 2200 - DNA, 846 bp, Homo sapiens
  misc_feature 3, 4, 5, 6, 7, 8, 9, 10, 11, 12, 13, 18, 19, 20, 22, 23,24, 25, 26, 489, 533, 534, 540, 550, 572, 582, 592, 613,617, 644, 645, 646, 647, 648, 649, 650, 651, 652, 653, 654,655, 656, 657, 658, 659, 660, 661, 662, 698, 725, 743, 749: n = A,T,C or G
  misc_feature 775, 778, 783, 785, 790, 796, 798, 805, 815, 817: n = A,T,C or G
ggnnnnnnnnnnnttttnnngnnnnngcgaattggagctccccgcggtggcggccgaggtacagtttagtcaggaagcaggcattaaacacacatatacactcacaatgctaaaataaaataaagctgttaatttgatcaatgccaagaagaaaaagaatggggcttataagagaatacaacaagcggtgcaacttaaatgagggggcaggggagtatctgagaagccctctgtgagtgagtgactttttttttttttttttttgagatggtgtcacactttgtctccaggctggagtgcagaggtgcgatccagctcactgcaatatccccctcaagcaattcccctgcctcagcctcccgagtaactgggacttcaggcacatgccaccacgcctggctaaatttttttgtatttttaatagagacggggtttcaccatgttggccaggatggtctcgatctcttgacctcgtggtccacctgcctnggcgtccgaaagtgctgggattacaggcgtgagccaccccgccnngcccanggagtgaccnttaatcttaaacttaattactngccatttccnggaaaaaagntgggaagaatgtgccaagaanaaanacatgcgtttggggtcttggaaacccnnnnnnnnnnnnnnnnnnnaaaaaagtcctggccggcgggcggtttaaaactagnggatccccggctggaggaattcatttnaactttttgaatcccgcnaccttnagggggggcccggccccccttttttnccnttaangngggtnaatggncnctggggnaaaaatgggnanaactggttcctggggaaatgttttccctt

SEQ ID NO: 2201 - DNA, 520 bp, Homo sapiens
  misc_feature 269, 328, 378, 382, 395, 401, 409, 430, 431, 441, 447, 475,478, 485, 488: n = A,T,C or G
cgaaacactactatagggcgaattggagctccccgcggtggcggccgcccgggcaggtactagctgtttttgcgacttttaataataacacctactagttactgagtgtcatcatcaccaatgtcatgattgccacgatttattgagtgcctactacatgcaggccccaggtcagtgctttacactcttaactgtcatgttgacaacagctctgaatgacaggagctctgttcagtgttttacaagtgagaaaactaaagacactaatnaattttttaaaaatatatccacaggttctattgattaagtaaagtaaggggagctagtnccttggcacgctctaataaactttgttgggattccccccccggggccttngcanggaaattttcgtntaattncaaaggcntttaattggaattaccccggnncgaacccttngaaggngggggggggccccggggttacccccaantcnttttttngtnttacccctttttaagttgaggggggtttaaaa

SEQ ID NO: 2202 - DNA, 859 bp, Homo sapiens
  misc_feature 418, 419, 420, 421, 422, 423, 424, 425, 426, 427, 428, 429,430, 431, 432, 433, 434, 435, 436, 437, 438, 439, 440, 441,442, 443, 444, 445, 446, 447, 449, 450, 451, 453, 454, 455,456, 457, 458, 459, 460, 461, 462, 463, 464, 465, 466: n = A,T,C or G
  misc_feature 467, 468, 469, 470, 471, 472, 473, 474, 475, 476, 478, 479,480, 481, 482, 483, 484, 485, 486, 487, 488, 489, 490, 491,492, 493, 494, 495, 496, 497, 498, 499, 500, 502, 503, 504,505, 506, 507, 508, 509, 510, 511, 512, 513, 514, 515: n = A,T,C or G
  misc_feature 516, 517, 518, 519, 520, 521, 522, 523, 524, 525, 526, 527,528, 529, 530, 531, 532, 533, 534, 535, 536, 537, 538, 539,540, 541, 542, 543, 544, 545, 546, 547, 548, 549, 550, 551,552, 553, 554, 555, 556, 557, 558, 559, 560, 561, 562: n = A,T,C or G
  misc_feature 563, 564, 565, 566, 567, 568, 569, 570, 571, 572, 573, 574,575, 576, 577, 578, 579, 580, 581, 582, 583, 584, 585, 586,587, 588, 589, 590, 591, 592, 593, 594, 595, 596, 597, 598,599, 600, 601, 602, 603, 604, 605, 606, 607, 608, 609: n = A,T,C or G
  misc_feature 610, 611, 612, 613, 614, 615, 616, 617, 618, 619, 620, 621,622, 623, 624, 625, 626, 627, 628, 629, 630, 631, 632, 633,634, 635, 636, 637, 638, 639, 640, 641, 642, 643, 644, 645,646, 647, 648, 649, 650, 651, 652, 653, 654, 655, 656: n = A,T,C or G
  misc_feature 657, 658, 659, 660, 661, 662, 663, 664, 665, 666, 667, 668,669, 670, 671, 672, 673, 674, 675, 676, 677, 678, 679, 680,681, 682, 683, 684, 685, 686, 687, 688, 689, 690, 691, 692,693, 694, 695, 696, 697, 698, 699, 700-758,760-823,825-858: n = A,T,C or G
cgcgtatacgactcactatagggcgaattggagctccccgcggtggcggccgaggtactaacagtcaggaacaaatagaacacatagagaggacagtgggaggtccccctggctaaagcagagggtgtattgagagaaggaaacctttgtctcaatggatcgtaggcaaactgagaaggaccataacaccttgctgagaagtttgaatgtgattccttggtgaccacagcaggaggtcctgaagtccctgtccttcagatgcaaacaaggaggctgtcccatacagactatcagggaaaaaatgcactgtttatcaaaagatatgaatgttcttgacaggcaaagccctgctcaaatgaaatggcagtgcagggagatgatattcagtgtgatgcagctgtgagtacctgcccgggcnnnnnnnnnnnnnnnnnnnnnnnnnnnnnntnnnannnnnnnnnnnnnnnnnnnnnnnnannnnnnnnnnnnnnnnnnnnnnnannnnnnnnnnnnnnnnnnnnnnnnnnnnnnnnnnnnnnnnnnnnnnnnnnnnnnnnnnnnnnnnnnnnnnnnnnnnnnnnnnnnnnnnnnnnnnnnnnnnnnnnnnnnnnnnnnnnnnnnnnnnnnnnnnnnnnnnnnnnnnnnnnnnnnnnnnnnnnnnnnnnnnnnnnnnnnnnnnnnnnnnnnnnnnnnnnnnnnnnnnnnnnnnnnnnnnnnnnnnnnnnnnnnnnnnnnnnnnnnnnnnnnnnnnnnnnnnntnnnnnnnnnnnnnnnnnnnnnnnnnnnnnnnnnnnnnnnnnnnnnnnnnnnnnnnnnnnnnnnntnnnnnnnnnnnnnnnnnnnnnnnnnnnnnnnnnnc

SEQ ID NO: 2203 - DNA, 871 bp, Homo sapiens
  misc_feature 492, 495, 576, 626, 686, 690, 691, 701, 704, 719, 721, 753,769, 772, 794, 796, 818, 844, 850, 856, 870: n = A,T,C or G
acgactactatagggcgaattggagctccccgcggtggcggcccgcccgggcaggtacacttccccctcctcctcccccgaccatgcctgaattcagacctctagcccttggatctgttatctgacccaagaagtcttgtcaattttagaaggctatcacctcttaacagccatttctgctgcttcctgcacactttctaatttctcctctgctttccctggaaatctgatgcttgacttggacacaattcaaccctgtctccttatagagacagctgctgaatgaatgctagaaatttaaattctgcctttagcttagggttctctgccttctttaaaaaagtatttctagaaaacatatacaatatatgctgctgcagattcaccttttttttttgctttaatcctttgacttgcagtagaaaattgcttttaagtaagaagtttccaaaatagttacacttaaaaataatgctccttttatacatttgntgnggaaaggcactaaaaaatgcaaaatcgtgagggacaaaaactttctttgatttaaacctattggtgactcaaacaacttgnctgaaaggaatttactttctttaaagcaaaatcttatgcaatataatgtnccttgacaaattaggggacattaaatatcaagcgagggctctggtcatttttgggtcttnctanngcacgggctnggnggtcaagcacacttntnttttatttggaatcttcaagcttctatccatngggcctatttataganganggaggaagccgggggctctgangngggaacaacaatggctcatggncacccaccaggtaagaaggggcccanttcccncgaggntgaccttcccagant

SEQ ID NO: 2204 - DNA, 884 bp, Homo sapiens
  misc_feature 1, 6, 7, 8, 9, 11, 12, 13, 14, 17, 162, 272, 354, 483, 538,641, 644, 671, 718, 729, 730, 738, 778, 805, 821, 827, 830,834, 849, 857, 884: n = A,T,C or G
ngtttnnnncnnnnttngcgcgtaatacgactcactataggggcgaattggagctccacccgcggtggcggcccgcccgggcaggtccgggcaggtactcttgtttaaccatcagaggtgatcccatcaccttcacagccccagcctctgctccagtccctncccagcgaaaagggccgcccatgccatcctgctgctggtgatttgctttgtggtcatggactcagtggacatcattattttattaaccgtgtggtaggtttttaactcanttatcctggatatccaaaggtttgtggtccatctttaggcttccgtttgttctttggtacctcggcccgctctagaactaantggatcccccgggctgcaggaattcgatatcaagcttatcgatacccgtctgacctcgagggggggcccggtacccagcttttgttccctttagtgagggttaattgcgcgcttggcgtaatcatggtnataagctgtttcctgtgtgaaattgttatccgctcacaatttcacacaacatacnagccgggagcataaagtgtaaagcctggggtgcctaatgagtgagctaactcacattaattgcgttgcgctcactgcccgctttccaatcgggaaacctgtcntgncagctgcattaatgaaatcggccaacncgcggggagaggcggtttgcgtattgggcgctcttccgctttctcgnttacttgactnnttgccttnggacaaccggttgaggcaagcgggtttaacttactcaaangcgggaatacggtattcacagaatcangggatacccaggaaanaacatntgnccanaaggcacaaaagccnggaaccgnaaaaaggccgggttgctgggtttttcn

SEQ ID NO: 2205 - DNA, 883 bp, Homo sapiens
  misc_feature 4, 289, 376, 408, 494, 495, 584, 589, 598, 633, 643, 666,668, 685, 701, 727, 729, 735, 738, 761, 779, 781, 797, 801,802, 803, 810, 818, 820, 828, 831, 832, 841, 843, 849, 851,862, 863, 875, 876, 877, 878, 879, 880: n = A,T,C or G
cganttggagctccacccgcggtggcggcccgcccgggcaggtaccctgaaggccgcttacttggaaccgtatcttctaaatgctctgaaaacctatccaaaggcaattaaaatcacaaatatcattgaaaacatctaagaactacgtgtaagcacttcgggatagtcaggtaaaggcggccctctaattatgaagcattttgataattaatagaattctaagccaaagcttaaatccggatacacatcataatggttaagccaaataacacttaatcattttaccttntattattgataaaggcaacacactgaagtagacagacagtaaagaaaaagtccacatctttttattgggtccaaataacctgattgnaaatacttaagcctctgattttcatgtttcanaatttgtatgttaatgaccttagtagatgtggctttgtccagcctcaaaaagggttgctctccagccaggggccccttttttccanntactgctcccatcttctttaagtatattcaaactggtgagtgaactctttatcccgcgtcccttggccgctctaagaactaagtggatnccccnggctggcanggaatttcgatatcaagctttatcggatcccgtcnaaccttcgangggggggggccccgggtccccancntttggttcccttttagnggagggggtaaatttngcgccgcttggcgtaaatcatgggcntnagctgnttnctggggggaaattgttattccgnttaacaatttccacacancntacgaagccgggggcnatannntgtaaanccctgggntncctaatgnggnnagctaactnantttaantngcgctgcggtnnctgccccatttnnnnnnggg

SEQ ID NO: 2206 - DNA, 854 bp, Homo sapiens
  misc_feature 1, 648, 713, 732, 740, 752, 756, 757, 774, 793, 796, 797,800, 809, 818, 819, 830, 837, 840, 844, 851: n = A,T,C or G
ncgcgcgtatacgactcctatagggcgaattggagctccaccgcggtgggcggcccgaggtaccaagaagaaagccatgggcactgtcagtaaagagatctagaatgggaacaagacagggagaaagccaggtgcaagacacaggaaaagttctagaaagaaagctttttgcatctaacatcagtctcccagattcaacccatctcaatattgaagaaattgtcatcctattcccaaataaagtgaaatgaggttttttatgtaaagtgcttagaatggagtgtggcacacagtaaggatcacctttaagtattacctatagatatactgataaatacatggatatgtcaagggagaggttggccttttaacttgaaggagtcagaaaaaaactgccatgcgcattttgctttgactttgaaaatctggatgcatggaagctctatagaagcacagcaggaatttcaagaggtatgctgcccaatgtgtggctggcagagtgctcacaccaaaggctccattggcattgagtggggagaacatactagaagtgggtttttcttgtcatggagttgaattttttttttaagcaagttcatcttctttctagtgaaaaaataaaccaaggataggggaaaatgtttggangatgaatctttaaaaataccactcatacccaaatagaaaaatggttctttttcagtatacgtctnttgttacttaacaaaatgnacaccggngggggagaagtnttannggggggagggacctggntccctgctggggccaaaantcnnttnaaaacctgngaaaagggnnacttaacaatntcctttnttnttgnccttttnaac

SEQ ID NO: 2207 - DNA, 883 bp, Homo sapiens
  misc_feature 2, 414, 457, 485, 491, 493, 532, 541, 543, 557, 562, 565,597, 599, 609, 612, 636, 643, 661, 680, 693, 702, 713, 714,717, 741, 746, 748, 752, 761, 810, 830, 834, 845, 852, 867,875, 880, 882: n = A,T,C or G
gnccccgtatcgactcactatagggcgaattggagctccccgcggcggccggccgcccgggcaggtacctcctccctatgcatctgctgtgggaagtgtgggtaactcatagatgatgccacagggcatgtattcaggcaccacaggcaacagtgaatgaatgaagtgaagtggtatttatccatttctggaaaggtccagggtttggctctgcagggccaagagaacagctttagctgtgccttaacccagtcctggagaagacagcaggccgtaatcacggggaggaaacccatcttttaagggctcctcgctcaggtggtgacaaggtgaggtggtcatctatgctgtctttatcagtatctgtcctaaatactgtgctctgacattgatgctaatattccatattatcanggcttctgtggtgtttaggcctctaatttttctcttcagtaangggaataacttttgctgtgtcaacgcantgcctnangagggttgcaatctaaaaacaagtgattggtaaaattgnctattaacncnccattttaaccatntgccncanacacagaagcccccaacattagtttttggaangngaaagcttanctnttgccaaataaaatcacagtgggnaattgangctttggcattttggtgncttttgaagctcttcctgnggcttctggtaanacaattganccccaaacccnnaanattgaaattgcccattgggttcanaaaangngggnaattaaggnaattctgaaaaaaaaaaaaaaacaggcttgctattttaaacccacagtncctgggccgtttaaaataangganccccggcctcnggaattnattttaaacttttcnaacccgcnacctnang

SEQ ID NO: 2208 - DNA, 896 bp, Homo sapiens
  misc_feature 498, 578, 658, 661, 670, 678, 705, 719, 721, 732, 737, 750,754, 759, 765, 773, 779, 792, 793, 815, 832, 837, 852, 855,856, 857, 860, 861, 862, 867, 870, 871, 874, 880, 882, 889,892: n = A,T,C or G
gcgcgtatacgactactatagggcgaattggagctccccgcggtggcggccgggggccattgagactgccatggaagacttgaaaggtcacgtagctgagacttctggagagaccattcaaggcttctggctcttgacaaagatagaccactggaacaatgagaaggagagaattctactggtcacagacaagactctcttgatctgcaaatacgacttcatcatgctgagttgtgtgcagctgcagcggattcctctgagcgctgtctatcgcatctgcctgggcaagttcaccttccctgggatgtccctggacaagagacaaggagaaggccttaggatctactgggggagtccggaggaagcagtctcttctgtccgcttggaaccccatggtccactgaagttccttatgctactttcactgagcattcctatgaaatacaccagtgagaaattccttgaaaatttgcaaggttgtctgggttcatgtctaanccttgttccagctattccagaatgcccacaaagaatttcagcttggatctgggaagaaggaaagaaactgatgggtgttnacttgaacccattttgattgagacctacaccagggctgatggtaattcattggaaaacccgcaacaaactttggctattnccntggcccggngggaagtnttgggttttttgagaaatcttttttgntaccctcgggccgntnttaaaactaantggantcccccggcttgnaggnatttnaaattnaacctttntcgatnccgccgaaccttnnagggggggcccgggccccaacnttttggtccctttaagnagggntaaattgcccccctnggnnnaannnatggnaannccngtttcngnggggaanatntttt

SEQ ID NO: 2209 - DNA, 905 bp, Homo sapiens
  misc_feature 570, 583, 590, 640, 684, 704, 719, 745, 751, 766, 770, 778,803, 813, 819, 823, 826, 832, 834, 838, 843, 848, 852, 859,872, 882, 892, 895, 899, 905: n = A,T,C or G
gcgcgtaatcgactcactatagggcgaattggagctccccgcggtggcggccgcccgggcaggtaccctgaaggccgcttacttggaaccgtatcttctaaatgctctgaaaacctatccaaaggcaattaaaatcacaaatatcattgaaaacatctaagaactacgtgtaagcacttcgggatagtcaggtaaaggcggccctctaattatgaagcattttgataattaatagaattctaagccaaagcttaaatccggatacacatcataatggttaagccaaataacacttaatcattttaccttttattattgataaaggcaacacactgaagtagacagacagtaaagaaaaagtcacatctttttattgggtccaaataacctgattgtaaatacttagcctctgattttcatgtttcagaatttggtatgttaatgaccttagtagatggtggctttgtccagcctcaaaaagggttgctcttcagccagggccccttttttccaggtactgctcccatctccttttaagtatattcaactggggaggtgaactcttttatnccggcgtaccttngggccgntctagaaactagtgggatcccccggggctggaaggaattcgaatttcaangcttatcgattacccgtcgaccttcgagggggggggcccgggancccagcttttggttcctttnagtggaggggtaaanttggccccctttgggggtaatcaatngggcanaagctgggtttcctngggnggaaaatngttttccgtttaccaatttccaaancaacaatacnaacccngggnccntaaagngnaaangcctnggggnggcntaaaggnggggctaactccnatttaattgngttgggctcnctngccnctttcn

SEQ ID NO: 2210 - DNA, 875 bp, Homo sapiens
  misc_feature 605, 633, 641, 667, 673, 683, 697, 738, 760, 761, 769, 772,776, 779, 792, 805, 813, 815, 839, 844, 857, 866, 867: n = A,T,C or G
cgcgcgtaatacgactcactatagggcgaattggagctccccgcggtggcggcccgcccgggcaggtactgtgtggtttaaagataagcagcctgtgctgtcttttattttcagaaataacataaataaacaacaattactgaacgcaatgtgcaatctctatcttctgtgtttcggggtcaattgtctaacaggagccacaggaagagcttcagaggcacccagatgccaagcctcaattcccactgtgactctactctggcagaggtgagacttcaccttccagaaactatgctgggggcctctgtgtctgtggcatattgtttatattgtgtgtttataggcaattttaacaatcactgtttctagattgcaaccctcctgaggcactgcgctgacacagcaaagttattccccttactgaagagaaaaattagaggcctaaacaccacagaagccctgataatatggaatattagcatcaatgtcagagcacagtatttaggacagatactgataaagacagcatagatggaccaccttcaccttgtcaccacctgagcgaggagcccttaaaagatgggtttcctcccgggaataccggnctgctggcttcttcaagactgggttaangcacagcntaaagctggtctctttggccctgcanaacccnaaccctgganctttccagggaaanggataaataccatttcacttcattcattcctgctggcctgnggggcccgaaaacatgccctgnngcatcatntgnggantancccacctttccanaccagatgcctangggaggangntccttcggccgttttaaaactagnggatncccccggctgganggaatttcnnattaaact

SEQ ID NO: 2211 - DNA, 873 bp, Homo sapiens
  misc_feature 551, 699, 700, 706, 719, 722, 745, 762, 765, 792, 794, 796,798, 801, 802, 806, 819, 830, 864, 867, 871, 872: n = A,T,C or G
gacgcgcgtaatacgactcactatagggcgaattggagctccaccgcggtggcggcccgaggtacatgtgacccaaggaccagcccaaacgcagatgcagacagattccagactcttcagcaatccttcccttatctggggcaaaggctgtgatgcctacacagtctctgtcatttcatccctgatgctccagtttttaggagaaaccacctcgtcatgttcaaacttccagaaatggtggtcctgtggaaagaatcctaggccagcagctaggagacctgctgtgagtcccagccctgcccatcacagctatgtcaggtggttcagacatgttgggcttcaggtccccatctataatcaaaaagtttgtttctagcttcaacaatctatgactattatttccgtttactgatagagtaactaattacttcattataggttttcaagaccagttacctcctgtttggttcaattagcaaaatgccaacatgattgtcattgattttggtggttgggcttccaggagagaaacccaatgggaaatagttcangatcttaagcagattttggattttattattccaagggagtatatgccaggaaccagggtttgtcatgcatttctcaaaagttctttgcctaggaaaaagctcactcccatcggtctcttccattctaggggatgccttaagactcttnnatttanaagtctagagccngangagaaggaataatcatgggtaanactggctttaatggaanacntttttttttccccctgaatagagaatntngngnttnngacngaaggggaatttnaaaaatgattnacccatccttttggataaaaggcacattttttgngantttnnt

SEQ ID NO: 2212 - DNA, 893 bp, Homo sapiens
  misc_feature 90, 92, 93, 94, 95, 101, 169, 228, 294, 358, 374, 389, 413,424, 466, 472, 484, 504, 512, 533, 538, 558, 573, 587, 598,609, 648, 653, 658, 659, 664, 668, 683, 690, 696, 699, 700,712, 742, 769, 772, 773, 776, 777, 781, 782, 785, 797: n = A,T,C or G
  misc_feature 800, 803, 805, 806, 809, 811, 812, 814, 817, 819, 827, 831,832, 842, 845, 852, 855, 864, 865, 868, 875, 885, 892: n = A,T,C or G
aagggcgtaatcgactcactatagggcgaattggagctccccgcggtggcggcccgcccgggcaggtacttttttttttttttttttatntnnnnttaacngggggaaatgacacaaactgacaagtatttatttagcctcattcccatcactcaccactgccacccanaaaagtgtcacctgagttttattgcatgcagccccaacactaaagaaagatcagaaatntttgttcccgtggtggaaaataaagggctatttgcccacgtcgccaggcttcctctggaaagcatntgggaatcattccagaaattcaatttccaggtgtgtgtttctttaaggaaatattgtggagtanagaaggaacgcactgngcaggtgccattggntgggggccgttgctatggcagatnagccttattantgaatagcaaaggaaggagtcaccaggaaaacacaacatgancaggcngagtgcccaccnccgtggccttggggaagccncaattatnttggcttgacatggttccaanagtgngggcattagggaaaccaacnttttgagcttgcaanattcaacaagcatnggccatgccanccagggaaaantgtgctttactccaggaataagggagcaaggccccatantttcntcttnntttcngggncttccttttgaactngaattgntttaanggnnaacctcttgaanaaaattggggtccttgcctttttggggganccttaaaaaaaaaattttgcttgtctnggnnttnnatcnnttnaaaagtggatcntgnccncnntananntngangnaacccccnggtnncaggaattcnatnttaaacnttnataatcccnncanccttaanggggggcccngaccacnt

SEQ ID NO: 2213 - DNA, 932 bp, Homo sapiens
  misc_feature 5, 340, 352, 355, 357, 444, 450, 451, 473, 489, 490, 535,538, 543, 553, 560, 567, 587, 588, 590, 598, 601, 602, 603,610, 616, 631, 640, 648, 653, 654, 660, 666, 669, 673, 677,689, 692, 694, 702, 705, 710, 718, 719, 720, 730, 733: n = A,T,C or G
  misc_feature 734, 737, 756, 771, 772, 775, 784, 785, 792, 802, 804, 808,823, 839, 843, 848, 849, 851, 864, 869, 873, 876, 897, 909,910, 917, 926, 931: n = A,T,C or G
gccgnacgcgcgtatacgactactatagggcgaattggagctccccgcggtggcggcccgaggtacgcgggtattatggagatgctctgttccatccagggaggtgcaggtgaaaagagggcagttcatcctcctcacacttagggcagggagcagcatgcaggggcagatcagcagctttgcatgttgacaaatccactctctgctgcagatgcctaggggaagttgcagacttaaattttcttttgtaaaatgggggaacacaaacagatcttatgtcacactggttactccagaaaaaaaaagaaaaagaaggaaggaagaaaagaaaaagaataantattatatatanaananaaaagtacctgcccgggcggcccgctctaaaactagtggatcccccgggcttgcaagaattcgatatcaagcttatcgataccgtcnaccttnnaggggggggccccggtacccancttttgttccctttanngaggggttaaatggcccctttggcgtaatcattggcatagcttgnttncttgngtgaaaattntattccnttcaacnaatttccccacaacataacnnancccggganccnnnaaagttntaaaangccttgggggtgccnttaatggangtggagcntaaanntaacanttaaanttngggnttgnggctcacttggnccncntttttcangtnggggnaaaacttnnnggggccccanttnnatntaattgaattcggccaacnccccgggggaaaagnnggnttggggcanntgggggnccttttttcngntttnttggttacttgaatnccttgggcctcgggcnttcnggtgnngncgaggcgggtttnacttntttnaangggggattaccggttattccnaaaattaggggnntaccccnggaaaaaanttttnt

SEQ ID NO: 2214 - DNA, 1034 bp, Homo sapiens
  misc_feature 4, 7, 9, 11, 21, 25, 28, 37, 40, 42, 43, 48, 49, 51, 52,61, 63, 64, 69, 70, 79, 80, 81, 82, 86, 87, 89, 92, 104,196, 241, 244, 247, 324, 328, 360, 393, 418, 467, 474, 500,505, 523, 533, 537, 559, 584, 586, 599, 603, 610, 627, 628: n = A,T,C or G
  misc_feature 630, 645, 666, 668, 681, 702, 704, 707, 708, 709, 718, 720,721, 726, 727, 733, 740, 743, 744, 748, 751, 757, 771, 774,785, 795, 796, 801, 806, 808, 816, 820, 833, 836, 838, 845,853, 868, 873, 890, 905, 906, 907, 916, 917, 924, 926: n = A,T,C or G
  misc_feature 937, 956, 961, 986, 992, 1000, 1001, 1006, 1009, 1014, 1015,1020, 1028, 1034: n = A,T,C or G
ctcnctncngnaatcttatanaacnttnattcctcantcntnnatctnncnntcccgttantnnttatnnatatttatnnnntaanncntanttggccctatcnatcctataggcgaattggactcaccgcggtggataccctccactcaaggaggtagaactcagtcctctcccttgtgagtcttcactaaaatnagtgacccacttccaaagagtgggagtatggaaagggaaacatantanctntacaggggagaaaaatgacaaatgacgtcttcaccaagtgatcaaaattaactgtcaccagtgataaagtcattcanattngttctagataatctttctaaaaattcataatnccaatctaattatgagctaaaacatccaggcanactcaagttgaaggacattctacanaatatcccctggggtattttaagagtattccctcaaaactgtaaaaatnatggaanaataaggggaatccttgatgaaacantcacnggaccacatgagactaanggagacatgntgancccaaggtgcaaattgtgcttntttgggatcagaatccttggaaacnanaaaaaaaggtcangtcnattgaanaaaacttgaatgaaagnncngaattcgaaaatttnggagttattttttaaccagtnanttggttgatttcnttaattctttgaacaaaatantngcnnngggtaaatngnnagganngataancgcttangannaaanttnatactngggcgaggggcttnttnaggaaattctnttgtaccctnngccgntcttnanaacttgtngganccccccgggctgntangnaattccnttttcaangcttaatggatcccnccaanctttagggggggggccntggatcccaaacttnnnttcctttannggagggntnataagcccccntaggcgtaaaaaatggcanaaccnggatccctgggttgaaatgttttcngttccnaattcctnnccaanttncgagnnggggncattaatntgtaan

SEQ ID NO: 2215 - DNA, 874 bp, Homo sapiens
  misc_feature 708, 733, 774, 779, 791, 818, 822, 830, 832: n = A,T,C or G
agcgcgtatacgctcactatagggcgaattggagctccccgcggtggcggccgaggtacactaaaaatggcaccttctgtcttctgacatcactggacagtatagggggggaaaaaatcaaccttaagaaaaagaaatttgatatgaaaaaaagaattcaaaacatcccaatttgcaattcaactggtaatataagctgtgtcatctgatactcttcagtgtccaattaaaatcacactctatctggcaatctatagtcacaactacctaaaaatgtcttaaggaagtaggaataaagaaggcatgtagctttaactgaagcactactttgttaaagaataaaagcatttttttttaaatgtcacctgacaccaaatatctggttggaagaggtgctgttttaaattttcaggggaaccctcaagatttatgcaagaattgaaaaaaataaaagtaaattttctcttccttgtataggcttagcattattgaatatactatgcctactctcaataaaaatgaaacaactcaaaatatttaaaagatcttgtttcctaagcacttcaattctcaggttatactaaactttatgatttcatattccctcaataaatcctaaattctctcaataaaatccccgcgtaccccacaagctgcattcaaacctcaaatctgtgggaatgagtgactcgacaaaatggtaattcnggatcaaacctcatcccctgactgngtgaaaaaagtcctgcccgggcgggcgcttctaaaataggnggatncccccgggctgnaaggaattcgatatcaagcttatcganccgncgacctcnanggggggcccggacccacttttgttccctttagagagggtaat

SEQ ID NO: 2216 - DNA, 863 bp, Homo sapiens
  misc_feature 233, 389, 493, 528, 534, 535, 536, 537, 538, 540, 541, 542,543, 544, 545, 546, 548, 549, 551, 552, 556, 558, 562, 563,564, 565, 566, 567, 568, 569, 570, 571, 572, 573, 575, 576,577, 579, 580, 581, 582, 584, 587, 588, 589, 591, 593: n = A,T,C or G
  misc_feature 596, 598, 599, 600, 601, 602, 603, 604, 607, 608, 609, 610,611, 612, 613, 615, 617, 618, 619, 620, 622, 625, 626, 627,633, 634, 636, 637, 638, 641, 642, 644, 647, 648, 649, 651,652, 653, 654, 655, 656, 657, 658, 659, 662, 663, 664: n = A,T,C or G
  misc_feature 667, 668, 669, 670, 672, 673, 675, 676, 678, 679, 681, 682,683, 684, 685, 686, 687, 688, 689, 690, 691, 694, 696, 697,698, 701, 703, 704, 705, 706, 708, 710, 711, 715, 716, 717,719, 721, 722, 723, 724, 726, 731, 733, 734, 736, 737: n = A,T,C or G
  misc_feature 738, 742, 745, 747, 748, 749, 750, 751, 752, 753, 754, 757,759, 760, 761, 762, 763, 764, 765, 767, 770, 771, 772, 773,774, 775, 778, 779, 781, 782, 784, 785, 787, 790, 791, 792,794, 795, 797, 798, 799, 800, 801, 802, 803, 804, 805: n = A,T,C or G
  misc_feature 807, 810, 811, 814, 815, 823, 825, 827, 829, 830, 831, 832,833, 834, 835, 837, 838, 839, 841, 842, 843, 845, 846, 848,849, 850, 852, 853, 854, 856, 857, 858, 859, 861, 862: n = A,T,C or G
gccgctaatacgactcctatagggcgaattggagctccccgcggtggcggccgaggtacgcgggatatacattctcacagtaaacagttttcagatattgaacaacaaaaagtaggcagtgctagccagagattccttggagccaaaaaacaaaacaaaacaaacaataaaaattggtaatcttatattgcttcagtttgctgcttggagaaagttctcaggctgcagctcanagaggaaaaatccagagctcagtggtctgaatgagttaaagaggatttggggcagcaaatgcaattagaattcacagggcagaggtgagaggaagtgtagagatggagagggttgtgctgagggaagagagagagggcgaagagagtagaactacnagagaagaacaagttgcaaagtaaaagagaaataaagatctggagtgctgcagacagtttcaggcttaagtattgatcagtgcacacattgtgaggaaactgcnggcaaaaaaaaaaaaaaaaaaaaaaaagtccctgnccggtnnnnntnnnnnnntnntnntttntntttnnnnnnnnnnnntnnntnnnntnctnnncntnttntnnnnnnnttnnnnnnntntnnnntnttnnntttttnnannngtnntnttnnntnnnnnnnnnttnnnctnnnngnngnngnntnnnnnnnnnnngtngnnnaantnnnnananntttnnncntnnnngnaaatncnntnnntttntantnnnnnnnnttntnnnnnnntngtnnnnnnttnntnntnntnatnnntnntnnnnnnnnntntgnnttnntttttttntncntnnnnnnncnnntnnncnnannncnnntnnnntnnc

SEQ ID NO: 2217 - DNA, 390 bp, Homo sapiens
  misc_feature 4: n = A,T,C or G
agcnccgcgtaatacgactcactatagggcgaattggagctccaccgcggtggcggccgcccgggcaggtacgcgggagactagagggaattgcacctcctcactgcacaagattagctaatgcgggtgaagctattggagtgcttctgaagaaatcaaaattttgttattatgattatactgttagatatttctttcttgagattctaaatgaatttgtttaatgccttattggtccattcctgcatctctgcttccagaagccaagaacaagttctctggatcacataggctcctctgctgcttcctcagaaacagagatggtacctcggccgctctagaactagtggatcccccgggctgcaggaattcgatatcaagcttatcgat

SEQ ID NO: 2218 - DNA, 398 bp, Homo sapiens
  misc_feature 5, 245, 298: n = A,T,C or G
gagcnccgcgtaatacgactcactatagggcgaattggagctccaccgcggtggcggccgcccgggcaggtactcacagctgcatcacactgaatatcatctccctgcactgccatttcatttgagcagggctttgcctgtcaagaacattcatatctttttgataaacagtgcattttttccctgatagtctgtatgggacagcctccttgtttgcatctgaaggacagggacttcaggacctnctgctgtggtcaccaaggaatcacattcaaacttctcagcaaggtgttatggnccttctcagtttgcctacgatccattgaggcaaaggtttccttctctcaatacaccctctgctttagccagggggacctcccactgtcctctctatgtga

SEQ ID NO: 2219 - DNA, 421 bp, Homo sapiens
  misc_feature 421: n = A,T,C or G
gagccccgccgtaataccgactcactatagggcgaattggagctccaccgcggtggcggccgcccgggcaggtacgcgggatgaaaaccaatgattttggaaagccaaattgttgagaagataaggtggggattccgactactagtatttttacaaatctgattgtcgttgcaggttttgttttattttgttgtgttaatgctgagagtggagaatagattggaatatttgcctcttgtgtttctttttgctttgtaacattgcaagtggtccacattttcctttatttaaaatttaaagttggtgcctggggtttctggtgttaaatagaagtgatacttctgcataaagtattatggagatgctctgttccatccagggaggtgcaggtgaaaagagggcagttcatcctcctcacacn

SEQ ID NO: 2220 - DNA, 421 bp, Homo sapiens
  misc_feature 70, 297, 334, 341, 373, 391: n = A,T,C or G
gagcgcgcgtaataccgactcactatagggcgaattggagctccaccgcggtggcggccgaggtactttntttttttttttttttttttttggacagtgagagtggtcttatttcttcccctagtttaggtcacagcagttgagtcagggtatcatgctatcgcagggcacaaatttctatcatcatccatagatcactggattagttgaaaaagtcactcaaatgctgaccaggagcacatgaacttctgtttatttcggactttctgataaatggtggccaggtacctgcccggncggccgctctagaactagtggatcccccgggctgcangaattcnatatcaagcttatcgataccgtcgacctcganggggggcccggtacccanctttttgttcccctttagtgaagggttaat

SEQ ID NO: 2221 - DNA, 415 bp, Homo sapiens
  misc_feature 5, 293, 295, 415: n = A,T,C or G
gagcncgccgtaatacgactcactatagggcgaattggagctccaccgcggtggcggccgcccgggcaggtacaagctccactggaataaaaaagactgtgtggaagtgaaggggctcctgcccacaagtgtgtcaccccgtgtgtccctgcactgcggtaagagtggtggaggagacgggtgcttcctcagatgtcactctggcattcacctctcttcaggactgcaaggggcctactctgtcacctgtggctcttcctttcctctcaggaacaaaaaaaaaaaaaaaaaananaagtacctcggccgctctagaactagtggatcccccgggctgcaggaattcgatatcaagcttatcgataccgtcgacctcgagggggggcccggtacccagcttttgttccctttagtn

SEQ ID NO: 2222 - DNA, 423 bp, Homo sapiens
gagccccgccgtaataccgacctcactatagggcgaattggagctccaccgcggtggcggccgaggtacgcggggaagtttgatttttagaactcatgtttatatgggtacatcccattttttttgatatacatttaaaataatttcttatgttgatttacgtaacagtattctaatgtttgagcatatatcttagactataaattttaattgttatagtttgttccatttttgttgaacgggaaaaactgatacatatctttaaaattgtatatttaaattaccttacatatgaggaatttttatacttgaaagttattgttattaacttgttttcataatgtgagatattctgtcataaagcacttatgttttaagttgtaatttaaaataccctttctttttaacatgcacacaggaaac

SEQ ID NO: 2223 - DNA, 408 bp, Homo sapiens
gagcgcgcgtaatacgactcactatagggcgaattggagctccaccgcggtggcggccgcccgggcaggtactcaccttgtattagctgagtgactttggttaaggacagttacttaattatcctgggtctcagtttctctctttgaaaaacagattcattcactaaaataatatttatgaagtattcattttgtgataagcactagtctagctaccggggatatacatttacaaaacagattttaaaatatcctgtcctggtggacctcacattacgttcattactaaccgggataatttcagtgcctctctcataggattgttgcaagaattaaattgatgaatacatacgtaacacttataacagtgtcacaaaatgagagctcagtaaaagccatcatcaccat

SEQ ID NO: 2224 - DNA, 421 bp, Homo sapiens
  misc_feature 5, 400: n = A,T,C or G
gagcnccccgtaataccgactcactatagggcgaattggagctccaccgcggtggcggccgaggtactgggggctcctaaaccatatatatcttgcaccattctggggatatttgccaggcctgggggatcaaaatataccccaaatattaaaccagttgaagggtgatttgagcctactttttgaacactttgtatcccctgtgtgccaggaaattcagggtctttttcgtaacttgatcagatgtctcccaggttgggctacacacaaaaaagttatctacatactggagtgtacctgcccgggcggccgctctagaactagtggatcccccgggctgcaggaattcgatatcaagcttatcgataccgtcgacctcgagggggggcccggtacccancttttgttccctttagtgagg

SEQ ID NO: 2225 - DNA, 421 bp, Homo sapiens
  misc_feature 421: n = A,T,C or G
gagcgcgccgtaataccgactcactatagggcgaattggagctccaccgcggtggcggccgcccgggcaggtacatacagcttcatatctgctaatggagaaaataacttaaacttggccctgccaggcaacccattttcttccagtttaaaacttagtctttttcaggttagctaggccaattccaggtgctcgtcctaccttctttctcccatttctacaccacccttcttttttgtctctccctgggagatatctgagcttaaggaaaaattcgttaagagtggggatcggagagacctctgttccactagttgccttctggacattttctggtctccactgttgatgtatccatcccttctggcctttgggtgcactgaggcatcttgctattgtctatggttatgccatagctccn

SEQ ID NO: 2226 - DNA, 412 bp, Homo sapiens
gagcgcgcgtaatacgactcactatagggcgaattggagctccaccgcggtggcggccgcccgggcaggtacaggttagccaacaggccaacaaacaactatgtcaattactccctagggtagtccactgcaactgcgagagtccacacacataattattagtgacacaagcatttgctttggccaacttgatgcaacttcccacctgaaatagtaaactatatgggcaaataagcccccttttttgcatttttatcaaacaggattcagttagggtatttaatctaatcaaacaattcacaaatagttaatacatttttaaaatgtaggtaaagtaaatatttttatttagattcaaataaaagcatggatatttgaattttatttcaaccaataattgcaggtatagggc

SEQ ID NO: 2227 - DNA, 915 bp, Homo sapiens
  misc_feature 2, 6, 8, 9, 257, 328, 346, 353, 371, 374, 375, 384, 390,391, 392, 398, 399, 417, 418, 420, 433, 437, 440, 441, 443,449, 450, 452, 459, 462, 477, 478, 481, 483, 487, 490, 491,494, 495, 512, 516, 520, 521, 525, 526, 529, 532, 535: n = A,T,C or G
  misc_feature 536, 539, 543, 546, 551, 552, 555, 556, 559, 562, 563, 568,570, 576, 579, 582, 603, 604, 611, 615, 616, 618, 620, 621,622, 629, 630, 635, 636, 638, 645, 652, 661, 668, 674, 677,695, 700, 706, 707, 712, 722, 729, 732, 736, 738, 743: n = A,T,C or G
  misc_feature 748, 754, 762, 767, 768, 771, 788, 789, 800, 810, 813, 815,817, 821, 822, 828, 829, 832, 833, 835, 847, 851, 859, 860,861, 870, 883, 886, 889, 891, 895, 899, 902, 907, 912: n = A,T,C or G
gnatangnntcgcgcgtatacgactcactatagggcgaattggagctcccccgcggtggcggcccgaggtactaaagaatgtgcatttatttgtggggaggagaggaggtctaaatagacaataaacatataaatattaatattgtgaaagtggtatgaagaaaaataaagcatgataaggagagagaggtgttccctggctctccagggggctgaggtggaagaaaaggactccggttttaggtaagatatcaganaagacctctctgattgactgaaatgtatgcaaaggcctgcatgaagccagggaccatgccgtgctgacatntgggggaggattatcctnacagatnggaaaggaagtgcaaatnccnngaggtggtnggaccnnntttggnnttgtccagcgaggaaccnntnctgccatgttgtncttngtnnangttcanncnatggganggncaaaagcattaaatnnaancntaantcnntgnntctatcaccgccacaantctnaatnntccnnttnttnccnnttntgcnacnatctnnatnntgnaannggttntnttcttnaanttnaatctaccaatttctaatttnnatacacnttgnncntnnntattttnncaatnncnttcccgntatcttncgtctcttnacatttnccttanttntttttaccaatatttatntctcnataatnntgtancattttaaancttttcntcntatnanatatnctccnattatncatatcgnctttnnttncttttactaccaaatcnnatctttcttanttctctaatnttncntncttnnttaatnnaannantcctttatctgncttntctgcgannnctctatatnatgatgaactccnatnatncnctcnttcntanaatanacccnccg

SEQ ID NO: 2228 - DNA, 875 bp, Homo sapiens
  misc_feature 2, 618, 644, 655, 671, 679, 706, 728, 731, 732, 745, 760,761, 775, 779, 788, 795, 798, 810, 814, 824, 827, 830, 834,844, 845: n = A,T,C or G
gnatcgctcctatagggcgaattggagctccccgcggtggcggcccgaggtaccaagaagaaagccatgggcactgtcagtaaagagatctagaatgggaacaagacagggagaaagccaggtgcaagacacaggaaaagttctagaaagaaagctttttgcatctaacatcagtctccccagattcaacccatctcaatattgaagaaattgtcatcctattcccaaataaagtgaaatgaggttttttatgtaaagtgcttagaatggagtgtggcacacagtaaggatcacctttaagtattacctatagatatactgataaatacatggatatgtcaagggagaggttggccttttaacttgaaggagtcagaaaaaaactgccatgcgcattttgctttgactttgaaaatctggatgcatggaagctctatagaagcacagcaggaatttcaagaggtatgctgcccaatgtgtggctggcagagtgctcacccaaaggctccattggcattgagtggggagaacatactagaagtgggtttttttttgtcatggagttgaattttttttttaagcaggttcatcttctttctagggaaaaaaataaaccangggatagggggaaaaatggtttgganggattgaatcntttaaaaaataaccancttattangcccaaaattagaagaaaatgttcccntttttcaaaaataaccgtcttntgnnttaccttaacaanacttgcccacccggnnggggggaggaagtnttantgttgggangggagcnctntgttccaccttnttgngagccaaaanttnaantttnaaaaacttgnnaaaagtggggactttaccaattttcttttt

SEQ ID NO: 2229 - DNA, 880 bp, Homo sapiens
  misc_feature 343, 467, 499, 509, 518, 519, 552, 563, 578, 607, 610, 615,632, 640, 642, 645, 669, 672, 673, 684, 689, 698, 700, 703,710, 713, 718, 722, 738, 748, 758, 759, 771, 773, 774, 783,786, 798, 807, 809, 821, 822, 826, 827, 834, 835, 836: n = A,T,C or G
  misc_feature 839, 841, 847, 852, 859, 867, 878, 879: n = A,T,C or G
agtatcgctactatagggcgaattggagctccccgcggtggcggccgcccgggcaggtaccaggttcaaatagtcagcagctcatcataatcaatgagcgaggacataaagtaggaaaaatgcatcaccatggtgagcaaggaaagcaagttattggaggcacatgttaacacataaaatataaaattaatatgatcacactggaaaggcttgcctgagcccacagtttgaatgcctacaataagatgagatgcacaacaaaaagcaagagaacctgatcaagtgggtgacctggccatggtgctctcatcagtggggacccaaatgcttatgtggactcacnaggtatcgaattagacatgaataggagtgtttgttgtgatggcaagaaactatataatcaaatgaatacaatgaaactttaaaaataattgtaagatctttacaccagccaatgtcatgttgcngtacctcggccgttctagaactagtggatccnccgggcttgnagggaattnnatatcaagcttaattgatacccggttgaccttngaggggggggnccggatccccagctntttgttccccttttagtggagggttaatnggnccgcntttggcgttaattcatnggtcatancntgnttccttgtggagaaattggtatcncgnntcaccaatttnctcanaaacataangnagnccggggngcnttaanaggngtaaaagccttggggnggccttaatngaggtgagcnnaacttcacattnanntgcctttgngcntcacatgcccgntttcccagncnggggaaaccttnncggnncagcttnnnttnanagaaantgganaaacccncggggagngggcggtttgnnt

SEQ ID NO: 2230 - DNA, 838 bp, Homo sapiens
  misc_feature 705, 708, 721, 735, 746, 748, 783, 793, 794, 807, 812, 817,831, 838: n = A,T,C or G
gtatcgctactatagggcgaattggagctccccgcggtggcggccgaggtactaacagtcaggaacaaatagaacacatagagaggacagtgggaggtccccctggctaaagcagagggtgtattgagagaaggaaacctttgcctcaatggatcgtaggcaaactgagaaggaccataacaccttgctgagaagtttgaatgtgattccttggtgaccacagcaggaggtcctgaagtccctgtccttcagatgcaaacaaggaggctgtcccatacagactatcagggaaaaaatgcactgtttatcaaaagatatgaatgttcttgacaggcaaagccctgctcaaatgaaatggcagtgcagggagatgatattcagtgtgatgcagctgtgagtacctgcccgggcggccgctctagaactagtggatcccccgggctgcaggaattcgatatcaagcttatcgataccgtcgacctcgagggggggcccggtacccagcttttgttccctttagtgagggttaattgcgccgcttggcgtaatcatggtcatagcttgtttcctgtgtgaaattggtatccgctcacaatttcacacaacatacgagccgggagccttaaagtgtaaagcctggggtgcctaatgagtgagctaactcacaattaattgcgttgcgctcactgcccccttttccagtcnggnaaactgtctgccnacttcattaattgnaatcgccaacncnccgggaagaggcggtttggcgtattgggcctcttncctttcctcnnttaattgactcgntgccntcggncgatcgggttgcgncaaggcn

SEQ ID NO: 2231 - DNA, 873 bp, Homo sapiens
  misc_feature 2, 199, 369, 408, 409, 411, 434, 438, 467, 517, 524, 529,535, 546, 564, 567, 569, 577, 584, 587, 594, 595, 602, 603,605, 607, 622, 625, 630, 633, 634, 636, 641, 642, 643, 655,656, 657, 658, 659, 671, 677, 685, 693, 694, 709, 710: n = A,T,C or G
  misc_feature 715, 719, 720, 721, 722, 726, 732, 733, 735, 739, 741, 744,747, 764, 766, 768, 771, 772, 774, 775, 785, 786, 787, 789,790, 797, 803, 808, 814, 817, 827, 831, 835, 843, 845, 853,855, 859, 860, 864, 866, 871, 872, 873: n = A,T,C or G
angtatcgactactatagggcgaattggagctccccgcggtggcggcccgcccgggcaggtacccacagaatgtggccccaaatgattcaattacagctagaagttgttctcttcccaaagcacgagtcttttgcattcacaggatattttttctttcataaacattcctgcgagaatgtaagtgcggatgaagattgngttctgtcttcttcttgtcttttttctgtttactctgattttataaaatgcagtgtcatgtcttaggacaaattatcctcagtttgccagcaaggtgagtttataaattattttattcaaatgagaaaatttccgctagaaccaatagtaaaggatggtgagtttccagntgacccacaatgacgtatttaactcacagtgaaactcanntntgcggttttaatagtatcccttntatntctaagagcaagggagcctattgtttctnataattggacatggcatgggacctgcccctaacatttggacagttttttncttcctnccagngttaangacattcttcnttacctccacttccaganacngnttaatggngttgganttngggatgnnggggtanngncntctccccaatagccntcncgatnccnnanattcnnnttcttattggcnnnnnacctaaatttcntattcnggatctcnccaactcnncaatcttggctaacnnagatncggnnnnagtnttatcnngntacntnttnatnggggaattcgctaattncngngcnncnncataaacttnnntnnctccttnatcggnaattncctaanccnctgaatcttnctantccntgaatccncngataatcncncccnnttcntntctcnnn

SEQ ID NO: 2232 - DNA, 891 bp, Homo sapiens
  misc_feature 281, 284, 287, 304, 305, 309, 310, 319, 328, 329, 331, 335,356, 376, 377, 393, 396, 405, 409, 412, 414, 418, 421, 423,428, 429, 432, 437, 438, 444, 450, 454, 485, 495, 496, 498,501, 512, 514, 516, 519, 534, 540, 543, 546, 548, 549: n = A,T,C or G
  misc_feature 551, 552, 558, 570, 571, 573, 577, 579, 585, 587, 592, 602,603, 605, 609, 611, 612, 613, 614, 615, 622, 626, 631, 640,642, 645, 649, 654, 655, 663, 664, 669, 671, 675, 682, 689,698, 711, 714, 721, 724, 730, 732, 746, 747, 751, 765: n = A,T,C or G
  misc_feature 784, 786, 790, 791, 792, 794, 796, 797, 800, 809, 814, 822,824, 825, 829, 836, 844, 846, 847, 854, 857, 859, 861, 869,873, 875, 876, 880, 882, 883, 884, 885, 889, 891: n = A,T,C or G
gacgcgcgtatacgactactatagggcgaattggagctcccccgcggtggcggcccgaggtacttgatcggaacccggctgcctctaagacttggtcttgggcaacccgtgggtgggcaggaagggaaattatttattttattttgttaaggggagtgaagaaaagaagacgtgaggaccgcagttcactgtaatgtagagtaattgcaaaagtgggctgcctgcccctagcttttcccgctgtggttgcggaggtggtcttggttgagggggttgcggcnctnacntcctgcccgtgcaatcnntctnnaacctattngaccccccnngntggncgaataccatatcatcttatngacaccgtccacctaaaggnngggcccggcacccagnttnagctcccanttangtncngtantantncgccnnttngccgnnctcacngtcctngctnttacctcgttgaaactggtatacccttcctntttccccacnntnatnccgactctgtnancntanactccttttgccagntggtgnttnaangnnannaaggtnccctaccttttnntncttntncaactnantgtcntatttttaanntngaantnnnnntcgcccntttntgttncattaattncnccncgcncggtnnattacccnncaaantnaatnttacacnttttatncttccttanctaacctgactcnttnggctttnttnccttcntntttattcatgctgnntcangttttctcatttgngggaaaaagtgggtggctncntatnnntngnnatnaaattttancgaantttaacgncnnaaantaattanggtagttnannttttggnctnananttattaanggtntnntttntnnnngtantn

SEQ ID NO: 2233 - DNA, 880 bp, Homo sapiens
  misc_feature 583, 626, 656, 662, 665, 696, 756, 811, 817, 821, 835, 842,852, 863, 866, 867, 872, 873, 874: n = A,T,C or G
aggggccgcgtatcgactcactataggggcgaattggagctccccgcggtggccggccgcccgggcaggtaccgattgttgaatgttgcagccctatacctgcaattattggttgaaataaaattcaaatatccatgcttttatttgaatctaaataaaaatatttactttacctacattttaaaaatgtattaactatttgtgaattgtttgattagattaaataccctaactgaatcctgtttgataaaaatgcaaaaaagggggcttatttgtccatatagtttactatttcaggtgggaagttacatcaagttggccaaagcaaatgcttgtgtcactaataattatgtgtgtggactcttgcagttgcagtggactaccctagggagtaattgacatagttgtttgttggcctgttggctaacctgtacctcggccgctctagaactagtggatcccccgggctgcaggaattcgatatcaaagcttatcgataccgtcgacctcgagggggggcccggtacccagcttttgttccctttaagtgagggttaattgcgcgccttggcgtaatcatggncataagctgttcctgtgtgaaaattgttatccgcttacaattncacacacaatacgaaccgggagcataaagnttaagnctnggggtgcctaatgagtgagctactcccattnattgcgtttcgctactgccgcttttccaagtcgggaaacctgtcgtgccaacctggattnatgaatcggcccaccccccggggagaagccggttgggtattgggcccttttccgnttcttngttnaatgacttgtttgnctcgggncttcggttgnggggaagcggntcnncttannnaaaggg

SEQ ID NO: 2234 - DNA, 905 bp, Homo sapiens
  misc_feature 366, 370, 373, 385, 389, 412, 417, 420, 435, 437, 443, 445,452, 454, 458, 462, 470, 475, 477, 479, 482, 484, 488, 494,497, 528, 531, 534, 539, 540, 543, 547, 553, 564, 584, 587,590, 597, 598, 599, 607, 608, 609, 614, 616, 617, 622: n = A,T,C or G
  misc_feature 626, 627, 629, 631, 638, 639, 643, 656, 662, 664, 675, 683,690, 693, 695, 696, 706, 715, 718, 723, 730, 742, 749, 759,766, 768, 772, 773, 774, 775, 779, 780, 793, 796, 798, 799,800, 801, 802, 805, 809, 813, 822, 823, 826, 827, 834: n = A,T,C or G
  misc_feature 841, 847, 848, 853, 862, 869, 870, 878, 880, 884, 885, 886,895, 899, 901, 902, 905: n = A,T,C or G
gtaatacgactcactatagggcgaattggagctccccgcggtggcccggcccgcccgggcaggtaccagagactcctatttatttataccagtaagggccctcccactgcctttgtctccagtaggtcagctgcatcatcagctttaaaagcccccaaatattgctgagcttgtttttttaaaacttctcttgcaaactttataaatttgtttcagagcactataataaaatatttcttgcaaacatggactataagtgccagagacactggagaaatctgagggtggggagaaaggataatctatcagcttggaagctccaaagcactgtctttagtagcgctattggtgatggtggttttgagngctnctntaaatgcagggntgangccagggatcacagtggcattanaaatntantccatgacattgggngncttacncnctgttgncnttangcangatctacnactanantnatncncttnggctgnacntattctcggttttcaagcttttatggatacngtnagnccctnnagngggngggtcngggaccccatnctgtttggttccttcaagcnganttntaaattnnnacaaattnnncggcntnnaattngcanntnanttgtttnngtcnggttaacgaatanatgatnangcctctcgtcntaccctanattcaanatngnncctggattantttaaattnttnttatncctgggntatctatattgngggaggnggctttcaanttaatantntttnnnnatgnntgttctaaatttnatngnnnnnatntatntatngtctaagtnngcnnctttttnatttatntatagnngcatntggactgcntatatannatattggnantgtnnnctctaaatnaatntnntcn

SEQ ID NO: 2235 - DNA, 881 bp, Homo sapiens
  misc_feature 67, 75, 84, 86, 249, 286, 305, 329, 372, 375, 385, 388, 403,406, 416, 423, 454, 472, 489, 520, 548, 553, 555, 590, 598,602, 607, 613, 615, 616, 617, 626, 628, 631, 632, 636, 640,649, 651, 655, 660, 671, 677, 678, 684, 685, 686: n = A,T,C or G
  misc_feature 690, 691, 696, 702, 703, 707, 708, 709, 711, 716, 719, 727,732, 733, 734, 735, 736, 740, 741, 742, 743, 746, 748, 754,762, 764, 768, 769, 779, 781, 783, 785, 788, 795, 796, 798,800, 801, 802, 803, 804, 808, 814, 816, 825, 826, 828: n = A,T,C or G
  misc_feature 829, 835, 839, 849, 850, 851, 856, 863, 872, 876, 880: n = A,T,C or G
cgtaatcgactactatagggcgaattggagctccccgcggtggcggacttttttttttttttttttntttttttnttccttggntncttgccttactttcagaaatacaaacagaactttctaaaatcagcaaagaagcaatttttcaccttccaactgccaacatactaatacacaatacttggcagagctgtccaaagcaagtcagaccacatacagtatacctaaatcctgacacctccaactctnttaacaaataattttttttctccgtggtaatggtctnttggaagttaaaatatagngagaaatgtgtaaacataccaatntattaaaataagacaagtgaatccctttaagaatcatgaaaantanttaacaccancancaaaagaaaaaaacngcnggagggcccngtgaggnggtcccacctgtaatctcagcattacagggngtaaggaatccaatgatncaattgaagctaaagtnggagggatcacttggaggccagtagttcaanaccaggcccgggcaatgtaacaaagacnttatntnataaattaagcagtcaattaatatgcttgcaagtnggggtgtnatgnccctntgcttngnnntctaaattntnatnnggtntaantggtgacangncatntatanacatgttgatnttgtgnnttgttnnnatanntagtngtgggnntccnnngntttgnccntgaattgncttgnnnnnttgnnnnacntnagtacntacatgtntntttnntttgttattngnantnggntctcaannantnnnnnttantaatcntnaatctatanntnntgtttntatnatttgtgttnnntcctntttatcntaacgacgnttgntaang

SEQ ID NO: 2236 - DNA, 838 bp, Homo sapiens
  misc_feature 16, 17, 597, 600, 637, 649, 671, 710, 712, 721, 724, 749,765, 769, 792, 800, 817, 824: n = A,T,C or G
tggatcgctacgactnngcgaattggagctggagctccccgcggtggcggcccgaggtactcccgggtgaaccctctgcagtctgccatttcttggaatcctcttaaccaatcttagaattatctcccagcatcagattttgcttattaaggaaaccaggcattgtgaaatgctcctttctacactaatctgaaagacataaatagtggcagagaatgttagacatagagcgggaaatttcagagacttttgttggaagaatcatcactctcctgcaggaactgcaaaaaacacttgatctctgtttacacatgcctgcagacacacagagaggccctaatcagcggcttgtggacagccttctatcatagctacccacttttctctgtgaccttccctgttcttccactccatgtctatcctgactctcattcacgcatcacggcttgggacacttgtgctgcctttatcatttgggaaaacatggcgcagcaatggcctcaagtttgtcagacgtctcaaatgctccacagtcgtcgtctctgaagccagacccaaatgtagttggctttggtgattactgggcattggctaatncangaaaaaacactcttttgtagaaatataataagcaatntgggtggtgctngatctgcagtttggcattttgnaaattatttgggttggagcaaaaataatcacatttttgncnctaaaagtnatnggcgaaaggaattaaaaattggccnggcccggggggtcacncctngaatcctaccaattgggagccangggggcanacatgaggctgggagancaaggcnatctggccaaaagg

SEQ ID NO: 2237 - DNA, 909 bp, Homo sapiens
  misc_feature 194, 206, 215, 219, 220, 230, 238, 246, 250, 251, 252, 253,258, 259, 262, 269, 276, 277, 278, 280, 281, 282, 284, 293,294, 296, 302, 306, 313, 315, 316, 325, 341, 347, 348, 362,363, 364, 365, 367, 370, 375, 378, 382, 383, 395, 396: n = A,T,C or G
  misc_feature 397, 402, 404, 405, 406, 408, 409, 412, 424, 425, 428, 429,430, 431, 433, 435, 440, 444, 449, 458, 468, 471, 473, 475,476, 477, 482, 484, 492, 495, 496, 498, 501, 506, 507, 509,513, 516, 525, 527, 528, 530, 531, 532, 540, 552, 553: n = A,T,C or G
  misc_feature 559, 562, 568, 569, 570, 572, 574, 576, 578, 581, 582, 584,590, 592, 596, 601, 602, 604, 608, 612, 614, 615, 616, 619,625, 631, 636, 640, 643, 645, 649, 653, 657, 663, 665, 667,668, 669, 674, 679, 691, 699, 702, 713, 715, 716, 717: n = A,T,C or G
  misc_feature 720, 722, 723, 730, 732, 735, 742, 743, 744, 750, 757, 765,767, 770, 773, 774, 787, 788, 796, 797, 804, 805, 808, 809,813, 817, 820, 824, 825, 835, 843, 845, 859, 860, 861, 866,867, 872, 873, 875, 896, 899, 900, 901, 906: n = A,T,C or G
cgactactatagggcgaattggagctcccccgcggtggcggcccgaggtacgcggaaatgttagacaaatgtagccaaaccaaaaaatacacatgttctatgaatccatatatgcaaggttcacaataggtgatagtagctactcttttgggaaggagtgaggaaaggactgagagagtattgccgagggggcntcgggtggttgngattttttntttnnccaggcccgngtgggttnggttgagncctnnnnccttnnggnaaatttnttgggcnnngnnntnaaatacccnntntttttntgtnagggaangnnttatatttntcactggggaaccctngagggnntgggggggggggannnntnctntttanttnaccnngtgggccctatnnntaaanannngnnggngttctctttttnnatnnnncncntgcgngttnttaancgtcttccnctctgtgatnaantntnnntttgntngctaattnttnnantanggggnntntctnttntatataggngnngnnntgtgttcnaaatataaattnngttccnctnttttgnnnantnantnggnngnggggtntncttnaatcnnantgtntgtngnnnctntttatntaactngtcgntttntgncncatntctnaaantactcncntnnntgctnaattnaataaacgctgngggggttnccnttttaaatcangnnnggngnntttttantnttngccgagnnngttttnattttanaatgaaancnggntgnntattaattattanncgcggcgnngttttannaanngaanactnggngtcnntttattaatntgatgcgntnttcttatataatcnnntcccnnctccnntnattcccactctcttgcttttnttnnnatctnctc

SEQ ID NO: 2238 - DNA, 938 bp, Homo sapiens
  misc_feature 544, 591, 626, 632, 634, 635, 647, 651, 654, 658, 667, 669,672, 673, 675, 677, 678, 681, 684, 686, 697, 701, 702, 703,707, 711, 712, 714, 717, 718, 719, 720, 738, 739, 741, 742,758, 761, 762, 763, 766, 767, 770, 771, 772, 774, 779: n = A,T,C or G
  misc_feature 781, 794, 798, 803, 805, 806, 810, 812, 814, 818, 822, 823,828, 830, 832, 834, 835, 839, 841, 847, 848, 850, 851, 852,854, 860, 866, 867, 869, 870, 877, 878, 887, 888, 890, 896,897, 898, 902, 905, 908, 911, 912, 913, 914, 917, 918: n = A,T,C or G
  misc_feature 920, 923, 924, 925, 926, 931, 932, 935: n = A,T,C or G
ccgctacttagggcgaattggagctcaccgcggtggcggccgtcggtgccggcaaggacaagatcgacaacacggaaccggccctgtactcgcagtacatggattggatcaacctgatgacctacgacttccacggcggctgggaaacgagcaccaacttcaatgcccagctgtttgccgaccctgcgatccgtcgacgggcatggcgcgcgaatacgtgggcgacaaggcggtgcaatacatgattgccgccggcgtgccgcgcgacaagctgctgctgggcatcccgttctatggccgcggctggacgggcgtggcgccaggaccgaacggcgatggcctgtaccaggcggccacgggcacggcgccgggcacctacgagtcgggcatcgaggactataaaatcctcgtcgccaagaccggcacgcgctactaccatcccgtgaccaagcagctgtacctgtacacgggcgcgggtggcaagtggtggagctatgacgacccgaccgtcatcggcaccaaggtgaagtacgtgaaggaccanggcttgcgccggcgcgttcttgtgggagcttgatggcgatgccaacngcgtgcttggcgacggaaggtgtggaaaagtccgnaatgcntnnttagggtagggnccgnccngacngggcattgntnttnngncnnttnatncntttaaaaaggngacnnnatantggnnancgnnnncgacattgggagccaaannanntggagcaggaacttanccnnnagnnggnnnantgggntngcggaaaaacctnatgntgggnannaatncntngggncttnntgccngngntnnaaanangccggnntnnngnaacccntgggcnncnngaaaatnnaattgggtnnanaacccnnntttngcnggnccnnnnccnntnaannnnttggnnaanccg

SEQ ID NO: 2239 - DNA, 446 bp, Homo sapiens
  misc_feature 11, 17: n = A,T,C or G
agggcgccgtntcactnctatagggcgaattggagctcaccgcggtggcggccgtcaccttgatcctgtggcgcgccaccgtgggcgtgatcaacggcagcatgaccctgggcgacctggtgctggtgaacgccttcatgatccagctgtacatccctctcaatttcctgggcgtcatttaccgcgaaatcaagcaaagcctggccgacatggaacgcctgttttccctgctgaacgagaaccgcgaaatcgccgatacgccggacgcaagtccgctcgtcacgcggggcgcggccgctctagaactagtggatcccccgggctgcaggaattcgatatcaagcttatcgataccgtcgacctcgagggggggcccggtacccagcttttgttccctttagtggagggttaattgcgccgcttggcgtaatcatgggtcataagct

SEQ ID NO: 2240 - DNA, 446 bp, Homo sapiens
  misc_feature 11, 58: n = A,T,C or G
taatacgactnctatagggcgaattggagctccaccgcggtggcggccgaggtactanggttttggttgggtaggagagaccaaaaccagggaaaagcttagaaatcctttattggggtttctgcaggaaatgcaaggcaggtcacagttaacagcttattattggctagtttgaataattccagtgggccctggggcacaggtatctagttgtctggtcgctctagaactagtggatcccccgggctgcaggaattcgatatcaagcttatcgataccgtcgacctcgagggggggcccggtacccagcttttgttccctttagtgagggttaattgcgcgcttggcgtaatcatggtcatagctgtttcctgtgtgaaattgttatccgctcacaattccacacaacatacgagccgggagcataaagtgtaaagcctggggtg

SEQ ID NO: 2241 - DNA, 449 bp, Homo sapiens
  misc_feature 2, 3, 4, 5, 6, 8, 9: n = A,T,C or G
gnnnnngnngggacgccgtatacgactactatagggcgaattggagctccaccgcggtggcggccgcccgggcaggtaccctcggttgcaagcacaagcaaatgtgccagggtggttgatgcagctgtggtcacaggtcctatccaaagagcactcatccacatcttggcaagacttctcatctgttaataatttaaatcctttcttgcagccgcagtcaaaactgcccacgatgtttttgcagaaatgatcacaacctcccccgcgtacctcggccgctctagaactagtggatcccccgggctgcaggaattcgatatcaagcttatcgataccgtcgacctcgagggggggcccggtacccagcttttgttccctttagtgagggttaattgcgcgcttggccgtaatcatggtcattagctgtttcctgtgtggaaattgttatc

SEQ ID NO: 2242 - DNA, 910 bp, Homo sapiens
  misc_feature 8, 23, 32, 36, 73, 104, 243, 334, 397, 455, 504, 510, 511,514, 536, 588, 603, 607, 625, 648, 655, 663, 680, 689, 698,742, 759, 762, 773, 774, 782, 791, 797, 799, 813, 818, 831,834, 836, 848, 849, 853, 854, 858, 862, 867, 878, 879: n = A,T,C or G
  misc_feature 883, 889, 910: n = A,T,C or G
tagtccgnttttaactaccggcnaagggcganttgnagctccccgcggtggcggccgcccggccaggtactgngttgaaactgtagatcagttggggaatattnccatctttacaatattttcttccgatctattaacatgaggagtctttctattcatttagttttaaaataacttctttcaatgttttttcacttttgaagtataaaatttgcacttgttaaatttattcctgtgtaattnatcatttttaattctgttgtaaagttgttaatggaaatgctttcttaattcatatttgaattgttcattgatagtgtatagaagtaaaacngatatttgtatgtggaacttgtattttacaaccttgctgaactagttaatttcctctaataanctttttttggtggatcttcaagattttcaaatatataaagaaccatgtcatctgcaanataggagaaaaatttttacttctttctttttcaatatgggatgcccttnaaattnnggntcttggtttaaatggcccccancttagaaccttcattggaataaaaaaattgaaaattgggccccggccccagnggcttcatttcctgnaatncccagcccctttgggganggcttgaagccggttgggaacanctttgangccccggngttcaaagaaccaggcntgggccaanaatgggggnaaaccccttgccttttgctaaaaataaaaaaaaaaattaccttnggccgtaatggggccanacncccctggtaannccagcttnccccggaanggcttnangccagaaaaaacanctttnaccccgggaaggnggnangttgccaattgnncctnngaanttgngccanctgggatttcnngccntggggnaaaaaaaacaaaagacctttn

SEQ ID NO: 2243 - DNA, 480 bp, Homo sapiens
atcgactactatagggcgaattggagctccccgcggtggcggccgcccgggcaggtacaagccaatgccagcgtcagagctgcttttgtgcatgcccttggagatctatttcagagtatcagtgtgctaattagtgcacttattatctactttaagccagagtataaaatagccgacccaatctgcacattcatcttttccatcctggtcttggccagcaccatcactatcttaaaggacttctccatcttactcatggaaggtgtgccaaagagcctgaattacggtggtgtgaaagagcttattttagcagtcgacggggtgctgtctgtgcacagcctgcacatctggtctctaacaatgaatcaagtaattctctcagctcatgttgctacaacagccagctgggacagccaagtggttcggagagaaattgctaaagcccttagcaaaagctttacgatgcactcactcaccatt

SEQ ID NO: 2244 - DNA, 498 bp, Homo sapiens
  misc_feature 1, 4, 9, 13, 399, 471, 485, 490, 496: n = A,T,C or G
natnttggnccgnatcactactatagggcgaattggagctccccgcggtggcggccgaggtaccctcggttgcaagcacaagcaaatgtgccagggtggttgatgcagctgtggtcacaggtcctatccaaagagcactcatccacatcttggcaagacttctcatctgttaataatttaaatcctttcttgcagccgcagtcaaaactggcccacgatgtttttttgcaagaaatgatcacaacctccattgcgggtctggcactcatcaatatctttacatgtcttcccatccaactggagagtgaatccaacaggacaactgcagtggacacctgtcgaagtatccttacaggtgcggtcacagcctccattgttgacagcacacgtttccatgancagccgttcgtttcacccgttttatccccatccaccactgatgtgggtgttgctctctgtcacctccagganagtgtcctttttgntcaanggcaanct

SEQ ID NO: 2245 - DNA, 431 bp, Homo sapiens
  misc_feature 47, 115, 133, 283: n = A,T,C or G
tacttagggcgaattggagctccccgcggtggcggccgcccgggcanggtaccaaagaacaaacggaagcctaaagatggaccacaaacctttggatatccaggataactgagtnaaaaacctaccacacggntaataaaataatgatgtccactgagtccatgaccacaaagcaaatcaccagcagcaggatggcatgggcggcccttttcgctggggagggactggagcaaaggctggggctgtgaaggtgatgggatcacctctgatggttaaacaagantacctaggccgctctagaactagtggatcccccgggctgcaggaattcgatatcaagcttatcgataccgtcgacctcgaagggggggcccggtacccagcttttgttccctttaagtgagggttaattgcagcgcttggcgttaatc

SEQ ID NO: 2246 - DNA, 432 bp, Homo sapiens
  misc_feature 397: n = A,T,C or G
attggagctccccgcggtggcggccgaggtaccaggattcattctcatcaaatatcatgaagtggagaacacggtgaactatgttggggttgatgtctttgcggcatacagagagagggcctaccagtccactgtgaaggtccttagccacagatacagttgaatagtaaaaccaaggtatgcattcaaagtcccagtgaggtagggaccagttctatcaggtatctgccaagtatatatttgaatctctcctggctgagttggaacaacagtggaattatttgttttcactccatgagcatgaatagaatacggtcttgcggctttatttttaaagataattttgaattatttgaccagggttgagcaatattaatgggacctagtatatccgagnatgtttttcacccttcatttcctttttgtttggat

SEQ ID NO: 2247 - DNA, 699 bp, Homo sapiens
  misc_feature 8, 17, 21, 28, 378, 610, 655, 687: n = A,T,C or G
gggccccntaatcgcgntatngacatanttgttggctgattggagctccccgcggtggcggccgaggtacgcggggggagatgctgccacctaggttacttgtaggaccctatacggcaacctcctttgccaggaactatttataaacatcctgcaggaaaatgagtctatatgtcagaatacacatttcccaccttgcccaacagtagaaaaacataagaagagaaaaacattaaaaaatgacaaggaagttaatggaagtcggcaatgtgatggtgtttggaggtggagccttcagaaggtaattaatgcccttgtaagaagaggccagagagcttgcgcaccttcttcctgccatgtgaggagccaagaagcccngctgtctgcaacctgcaagaggaccctcactagaagctagccatactggcctcctcatcttggctttccaacttccagaactgtgagaagtatatgtttgtggtttagtcaatggtctatggtaatttttttatagcagtcccagccaagacagtgcctcatttactacataccatttatattattatataggctcctttcagaaacccatgttcaaattagagataagatnctgaaacacatacaccttcctagtttttagtatacaaatttgggnaaatagttttggtattaactatctcatccaanaaatgccggatt

SEQ ID NO: 2248 - DNA, 871 bp, Homo sapiens
  misc_feature 15, 22, 26, 27, 199, 334, 502, 509, 527, 541, 591, 623, 644,705, 713, 757, 792, 810, 834, 843, 854, 856, 859, 861, 871: n = A,T,C or G
atcgcgtatcgactnactatanggcnnattggagctccccgcggtggcggccgcccgggcaggtacaaagaaacagcttcaatccttttggggaatggcagggttttgcagaatatgtgttccaaatttggggtcatagcaaaacccctttataaagcaacaagggggccagaaaatgagtcaatggagtgggccctanaaatgaggggaaactttgtcaagttaaaacaggctcttaacaaagctcccactcttggcatcccaaacttcattaagcatttttccttgtatatagcaggaaaaaaagggcataactgtgggaatactaacccanaaattgggatcagaacccataccaaccatctacttttcaaagaaattgaacagagtagcctcacagtgaccaagctgcctgcaggcaatagcagccactgttattttagtggaagaagccactaaaatcaccctgggtcaaccactgaaagtgttaactccacatcangtaaggncagtcctgggaataaaangacatatctgaacnatgggaagaaaggttaaccaaataacaggctatattcctagataatccanaaggtacccttaaaacctgtacaccctgaatncagctttattgcttgccacangcccatgactgatcacttctgcaggcaggtcatcacatcacatatgtcaactgcctctttnaaaagatnagcccttccaattcaaagatactgggttacaaacagcaataacnttttttccatggaaaatgcctgcttgaaatttggnataaaatccaacttcttnttgggttccaacactacccagggncatgtttcnaaaagttaaanantgntntatttggccn

SEQ ID NO: 2249 - DNA, 885 bp, Homo sapiens
  misc_feature 580, 603, 614, 646, 668, 674, 682, 688, 734, 736, 738, 751,755, 777, 780, 794, 809, 823, 836, 844, 850: n = A,T,C or G
gcggtatcgactactatagggcgaattggagctccccgcggtggcggccgcccgggcaggtaccaaagaacaaacggaagcctaaagatggaccacaaacctttggatatccaggataactgagttaaaaacctaccacacggttaataaaataatgatgtccactgagtccatgaccacaaagcaaatcaccagcagcaggatggcatgggcggcccttttcgctggggagggactggagcagaggctggggctgtgaaggtgatgggatcacctctgatggttaaacaagagtacctcggccgctctagaactagtggatcccccgggctgcaggaattcgatatcaagcttatcgataccgtcgacctcgagggggggcccggtacccagcttttgttccctttagtgaggggttaattgcgcgcttggcgtaatcatggtcatagctgtttcctgtgtgaaattgttatccgctcacaattccacacaacatacgagcccgggagcataaagtgtaaagcctggggtgcctaatgagtgagctactcacattaattgcgttgcgctcactgcccgntttcagtccgggaaacctgtcgngcccacttganttaatgaatcgggccaaccccccggggaagangccggtttggcgtattgggcgntttttncgctttcntggttnactgaattcgcttgggcttcgggcggttcggcttgcggcaaccggnantnactttatttaaanggcngggaattccgggttttccaaanaantcaggggatacccnaggaaaaaaacattngagccaaaaggccngccaaagggccangaaccggnaaaaanggccggttggctggggtttttccataggctcccct

SEQ ID NO: 2250 - DNA, 868 bp, Homo sapiens
  misc_feature 7, 271, 292, 309, 312, 371, 465, 612, 707, 735, 739, 766,788, 799, 852, 865, 868: n = A,T,C or G
gtgttcnctacttagggcgaattggagctccccgcggtggcggcccgaggtacatggttcttcctcaaaaagtggtaattccttaatgtgtttctttttaccctttttcttcttcttggaaaggggattttaagtaaagaactgaagtaatggaaagagtaagctagaagaatatctggggaaaaagcccccagacacatggaactgctaagtgccagaaggtgtgcctgggaatcttttaagcagtaggggtagggtaagggaatagcancaagttcagtgttgcttgaancagagcaaagacatagnaancagaagtttaagcaggagaggtaacatgccagatggttactgccttcagttattagganggacctctgcacatactcagagtgaaatggggaggcaatcagaagggctggggcagaaggaatgacccaatttgacttatgtttaaaatacatncacttgagtttaagaattgacaaaaggggaagtttttaaaaacccaggactatcaattccaagtctatgacactcatctagactacagatgacggtggctcaaatgtacctgcccgggcggccgctctagaactagtggatcccccnggctgcaggaattcgatatcaagcttatcgataccgccacctcgagggggggcccggtcccagcttttgttcctttagtgagggttaattgcgcncttgccgtaatcatggtcatactggttnctgngtgaaattggtatccctcccaattccncacacatacgagccggggcctnaagtggtaagnctggggtgcctaatggagtgaccttactcccattaatgcgttgcgctcactgncccttttccagcnggn

SEQ ID NO: 2251 - DNA, 951 bp, Homo sapiens
  misc_feature 1, 564, 578, 626, 633, 641, 653, 713, 716, 745, 753, 758,759, 765, 775, 796, 812, 813, 819, 820, 824, 830, 831, 832,833, 837, 838, 843, 844, 846, 847, 848, 849, 859, 866, 869,875, 879, 888, 900, 905, 911, 913, 915, 924, 925, 931: n = A,T,C or G
  misc_feature 943, 949, 950: n = A,T,C or G
nacgtatcgactcactatagggcgaattggagctccccgcggtggcggcccgcccgggcaggtacgcgggggtagatggaaggaagaacttgtgtgcttagacctgacgctgggaggagatgctgccacctaggttacttgtaggaccctatacggcaacctcctttgccaggaactatttataaacatcctgcaggaaaatgagtctatatgtcagaatacacatttcccaccttgcccaacagtagaaaaacataagaagagaaaaacattaaaaaatgacaaggaagttaatggaagtcagcaatgtgatggtgtttggaggtggagccttcagaaggtaattaatgcccttgtaagaagaggccagagagcttgcgcaccttcttcctgccatgtgaggagccaagaagcccgactgtctgcaacctgcaaagaggaccctcactagaagctagccatactggcatcctcatcttggctttccaacttccagaactgtgagaagtatatgtttgtggtttaatcaatggtctatggtaatttttttatagcaatcccagnccaagacagtgccncattttactacataccatttatattatttatattagggctcctttcanaaacccnttgtttcnaatttagagatnagatcctggaaacacattaccacccttcacttatttttagtattccaaatttggggaaanaanttgttattaactatcttattccaagaaangccaaatncatgnnggtctnaaatttttanataaaattggccaaattgaanaaccttacccctcctnnattttnnttgncccaannnnaaannaaaannannnnaaggtccctnggccctntanaactangggntccccggcntgcaggaattcnatttnaacttntngnttcccgccnnctctanggggggcccggnacccannt

SEQ ID NO: 2252 - DNA, 910 bp, Homo sapiens
  misc_feature 3, 604, 616, 626, 659, 666, 685, 709, 738, 740, 763, 764,772, 775, 781, 809, 820, 829, 861, 870, 872, 873, 878, 887,893, 901, 910: n = A,T,C or G
canctactatagggcgaattggagctccccgcggtggcggccgccgggcaggtacgcgggggggagaccattgctctatagcaagaccagactttgcccttcctcctctcagcctactcaacgtgaatataatgaggatgaagacctttgtaatgaccttttcccacataatgaatagccattgggagacacacttctgaacaccaccactggaaaatcacacatgctgaaatgggagagttccctgacccccttgcaggatatgtgacaggagtgtggctcatctgttcagctggagtgcatactcaaaccccttatgagacaaggagtatgcagacagaaggtgcaggaactggggtgagtacctcggccgctctagaactagtggatcccccgggctgcaggaattcgatatcaagcttatcgataccgtcgacctcgagggggggcccggtacccagcttttgttccctttagtgagggttaattgcgcgcttggcgtaatcatggtcatagctggttcctgtgtgaaattgttatccgctcacaattccacacaacataccaaccgggagcataaaagtgtaaaagcctggggtgcctnatgagtgagctnactcacattnattgcgttgcgctcactggccgcttttcaatcnggaaaanctgtcgtgccactgcattnatgaatcggccacccccgggagangcggttgcgtattggcctttttccttctngntacttgactcgcttggctcggcnntcggttgnggnagcggnttagcttacttaaaggcggaatacggtntccccaaattnggggtaacncaggaaaaacatttgaccaaagggccccaaanggccggaancnnaaaangcccgttgnttgggntttttcanagctccccn

SEQ ID NO: 2253 - DNA, 975 bp, Homo sapiens
  misc_feature 2, 8, 19, 35, 91, 104, 107, 587, 626, 648, 654, 689, 699,701, 702, 712, 720, 737, 762, 774, 776, 803, 823, 832, 868,883, 887, 890, 891, 914, 944, 947, 961, 973: n = A,T,C or G
gngtatcntttcactatanggcgaattggagcttnccgcggtggcggccgcccgggcaggtaccacacacacacaggcacacgcaggcacncgcaggcacacantcngacacacacacacacataaacacacagagttcactagtccgagttactgattttcttaggattctcaaagtgacaacaccggaaacaaggtaattcatgttaaaacacaagggttatatcagtaagagatgggatccccgaagtaaaccgtggaatttgaatcaagcttcgaagagctaaaaaaagaaattggagtttcaacattcaccttcttgaatccttaagaaatacagaagttcaaaatagaaaacattacagtttcaggatcaaaagtagaaacatctgagattaagcctacatttttaaaaaaagatattgaaaattactgggcttgtaataccagcttttcaaacatcaataccagtattggcattacctagatcaaatcttttcatcaaagttgaaaaaataaagcatttggggggatagaaggaccatcaaaaatgtccaatattgaaatattgggtctttgcatagttncattaaaaaaatttaccctgctctcaatggttgggtcanttcttcaattccaaggctttantttggnacaagactttttgcattttcaatgggcaggctcgnaaggcagatngnnttttcggganggctcttnaaaagccaaaattagantttattatcaatcttaaggtaaatntggacaaggccngnccccaaatggaatggccgggataagtntctaactggcttccttttgnttccaattnggagaatggaatactttagaattgggaagggttttnttttgggttgttttngganccnnccccgaccaggattccctggagnaaaattttattcccggtttacaaatcttgncgntaaaactttaagangcgggattgtgntt

SEQ ID NO: 2254 - DNA, 931 bp, Homo sapiens
  misc_feature 2, 620, 714, 745, 759, 783, 784, 799, 800, 801, 802, 803,804, 805, 806, 807, 808, 809, 811, 812, 814, 815, 816, 817,818, 826, 829, 844, 872, 875, 891, 892, 899, 901, 918, 919: n = A,T,C or G
ancgtatacgactactatagggcgaattggagctccccgcggtggcccgagcggcccgcccgggcaggtacgcgggggacgctgggaggagatgctgccacctaggttacttgtaggaccctatacggcaacctcctttgccaggaactatttataaacatcctgcaggaaaatgagtctatatgtcagaatcacatttcccaccttgcccaacagtagaaaaacataagaagagaaaaacattaaaaaatgacaaggaagttaatggaagtcagcaatgtgatggtgtttggaggtggagccttcagaaggtaattaatgcccttgtaagaagaggccagagagcttgcgcaccttcttcctgccatgtgaggagccaagaagcccggctgtctgcaacctgcaagaggaccctcactagaagctagccatactggcatcctcatcttggctttccaacttccagaactgtgagaagtatatgtttgtggtttagtcaatggtctatggtaatttttttatagcagtcccagcccaagacagtgcctcatttactacataccatttatattattatataggcttcctttcagaaacccatgttcaaaataagagataanatactgaaacacataacaccttccttagtttttaagtatacaaatatttgagaaaatagtttggttattaactattttaatccaagaaatgcanaatcatgtggttctaattttttatatttaantggcaaaatggaanaaccttacccccttctaaattttnntgcccaaggaaaaannnnnnnnnnngnngnnnnnggtccctnggncggtttaaaactagngggatcccccggctgcaggaatttcaanttnagcttattgatccccnngaccctnanggggggcccggacccannttttttcctttt

SEQ ID NO: 2255 - DNA, 938 bp, Homo sapiens
  misc_feature 2, 650, 662, 666, 668, 669, 711, 741, 755, 767, 803, 809,810, 811, 821, 822, 831, 857, 860, 861, 862, 879, 880, 885,886, 887, 892, 894, 895, 898, 900, 901, 902, 905, 908, 909,912, 924, 928, 933, 935, 936, 937: n = A,T,C or G
cntctactatagggcgaattggagctccccgcggtggcggcccgcccgggcaggtactttactcacccttcctctgacagaaaaggatgaagtcaagggcctggtagaggcaccactaagaaaggcgtctgagaggaccaaagagagtgaccagcaagcattttttgcaaggctgaggagctgacagcttcatgaaaggctggaccacccagtggtgagaagcatcatctgggttaccttgtgctgccataaaacacaccacagacttggtgacttaaaccacagatatttatcttctcacaatcctggaggctggaagtctgcaatcacggtgccagcatggtcaggttctggtgagggcctctttccttctcactgtgtgctctttcttgtgcatggagagagagagcatgaacaagccctctactgtccctcttagaagggcactaatcccataataaggcatccaccctcctgacctcggctaaccccagttaagtacctcggccgctctagaactagtgggatcccccgggctgcaggaattcgatatcaagcttatcgataccgtcgacctcgagggggggcccggtacccaacttttgttccctttagtgagggttaaattgcgcccttggcgtaatcatggncatagctggttnctgngnngaaaattggtattccgctcacaatttcccacaacaataccanccgggagccttaaagtggaaagcctggggngcctaatgaggggnctacttccaatnattgggttgcgcttactggcccctttccaatcgggnaacctnnnggccacttgnnttaatgaantggccaaccccccgggagaaggcggnttnnntatttgggcccttttcnnttctnnnttaantnntcntnnnctnggnnttnggttgggggaangggnttaantnnnt

SEQ ID NO: 2256 - DNA, 474 bp, Homo sapiens
  misc_feature 2, 3, 4, 5, 6, 7, 11, 13, 15: n = A,T,C or G
gnnnnnnaggngngncggctatacgactactatagggcgaattggagctccccgcggtggcggccgaggtactttgccaagcagtaaaggatccaggagatagcactggatgtggtgtcatgtcctgcaaacatgaacgttttcacttcagcctggagatctgcttcagagaaatctttggtgttttcgcttttggcactcaaaagtatgtccagaaaatcccagcgccttttctgagtagtatcttgttttagcttatccttaagagactccttccggtcctggattactttctctgtgaactgatgaagttcttggttaaatttagaaaagatttggccttgagagctgaatttgaaaaccaggtcgttgtgatgtagaaaattgttcatgcgctggttggagattttttgctaaggttgaacactgctttcaggtattgagtccagggtacctgcccgggccgggccgctt

SEQ ID NO: 2257 - DNA, 443 bp, Homo sapiens
tatagggcgaattggagctccccgcggtggcggccgcccgggcaggtacctgagtagtctgtaaccaaaataattcatttggcacatttaaggcatctgcccaataaaataccttgtgaataaattctttaggaattatgaatactacaaggagaaaaatgacagaaagaagctgacttggggggaatgggagttgtttttaataacctttttaccaccctagacttctggccaatcaaattgaatcataccttgggaagggaaactgcctgatgcagcagctgagccaaagtcagcaaatcctccgaataaatcagctgatcctcctagaagttaagaaaaagttaaaactgttagaactagagaaaaattgtaaataatttctggaggccattttagtgccacacaaaaagtacctcggccgctctagaactagtggatcc

SEQ ID NO: 2258 - DNA, 470 bp, Homo sapiens
  misc_feature 3, 4, 5, 74: n = A,T,C or G
ggnnncgccgatcactcctatagggcgaattggagctccccgcggtggcggccgctttctcttactgatagtanggatatttctgctttagttattgtcaccttaaatatattttcaatgttgaaatcctcacagcatgtttgatgaaatctagttttcaaattttcttaggtatatttctgtcacgttggcatgataacaaatgcaataacccaaaagaccccaaaagctagtgtaatcccttttgcaatccaagcatgaggattcatcttcatgttgacagtgcgtgaatgttcggtaggctttgtcaagcttgcatacaataaattatatatgtcccttttcttttagggtctcctgttaaaggatggtcttctgaaggctaactgcggaatgaaagtttctattccaactaaagccttagaattgatggacatgcaaactttcaaagcagagcctcccgagaagcc

SEQ ID NO: 2259 - DNA, 447 bp, Homo sapiens
tatacgactactatagggcgaattggagctccccgcggtggcggccgaggtactcaccccagttcctgcaccttctgtctgcatactccttgtctcataaggggtttgagtatgcactccagctgaacagatgagccacactcctgtcacatatcctgcaagggggtcagggaactctcccatttcagcatgtgtgattttccagtggtggtgttcagaagtgtgtctcccaatggctattcattatgtgggaaaaggtcattacaaaggtcttcatcctcattatattcacgttgagtaggctgagaggaggaagggcaaagtctggtcttgctatagagcaatggtctccccccgcgtacctgcccgggcggccgctctagaactagtggatcccccgggctgcaggaattcgatatcaagcttatcgatacccgtcgacctcga

SEQ ID NO: 2260 - DNA, 474 bp, Homo sapiens
  misc_feature 4, 6, 419, 454: n = A,T,C or G
gttntntggcgccgaatacgactactatagggcgaattggagctccccgcggtggcggccgcccgggcaggtacttggccactttcctgagccaagcacttcattatcttcttgtcctgtgagtcctaatagatatatttagaaacacttctatgaaatatggaatccaggcttaaccagctgtttgaaatcacaacccacaaccactttgctggtgtgtgctcacacacacacacacactgacacatgcttgctatacatacatacacacagtttccatcttttttttttttttttgagacagagtcttgctctttcgcccaggctggagtacacttggctcactgcaacctctgcctcccaggttcaagcaattctcctgcctcagcctcccaagtagctgggactacaggcacgtnccactacacccggctaatttttgtatttttagtanagacctgagttttgccgtgt

SEQ ID NO: 2261 - DNA, 837 bp, Homo sapiens
  misc_feature 1, 627, 685, 700, 716, 719: n = A,T,C or G
ngcctatcgactactatagggcgaattggagctccccgcggtggcggccgcccgggcaggtacgcgggcttccaccatgtgagggacacagcaagaaggggctgactctgaaccaggaagctgtgctgtgctcaccagacactttgatcttggacttctcagcctccagaactgtgagaaagagatttctatttttataagccacccagtagatggtactttgttacagcagcctgaaaggactaagacaccgacctagtctccctgatgaaaaagtttctctcagacttctaccctttccaatgtggccaaagcttttcattccgaagaagtttcctttctgagaacgctcattgtgtcgtttggctttccccgtctctgcttgacacatgaaccaaaacagaggcagccaaagcagggaaaaaaaaatcctaggatcagagtccactctatgcccttttgagcttcaaaaggagaaagagacaaaagccaaaagcaatggaggtcaagctgccggtcatgtttctttacgcctgacctcctgatggactcactaaataaaatgctccttcttgtagccagcaagcaaatgagtacttttttatggcttacatctgtgcctggtcngccattaagtctgggtgccactggttgagaattggggctggtttctgcactggatctntgctacagataaggntttccttctgaggccnaancctggttaacgttaagaactttatgatgatgccaactttaaaaggcgatcccttacattaacaaaaaccttcccagaaccagaacctggttttttaaccaaaaccctttccgttggtt

SEQ ID NO: 2262 - DNA, 805 bp, Homo sapiens
  misc_feature 11, 16, 20, 115, 117, 134, 151, 152, 161, 162, 338, 410,571, 716, 802: n = A,T,C or G
gcctatcgacnactcncgtntacgactactatagggcgaattggagctccaccgcggtggcggcccgcccgggcaggtacgcgggggaacttgtgtgcttagacctgacgctggnangagatgctgccacctangttacttgtaggacccnntactgtaanntcctttgccaggaactatttataaacatcctgcaggaaaatgagtctatatgtcagaatacacatttcccaccttgcccaacagtagaaaaacataagaagagaaaaacattaaaaaatgacaaggaagttaatggaagtcagcaatgtgatggtgtttggaggtggagccttcanaaggtaattaatgcccttgtaagaagaggccagagagcttgcgcaccttcttctgccatgtgaggagccaanaagccggctgtctgcaacctgcaagaggaccctcactagaagctagccatactggcatcctcatcttggctttccaacttccagaactgtgagaagtatatgtttgtggtttaatcaatggtctatggtaatttttttatagcaagtcccaccaagacagngcctcatttactacatccatttatattattatataggctcctttcaaaaacccatgttcaaattagagataagatctggaacacttacaccttcctagttttagtatacaatattgagaaatagttggtataactatctatccanaaatgcaatctgtgttctaattttattataatgcaaatgagaacttacacatctaatttactgccaaaaaaaaaaaaaaaaaaagnccc

SEQ ID NO: 2263 - DNA, 450 bp, Homo sapiens
  misc_feature 2, 3, 4, 11, 15, 332, 421, 433, 449: n = A,T,C or G
gnnnaggagcnttcngctatttactactatagggcgaattggagctccaccgcggtggcggccgaggtacgcggggaaagcttggtggaaaaaacacctgatgaggctgcatccttggtggagggaacatctgacaaaattcaatgtttggagaaagcgacatctggaaagttcgaacagtcagcagaagaaacacctagggaaattacgagtcctgcaaaagaaacatctgagaaatttacgtggccagcaaaaggaagacctaggaagatcgcatgggagaaaaaagaagacacacctagggaaattatgagtcccgcaaaagaaacatntgagaaatttacgtgggcagcaaaaggaagacctagggaagatcgcatgggagaaaaaagaaacacctgtaaagactggatgcgtggcnaggagtaacatntaatttaaaacttaang

SEQ ID NO: 2264 - DNA, 458 bp, Homo sapiens
  misc_feature 2, 3, 4, 5, 9, 271, 407, 432, 435, 443, 447, 449, 452, 455: n = A,T,C or G
gnnnnaggnccgcgccgaatcgactactatagggcgaattggagctccccgcggtggcggccgaggactttttttttttttcttttttttttttttggattgttgatcacacctttatcttgcttaatatgtgtccagattcacaaaaatatctacatccttctgatgtatcattttagggtatgatctcagtaatcaggcagtgaattttctatagatttgtaggaagtctaggacaagatgcatattgttggcatgctgtatacttcanaatgcttagtttattaatcaacaaaggagtcatatctttttgtcactaatgtcctcaaaacaatcccaaccaatcttaccgctaaaattgtattttattattttatttttattttttactttgtaagcaatcaaanacaatatggtatcttaaaatagtanaanggtttttntatntnganaanaaa

SEQ ID NO: 2265 - DNA, 441 bp, Homo sapiens
  misc_feature 404: n = A,T,C or G
gggcccgatcactacttagggcgaattggagctccccgcggtggcggccgaggtacgcgggggcttagacctgacgctgggaggagatgctgccacctaggttacttgtaggaccctatacggcaacctcctttgccaggaactatttataaacatcctgcaggaaaatgagtcaaggaagcttttcttttgagctatttacagcttttagcaattgagtaaagtatactcctgtgaacaaaatttggaacatatttgtttctctctaactgatttctccagaatttggaactagttaaccaggaaccctctcttggggtgtggatcgagacccctttctggtaacgagagcacagcttggttttatacattttaaggagacatgagacatcaatcaacgtatntaagatgaacattttgatctgaaaaggccttttttaa

SEQ ID NO: 2266 - DNA, 451 bp, Homo sapiens
  misc_feature 2, 3, 15, 422, 430, 433, 434: n = A,T,C or G
gnnaggcggcctcgnatcactactatagggcgaattggagctccccgcggtggcggccgaggtacttttttttttttttttttttttgcctggagagagagagatgttttatttttgccaaagcatgtgagagtaagtagcaaacatcatgacacttcacccctcaaatattttcccacgtatcacttaagaacaagggcattcattctgttacatgaccacaatacaatcagcacagatagatattaacattgagacaatgctctgatgtattggtatctactatgcagttcataatcaaataagggttttggtaacttgggatccataaatggtctgcaaggtcagcccctgtagacctgcacttagtgggtgccatttccctgtctcaggtgcctgctctacttggtgaattttttttnactggctnttnntgctcactttaaaattt

SEQ ID NO: 2267 - DNA, 633 bp, Homo sapiens
  misc_feature 2, 5, 6, 7, 10, 12, 13, 15, 16, 27, 29, 33, 37, 38, 41, 42,44, 45, 48, 50, 51, 53, 54, 57, 62, 63, 65, 68, 69, 70,71, 76, 82, 85, 87, 89, 92, 93, 95, 104, 108, 112, 113,114, 115, 121, 129, 354, 423, 445, 460, 476, 480, 488, 499: n = A,T,C or G
  misc_feature 519, 544, 568, 633: n = A,T,C or G
tncgnnntantnntnntattttctcgncntttntacnnatnntnnttntnncnnttnttttnnantannnnttttnaaaatnttnantnatnntnctttttatntttntagnnnngggttntgccgctntacgactcactatagggcgaattggagctccaccgcggtggcggccgaggtacaccccctttttaccttggacagttttcagagagaagccatagctgcctccttccttcacgagatagcagagccggggctgggtccaagtttgcacacctccattcatcacaggggaaagtatattatcactcaaaccttgctccttctgactttgacccaactctttcaagntccacccgtgttttcactgcctttctcataggaaatctcccatcccagtaacctagttaaaagctcacntggcattccccacttctttctngaccaggatcccacnaacctgccataatgtntctntcttttgntccacaaaagnacaccaatttgtatccttanagaaacctcttgtcttccattcttngaaaggccagccccttcttctgcntgggcctacactttctcaaacccaaccccgggaccaagggtgggcccctcgggtgtccctttctn

SEQ ID NO: 2268 - DNA, 657 bp, Homo sapiens
  misc_feature 5, 6, 7, 23, 24, 29, 43, 46, 47, 49, 52, 53, 55, 57, 59,60, 66, 67, 69, 75, 77, 79, 80, 83, 86, 91, 92, 102, 103,117, 120, 123, 362, 373, 403, 451, 478, 488, 493, 515, 517,531, 533, 549, 553, 586, 606, 618, 630, 653: n = A,T,C or G
ttgtnnnttttttaaaatatatnnttctnttatcctgaaaatnttnntncanntntngnntacganntntttagncngnnatnttnaaaanntttttccttnnttaagtatgggtanacnccntatacgatcactatagggcgaattggagctccaccgcggtggcggccgaggtacaatgccaggaagatgaatgtgcgttaatgttgctggaacatggcactgatccaaacattccagatgagtatggaaataccactctacactacgctatctacaatgaagataaattaatggccaaagcactgctcttatacggtgctgatatcgaatcaaaaaacaagcatggccttaccaccacntgcctacttgngtgtacctgcccgggcgggccgctcctagnaacctagttgggatcccccccggggctgcatgggaattcgatatcaangcttatcggattacccgttcgaccctntgaagggggnggggnccccggttacccaagccttttngnttcccttttttagntngaagggggtttaaatntgcngccgcctttggggccgttaaaatccaatggggntccattaggccttggttttncccttggttggntggaaaaatttngtttattcccgccttcaaccaantttc

SEQ ID NO: 2269 - DNA, 437 bp, Homo sapiens
  misc_feature 437: n = A,T,C or G
cgaatacgactcctatagggcgaattggagctccaccgcggtggcggccgcccgggcaggtaccaccacgcctagataactttttgtatttttaatagagacagagtttcaccacgttggccaggctggtctcaaactcctgacctcaagtgatctgcctgcctgggcctcccaaagtgctgggattacaggcataagccagcacacctggccgttaaactagttattttaatcatgctacacaaagaagacatttctccaaaggaaatatataaagggaaacactgttgaaataaatggaaagctaaaagtctcagcatagaagctataaaaagaaacaagtggaaattgtagaactgaaaatacaataacaaaatttactgggaaggtctcaacacaatgaagatgactgagggaagagtcagtaaatttgaagn

SEQ ID NO: 2270 - DNA, 441 bp, Homo sapiens
  misc_feature 2, 3, 4, 5, 8, 382: n = A,T,C or G
gnnnnagnggccgcgtaatacactactatagggcgaattggagctccccgcggtggcggccgcccgggcaggtacgcggggtcagttacatgaaaatcccctttggtcactgagatccaaaccttgccggtgtgtcattgagccaggtcaagtcttcgatatgactgtgctcctaccctcaacccagcctttggcgtttgtgccttagtgactgcagaagcctcttagtcttcccatctccaccttgctctatacccctgccttgaccctagctggccaatagtaaaaatcccctcccaaaatatttttaagtaaacaaacaaacaatacaaaataacgtttaaaaaaaaaaaaaaaaaaaaaagtccctcggccgctctanaactaggtggatcccccgggctgcagggaattcgatatcaagcttatcgataccgtcga

SEQ ID NO: 2271 - DNA, 461 bp, Homo sapiens
  misc_feature 2, 3, 4, 5, 8, 9, 374, 393, 404, 413, 423, 435, 444, 451: n = A,T,C or G
gnnnnagnnggccgcgtatcactactatagggcgaattggagctccccgcggtggcggccgcccgggcaggtactcacagttgagataggattaaaccccaatttcaaagccccttacagagttccacttaccaggttatttcagccggcaaccaggaactagactgaatgcaatcctcccacatccaaggtcccccgcgtacctcggccgctctagaactagtggatcccccgggctgcaggaattcgatatcaagcttatcgataccgtcgacctcgagggggggcccggtacccagcttttgttccctttagtgagggttaattgcgcgctttggcgtaatcattggtcatagcttgttttccttgtgtgnaaattggttttcccgttcnaaatttccccncaaacttancaacccgggnagcataaaagtngaaaaaccntgggggnggcctaaaaa

SEQ ID NO: 2272 - DNA, 436 bp, Homo sapiens
  misc_feature 2, 3, 11, 13: n = A,T,C or G
gnnggccgcgnancactactatagggcgaattggagctccaccgcggtggccggccgcccgggcaggtacactaactgcagtgcctcatttcctaatttccatataagctgcccctctgacctagagcatctttgttttccacctaccataacctttaaagcaagggtccctaacccccggggccacagaccctgttaggaaccaggttgcacagcaggaagtaagtggtgggcaagtgagcattcccgcgtacctcggccgctctagaactagtggatcccccgggctgcaggaattcgatatcaagcttatcgataccgtcgacctcgagggggggcccggtacccagcttttgttccctttagtgagggttaattgcgcgcttggcgtaatcatggtcataagctgtttcctgtgtgaaattgttatccgctc

SEQ ID NO: 2273 - DNA, 468 bp, Homo sapiens
  misc_feature 2, 3, 4, 5, 6, 9, 25, 427: n = A,T,C or G
gnnnnnagnggccgcgtaatcactnctatagggcgaattggagctccaccgcggtggcggccgcccgggcaggtaccgggcagcttgacctccattgcttttggcttttgtctctttctccttttgaagctcaaaagggcatagagtggactctgatcctaggatttttttttccctgctttggctgcctctgttttggttcatgtgtcaagcagagacggggaaagccaaacgacacaatgagtgttctcagaaaggaaacttcttcggaatgaaaagctttggccacattggaaagggtagaagtctgagagaaactttttcatcagggagactaggtccggtgtcttagtcctttcaggctgctgtaacaaagtacctcggcccgctctagaactagtggatccccccgggctgcaggaattcnaatatcaagcttattcgatacccgtcgaccttcgagggggg

SEQ ID NO: 2274 - DNA, 419 bp, Homo sapiens
ggcgaattggagctccccgcggtggcggccgaggtacgcggggacctaggttacttgtaggaccctatacggcaacctcctttgccaggaactatttataaacatcctgcaggaaaatgtgaagtagaagagacagggatatcccagaaggttatgcaaaacatcaagagaagatgagaggagtctatatgtcagaatacacatttcccaccttgcccaacagtagaaaaacataagaagagaaaaacattaaaaaatgacaaggaagttaatggaagtcagcaatgtgatggtgtttggaggtggagccttcagaaggtaattaatgcccttgtaagaagaggccagagagcttgcgcaccttcttcctgccatatgaggagccaagaagccggctgtctgcaacctgcaaggaggac

SEQ ID NO: 2275 - DNA, 424 bp, Homo sapiens
  misc_feature 248, 251, 349, 404: n = A,T,C or G
ggcgaattggagctccccgcggtggcggccgaggtacgcggggactgtgggctggaatcctagcaccccaacctgctagatgtaaggcacttaccttttttcttcctcaggttcctttgaacagtgtcgagcacacaggcttagctccattatggttactttgggaatagcctctcgactcaaattgggaataagaaatgtcactgttaaagaaatccctaaaaaaaaaaaaaaaaaaaaaaaaaaangtncctgcccggcggccgctctagaactagtggatcccccgggctgcaggaattcgatatcaagcttatccgataccgtcgacctcgagggggggcccggnacccagcttttgttccctttagtgagggttaattgccgcgcttggccgtaatcangggtcataggctgtttcctg

SEQ ID NO: 2276 - DNA, 430 bp, Homo sapiens
cgaatacgactactatagggcgaattggagctccccgcggtggcggccgaggtacttgcaggctacgagaggtgatttgcagcatgcttcagagacaaccatgctgaatcattcgtagatgtcaaaagtgttagaactgacatggatcttagaagccacctggctttcaccacccattttctcctgcttcccaatgtcccgggaacacacggcacttaggaggggactgtaaaagcagtagctcccaattataacaccagtctcccagtttggaactttgaggttaggtaactccaaacttagcctacccttgacactcccctctacccattctctattcaaacctcaaatcccgcgtacctgcccgggcggccgctctagaactagtgggatcccccgggctgcagggaattcgatatcaaagcttatt

SEQ ID NO: 2277 - DNA, 454 bp, Homo sapiens
  misc_feature 2, 3, 4, 408: n = A,T,C or G
gnnnatatacttggcgccgtatacgactactatagggcgaattggagctccccgcggtggcggccgcccgggcaggtacgcggggagtcaacacacccgtgggtaattaacctggtcatccccaccctggagagccatcctgcccatgggtgatcaaagaaggaacatctgcaggaacacctgatgaggctgcacccttggcggaaagaacacctgacacagctgaaagcttggtggaaaaaacacctgatgaggctgcacccttggtggaaagaacacctgacacggctgaaagcttggtggaaaaaacacctgatgaggctgcatccttggtggagggaacatctgacaaaattcaatgtttggagaaaggcgacatctggaaagttcggaacagtcagcagaagnaaacaccttaggggaaattaccgagttccctggcaaaagtaaacat

SEQ ID NO: 2278 - DNA, 418 bp, Homo sapiens
  misc_feature 282, 413: n = A,T,C or G
ctatagggcgaattggagctccaccgcggtggcggccgccgggcaggtactcgggtgacccaaggaggaccattttaaacttctaagttttcaccgagattaacatgcatttgttgaaagacaaacctcttttaccctactcccccagctgcaaatgctttcagggttcacatcatgttggaacatttggttacagtgtttcctaaactttgcgggtaaaaattgttcaagtaggtaaaaatggagcacatacaaaaaaaaaaaaaaaaaaaaaaaaaaaangtacctcggccgctctagaactagtggatcccccgggctgcaggaattcgatatcaagcttatcgataccgtcgacctcgagggggggcccggtacccagcttttgttccctttagtgagggttaattgcnccgct

SEQ ID NO: 2279 - DNA, 461 bp, Homo sapiens
  misc_feature 119, 127, 202, 204, 223, 225, 240, 269, 293, 297, 305, 311,324, 365, 373, 392, 395, 408, 409, 416, 420, 434, 459: n = A,T,C or G
ctatcactacttagggcgaattggagctccccgcggtggcggccgaggtactttttttttttttttttttttttttcctgtttttgttaaagctttatttggtgacactccctcccaanaccaacanaattggggaaaggtcccaaagagaggaatccaacttttaaaaacggcctcattccatacctgagtcaggctgctntntggctcgctcgctctcctntntaacaagagttatgngttctttctgttctagtatcaaaaaaggngataacaagggagtcatttacaanccanccaccaanatgganactgaggcccacncttgaggtccccggagctcccgggcacatccaggaaggacnttgggttnggacccctacacacttttnggnttttttggggaannttttggngaanacccttaaaggggnggttttttttttaaacctcaaaaanct

SEQ ID NO: 2280 - DNA, 406 bp, Homo sapiens
  misc_feature 15, 279, 353, 366, 379, 402: n = A,T,C or G
ggagctccccgcggnggcggccgaggtacacacaaagacaaacctgaacttaatttcaaggaaaacttaaacccatgcacaaataattggtgagccttcatttccctgacttcaagtttccatgtgaggactcatgctctctccactttcttcttgggaggagggaagatttacctaatgggtaaatttgggcaaagcacattgagtgtgcttgtttggctctgagtctctttgcaaacatgtgtctgcccacagtgacatgagtttgccgttgactgncatgtctgcaggaagctgcctgctcctgtggccatgtcaagcaattctttctttcaactgcaactgtgtgtaanagcttagtctganaagaaatgttcancaagctcactgtggctgcacatntgaa

SEQ ID NO: 2281 - DNA, 516 bp, Homo sapiens
  misc_feature 2, 3, 4, 20, 235, 275, 350, 366, 386, 390, 396, 411, 417,429, 431, 438, 440, 444, 448, 453, 457, 462, 465, 476, 484,485, 487, 488, 500, 504, 506, 510, 516: n = A,T,C or G
gnnnacgccgcgaaacactnctatagggcgaattggagctccccgcggtggcggccgcccgggcaggtacgtaatgaaaattgaggttcattctatgaaaaaatctccccttctccccttcccttattgcctgtcttggcaatggccagtagagtagttatttaagggattttgtttttttgtttttttgtttttttttggtaggggaggtggggaatttctgggtttgtctttnttttaatgtatataaaagtttgctagttgttagttattgntgttctttcactctcaacacagttttttgtttggaagttgtacgaatcaaatgtaattgaggggacccatacccngaagaagtagtggganaaatatttcttttgcccttncctnaaaaanccctggtttttaccnccatantcccaagataantnatttggntngaancccnccttnaccnaaggnggncttttgggggnttttttcnngnnttttcattttgncttntntttngagagn

SEQ ID NO: 2282 - DNA, 457 bp, Homo sapiens
  misc_feature 2, 3, 4, 5: n = A,T,C or G
gnnnnagcctatcactacttagggcgaattggagctccccgcggtggccggccgcccgggcaggtacaaaaatccccagagccacatagacgggggtggtagtgcgaaccatagcaatattggcataggtgccaatctgtagctcttccagagacttggacatgaactctggcttggggaactcagtgataaacaatttgaggaacttcagaatgcgcttgtgggtgaggatgtacatgccggcttcccttaagttgattagatgggaaaccaaacaccgtctttcaagtgtgaggctgtgccatgctccctcagggaggaggggcgctgggtctgaccaggtctgcctctgccctcaccagctggcagacgtgaactggagaacagccaccagaaaggctggtggttgggcaagctgcttcaccgacacaagttgcttgaccctgcagcaagatcc

SEQ ID NO: 2283 - DNA, 453 bp, Homo sapiens
  misc_feature 4, 5, 440, 444, 446, 450: n = A,T,C or G
gccnnatcactacttagggcgaattggagctccccgcggtggcggccgcccgggcaggtacctcagttgtaaatgcagaaatcaggccatcttctgtgtcaatcatggtgggagctgcagaccggagctggaactattcagccatcttggaacgggagccctctaggtgatatattttgaagtcagaaatggaaaatgttgtccagagttcaggggaagaggatattgggttcttttctctgaggtcactgtttcaaaacgttacagaagaaaaggctaatattgcttcagcccttgcccagatcccacagaaggtcagtaaaacctccattcctgataagcagctattcacatagtgagaaagtatggcttttgccctactcagtcttgctgttattggaaacaaactctctttgattgtccgtttcgtttataaatanaaanancaanata

SEQ ID NO: 2284 - DNA, 812 bp, Homo sapiens
  misc_feature 2, 4, 6, 7, 10, 12, 16, 20, 26, 27, 30, 31, 34, 37, 40, 41,42, 45, 46, 48, 55, 59, 60, 63, 71, 74, 75, 79, 80, 85,86, 90, 96, 99, 116, 119, 120, 122, 244, 293, 324, 408,474, 483, 500, 505, 533, 545, 574, 577, 591, 639, 645, 651: n = A,T,C or G
  misc_feature 674, 678, 695, 703, 706, 707, 728, 731, 736, 743, 761, 777,783, 785, 786, 794, 796, 806, 809: n = A,T,C or G
tntnannatngnactnctantattannttnntcntanccnnnacnnantatgatnttannctnatgtaatnctnntctnnatccnnttgnatattnatntttctatttatattatngtnntnagttggcgcgcgtatacgactcactatagggcgaattggagctccacccgcggtggcggcccgaggtaccaggtgaacaaggtttaccagaaagcagttgagacaagaaaataagagctcangatgagggaaaagaaaaagattgagagaatttgtgcccccaaccatttnctcatgactctaagtaaagaaccacgctctntccagggcagggtcttgaaagctcaactctcttaatttgcctccaccttcagggttattaccctcacttttacaccaattatgnaatttattaacctgggaaaaaggaaagtttggggggaccaccattggttatttttggggtggaatntaccatttnttaaaaccaccatttanggganaaaaggtttgcctaattttgaaaccttnttttaattgganttttttttggggggggggaggttaaaagnaanttaattttttggtnggattggccaaaaataaaaaattattccctttttaaaattttgaattncggacntttggncccaaaaatttttaagaattttntggntggttggccattacaanggcctttntcnntttttttattttcctttttanttntaagnaaggaanaggtttccaattttattnaaggcctttcttcctnttttcntnntggtgtantnctttatcctntanccc

SEQ ID NO: 2285 - DNA, 501 bp, Homo sapiens
  misc_feature 3, 12, 23, 473, 474: n = A,T,C or G
gcncgctattcnctactatattngcgaattggagctccccgctgtggcggccgaggtactttacagtttatatgatctcatttgattcttaacatgagcctgtgagtgaaaaattccttcccctcttctacagattaggacgttgagattcagggaggttcagagggattcagggaaagtcaagtggcacctggagtcccgtggctaatttgaggcccggagggggatttcgaacccaggatttgtgcttcttatgcctgggcttctgctctctggggcatggtcttccccctagctttcccattcactactttagcctaggggtcctaccctttattaaactgccagtgcctcactgcttttctcccccaaagacaaaaaaaaagtgtttttgcttttgttttgtttttcatgggcagagacctggaatttcagcttgagaatttgtgccatatgataaaataaatcaacannatggctttttccccaaaaaaaaaaaaa

SEQ ID NO: 2286 - DNA, 492 bp, Homo sapiens
  misc_feature 17, 25, 65, 79, 86, 103, 123, 220, 247, 288, 420, 465, 471: n = A,T,C or G
gggaccttttgacccanttttgaanatccggcgaattgttctccccgcggcggcggccgcccggncaggtacatctganccaccgncatctgtagtctatttnagtgtcatagacttggaatngatagtcctggtttttaaaaacttccccttttgtcaattcttaactcagtggatgtatttaaaacataagtcaaattgtgtcattcctctgccccancccttctgattgcctcccatttcactntgagtattgtgccaaagttcctcctaataactgaaaggcantaaaaccatctggcatgtaacctctcctgcttaaacttctgtttcttatgtcttttgctctgtttcagccacacttgaacttgttgctattccttacctaccctacatgcttaaagattccaggcacacctntgcacttagcagtttccatgttgtctgggatgcttttttccccanatattnttctagctttactctttccat

SEQ ID NO: 2287 - DNA, 480 bp, Homo sapiens
  misc_feature 435, 449, 467: n = A,T,C or G
ggcctatcactacttagggcgaattggagctccccgcggtggcggccgcccgggcaggtacttttgccgatggggagggggatacagaggaagatgattacgatgacattattgagccccttctctcccttgaccaagcttctcactgtgagctagggcctgcacccagcctgggtcaggcctctcacagtgactccgaaatgacatcacagcgattttcgtcagttgatgaacaagcaaaacttcataagactatgtctcaaggagagattaccaagttggcagtgagacagaaggcttcggattcagatataagacctcagagagctaagatgagattctgggccaaagggaaacaaggggagaagaagactaccatgagtgaaacctactacccagtcagaggtttcgccactctttgcaggcacagatgtngattccagctcatnagtttccagatgaattancctgcatatcacc

SEQ ID NO: 2288 - DNA, 501 bp, Homo sapiens
  misc_feature 2, 5, 7, 9, 12, 18, 22, 24, 28, 228, 501: n = A,T,C or G
gncgnancnctnctacgntcantntggngctccccgcggtggcggccgaggtactttttttttttttttttgagaagacatcattacctgtatatgccccctcttctcagttccctcaatggacattggcattgatgagcccataagtacatgataagcctacaaggacaatagtgagtttatatttttatgtaatgattttagaacatgggataatattccagaggngatggaggtaaaactattcacatttccatattccaaactacttcaagaatcactagagtgcagaagttataactctaaatgctgaatggagaaatcatctgtcccaagaactacacccatatgactttccaataaatctatctcaaaaggcctaccatttaacaacaacagcaacaacaaaactttaaaagaacccaaatggaagtttttgtataagttgggggtctttttttctatacattttgaaaggacaaaaagctggctggtgagctn

SEQ ID NO: 2289 - DNA, 503 bp, Homo sapiens
  misc_feature 1, 2, 3, 12, 15, 18, 22, 27, 134, 412, 416, 417, 418, 422,430, 439, 453, 456, 497: n = A,T,C or G
nnncactacttnggncantatngggcnaattggagctccccgcggtggcggccgaggtacgcggggagagcttttggtttgctgaggtttgtcagattttccagctcagggcccagccagctggcaggaagcangacagaggtcacttgaattcagaccacatgtccctgttaaatacattagcttttaaatcaatctttgttcaaagtccaatgagttgcaagcctaatgctcacctgcagagacagaattcctgagtgaacgaacagagcagctcctcttccatctccagaaatgacctccaccttcaacccccgagaatgtaaactgtccaagcaagaagggcaaaactatggcttcttcctgcgaattgagaaggacacccgagggccacccggtccgggtggttganaaannnttancccagcanaaaaggctngccttcaaagattnganaaccgaaatttttaaggatcaatgggggtctttgtgggacnaaaaaa

SEQ ID NO: 2290 - DNA, 486 bp, Homo sapiens
  misc_feature 3, 5, 7: n = A,T,C or G
gangnancactacttagggcgaattggagctccccgcggtggcggccgaggtacagtggatttgccagatcatagcgagactgcttctttaagtgggaccctgatacatttctgctcactgggtgaaacctcccagccaggccccccagccatgtccacctgcacttattagggacagagctctgatctctccctgggaaggagtgcctgggggccaggggagggtggccacctgggttggttggatgactcagttcttccaaccaacctcctccccaacaggggcagaggcagttccccaccatgacacggttcccccaccacaatacagctcttttcttgaggcatggacagactgctcctttaagtgatttactccttctcgtggattggtttctcccggccaggtcctcccagtcggggcttccagccaccttgacctgtattctgtgggggcagacagagcttcgtgtttctctctgggat

SEQ ID NO: 2291 - DNA, 489 bp, Homo sapiens
  misc_feature 2, 3, 6, 59, 85, 185, 237, 241, 349, 354, 439, 485: n = A,T,C or G
gnnagnaacactacttagggcgaattggagctccccgcggtggcggccgaggtactttntttttttttttttttttttttggccnggagagagagagatgttttatttttgccaaagcatgtgagagtaagtagcaaacatcatgacacttcacccctcaaatattttcccacgtatcacttaanaacaagggcattcattctgttacatgaccacaataccattcagcccagatangatntttaacattgagacaatgctctgatgtattggtatctactatgcagttcataatcaaataagggttttggtaacttgggatccataaatggtctgcaaggtcagcctntgtanacctgcacttagtgggtgccatttccctgtctcaggtgcctgctctactggtgatattttttcactggctctgttgctcacttanaattttttctcccagcctgttgacattttattttctgcattagttntgaa

SEQ ID NO: 2292 - DNA, 493 bp, Homo sapiens
  misc_feature 2, 3, 6, 9, 35: n = A,T,C or G
gnncgnccnctacactactatagggcgaattgganctccccgcggtggcggccgaggtaccttggttttcaggttatctgacaaaggcagctttgattgggacatggaggcatgggcaggttctcctttctttggaaacacatccatgctgggatgcacagttcttttcctaaggattgtgtttactcctgactgcaacgtcttggccactgtttggagcagtttgggtctgaaggtcattaaggatctgcttgcatcttgtttcatgtcctccgtgacagactgcagaccatgttagaagagaaggaaggtttgtggatcaagagggttgacattaggtttggtgagatgagttgcttggcacagatcagcagaacaggaccctggtgataaggcattctgggctttgctaaccacttatcatcttccattatttctctttcttaaactaaagtaagaccccgaaagtgcactttttggaagtctgggttta

SEQ ID NO: 2293 - DNA, 494 bp, Homo sapiens
  misc_feature 2, 3, 10, 11, 15, 463, 474, 479: n = A,T,C or G
gnncgccgcnntacnactcctatagggcgaattggagctccccgcggtggcagcggccgcccgggcaggtacgcgggattgagagcaggtaaattttttaatggaactatgcaaagaccaatatttcaatattggacattttgatggtccttctatccccaatgctttatttttttcaactttgatgaaaagatttgatctagatgagatactcccatcagaatcccaaccaaaagggactatgaagaaagttcttgggattctgagagtctctgtgagactgtttcacagaaggatgtgtgtttacccaaggctacacatcaaaaagaaatagataaaataaatggaaaattagaagggtctcctgttaaagatggtcttctgaaggctaactgcggaatgaaagtttctattccaactaaagccttagaattgatgggacatgcaaactttcaaaggcagnagccctcccgnagaangcccatctgcccttc

SEQ ID NO: 2294 - DNA, 492 bp, Homo sapiens
  misc_feature 2, 3, 4, 5, 16, 21, 36, 64, 66, 80, 351, 402, 470: n = A,T,C or G
gnnnntctgacccatntgaanatccggcgaattgtntctccccgcggcggcggccgaggtactntntttttttttttttntttttttttcggaggatttttgaaatagaggactgggaatttgagcaaattttgaggaatcttaaattgctattaggacaccaatatgacgcagcaatcaatcattattttctaggactctggttaccaaagttatagacagcgagccaattctccattattttggcaaaagataatgcaaatttatgttactgtttgctagttgatttgattcactgcctaaaataaactgattccttctgttttaaaaaatccattttgaagccacacncaacaaaaatcattcagttagttgaatttgctttataattagactatgggngaagacaccagatattttaaaaagcaatccaaatgactgagtttagaaaataaaatgagattacagcncctcttgagagtgtctgaggag

SEQ ID NO: 2295 - DNA, 495 bp, Homo sapiens
  misc_feature 3, 4, 12: n = A,T,C or G
ggnnggccgcgnatcgactactatagggcgaattggagctccccgcggtggcggccgaggtaccattgtccagggagctctgaaaagcatcctatgtcgcaccccgggagagttttaccacaacactctgagcttcctcaaggtaagggcagctcctgccctccactttgggagtttgggagtcagagaatgccgcccgtggaattaggaataattggttctcctttctggagccatgttccaatattaggagacggcatcggtgtaagcatccacacacacgtttctcacttccggccattccctctgcccctggtgaaaagcttcaagtaatagagctttttctttttcactccttatgccagaacatcacacctaccgttcccactcttcaatgaggggtctatttttaatgactttggctttttcttttacttaaattttgatccttgatttctccttgcctctttcttgtaagtccaatgctgatctctg

SEQ ID NO: 2296 - DNA, 495 bp, Homo sapiens
  misc_feature 2, 3, 4, 6, 89, 102, 103: n = A,T,C or G
gnnngnttcgacgccaatcttggaaaatccggcgaattgttttctgacagcggcggcggccgaggtacatgttcttggcatcctttccnttaaagtaaacanntttaaagccacacagactttaacacattataccttaattccatcaacagtgtcctgagactgaggatagataaaatacttcaggtcaaagcagagcctgtggaattttaatttaaacaatagatgagaaaatgtcttttgttggaaaagagacattcaaaaaagatgttaaaatataccctgtttattatgaattatttgggaacgtaaacattaccttttatcttacagaccagactgacaaggccaccgagtatgtgccccacctgctgtgagccatcagcttgcacaggtacctgcccgggcggccgctctagaactagtggatcccccgggctgcaggaattcgatatcaagcttatccgataccgtcgacctcgagggggggcccgg

SEQ ID NO: 2297 - DNA, 490 bp, Homo sapiens
  misc_feature 2, 3, 4, 5, 6, 8, 21, 42, 106: n = A,T,C or G
gnnnnngnttcgaaacgactnctatagggcgaattggagctncccgcggtggcggccgcccgggcaggtacatacacgtaacgcttctgccttcccagctgctgtntggttagtggaactaacaatttccttgatggaaattgaataaggtaatccaaaaagaaggctcttttagatgaaaaaacatggatagattattaagcgccaagttttctcttcaacctactgctcaccagtgctccctcctcagctccaaggctgtggagggctcatgaagtcacaatgttctactgagaatttagctttttttttttttggagtgggtataccattttgtaattccacttgataatggcatctgattatttgatcatgacatcattatttgtatacaatgcagcaagaattttgtttttaatgtaggcttttaaatgggctttgatggaacttggttccatagaaggaatcccagataaggctttttaaaagc

SEQ ID NO: 2298 - DNA, 493 bp, Homo sapiens
  misc_feature 2, 3, 5, 8, 25, 42, 53, 94, 105, 106, 112, 150, 152, 160,168, 194, 289, 294, 298, 321, 328, 351, 356, 488, 491: n = A,T,C or G
gnnantgntttcgacccttttctantatcgggcgaattgttnctccccgcggnggcggccgaggtacttttttttttttttttttttttttttntggaggatttnnaaatanaggactgggaatttgagcaaattttgaggaatcttaantngctattangacaccantatgacgcagcaatcaatcattattntctaggactctggttaccaaagttatagacagcgagccaattctccattattttggcaaaagataatgcaaatttatgttactgtttgctagtcngattngatncactgcctaaaataaactgattncttctgntttaaaaaatccattttgaagtnacacncaacaaaaatcattcagttagttgaatttgctttataattagactatgggtgaagacaccagtatattttaaaaagcaatccaaatgactgagtttagaaaattaaatgagattacagcacctcttgagagngtntg

SEQ ID NO: 2299 - DNA, 462 bp, Homo sapiens
  misc_feature 2, 3, 4, 10, 21: n = A,T,C or G
gnnngtcgcnccttacgactnctatagggcgaattggagctccccgcggtggcggccgaggtacgcggggagactgcgagcggagaagcggagtttgcagcctcggaattggctagagcgccagagccgagtcagccataaagctacgcgctaggctcttggccctgacgtgaggcgcgcagagatggcgtaacgggaatagttttcaacgtctatttcgagcggccgcccgggcaggtacacagagctgaggatgaaacacacccagagtggacagagcacatctccactggtgatagattatacttgtcgagttggtcaaatggcctttgttttctcaagcctgatacctctgctattgatgacacctgtattctgtctgggaaatactagtgaatgtttccaaaacttcagtcagagccacaaggcgtatcttgatgcactcaccaccatcagccatgg

SEQ ID NO: 2300 - DNA, 470 bp, Homo sapiens
  misc_feature 2, 3, 4, 5, 7: n = A,T,C or G
gnnnngngggcgaaacactactatagggcgaattggagctccccgcggtggcggccgaggtacattccaaacactttttcatagaatggctgtaaacatgctccctatttctgcttgacatgttacatcacagtgctctaaaagctctgtcatgcgtattatactctcagcatcctggataatagagttcatctccagttcaaattctccaccaaccagctttatcttgtttcctgcaaaatcatggaggtttgggaagttcctttagacccattctcgtatggaggtttgttttcttcttttttctttccgcggagacctgcctcctactccaccatcacatggaacccaccactgcttctccgaagctcgctctccccgcgtacctgcccgggccggccgctctaagaactagtggatcccccgggctgcaggaattcgatatcaagcttatcgatacccgtccgacc

SEQ ID NO: 2301 - DNA, 471 bp, Homo sapiens
  misc_feature 4, 7, 452: n = A,T,C or G
gagngcnatacactactatagggcgaattggagctccccgcggtggcggccgaggtacacacaaagacaaacctgaacttaatttcaaggaaaacttaaacccatgcacaaataattggtgagccttcatttccctgacttcaagtttccatgtgaggactcatgctctctccactttcttcttgggaggagggaagatttacctaatgggtaaatttgggcaaagcacattgagtgtgcttgtttggctctgagtctctttgcaaacatgtgtctgcccacagtgacatgagtttgcgttgactgtcatgtctgcaggaagctgcctgctcctgtggccatgtcaagcaattctttctttcaactgcaactgtgtgtaagagcttagtctgagaagaaatgttcaagaagctcactgtggctgcacatctgagccatgtcttcccattaanttgtcatgagtcagcaata

SEQ ID NO: 2302 - DNA, 504 bp, Homo sapiens
  misc_feature 2, 3, 7, 11, 35, 46, 248, 249, 397, 458, 498: n = A,T,C or G
gnnattnaccnatttgaaatccggctaattggttntccccgcggtngcggccgaggtacacacaaagacaaacctgaacttaatttcaaggaaattttaaacccatgcacaaataattggtgagccttcatttccctgacttcaagtttccatgtgaggactcatgctctctccactttcttcttgggaggagggaagatttacctaatgggtaaattttgggcaaagcacattgagtgtgcttgttnnggctctgagtctcttttgcaaacatgtgtctgcccacagtgacatgagttttgcgttgactgtcatgtcttgcaggaagctgcctgctcctgtggccatgtcaagcaatttctttctttcaacctgcaactgtgtgtaagagctttangtctgagaagaaatgttcaagaaagctcactggggcttgcacattctgaaccatgtctttnccattaggttgtcatggagtcaaccaataaagcggggttntgtttg

SEQ ID NO: 2303 - DNA, 445 bp, Homo sapiens
  misc_feature 246, 279, 430: n = A,T,C or G
ggcgaattggagctccaccgcggtggcggccgaggtactttactcacccttcctctgacagaaaaggatgaagtcaaggacctggtagaggcaccactaagaaaggcatctgaaaggaccaaagagagtgaccagcaagcattttttgcaaggctgaggagctgacagcttccatgaaaggctggaccacccagtggtgaaaagcatcatctgggttaccttgtgctgccataaaacacaccacanacttggtgacttaaaccacagatatttatcttntcacaatcctggaggctggaagtctgcaatcacggtgccagcatggtcaggttctggtgagggcctctttccttctcactgtgtgctctttcttgtgcatggagagagagcatgaacaagccctctactgtcccttctttaaaaagggccnctaatccccaataat

SEQ ID NO: 2304 - DNA, 484 bp, Homo sapiens
tatcactactatagggcgaattggagctccccgcggtggcggccgggggccattgagactgccatggaagacttgaaaggtcacgtagctgagacttctggagagaccattcaaggcttctggctcttgacaaagatagaccactggaacaatgagaaggagagaattctactggtcacagacaagactctcttgatctgcaaatacgacttcatcatgctgagttgtgtgcagctgcagcggattcctctgagcgctgtctatcgcatctgcctgggcaagttcaccttccctgggatgtccctggacaagagacaaggagaaggccttaggatctactgggggagtccggaggagcagcctcttctgtcccgctggaacccatggtccacttgaagttccttatgctactttcactgagcatcctatgaaatacaccagtgagaaattccttgaaatttgcaagttgtctgggttcatgtct

SEQ ID NO: 2305 - DNA, 474 bp, Homo sapiens
  misc_feature 228, 474: n = A,T,C or G
ggcccgcgccgtaatcgactactatagggcgaattggagctccccgcggtggcggccgaggtaccctactggcctatgccgaaagcacaggaactgtgagggtgtttgatctcatgggaagtgaactctttgtcatttccccggcatctagttttataggtgacttaagctatgccattgctgggttgatatttttagaatataaagcaagtgcacagtggtctgcanaactcctggtcatcaattaccgaggagaacttagaagttaccttgtaagtgttggaacaaatcagagctaccaagaaagtcactgtttcagcttcagtagtcattatcctcatggaatcaacacagctgtttaccaccctggtccagacttttacttgttggtggatgtgaaactgctgaagtaggcatgtcaaaagcttctagctgtggcctttctgcctggagagttctttcaggatcaccgtn

SEQ ID NO: 2306 - DNA, 493 bp, Homo sapiens
  misc_feature 2, 3, 4, 7, 8: n = A,T,C or G
gnnnagnnggccgcgtatcgactactatagggcgaattggagctccccgcggtggcggccgaggtactttcacagcaacatttagactagtgtttgaccaacaactgggcaccacggtcaagccaagttggcatatagaattagccagcaaacttggtattcacaatctgtcattatagtcttatctataaacctaaggtttagagaaacgctggtcattctgaacaattccctgtgaatgcagagatcaaggagcctccccttaactgggtaggcagtgtgaaatacctgcagtgtgcttgaccttactgttcacccactggcagctgttcctacagcttggcttcagatatataatattacattggctaacttcaaagagcattgttttccaaggatagagatggtgatggtgtatattacttttaccagccccagacctgtaagaggttctcatctcttttgtttaagattttgttgttttttttaatgc

SEQ ID NO: 2307 - DNA, 510 bp, Homo sapiens
  misc_feature 2, 3, 4, 10, 240, 342, 449, 458, 459, 461, 463, 484, 494: n = A,T,C or G
gnnngtgccncccgtatacgactactatagggcgaattggagctccccgcggtggcggccgaggtacgcggggacacgtttcccgtcaagatggcggatactctcccttcggagtttgatgtgatcgtaatagggacgggtttgcctgaatccatcactgcagctgcatgttcaagaagtggccggagagttctgcatgttgattcaagaagctactatgggaaggaaactgggccagtnttagcttttcaggactattgtcctggctaaaggaataccaggaaaacagtgacattgtaagtgacagtccagtgtggcaagaccagatccttgaaaatgaanaagccattgctcttagcaggaaggacaaaactattcaacatgtggaagtattttgttatgccagtcaggatttgcatgaagatgtcgaagaagctggtgcgctgcantaaaaaaannantnaattaagtacctgcccgggcngccgctctanaactagtggatccccc

SEQ ID NO: 2308 - DNA, 512 bp, Homo sapiens
  misc_feature 2, 3, 4, 324, 327, 383, 433, 440, 492: n = A,T,C or G
gnnngtgccgcgccgtatacgactactatagggcgaattggagctccaccgcggtggcggccgcccgggcaggtacgcgggtgacccaaggaggaccattttaaacttctaagttttcaccgagattaacatgcatttgttgaaagacaaacctcttttaccctactcccccagctgcaaatgctttcagggttcacatcatgttggaacatttggttacagtgtttcctaaactttgcgggtaaaaattgttcaagtaggtaaaaatggagcacatacaaaaaaaaaaaaaaaaaaaaaaaaaaaaaagttcctcggccgctntanaactagtggatcccccgggctgcaggaattcgatatcaagcttatcgataccgtcnacctcgagggggggcccggtacccagcttttgttccctttagtgagggtnaattgcncgcttggcgtaatcatggtcatagctgtttcctgtgtgaaattgttatccgntcacaattccacacaacata

SEQ ID NO: 2309 - DNA, 530 bp, Homo sapiens
  misc_feature 28, 53, 157, 191, 193, 200, 254, 270, 308, 312, 329, 344,359, 363, 368, 375, 377, 379, 383, 384, 388, 392, 393, 396,397, 401, 402, 403, 404, 405, 413, 414, 420, 422, 425, 433,434, 435, 436, 438, 439, 442, 444, 457, 463, 465, 468: n = A,T,C or G
  misc_feature 484, 487, 492, 497, 499, 501, 503, 504, 512, 517, 519, 521,522, 523, 525, 529, 530: n = A,T,C or G
ggcgaattggagctccaccgcggtggcnggccgcccgggctggacccactcanaagccttcactgtcaacttcggggacaccgaagaggccaagaaacagatcaacgattacgtggagaagggtacattggacatcctggactgattctgtaattcncgtatcttttttctcccatgtaccctttatttgncnttagggntctgctttttgggaggatttttcttaacttgatctacctgaggctcaagacctnatctgttaaatgctgntaaaaggacctaccacctagcgttgctgtgaggtgttngtgnaataaaaatgtaaaaantgcttaccacaagtnaactttaataaatgngtangttgntggtttncncntttnncatntaannatnntggnnnnnctgacaannggcatntntcnctcatttnnnntnnatnanagggggttccctnggggcngntcntagaactaaggtgggnatnccccnggggntngnannggaatttnaagtntncnnncntttnn

SEQ ID NO: 2310 - DNA, 431 bp, Homo sapiens
  misc_feature 3: n = A,T,C or G
ctnctatagggcgaattggagctccccgcggtggcggccgaggtactttactcacccttcctctgacagaaaaggatgaagtcaaggacctggtagaggcaccactaagaaaggcatctgaaaggaccaaagagagtgaccagcaagcattttttgcaaggctgaggagctgacagcttccatgaaaggctggaccacccagtggtgaaaagcatcatctgggttaccttgtgctgccataaaacacaccacagacttggtgacttaaaccacagatatttatcttctcacaatcctggaggctggaagtctgcaatcacggtgccagcatggtcaggttctggtgagggcctctttccttctcactgtgtgctctttcttgtgcatggagagagagcatgaacaagccctctactgtccctcttagaagg

SEQ ID NO: 2311 - DNA, 474 bp, Homo sapiens
  misc_feature 194, 236, 452: n = A,T,C or G
ctatcactacttagggcgaattggagctccccgcggtggcggccgaggtacgcggggggagatgctgccacctaggttacttgtaggaccctatacggcaacctcctttgccaggaactatttataaacatcctgcaggaaaatgcagtgaagtagaagagacagggatatcccagaaggttatgcaaaacatnaagagaagatgagaggagtctatatgtcagaatacacatttnccaccttgcccaacagtagaaaaaacataagaagagaaaaacattaaaaaatgacaaggaagttaatggaagtcagcaatgtgatggtgtttggaggtggagccttcagaaggtaattaatgcccttgtaagaagaggccagagagcttgcgcaccttcttcctgccatgtgaggagccaagaagccggctgtctgcaacctgcaagaggaccctnactagaagttagccatactggc

SEQ ID NO: 2312 - DNA, 435 bp, Homo sapiens
  misc_feature 4, 267: n = A,T,C or G
actncttagggcgaattggagctccccgcggtggcggccgaggtacttccatgttagctgtgcatgtccaccacgctttgtctgtaactcgagtagaaaaagatgttgtgttttaattaatcattccttacaattcaagatgaactccacatacccgcgtacccactgaatgttgttactacatattgagagtcattttatgcatatgcattctacctttcctgctttatgagtatttttaagcttttagttcaaggttatattcanaaaatatttcccagcataatgatacatcgtagcctaagaaatattttctcaatgtaattcccttcccagctacccaaatgctacagagaaatgttttctacttggccactatcagggttcgtcatctattgtgttgactattaatggctttttgattgggtaaggatt

SEQ ID NO: 2313 - DNA, 415 bp, Homo sapiens
  misc_feature 5, 243: n = A,T,C or G
gagcncgcgtaataccgactcactatagggcgaattggagctccaccgcggtggcggccgaggtacttttttttttttttttttttttcctatccagagccctacttgatcaaaaactggttctttaatccattgcaaattatcaagtagcttttaataactaacacggctataaaccaccataactgttcttttttccatatcaatactattcacttactaaaaaaaaatctgagggtatanaatatgctgataactgtgctgggtattggcgacaccagggaacaaaacagacgaggcctctggctcttctaatggacagctgggtgcaactctctaaaaatactacttcatgatttgacaggatatttgccaaagtccttcactactctacacaactataacaacattttct

SEQ ID NO: 2314 - DNA, 767 bp, Homo sapiens
  misc_feature 4, 6, 7, 9, 11, 12, 17, 18, 19, 20, 24, 26, 27, 32, 34, 35,36, 38, 39, 40, 43, 45, 46, 47, 48, 49, 50, 52, 54, 58,59, 67, 68, 70, 74, 75, 79, 84, 88, 90, 92, 118, 119, 122,123, 124, 127, 132, 133, 403, 413, 431, 434, 436, 444, 502: n = A,T,C or G
  misc_feature 554, 570, 583, 597, 603, 610, 630, 682, 693, 711, 715, 747,763: n = A,T,C or G
tcantnncnanntttgnnnnattntnnattcntnnntnnntcntnnnnnntnantttnnaattatanntnattnntttnatttnttgngnangggggggggggggggggggggggtgnnagnnnagngtacnntacgcgtatacgactcactatagggcgaattggagctccaccgcggtggcgggctcatacagctcaaacaggaggaaaagcatctctgggagcaggcagcctcatgtgtctgattcgctgctcaattccaggcaaaactacaagaattactccatggagtcaaggacacactttcgaatccaggcagccacactccaagccaagtcttccctagaggaaccagcaagcagatccatggtctcatcagtgtcctttgtagcttttgtgcangccagattcncgggcctgggaagacagnagnancagctggnacagaagcctcctggaaaaccattttcaaaaatacccccttcccccctgccccttgcncctggcctttggggggtccacccgggcaacttcccaggttggggattggggnaccaaaccaattaagntggttattcccgntggccaaggaaaanccccgnagccttngggcaattttttcaacccangttggttaaggccccaaagggggcccctttttggccccaaagggggcccagnaagccaatggnttggggaaggcccccttnttgnccctggccccctaattcaaccaccaattacgnggggttaacccctttngggg

SEQ ID NO: 2315 - DNA, 538 bp, Homo sapiens
  misc_feature 436, 503, 518, 521: n = A,T,C or G
gcctatcactacttagggcgaattggagctccccgcggtggcggccgaggtactgcaccctccctacccccttaaaaacccactaggaaaggaagaaggggtggaaacccattaggagggagtgagcaggcagatttgccctgagagtctacacccctggcctgatgcacagagaacaaggatgtcctagtgtggcacaaaaatctaggggccacccaaaactgctctcatgttctaaaggtgactgtgtggggtttgaaccttggcgcccactggacagtggtgagcactcaccaccctgaggcctggcagcctgtctgtcactggagagccgttcaaacactgacacttgacattagccagatcacaaaagctttttcaggcccacgttatgtatctcttgggaaggcaaggacaaagggccttgctttgttcnggggaagccattgaaggtttgccagccatgccagttcaaagcccaagtatttcttggccctaaggtnaccttggccggggcnggncccgttttaaaaactta

SEQ ID NO: 2316 - DNA, 778 bp, Homo sapiens
  misc_feature 2, 4, 6, 10, 12, 14, 18, 19, 21, 27, 28, 29, 33, 35, 36,40, 41, 43, 45, 49, 53, 57, 58, 66, 70, 73, 83, 89, 90,100, 125, 351, 355, 396, 403, 430, 452, 461, 517, 529, 604,608, 611, 623, 631, 650, 684, 687, 719, 721, 731, 736, 760: n = A,T,C or G
  misc_feature 761: n = A,T,C or G
tnantnactntnantttnnanacattnnnactnannatcnntnantctnttanattnnaataaaantatntanagaaaaaaangggggnngggggggggngggggtgaataagagcaatatcctntacgactcactatagggcgaattggagctccaccgcggtggcggccgaggtacacgtctctgtccgggcctcggccagggtgccgagggccagcatggacaccaggaccagggcgcagatcaccttgttctccatggtggccattgcctcctctctgctccaaaggcgaccccgagtcagggatccccgcgtacctgcccggggcggcccgtctctaaaaactagntggnatcccccgggcctgcaaggaattcgatatcaaagctttatncgatacncgtctgaccttcgagggggggggcccngggtaacccagcctttttgttncccttttanttgaagggtttaaattggcgccgccttgggccgttaaattcattgggttcaataanccttgtttttcnctggtggttgaaaaaatttggtttaattcccggcttcaccaaattttcccaaccaaccaaaacaattacccgaangccncgnggggaagccaantaaaaaanttggtaaaaaagccccctngggggggttggccccttaaattggaagttggaangcntaaaccttcaaccaatttaaattttggcggtntnggcggccttncaacnttggcccccggccttttttccaannttccggggaaaaaacct

SEQ ID NO: 2317 - DNA, 501 bp, Homo sapiens
  misc_feature 2, 3, 4, 8, 14: n = A,T,C or G
gnnnatgnctcgcntatacgactcactatagggcgaattggagctccaccgcggtggcggccgaggtacattgtaggatgcttaccagatcctgcccactagaggccaatagcacctcatcatcatagcaccccttccctcagtgataataaaaaatgtctccagacattgtttaagttaataaatgtgcccagagcccaggcacagtggctcaggcctgtgattttagctctttgggagaccgaggtgggtggatcacttgaggccaggagttcctagaacgttcctctgtcaaaagacaaaattacaacaatttaaaatctaattggctgttattggccattctagaattggttgacatctcattctatgaaatacaatgagtgctcttcaataagctgagcagaggggggttagctttattggcagaaaagggctaaagaaaacagaaaaagaacaaaaagtgattggttgtttcagagttactttccttaaagaggg

SEQ ID NO: 2318 - DNA, 493 bp, Homo sapiens
  misc_feature 14, 435, 473, 491: n = A,T,C or G
gccgctaatcactnctatagggcgaattggagctccaccgcggtggcggccgcccgggcaggtacgcggggtggagacatgggatttctcatggaaagtgaaaataactcactcagaataatgttttttcaaactcttctgtctttccacagtatgttcttgttactgattgtcagaaagctggttttgagactgcagcttggactaaagtaagttttgtctagaattgtttctctattcagtatagacattttcatgctatgatttatttctaagcctaggggaaacaataaacaacatctggctatcttatttcaaatttgttatgtaaaaattgtggattgatctttattggagcaaatttgtaatccaaattctcttggtgatttatttgcttggcacctaatacacctctaagctaacaacagtcatctnatttcaaatgtaaagcctcattgtaaaaacaaaaagcntatacatacacaaatatnta

SEQ ID NO: 2319 - DNA, 493 bp, Homo sapiens
aagccgaatcactactatagggcgaattggagctccccgcggtggcggccgaggtaccatgcggtcagccaaatgtgtaaggaacttgttttgagaggagagaagaaaattctatagtaggcgagacaggcttctctctcctgctcctcctccctttctttttctctctctcctctttcttccctccttctctccctctttctctttctctcacacagttcctacatttctgcactgggggacaaaccaggcttctgatcaaaggcaatccgagacttgggttcaaaagctttgatgaagattggtacctgctatgcagatggggggagggaagaagagactagcctaggggcttttatatttctttaaagcatcagccattaatgggctaagtttaccactgggacccagagagctagtccccaaacacaagctcaaaatgtatgcattttccaattcatggttttcaaggacatgttcccccgcgtacctg

SEQ ID NO: 2320 - DNA, 470 bp, Homo sapiens
  misc_feature 7, 8, 15, 71, 99, 180, 185, 214, 268, 433, 437, 467: n = A,T,C or G
gggcccnnatcactncttagggcgaattggagctccccgcgggtgggcggccgcccggccgggaccttctntttttttttttttttttttttatgtatncatcactcaaattttattaaaggcagcacaatagcccgctcattttttgattcagaaataaacttgtaactaaaccatctntcttnaaatagtaccgcagactgtcttttaaagnagctcatctttatttgatgcaatctaaaaggcccaaactctgaaagaaaataanaaactattgttaactattattaacaaagtaatatatcaaataattcactcaaactcctacttaagaaacgtgtcatcaccaataagatagtaaaggctcttctaatattgctttgttgagacaattcatttcatcttatggcaggttgtaccagtttcacagacntganacaagtgggaagaaggaaaagccagggccncca

SEQ ID NO: 2321 - DNA, 454 bp, Homo sapiens
  misc_feature 10: n = A,T,C or G
taatcgactnctatagggcgaattggagctccccgcggtggcggccgaggtacgcgggggcttagacctgacgctgggaggagatgctgccacctaggttacttgtaggaccctatacggcaacctcctttgccaggaactatttataaacatcctgcaggaaaatgagtcaaggaagcttttcttttgagctatttacagcttttagcaattgagtaaagtatactcctgtgaacaaaatttggaacatatttgtttctctctaactgatttctccagaatttggaactagttaaccaggaaccctctcttggggtgtggatcgagacccctttctggtaacgagagcacagcttggttttatacattttaaggagacatgagacatcaatcaacgtatataagatgaacattttgatctgaaaaggcctctttaaatatacacttctctgta

SEQ ID NO: 2322 - DNA, 480 bp, Homo sapiens
  misc_feature 3, 208, 384, 385, 388, 410, 443, 451, 459, 472, 473, 475,477, 479: n = A,T,C or G
ctnatacactcctatagggcgaattggagctccccgcggtggcggccgaggtacgcgggggggcactttacttgttccagaactggagcaggattaaactggtcgagcttcttggaagaaattttattttgtttatcatctttggcaccatggaagaaatgcagaacaaagctgtggttttctttgtgttttatttgtggagtgccanttgaaaattttcaggtgggtagaaatgccaggatggtgtttggaatgctgctccctgtttgcagcagctctgttcttgagggagttgttatcttagccagagtctcatttggtttgggactaagattacatatgtggagaattctggttgcacctatgtgctctgcaaagttgganncanatttttttaaagccgccattgnatcataataccagactggattactagggagcanaagagganaaccaganaaagggggaaaanntncntnc

SEQ ID NO: 2323 - DNA, 409 bp, Homo sapiens
  misc_feature 101, 199, 315, 323, 334, 373, 388: n = A,T,C or G
gagcgcgcgtaatacgactcactatagggcgaattggagctccaccgcggtggcggccgaggtactttttttttttttttttttttttttttttacagggntgtctttccctctttgacaacccccattccagcttcagccctaacatgacaacatagctgcagcaatcttacgtaccttccatttcaaacattcttgnggaacttaattgtatactaaatcgtatgacgtgccaagcactgagctaacgggtttatataagaggcacagcataatggtaaaagcaactggggagtacaactgagtttgaattgngccattanacagccttcanacttgaagtgcaacaccggctcctccctgggtctcaagnggattgggtctctgnggattttaaacttgccagcct

SEQ ID NO: 2324 - DNA, 403 bp, Homo sapiens
  misc_feature 169, 202, 339, 369: n = A,T,C or G
gagcgcgcgtaatacgacctcactatagggcgaattggagctccaccgcggtggcggccgaggtacgcggggagacctgacgctgggaggagatgctgccacctaggttacttgtaggaccctatacggcaacctcctttgccaggaactatttataaacatcctgcangaaaatgagtctatatgtcagaatacacatttnccaccttgcccaacagtagaaaaacataagaagagaaaaacattaaaaaatgacaaggaagttaatggaagcaatgtgatggtgtttggaggtggagccttcataaggtaattaatgcccttgtaagaagaggccanagagcttgcgcaccttcttcctgccatgtnaggagccaagaagccggctgtctgcaacctgcaa

SEQ ID NO: 2325 - DNA, 410 bp, Homo sapiens
  misc_feature 237, 352: n = A,T,C or G
gagcgcgcgtaatacgactcactatagggccgaattggagctccaccgcggtggcggccgcccgggcaggtactgtctgtagtatcagctagagctgagggtagctgctctgtctggatagctaggcaggcacaaaatgggagaaggaaattattcagcagccttgaagcttcaaagactcagagaaaggaaactgaaactcagtgtgcccagcccacttgacagcatgccaacttntctcaacaaagggagcataagctgatccagcttttagacagtaaaattttatattaaaaaaattgaaagaatcaaggaattgaagtcagagggaagaaaacataacagctcactnacttttaaaaaatctttttatttaaggaaaatgcaaccaatttctgtatatggacata

SEQ ID NO: 2326 - DNA, 412 bp, Homo sapiens
gagcttcgcgtaataccgactcactatagggcgaattggagctccaccgcggtggcggccgaggtactattgacatttggggccaggtaattcttgggggcagtggggagatgctgccctgggcaccggaggatgtccagcaatatcgtctacctactagtagtcagcagcaccgcaccaagctgtgacaaccaaaaaggtcccagacattgtcaatgtcccctggaggacagaactggccctgttttacaggaagataaatgtcccctaatccttttgtgtaaaagggggaatgttttttacccttagaccggataagcaagaccagctgagacctactggtataaagcatactgcctgctcacatggtgagaactcaataaatgtttgtatcactacgtaatgagagatc

SEQ ID NO: 2327 - DNA, 411 bp, Homo sapiens
  misc_feature 5: n = A,T,C or G
gagcnccgcgtaataccgactcactatagggccgaattggagctccaccgcggtggcggccgaggtacttcctgtaattgacagccttgccttgttcctcatggcatcattcaaggtcatcttaaatgagagaggagggaaagaaagaaaaagaaatcatacgttatggttttcaaatgcacccagaggaaaggcagggttgtttttgaaaagtttacttctatctgaaagcttctagcaaatgaaagcaaacagtgcaaagctgaactacaaataataaagcacaattatggcaggaatctgtccacattcacccaagctactgtgccattaaagaggaaaatagacagttgagctgcaggttagtcaccaactgggaacatggaagaacgtcaacaatacatacaggat

SEQ ID NO: 2328 - DNA, 469 bp, Homo sapiens
gccctatcactacttagggcgaattggagctccccgcggtggcggccgcccggcaggtacgcacaagcagggcccagcttgggagacgctaggataactaagacctggtcagcgccctgaggagtcttgtctggataaagggagacacacactagcttggacttatgcgtgcagcggagctgtgtagagcaggagtgcgtggagagggcagcaatgaactttggctggagagccagagaaagcttcgtgagctggaacacggggtaaagtaggagctttccagggcggaggggacttctgaagtggaggaaactgcctgttcaggacatggaggtagggatcaaagttctgagtcatgtgggtgggcacagagcagaggatggctggggcggtctcagggataaggagaagtttggggaccagactgttttgtcaccgtatctgcatccctgcagcctgcacaccagag

SEQ ID NO: 2329 - DNA, 451 bp, Homo sapiens
  misc_feature 3, 166, 175, 183, 188, 204, 231, 271, 280, 314, 329, 349,369, 391, 394, 417, 425, 429, 440, 450, 451: n = A,T,C or G
ctnctatagggcgaattggagctccccgcggtggcggccgaggtactcaagtggccatgtggagctagtggccaccacacttgacaccacggatgcagaacttttccatcactgcagaaagctctgttgaacagtacttttttttttttttttttttttttttttnccgcattanatcactgngggtnttaaacaaatttcttnaaaagcgaactttgggtttttactttngcttcactctcagctgtaggcatctttcagctttatgcanaggactganaatgcaaagcattgactcaatcaggatccttttntcagacataattaanaaggctttgacaggttgaanattcagccccaggttcccgngtacctgcccgggcggccgctntanaactaggggatcccccgggctgnaggaattngatntcaagcttatngataccgtcnn

SEQ ID NO: 2330 - DNA, 829 bp, Homo sapiens
  misc_feature 1, 3, 4, 6, 10, 11, 13, 14, 15, 16, 20, 22, 23, 26, 29, 31,33, 36, 37, 39, 40, 46, 47, 49, 50, 51, 53, 55, 57, 65,68, 69, 70, 76, 78, 81, 87, 89, 90, 91, 92, 93, 94, 95,96, 98, 102, 107, 109, 110, 111, 114, 118, 119, 271, 321,352: n = A,T,C or G
  misc_feature 358, 380, 426, 517, 537, 561, 586, 591, 604, 619, 630, 635,640, 650, 652, 663, 681, 694, 702, 709, 710, 716, 737, 781,790, 817, 826: n = A,T,C or G
ntnntntctnncnnnnattntnnttnttntnantcnntnntttttnntnnntngnantttattanttnnnttattntnttnctctanannnnnnnntntttnttttntnnnttngggnnccctcatacgactcactatagggcgaattggagctccaccgcggtggcggccgcccgggcaggtactgcaataacaaaatacagcaataaaacaactggacactcctaggggacaccaaagataaagggcccattaatcaggtggaggccanagaaaccggaaggctattttaaagtgtttaatataaatcatgtaaagggnaaaaaaaaatccttcccccaaaaacaaattnaaagtncaaagccaaatttttccattantccttaatattggaaactttaatttttccattattccttaattatngaacctaaaaaaaaaaaatggaaaaaaaattgaacccctttttggccttgggccaattttaattttggccttaacccgcccggaaaataanttcccaattaaccctttttncccccccccttttggaattaattntttaaaaaggggaaccaattggttnggggnggaaggaaaaccnttttttaattaaaanaaccaaaaggngttanaaaangggttggttngnccacccaaggnaaaaggggccaacccttnggttttttttggngggcccancctttanngcccanaaaaaaaaagggggaaccaanggttttaaaattttttccaaccaattgggaaaattccaaccggntgggaaaanccttttttaaaattaaaaaccccccanttggaattnatt

SEQ ID NO: 2331 - DNA, 455 bp, Homo sapiens
  misc_feature 5: n = A,T,C or G
cactnctatagggcgaattggagctccccgcggtggcggccgcccgggcaggtacagggaggagtggcattgtccagtatagccaggccagtctgtggtgggctcaggctgtttctgctggcttggtcctgctgtcctggaccctagcatgtgtgcagtccccgcgtacctcggccgctctagaactagtggatccccccgggctgcaggaattcgatatcaagcttatcgataccgtcgacctcgagggggggcccggtacccagcttttgttccctttagtgagggttaattgcgcgcttggcgtaatcatggtcatagctgtttcctgtgtgaaattgttatccgctcacaattccacacaacatacgagccgggagcataaagtgtaaagcctggggtgcctaatgagtgagctaactcacattaattgcgttgcgctcactgcccgcttt

SEQ ID NO: 2332 - DNA, 448 bp, Homo sapiens
aatacgactactatagggcgaattggagctccaccgcggtggcggccgcccgggcaggtacagtagtggcaaccagccgggaaaatccataggatcatttcagaccgcattcaacacagatactcatgtagccccgacgtttcttgtgaagggaattgatgtattgcttgagggggtcgatctctggttctaaggtgttttggtttgtttccatcgtgactaccagaaaattatagaaggccagacgcagtggctcatgcctgtaatcccagccagtttttctaattaagttttaatctgtctcctccactaggccatgagccctaggaggagattgtctctagagggtatcccctgtgcctggcacatgcatgcaagttatgatttatgttgatgaatgaatgaatgaatgaatgaatgaatggtggatgggtcctctgaggctcta

SEQ ID NO: 2333 - DNA, 664 bp, Homo sapiens
  misc_feature 7, 9, 11, 13, 14, 15, 16, 17, 19, 21, 22, 30, 32, 35, 39,40, 43, 45, 47, 51, 52, 57, 60, 61, 62, 66, 72, 74, 76,78, 81, 85, 87, 88, 89, 95, 96, 98, 107, 108, 110, 111,112, 115, 303, 319, 327, 332, 339, 341, 343, 356, 363, 367,380: n = A,T,C or G
  misc_feature 384, 398, 401, 407, 416, 425, 441, 453, 462, 468, 473, 478,505, 528, 531, 545, 555, 586, 599, 626, 635, 655, 663: n = A,T,C or G
ttcttananantnnnnntntnnttttaaantnatnctcnnttntntnattnntgttnatnnnaaanaatttnantntnaantttngnnnaatatnntntattggtgnngnnnttnactatcatatagggcgaattggagctccaccgcggtggcggccgaggtacttttttttttttttttttttcgtcactacctccccgggtcgggagtgggtaatttgcgcgcctgctgccttccttggatgtggtagccgtttctcaggctccctctccggaatcgaaccctgattccccgtcacccgntggtcaccatgggtangcaccggnagacnaccccantncnaaaagttgtatangggcagnacgngtcgaaattgggntcgntctgcccgcccacnggngggggncagttgtcnaatacggcnccgccccgacagtacnctgcccccgggncgggccgtntctaanaaacntagtngggattccccccggggcctgccagggnaatttcgataatcaaagtctttnttntgaatacccggtcngaactctttnaaggggggggggggcccccggttacccccangccttttttggtntccccttttaagttggaaggggtttanattttgccnccgcctttggccgtaaatanaatggggnc

SEQ ID NO: 2334 - DNA, 1025 bp, Homo sapiens
  misc_feature 1, 4, 5, 6, 7, 9, 11, 12, 13, 14, 15, 16, 17, 19, 20, 21,24, 27, 29, 31, 32, 33, 34, 35, 37, 38, 39, 40, 42, 45,46, 47, 48, 49, 50, 51, 53, 55, 56, 59, 60, 61, 62, 63,64, 65, 67, 69, 70, 73, 75, 76, 79, 80, 81, 83, 85, 86,90, 91: n = A,T,C or G
  misc_feature 96, 97, 99, 100, 102, 103, 109, 110, 111, 112, 120, 122,123, 126, 127, 129, 130, 132, 133, 134, 135, 136, 137, 139,141, 149, 150, 162, 163, 199, 203, 205, 234, 238, 245, 246,259, 272, 308, 315, 317, 323, 326, 334, 342, 355, 362: n = A,T,C or G
  misc_feature 383, 385, 396, 399, 400, 405, 407, 415, 422, 438, 455, 463,467, 490, 492, 503, 504, 514, 520, 530, 570, 573, 587, 598,603, 610, 611, 614, 615, 644, 650, 656, 658, 663, 671, 674,675, 676, 681, 691, 692, 695, 696, 713, 731, 733, 743: n = A,T,C or G
  misc_feature 754, 756, 759, 762, 765, 769, 771, 778, 789, 790, 791, 792,797, 798, 808, 811, 819, 838, 853, 856, 857, 858, 863, 877,890, 910, 921, 926, 928, 941, 945, 946, 951, 966, 967, 976,991, 999, 1003, 1012, 1013, 1015, 1022, 1023: n = A,T,C or G
ncannnnangnnnnnnncnnngangancnannnnnannnnangannnnnnnancnncannnnnnnanannaancnncgnnnancnnaacnnaccgnncnncnnccaaannnncgagcaanannaannanncnnnnnncncncagccagnntggaaacccatnncggaaaaacccggcaggagccgaattcgggagcccncacncncgggggccgggcgctcggctgcggcgagncggnatcagcnncactcaaagggcntgttaataccggngtatccaccagaaaatcagcgggggatcaaccgcanggaaaangnaaccangtngagccaanaaagcgcncagccaaaagggncccaagngcaaacaccgctaaaaaaaangnggccccgccgnaanngcctngngccggacnaattttncccaattaaggggcgncccggcccccccccccngggaacgnaggncaattccaaccaaaaaaaaaaangncggaccggccnnccaaaagatnccacgnaagggggggnggccaggaaaaaacccccccggaaccaagggggaaccctnaantaaaaaaagggaantaacccccaanggggnccgggtnnctnnccccccccccctggggggaaaaagggccntccccncccatncnggagngggcccgnccnnnccttnccccctgggnnatnnccccggcaacccccccngtggggcccccggccctntntaaacccccngggggaaaatnanccnccnttngggntncccccgnccccccctctnnnnccatnnccccccgttnttnccgggggngggaaaaaggccccgggtngggggcccgggcccntcnnntcccntccaattaaagggnccttccaacccgnccctgggggaaaagggggcnaaaaacccccnccaangntacccccgggggncggnntaaanggggatcccggaacnnccggccatnccccaaaaagacccngggggggncctngggtaggtnngnccaaccnnca

SEQ ID NO: 2335 - DNA, 434 bp, Homo sapiens
attggagctccccgcggtggcggccgaggtgcgcggggagaacttgtgtgcttagacctgacgctgggaggagatgctgccacctaggttacttgtaggaccctatacggcaacctcccttgccaggaactatttataaacatcctgcaggaaaatgagtctatatgtcagaatacacatttcccaccttgcccaacagtagaaaaacataagaagagaaaaacattaaaaaatgacaaggaagttaatggaagtcagcaatgtgatggtgtttggaggtggagccttcagaaggtaattaatgcccttgtaagaagaggccagagagcttgcgcaccttcttcctgccatgtgaggagccaagaagccggctgtctgcaacctgcaagaggaccctcactagaagctagccatactggcatcctcatcttggc

SEQ ID NO: 2336 - DNA, 451 bp, Homo sapiens
  misc_feature 3, 266, 269, 271, 325, 347, 383, 398, 444: n = A,T,C or G
ctnctatagggcgaattggagctccccgcggtggcggccgaggtactttttttttttttttttttttttttttttattttggtttgtttaggagtacacgtccctagaagcacatagctccagcaacaaagctaatctgagagtaatacccaagatgcctcctaccttgcaaatttcaaggaatttctcactggtgtattttcataaggatgctcagtgaaagtagcataaggaacttcagtggaccatgggttccagcgggacanaananactgctcctccggactcccccagtagatcctaaggccttctccttggctcttgnccagggacatcccagggaaggngaacttgcccaggcagatgcgattgacagcgctcanaggaatccgctgcanctgcacacaactcagcatgatgaaagtcgtatttgcagatcaaganagtcttg

SEQ ID NO: 2337 - DNA, 447 bp, Homo sapiens
  misc_feature 3, 434: n = A,T,C or G
ctnctatagggcgaattggagctccccgcggtggcggccgaggtactccttgcccaaaatgtttaatgatttccagtttcattaactagtagatacattgaaaaatataaaattaaatattcccctataagtcaatatttgcataatactgctaacttgtttttttattaggtcattcatttcactttacaaatccatttcatacttgttattagatccctctctgggcgcattgttggaggtgtgtggtggttctttaccctgatcataatctcctcctacacggctaacttagctgccttcctgactgtagagaggatggtgtctcccatcgaaagtgctgaggatctttctaagcaaacagaaattgcttatggaacattagactctggctccactaaagagtttttcaggagatctaaaattgcagtgtntgataaaatgtgg

SEQ ID NO: 2338 - DNA, 483 bp, Homo sapiens
  misc_feature 363, 417: n = A,T,C or G
tggcttcatcttagggcgaattggagctccccgcggtggcggccgcccgggcaggtacttttttttttttttttttttttaggatactcaaaaaacatatatttgcatgtgccaggaaaaggtaaggaaagggagccttcatgtgccagcccctgtgctgagccctggagctgtagagatgagtgaggtggattttttgtctgtaaagagtttgccgatgggaccaagtctgtcatctctctttcctggcctgaccgaggacaagcacttcttagtaaccctgtgaataccgatgcatcccgtcagtcagcagctgtttgcggaacaccagctgcaggccaggcaccgtgctgcaaggcgtanatatgttgctgaacacgactcccttccagatgttcaggatttaacaggcaagtnaacagagggtccagagaaggcactcagcactgcctcatgacatcagggaggattgctcaaaggaag

SEQ ID NO: 2339 - DNA, 484 bp, Homo sapiens
  misc_feature 2, 5, 7, 431: n = A,T,C or G
gnggntnacatcttagggcgaattggagctccccgcggtggcggccgcccgggcaggtaccacacaccctccactactcatcaccagacagggaaccctggcttgggcccacagcacagaccctccatcctgggccgattacactaagtgattgctaactcacatgtctctgggatggagcacccaggagacaagcaaagtgttggagcagcaagtcaggtgatgtggagcccagagggctgggacagctatctctctagggtctacttgcccttgtgagacactttatcccagcactttaggagtgctgaggtcataccagccacatctcatgtgcaagattgcccaacagagatcaggtccaagagttcctgttttaagaaaggggacttgtttgataagggaagtctggccatgtttgtgtggagcanctgtgctgtgctgggggttcacttttgagagaagttctcctctgagacctgat

SEQ ID NO: 2340 - DNA, 489 bp, Homo sapiens
  misc_feature 4, 6, 9, 10: n = A,T,C or G
gggngnganncacactactatagggcgaattggagctccccgcggtggcggccgcccgggcaggtactttactcacccttcctctgacagaaaaggatgaagtcaagggcctggtagaggcaccactaagaaaggcatctgaaaggaccaaagagagtgaccagcaagcattttttgcaaggctgaggagctgacagcttccatgaaaggctggaccacccagtggtgaaaagcatcatctgggttaccttgtgctgccataaaacacaccacagacttggtgacttaaaccacagatatttatcttctcacaatcctggaggctggaagtctgcaatcacggtgccagcatggtcaggttctggtgagggcctctttccttctcactgtgtgctcctttcttgtgcatggagagaagagagcatgaacaagccctctactgtccctcttagaagggcactaatcccataataaggcatccaccctcct

SEQ ID NO: 2341 - DNA, 844 bp, Homo sapiens
  misc_feature 1, 559, 569, 615, 658, 668, 679, 694, 707, 723, 725, 732,733, 740, 753, 773, 777, 778, 781, 787, 795, 797, 801, 804,817, 833, 843: n = A,T,C or G
ngcgccgtatcgactactatagggcgaattggagctcccccgcggtggcggccgcccgggcaggtacgcggggagacctgacgctgggaggagatgctgccacctaggttacttgtaggaccctatacggcaacctcctttgccaggaactatttataaacatcctgcaggaaaatgcagtgaagtagaagagacagggatatcccagaaggttatgcaaaacatcaagagaagatgagaggagtctatatgtcagaatacacatttcccaccttgcccaacagtaaaaaaaaaaaaaaaaaaaaaagtacctcggccgctctagaactagtggatcccccgggctgcaggaattcgatatcaagcttatcgataccgtcgacctcgagggggggcccggtacccagcttttgttccctttagtgagggttaattgcgcgcttggcgtaatcatggtcatagctgtttcctgtgtgaaattgttatccgctcacaattcacacaacatacgagccgggagcataaagtgtaaagcctggggtgcctaatgagtgagctnactcacattnattgcgttgcgctcactggccgctttcaatcggggaaacctgtcgngcccactggcattaatgaatcgcccaccccccggggagaagcnggttgcgttnttggggcgctntttccgctttcttgnttaattgacttgntgggctcggccgttcngnttgcggnnagccggnattaactcacttnaaaggggggaataccggttnttcnnaanaatcangggatacncncggnaanaactttggagccnaaagggccaccaaaanggcccggaant

SEQ ID NO: 2342 - DNA, 498 bp, Homo sapiens
  misc_feature 114, 123, 132, 244, 245, 291, 293, 314, 371, 454, 495: n = A,T,C or G
ggcctatcactacttagggcgaattggagctccccgcggtggcggccgcccgggcaggtactttttttttttttttttttttggtagagacagggtttcaccatgttggccagnatggccttnatctcccancctcatgatctgcccaccttggcttcccaaattgctaggattacaggcgtgaaccaccgcgcctggcctatttttaattactttctgccattacttttagtggcaaaaattnngattatttttgcatcaacccaataaatttcaaaatgacaaaactgnanatccagcaccacccacactgncttattatatttctacaaaagagtgttttttcctggattagacaatgcccagtaatnaccaagacaactacatttgggtctggcttcagagacgacgactgtggagcatttgagacgtctgacaaacttgaggccattgntgcgccatgttttcccaaatgataaaggcagcacaagtgtncaa

SEQ ID NO: 2343 - DNA, 486 bp, Homo sapiens
  misc_feature 18, 70, 153, 229, 251, 274, 356, 363, 377, 395, 416, 418,427, 428, 430, 437, 446, 449, 452, 458, 481, 484: n = A,T,C or G
gaagttgaccatttaaantcggcgaattggtctccccgcggtggcggccgcccgggcaggtaccactcanaagccttcactgtcaacttcggtgacaccgaagaggccaagaaacagatcaacgattacgtggagaagggtacattggacatnctggactgattctgtaattctcgtatcttttttctcccattgttccctttatttggccttttggttctgctttttnggggagaattttctttaacttnatctaccttgaggctcagtcctnatctggtaaaaatgcttgataaaaaggaccttaccacctaaccgttgcttgtgaaggtgtcagttgaaaataaaatgttaanaatgccntagccacaagccgnaacttttaataaaatggntagttgtaggttgccacattnanaaggattcnnanaaatctngggaatttnttnccncttccnaggcttaaactgaacgttccccntcncc

SEQ ID NO: 2344 - DNA, 455 bp, Homo sapiens
  misc_feature 2, 3, 12, 231, 309, 370: n = A,T,C or G
gnngtcacgcancactacttagggcgaattggagctccccgcggtggcggccgcccgggcaggtactcttctcccctttcacttttctgtctccctagagcttctgctgctttctactgaattttgtttcttgcttgaagaagagggtagtgaaggaaaggaggaaggcaaaacagcaagagagagaagaggctgtttggaacattctggaacaggtttgaaacagctcangcagggagaatggaacgaaagcctgcaatgagaaaccagaatgctgctatcattttgttcctgacattcacacctcangtcttcactttggggagcgaaagccttttaagcagaaaataccagcaagtacctcggccgntctagaactagtgggatcccccgggcctggcagggaattccgatatcaaggctttatcgatacccgtcgaccttcgagggggggg

SEQ ID NO: 2345 - DNA, 468 bp, Homo sapiens
  misc_feature 6, 25, 51, 89, 93, 97, 98, 111, 113, 128, 130, 136, 147: n = A,T,C or G
ggcccnaacactacttaggggcaantggagctcaccgcggtggcggccgangtactgaccctagacataggcatgggctttgacttggnttgngggnnttatactgcggtncngccaggggttttgtntnagtctnaaccatgactntagtcttagttgtatcttccaccttgatcacttcccttgtcacagccatagcctcccctgtaggtcaactgtatgtgtcctggtcattgctccatcaccagctttggcctgggtcactgattctgttttcagttctgcctcagccactgcctcggcctgggttttaccattcactctagcagtggcaggaccactgattccatcttgcaggccagcctcagcctttcctctagcccttgcttctgtcccagagtcaaccatgttccaagtttaaacgtaaggacaagttatatacccccacccgtcttcaaacttgacttg

SEQ ID NO: 2346 - DNA, 434 bp, Homo sapiens
  misc_feature 203: n = A,T,C or G
tatagggcgaattggagctccaccgcggtggcggccgaggtaccctggactcatacctgaaagcagtgttcaaccttagcaaaatctccaaccagcgcatgaacaattttctacatcacaacgacctggttttcaaattcagctctcaaggccaaatcttttctaaatttaaccaagaacttcatcagtttcacagagaaagnaatccaggaccggaaggagtctcttaaggataagctaaaacaagatactactcagaaaagacgccaggattttctggacatacttttgagtgccaaaagtgaaaacaccaaagacttctctgaagcagatctccaagcttgaagtgaaaacgttcatgtttgcaggacatggacaccacaactactgctatctcctgggatctttttactgcttggcaaagtacctgcccg

SEQ ID NO: 2347 - DNA, 509 bp, Homo sapiens
  misc_feature 204, 225, 230, 247, 346, 388: n = A,T,C or G
ggagctccccgcggtggcggccgcccgggcaggtaccgcgggtaagctgtgtgtttttgcatttaagctttaataatggaaagcgcccaaaaccttttctttttcagaacaggaaaagctaagacttagtctcacccctcttctgactttttcaaaacagttttctaattccagagaagagcctgagctctgagaatcattctncttattttaattttccataanctttngtccccggaaaatgcantctggggggaaaagcatttttaaaatagtaaatcatctgagtctagtccagaattttggaatccaaggggcaaggcggatactttgtcataaacaggangcaataataccgtagataattgcagtcagtggaggaaaagtntggcgcttgctgtggctcttgactgcttcctgggattaagttactaagacccaaaatggttgcaaactggtcccattggctttttggcttttggagccaaagccaccccgttattttttta

SEQ ID NO: 2348 - DNA, 851 bp, Homo sapiens
  misc_feature 6, 7, 11, 13, 14, 15, 20, 25, 45, 49, 56, 58, 60, 61, 62,66, 71, 73, 80, 85, 88, 104, 108, 111, 114, 116, 117, 119,339, 345, 347, 354, 361, 362, 364, 373, 380, 382, 387, 412,415, 417, 421, 435, 436, 450, 460, 463, 468, 473, 482: n = A,T,C or G
  misc_feature 489, 494, 500, 504, 510, 573, 574, 582, 590, 605, 608, 611,619, 628, 662, 669, 678, 705, 716, 723, 725, 794, 845: n = A,T,C or G
ctctcnnattntnnnaattntgatnctatatttatctttttatcnattnttgtatntntnnnctanttttntnatttatngattnatntattattcaattttantagntgnggnanngntcatatagggcgaattggagctccaccgcggtggcggccgaggtacagacaggcttctctgctatcctccaggcagtgtaatagtcaaggaaaagggcaacagtattggatcattccttagacactaatcagctggggaaagagttcattggcaaaagtgtcctcccaagaatggtttacaccaagcagagaggacatgtcactgaatggggaaaagggnaccccngnttattcnccaggtnncnttgttaagncatttcnanttatngcaagggaaagaatggggctttttnggngncagntgggccttggaatnnaaaaaggccaagantttttgaagnatnacccncaggncttcccgtngaaaacnaaagnggttcnattnctttanttaaccaagggttttcctttcccttttccaccttggagaaaccaaaatggtaaaatttttcannggggggtntggaattnccaatttttctttcntgnaangggggggnctttggaantaaaggggtttggcctttttcccttccgggaatnttttttncaaccttancccccaatccaatttttaagccccttntgggggccttncctttcntnggttcctttccaaggaaagggggggttaaattccttccttaaaacgcaacctttaagggggggggcccntttggggggttaaattaaattaatttggtgtggggggttccaaaaaaaaanccgaat

SEQ ID NO: 2349 - DNA, 493 bp, Homo sapiens
  misc_feature 43, 211, 223, 227, 264, 341, 419, 433, 453, 465, 469: n = A,T,C or G
tagggcgaattggagctccccgcggtggcggccgcccgggcanggtacgcacaagcagggcccagcttgggagacgctaggataactaagacctggtcagcgccctgaggagtcttgtctggataaagggagacacacactagcttggacttatgcgtgcagcggagctgtgtagagcaggagtgcgtggagagggcagcaatgaactttngcttgagaagcnaganaaaagctttcgtgagctggaacacgggggtaaagtangagctttccagggcggaggggacttctgaagtggaggaaactgcctgttcaggacatggaggtagggatcaaagttntgagtcatgttgggtgggcacagagcagaggatggctgggggcggtctcagggataaggaagaagttttggggaccanactgttttgtcacncgtatctgcatccctgcagnctacacgccagnaagntgttaaggccgccagggaagaagc

SEQ ID NO: 2350 - DNA, 498 bp, Homo sapiens
  misc_feature 197, 220, 409, 413, 419, 473: n = A,T,C or G
ggcgaattggagctccccgcggtggcggccgcccgggcaggtacctatagcacaagctgatgatagctggcaactgaacatttggcttcaatgtcagagtaatagagtgtggcaaactgcagagctcatgctccgcctaaaaggggcagctgctgctcagctcctgccaattaccaccatgcaggaatttggcctantgtgctcagctctttctggtttntacccagaagcctagggaatctggggttttttatgtgaaatggccctaatttttaaatgttagcatccactctgaaaaaaaaacaaaacaccgtgtggggccaaataaaacatttgctggccaaatgcagcctgatttgctctggttttcaacccctggcacaagaattttggttcatttctctcttgntggnaccttnggccgctctagaactagtgggatccccccgggcctgccaggggaatttcgaatnattcaaagcttttaatccgaattac

SEQ ID NO: 2351 - DNA, 556 bp, Homo sapiens
  misc_feature 7, 200, 203, 205, 208, 224, 226, 249, 302, 348, 374, 392,451, 490, 495, 498, 516: n = A,T,C or G
tagggcnaattggagctccccgcggtggcggccgaggtactttttttttttttttttcccttgtgactggagagaagtgtcacattttgctcactctcaaccttcctcgcccacccccttcccggagaacctgtgcggtgtgtagagggtgctgtgagccacctccagcctcgggtggctgcttaagtaactttcaactnctntnttnttaacacttttaaaantnttttcgggaagccgcagggggcnaaggcagctgcttttcctggcctctttggctgggcttcttttttgaagatttntgcaacccggggggcaccagcccaccttttataacaaacccgcttntgcctggtggataaaagtggataagnattttatttcccaaaaancaagaaagaagggaaagccattatttgccactggaaagaaaaaatattccttatcaacnttaaagccttgggataaccagtaaaaaaaccagggaccncaagnaangatgaaaaggagcccagnacattgggaaaaaattttcttggggattcccttcaaaatt

SEQ ID NO: 2352 - DNA, 861 bp, Homo sapiens
  misc_feature 7, 16, 21, 24, 25, 29, 34, 37, 48, 49, 52, 54, 59, 61, 65,67, 71, 72, 73, 77, 81, 86, 87, 91, 101, 102, 116, 330,334, 339, 345, 346, 354, 355, 373, 384, 430, 433, 440, 447,458, 478, 490, 491, 492, 533, 538, 570, 577, 584, 594, 606: n = A,T,C or G
  misc_feature 608, 614, 615, 622, 630, 633, 652, 653, 655, 664, 674, 690,729, 739, 742, 752, 762, 764, 774, 778, 790, 817, 826, 829,860, 861: n = A,T,C or G
tccattnatctaactntcatntanncttntccanctntactagctttnnttntnttttntnattntnattnnngttntatnttcanntttnttttatttannttggtacatataanggcgaatggactccaccgcggtggcggccgggggatgcgaggctcggagcacccttgcccggctgtgattgctgccaggcactgttcatctcagcttttctgtccctttgctcccggcaagcgcttcttgctgaaagttcatatctggagcctgatgtcttaacgaataaaggtcccatgctccacccgagggacaagttctttcggtgccccngcanatttnttttgnncaaaaagnnccaaaagggtcccctttngggccccggcntcttaagaaaccttaagtggggaattccccccccggggggcttgcnaanggaaaantttctgnatatattccanaggcctttaattccggaatnaaccccggttcnnnaacccttctcgaaggggggggggggggccccccggggttanccccncaagggcttttttttgggtattcccccttttnttaaagnttggganggggggtttntaaaattttggncnggcccnnccttttnggggcccngtnaaaaattccaaattggggnntncaaattaanggccattggnttttttccccttgggngggttgggaaaaaaattttgggttttaattcccccgacnttccacccanaantttcctccanccaaccaaancnatttacccgnaagncccccggggggnagggccaaattaaaaaaaggttgggtnaaaaaaggnccnccttggggggggggttgggcccctttaaaann

SEQ ID NO: 2353 - DNA, 448 bp, Homo sapiens
  misc_feature 2, 3, 5, 6, 37, 213: n = A,T,C or G
gnnanncctaacactacttagggcgaattggagctcnccgcggtggcggccgaggtacatggaggccgacaatttggtgaccagtgatggcaggccactcagctttgagtagccatgtccgcaacaggccctgcggcacatctcagctccctgggtgcagaattctgacatcatggccttcatgcccgtgctcagtgcgtggagcttgtgaanaacatggaggggggttgggcggtgttagggggcctccaccatagggaccaaccctgtgcaccacttactgagcatctactcatgcccagctcagctctgaggtcccgcgtaccggcccgggcggccgctctagaactagtggatcccccgggctgcaggaattcgatatcaagcttatcgataccgtcgacctcgagggggggcccggtacccagcttttgttccctttagtgga

SEQ ID NO: 2354 - DNA, 915 bp, Homo sapiens
  misc_feature 9, 24, 34, 50, 69, 71, 94, 103, 142, 333, 349, 373, 380,437, 450, 462, 490, 518, 546, 562, 583, 608, 631, 646, 702,822, 871, 876, 904: n = A,T,C or G
ggggcttcngataccacttttatngggggacganttgggggaaggctccnttcgcgggtggggcgggcncncccggggcaggggttaccttttnaaaactcangggccatctcccaactttttcaaaaatggaactttttanaaggtttggaggcttaggcccttaatttttaaaaaaaactaaaaaaggtttccaaaaaaatccaggtggggtggaccatggaagggaacttaatttaattttaaaaaggtggctttaaaagccccttggggttttttaaggaaagttttctaaaaggaaagaaccctaaagtggggaaaattttggcttanttaattggaaaaaaangccatggaaaaaaggaatttaaangaaaaanccctggggcctaaaaaaggggttccaaggggtggcccccaagcctttccgaaagggnaaaaaaaagtttngggggccctttntttaaaggggggaacccgggggggaaangccattttaaaaaaggggccacccaagnaaaaaccttttttaaccaattttttttnggggggggggggttcnaatttttttttgggttttggnaaggttaagggggttggaaaaaggnttggaaaggggggggaatttttnggggggggccttttngggaaattaaattttttttggggggcccttggggccccccccccaatttcctttcnttaaatttgggttgggggggggaaaaccccttccaaaaaaaaggggtttttaaaaaaaaaaaaaaacccccccccaacccttgggttaaaggggggttaaaaaaaaattttttaaagggnaaaaagggggggggcccaagggccctttcctttttggggaaaaaaattnccttnggggggggccccccaagggtttcccttnaatttaatttg

SEQ ID NO: 2355 - DNA, 454 bp, Homo sapiens
  misc_feature 1: n = A,T,C or G
ntgcctatcactacttagggcgaattggagctccccgcggtggcggccgggggccattgagactgccatggaagacttgaaaggtcacgtagctgagacttctggagagaccattcaaggcttctggctcttgacaaagatagaccactggaacaatgagaaggagagaattctactggtcacagacaagactctcttgatctgcaaaatacgacttcatcatgctgagttgtgtgcagctgcaacggattcctctgagcgctgtctatcgcatctgcctgggcaagttcaccttccctgggatgtccctggacaagagacaaggagaaggccttaggatctactggggggagtccggagggagcagtctcttctgtcccgctggaacccatggtccctgaagttccttatgctactttcactgagcatcctatgaaatacaccagtgagaaat

SEQ ID NO: 2356 - DNA, 458 bp, Homo sapiens
  misc_feature 2, 3, 4, 8, 9, 12, 15, 23, 159, 396: n = A,T,C or G
gnnnatgnnccncgnatcgactnctatagggcgaattggagctccccgcggtggcggccgaggtacttttttttttttttttttttttggtctctgagcatttgcaatttgaactgtggttccctggccacagttgtcttcaggagttgaaatggccanaaagggaaatatctacatggtttatccttgagatggcaaagacatctgcaccaatgcaccaccccaccgggagcatgcattgctagcaggtgaaattcacatggaaaagtaggattgtgggttagggtaagagatacagcaatggttacaagtgcagaatttggaggcaagtagtccttgattagaatcccaatactagcatttgctagctgcataatcttgggcatgtcactcaancttctctctgaaccaccctctctttacctttaaatgggagttgattggtacctgcccgggcg

SEQ ID NO: 2357 - DNA, 477 bp, Homo sapiens
  misc_feature 2, 3: n = A,T,C or G
gnnggtcccgaatcgctactatagggcgaattggagctccccgcggtggcggccgaggtaccccatcagcgttgcacccatctccatagttgtagtttccacacacttatacaactcaaatgttcactttactgtgcagtccattccctctgttttgtgatttttaggaaatcttcataatttacggtctacaaaactattattttgttttcaaggaagtcgtgttatatatttctgactgtcttttctcttatttctagaattcaagccaggaagaagcagcaatctgtcttctggattaaaactgaagatcaacctactttcaacttactaagaaaggggatcatggacattgaagcatatcttgaaagaattggctataagaagtctaggaacaaattggacttggaaacattaactgacattcttcaacaccagatccgagctgttccctttgagaaccttaacatccattgt

SEQ ID NO: 2358 - DNA, 467 bp, Homo sapiens
  misc_feature 3, 25, 34, 466: n = A,T,C or G
ctnctatagggctgaattggagctncaccgcggnggcggccgaggtaccccatcagcgttgcacccatctccatagttgtagtttccacacacttatacaactcaaatgttcactttactgtgcagtccattccctctgttttgtgatttttaggaaatcttcataatttacggtctacaaaactattattttgttttcaaggaagtcgtgttatatatttctgactgtcttttctcttatttctagaattcaagccaggaagaagcagcaatctgtcttctggattaaaactgaagatcaacctacttttcaacttactaagaaaggggatcatggacattgaagcatatcttgaaagaattggctataagaagtctaggaacaaattggacttggaaacattaactgacattcttcaacaccagatccgagctgttccctttgagaaccttaacatccatttgng

SEQ ID NO: 2359 - DNA, 491 bp, Homo sapiens
  misc_feature 2, 9, 10: n = A,T,C or G
gnaaggggnnccctatacgactactatagggcgaattggagctccccgcggtggccggccgcccgggcaggtaccattgcatgcaggcgtgagtgatcacagcacgtcccaggaacttcagtcatggttttatctgtattccacttaccatggctgtgcaaataactactgccaaaacacactagtgtaaaacaaccatccagtttcttcatggatattataggtcaagaatttggactgggtgcaggggagatagtttgtccctgctccatgacctctgggccttggcaggagagcgtgaaggctggggcaaatcacctgaaggctcactcccttgtgtgcctggcagttgatgctggctgtcagctgaaggcctcggttccctcacatgagcctctctgtgcggtgtctccaaaggctagctcgtgcttccccactgcatggtgactgggtgcaaggacaggcattcaagggaaaaagagccagaggaa

SEQ ID NO: 2360 - DNA, 481 bp, Homo sapiens
  misc_feature 3: n = A,T,C or G
agngccctatcatacttagggcgaattggagctccccgcggtggcggccgcccgggcaggtacagtagtggcaaccagccgggaaaatccataggatcatttcagaccgcattcaacacagatactcatgtagccccgacgtttcttgtgaagggaattgatgtattgcttgagggggtcgatctctggttctagggtgttttgtttgtttccatcgtgactaccagaaaattatagaaggccagacgcagtggctcatgcctgtaatcccagccagtttttctaaagttttaatctgtctcctccactaggccatgggccctaggaggagattgtctctagagggtatcccctgtgcctggcacatgcatgcaagttatgatttatgttgatgaatgaatgaatgaatgaatgaatgaatgaatggtggatgggtcctctgaggctctagaaataggggtgagaggccagccaggtgtaa

SEQ ID NO: 2361 - DNA, 480 bp, Homo sapiens
  misc_feature 1, 287: n = A,T,C or G
ngtccctaacactacttagggcgaattggagctccccgcggtggcggccgcccgggcaggtactttttttttttttttttacagcaataaaaacgttttaatacaggaaattattttgctgtacaatataggcagacagtttgccttcagaaatccagaaatgcagcttttgagggaggtcagcatcattggtctcagctaccattttcctgcaggatgtttataaatagttcctggcaaaggaggttgccgtatagggtcctacaagtaacctaggtggcagcatntcctcccagcgtcaggtctaagcacacaagttcttccttccatctacccccgcgtacctcggccgctctagaactagtggatcccccgggctgcaggaattcgatatcaagcttatcgataccgtcgacctcgagggggggcccggtacccagcttttgttccctttagtgagggttaattgcgcgcttggcg

SEQ ID NO: 2362 - DNA, 487 bp, Homo sapiens
  misc_feature 2, 3, 40, 102: n = A,T,C or G
gnngtgccttatcactacttagggcgaattggagctcctncgcggtggcggccgcccgggcaggtacgccgggggaggaagtgcagactgacatgggagagnatggcaggcaaacttagcctgtaagggtggaggtgctggagagacacttcctgcaggaagtggcctgtaggctgatacttgaagaatggttaggagttaggcaattggggtgggagggaggaaatgaagctgagacaaagaatagcaagggccaaaacctagaaacaagagactgtaagctatagcaaaggaagtggggtaatgcatgttttaggtcctgtgtggggtgtttgtgaatacacatgccggggtgtggagcgtgatgagagacaaagctgagaagtgtggtggaaaaggaagagagagctgaggcagacgatgtaagatctgctgttacttcttgctgtgtgaccttgggtgaagtgaagtggggtgtgcctgggaa

SEQ ID NO: 2363 - DNA, 486 bp, Homo sapiens
  misc_feature 2, 3, 8, 29, 73, 74, 88, 89: n = A,T,C or G
gnngtgcntttaacactatttagggcganttggagctcttcgcggtggcggccgcccgggcaggtacttggcnnctttcctgagccanncacttcattattttcttgtcctgtgagtcctaatagatatatttagaaacacttctatgaaatatggaatccaggcttaaccagctgtttgaaatcacaacccacaaccactttgctgggtgtgtgctcacacacacacacacactgacacatgcttgctatacatacatacacacagtttccatctttttttttttttttttttgagacagagtcttgctctttcgcccaggctggagtgcacttggctcactgcaacctctgcctcccaggttcaagcaattctcctgcctcagcctcccaagtagctgggactacaggcacgtgccactacacccggctaatttttgtatttttagtagagactgagttttgccgtgttggccaggctgatctt

SEQ ID NO: 2364 - DNA, 443 bp, Homo sapiens
ctatagggcgaattggagctccccgcggtggcggccggtatgacctcagcattcctaaagtgctgggataaagtgtctcacaagggcaagtggaccctagagagacagccatccctgacctctgggctccacatcacctgacttgctgctccaccactttgcttgtttcctgggtgctccatcccagagacaagtgagttagcaatcacttagtgtaatcagcccaggatggagggtctgtgctgtgggcccaagccagggttccctgtctggtgatgagtagtggagggtgtgtggtacctcggccgctctagaactagtggatcccccgggctgcaggaattcgatatcaagcttatcgataccgtcgacctcgagggggggcccggtacccagcttttgttccctttagtgagggttaattgccgcgcttggccgtaatc

SEQ ID NO: 2365 - DNA, 750 bp, Homo sapiens
  misc_feature 4, 9, 13, 14, 17, 23, 29, 31, 36, 39, 42, 45, 50, 51, 55,57, 61, 63, 67, 74, 81, 88, 94, 103, 109, 114, 119, 120,122, 145, 146, 278, 340, 376, 396, 398, 404, 408, 430, 431,432, 435, 439, 440, 448, 450, 458, 476, 504, 555, 559, 560: n = A,T,C or G
  misc_feature 571, 597, 598, 601, 603, 625, 630, 631, 664, 677, 678, 679,684, 696, 704, 722, 728, 730, 736, 744, 747: n = A,T,C or G
tttncgttntccnncanattttnactttngntaacnttntanctnttttnnattntntctncntatnttatttntcatgcncttaatntttttncttttttcnattttnagtangtttnntntctctcctatagggcgaattggnnctccaccgcggtggcggccgcccgggcaggtacgcggggaggcattgaggcagccagcgcaggggcttctgctgagggggcaggcggagcttgaggaaaccgcagataagtttttttctctttgaaagatantagattaatacaactacttaaaaaatatagtcaagtagtgtttactaagaatattgctttanccgtttaagtttttttaaacgttaaatttttaaatnaggctttaagaatttttttnancgaagnaaanattatggaaggaactttagtannnaanttanncattgaangnaaatgggnaaaaaagaattaaaaaangggttttcttaaaaaaccattgtaccgngaagggtttgtagaattgaaaagcctttctttcattggggaggttcatatnaaanntgaatattacnacatacacattataggttttcccttnnggncncgcctttcttaagaaaacctangtttnnggaattcccccccccggggggccttgtccaagnggaaaatttttcnnnattantttcaataagtnctttttanttccggtaattaaccccngttgcngnaccccnttccgggnagnggg

SEQ ID NO: 2366 - DNA, 448 bp, Homo sapiens
  misc_feature 349, 399: n = A,T,C or G
ggcgaattggagctccccgcggtggcggccgaggtactcttgtttaaccatcatgaggtgatcccatcaccttcacagccccagcctctgctccagtccctccccagcgaaaagggccgcccatgccatcctgctgctggtgatttgctttgtggtcatggactcagtggacatcattattttattaaccgtgtggtaggtttttaactcagttatcctggatatccaaaggtttgtggtccatctttaggcttccgtttgttctttggtacctgcccgggcggccgctctagaactagtggatcccccgggctgcaggaattcgatatcaagcttatcgataccgtcnacctcgagggggggcccggtacccagcttttgttccctttagtgagggtnaaattgcgccgcttgggccgtaatcatggtcataagctgtttcctgtgt

SEQ ID NO: 2367 - DNA, 406 bp, Homo sapiens
  misc_feature 406: n = A,T,C or G
cgcgtaatacgactcactatagggcgaattggagctccaccgcggtggcggcactgctgtgggctgaagggaggaagatggtgtctgcaaaccaggaagcagccttgccagacacaggattggccacaaccttgaccccagacttccagcctccagaactgaaggactgagttcattttcagcgtgtctggcttttccatttctgtggcctgggaaggaatttccctgcacaggctctcttgcctgccaccatgtaagacctgcctctgctcctccttcaccttccgccatgattgtgaggccaccccagccatgtggaactctcctactgcactgagaagcacgtgttctccatttccctgggggagaccattgtattgggcagtttggaacaaaacaccatggn

SEQ ID NO: 2368 - DNA, 638 bp, Homo sapiens
cgtatacgactcactatagggcgaattggagctccccgcggtggcggccgcccgggcaggtaccctctctgttcccctccctccacccttcccctccttttctgtttttaagataaggtgttgatttggaattcagcaactgcaagtccatttgaaagaagtcagttttgttagaggcctggatagagcaatatgttgtaaccaaatcacacgtgaacattctgtggctgaacataagaaattgtgcattattaacgttgtgcttcaaggtggaatgctgaaagcacttggaaagtagttgccagagaagagctcactgaaaacattattagctttatatatccacttgtagaatctctgtgcagtgatacatccctccctttcatcttgatcataaatataagacttaaaggaggcagagtgaacgtgcttaggaagcccactgagagctctcagaaaggcgcttaatacctttcttagtaagttgaaagtaggttgatcttcagttttaatccagaagacagattgctgcttcttcctggcttgaattcaggttatttcagccggcaaccaggaactagactgaatgcaatcctcccacatccaaggtccccgcgtacctcgggccgctctagaac

SEQ ID NO: 2369 - DNA, 663 bp, Homo sapiens
  misc_feature 5, 89, 250, 415, 472, 500, 526, 539, 543, 544, 554, 557,558, 560, 562, 567, 568, 569, 570, 579, 581, 582, 583, 584,586, 587, 588, 589, 593, 594, 597, 598, 599, 602, 604, 605,606, 607, 608, 610, 611, 612, 613, 614, 615, 616, 617: n = A,T,C or G
  misc_feature 618, 619, 620, 622, 623, 624, 628, 629, 630, 631, 632, 633,634, 636, 637, 638, 639, 640, 641, 642, 643, 644, 646, 648,649, 650, 651, 653, 654, 655, 656, 659, 660, 661, 662: n = A,T,C or G
gagcnccccgtaatacgactcactatagggcgaattggagctccaccgcggtggcggccgcccgggcaggtacgcgggggggggaaaanccaaaaacaacaacaaaaaaactctcttacagaattttccttaacattaaaaaaaacttgtcgtatttttcaaaggcacatttgatactcagaattgctaaaagtatatttaaagacatctagccttccatatgtaaaaaatattttagataaagacaggnacaggactcagaataatatattgggtgattcactgtatcctccacttttacatttaaagaaattcaaaatacgtgattaaatttttttttttttaatggatgggttggttctcgcttaaccacttgggtgctagtggtcttgaactgtgatacagtgtagacagnatttgtaaccttgcacagcctctgggggtaactgtcaaactgtcagatttaacttanactaatagaatatattgctggacagtgngtgtatatgtttatatattgagggcngaaggggaaaggntctnnttagactaanggnntngntgctnnnnaaacttatngnnnntnnnngagnnttnnnaanannnnntnnnnnnnnnnngnnnagannnnnnntnnnnnnnnncnannnncnnnnttnnnnc

SEQ ID NO: 2370 - DNA, 697 bp, Homo sapiens
  misc_feature 78, 94, 421, 516, 544, 553, 557, 588, 600, 607, 628, 646,652, 668, 679, 682, 687: n = A,T,C or G
cgtatacgactcactatagggcgaattggagctccaccgcggtggcggccgcccgggcaggtacaggatgggaaggcngggctatggatcccancctttctagggctgggtagtgggaacctcccaaaattggagttcgggttaggaaatcctcacatgcagtttgggagaggctcaggaggaggaacctgagccatgtcctctgttctgcagtgaaaagaagattaaatatgaccagtgcttgatcccaaacgccctgctggagctggccctgcttgcttatggagcaagacagaaaccaagaggccatcaaacttttggaatctgccaagtaaggcttgggtaaccctcagtctgtccttttgctccctctgaactcagctcaaggagctggctggggacagagttgcccagagagcantgagttggagttgctagcaaaggccagtcttggcagtctagagggtggaccttgtgtccctcgaatccagctctcccctgtcataggaagacttntttcttaatgtataaatgccccagtttngactcccanaagncaggaagtaagttcccaaaggttcacatcanaaaccaactgcntggctgnggtgaagaccattgcctcctngctttccaggtagggggnctattnccctaaaaccaccccnttcaagcttangancccangaagaccaag

SEQ ID NO: 2371 - DNA, 675 bp, Homo sapiens
  misc_feature 639, 654: n = A,T,C or G
cgcgtaatacgactcactatagggcgaattggagctccccgcggtggcggccgaggtacagggccctgagatggaaacatgcctgatgggttcaagaattaggtcattggccagtgtggttgaaaggaatgatgggtggggaacgtagtaggaaatgcggctacaaaggaaaagagccagaaactaaaggctcctgaaggcaattgctaggattaagactggagagccattggaggcttctactcagaagattgtcatggtgtggcttaggtttttaaaagaatttctcagcatgttagttggcttgggcttccataacaaaatgctacatactgggtggcttgaacaacagacatttattttctcatagttctggaagctggaagtccaagatgagtatgccaatatggtcagaatctggtgagggctttcttcctggcttgcagacagccactttctccctgtgtcctcatagggtggagagaaaacaacatctttgctgtgtcttctcataaggatcttatcagatcagggccctccccttgtgacctcattaaatctgagttacttctataaagtccctatctcacattaggggttagggttttagcatatgaatttagtagggagacaatccantccattgcattgtanctgatttggaaataaagattg

SEQ ID NO: 2372 - DNA, 652 bp, Homo sapiens
  misc_feature 81, 82, 243, 491, 561, 571, 642: n = A,T,C or G
cgcgtatacgactcactatagggcgaattggagctccccgcggtggcggccgaggtacttttttttttttttttttttttnnggaacaaacacaaaaaagttttatttaaaaaaagagtttgacatttaaaagtttgaaataatattaaagtgacaccctgtttccttggaaacacaatgcagaaccacaaactctgagacttattatagcgaaagtattgccattcagttcaatctaatggnatgaggttagctttggaggccaaaagaaactagtttctaattcttattcttctccccactagacttgtggcctaggtaattttgtaatctttctgagtctgttttctcatcaggagcaggataattcctaagtaatagatcatatgtagaagtgaatatgatctcatggcaatggacatcaaccatagttaattattaagaatatatttacattgagctatcctttatctactttaaaattgcagacnaacaacaattgacaaagaatagataaaatgttctaacataaacattcttccattctttctaggaagaagncacacatacngtaaaaaataattagagaggacccagttcatatcgaacaaccttccccaaccctgaaacaggtctgctttntacatcagaa

SEQ ID NO: 2373 - DNA, 676 bp, Homo sapiens
  misc_feature 5, 664: n = A,T,C or G
gagcnccgcgtaatacgactcactatagggcgaattggagctccaccgcggtggcggccgaggtactgtgttgaccactttttgaggctacttaggacctgagcagaactgaaatgcatttggctccatgggagaaccacaagcagctccaaattaaactcctttagagacacaacacaagtataaacaagcctgagcacttcttggaccaaaagtcacattacaagctctcagaggcacatgcaattttatttgcttcttacaatttaaactctgaaagtttaaatccttaaaaaagttttctattgtagctcattttttttaacatgctactaaaatataaagagactttattgtgcctaagaaacttgcctgtcacgatctttatccaccagatgataccttgccctaaatgctacaagccgggcataatatgcaggggctggaatagagacggagcgagtgcacctcacataggtgtgacacagctggtaagtcagtagctggagttcatctgcagtgaagcagttgtcatcccacaagacctggtaatgtgagggacggctggttcctgaggagagagttttatgattaatgtttttttttttttgttcgttttttggttttggtttttttttttttttgagatggagtctcactctgncacctaggctgg

SEQ ID NO: 2374 - DNA, 673 bp, Homo sapiens
  misc_feature 68, 72, 164, 190, 191, 287, 313, 326, 334, 354, 355, 356,389, 530: n = A,T,C or G
gagcgcgcgtaatacgactcactatagggcgaattggagctccaccgcggtggcggccgaggtacttngttntttttttttttttttttggaacaaacacaaaaaagttttatttaaaaaaagagtttgacatttaaaagtttgaaataactattaaagtgacnccctgtttccttggaaacacaatgcnnaaccacaaactctgagacttattatagcgaaagtattgccattcagttcaatctaatggtatgaggttagctttggaggccaaaagaaactagttnctaattcttattcttctccccactanacttggggcctangtaatttngtaatctttctgagtctgtnnnctcatcaggagcaggataattcctaagtaatanatcatatgtagaagtgaatatgatctcatggcaatggacatcaaccatagttaattattaagaatatatttacattgagctatcctttatctactttaaaattgcagacaaacaacaattgacaaagaatagataaaatgntctaacataaacattcttccattctttctaggaagaagtcacacatacagtaaaaataattagagaggacccagttcatatcgaacaaccttccccaaaccctgaaacaggtctgctttctaacatcagaaatgaaagcagtc

SEQ ID NO: 2375 - DNA, 668 bp, Homo sapiens
  misc_feature 5: n = A,T,C or G
gagcnccgcgtaatacgactcactatagggcgaattggagctccaccgcggtggcggccgcccgggcaggtactttactcacccttcctctgacagaaaaggatgaagtcaagggcctggtagaggcaccactaagaaaggcatctgaaaggaccaaagagagtgaccagcaagcattttttgcaaggctgaggagctgacagcttccatgaaaggctggaccacccagtggtgaaaagcatcatctgggttaccttgtgctgccataaaacacaccacagacttggtgacttaaaccacagatatttatcttctcacaatcctggaggccggaagtctgcaatcacggtgccagcatggtcaggttctggtgagggcctctttccttctcactgtgtgctctttcttgtgcatggagagagagagcatgaacaagccctctactgtccctcttagaagggcactaatcccataataaggcatccaccctcctgacctcggctaaccctagttaagtacctcggccgctctagaactagtggatcccccgggctgcaggaattcgatatcaagcttatcgataccgtcgacctcgagggggggcccggtacccagcttttgttccctttagtgagggttaattgcgcgcttggcgtaatcatggtcat

SEQ ID NO: 2376 - DNA, 670 bp, Homo sapiens
gtatacgactcactatagggcgaattggagctccccgcggtggcggccgaggtacccttccaccatagctgtaatcttcaaaaacaggaacacagtgacagagactgttaaaggaacttcttcactgaaggtaagaagaataacacaaatttgaaaagggcctctatcagatatagggaaacttctaatgacctggattgaataccagacacagaaatgtatccctgtcagcacgctgagtatcatggccaaagtataaagtttgtgatgttgaaaaaaaaggctggatctgactatgatgtcagatgttaaatttactgctagctctgggtggtttaaacaattcagaaccattattcattacataatgtgaaagtgagtgctgagtctgtgagtgctaatgttaaggcagctggagaatttagaaaccctagataagctaattgtggaggaaatttacttgccaaagcaaatcttcaatgtgtatgaacgctccctattctggaaatggatgctgaaaaagatattcatccataaggaggccaagtcaatgtcaggtctcaagccttttaagaacaggataaaagtcttgcttgggggcaatatttcaggctacaaattcaaaccctttgtgatctggcactggacaaaccctggggccttcaagcat

SEQ ID NO: 2377 - DNA, 679 bp, Homo sapiens
gagcgcgcgtaataccgactcactatagggcgaattggagctccaccgcggtggcggccgcccgggcaggtacacaagaaagttcagagatgagacctctggttgtattccacctttgggacatgggggatgtctttagttcaaagtcacaaataaatgcaggttctacaattcagaggcttcatatccctgctggagtattacatgtttattcaggatggaccacttttcttagcaacagtttctaaacctttgccaggtctgggaagtctggcaggagagatttctaagaaccaatcattcctgcacacacttcttgaagataatatacattattccctagttatctcttcctaggtttttgtaggctcatttcaatattacaacaatctttattggaaaaccccaagtattttgtcttgaaaaatcagcaatccaggtattaaaaatagcatggaatgcccaattttactttgataattacatggtagtcagtttccgctcctggctaaagccttggattttcttctgggcagttcctaaaggcacaggtggcatggaagaaatcattccattttcatctcctccccttatttgattggtgtctggttaccaaaagagtcatcaggcccttggattaccttcttgaactgatcttctagatcgcaagtctaggttt

SEQ ID NO: 2378 - DNA, 669 bp, Homo sapiens
  misc_feature 5: n = A,T,C or G
gagcnccgcgtaataccgactcactatagggcgaattggagctccaccgcggtggcggccgaggtacgcggggggcctgattatatgtggcaactgcatgtagagaaatctaattgccataccttcctttttctaatttcttttaacaaaactgctttttctctccctttggcactaattggtaacattgcttccttccatcatagccctgaattatcagatctctctacccagcaatggttctattaacaacctcaatcttaaaacacagccaaataattaactcaaatttatttttttcttctcccctaccccttccttttacagccaaagaacctgaaattggaaacttaaatgtttctgacataactcccgagagcttcaatctctcctggatggctaccgatgggatcttcgagacctttaccattgaaattattgattccaataggttgctggagactgtggaatataatatctctggtgctgaacgaactgcccatatctcagggctaccccctagtacctgcccgggcggccgctctagaactagtggatcccccgggctgcaggaattcgatatcaagcttatcgataccgtcgacctcgagggggggcccggtacccagcttttgttccctttagtgagggttaattgcgcgcttggcg

SEQ ID NO: 2379 - DNA, 677 bp, Homo sapiens
  misc_feature 5: n = A,T,C or G
gagcnccgcgtaatacgacctcactatagggcgaattggagctccaccgcggtggcggccgcccgggcaggtacatagaattatttcttcaagtataattcaaaataatatggacattatcatgttctgcattacaataatgggatgtcatcaccattgctagaatactggcatgattcttctgagcagaagttgaaactgtaaatttaaaccttttaattatcaccttacctgaaagaggttagttaagatattcacacagtatgtattatattaaccatatcacacttaagttattaaattcagactatttgtaacttattgttatagggcctgccgtatggcttaggatatttgagtaatcatatatttaaagtaaaaactttgggctgggcacagtggctcacacctgtaatcccagcacttggggaagctgaggtgggcagatcagttgaggtcaggagttctagaccagcctggtcaacatggcgaaaccccatctctactaaaaatacaaaaattagctgggcgtggtggcacacacctgtaatcccagttacttgggaggctgaggcacaagaatcgcttgaacccgggaggcggaggttgcagttagccaagatcgccctgctgcactccagcctgggcaacagagggagactctgtctccaaaaaca

SEQ ID NO: 2380 - DNA, 671 bp, Homo sapiens
  misc_feature 5, 395, 588, 667: n = A,T,C or G
gagcnccgcgtaatacgactcactatagggcgaattggagctccaccgcggtggcagcggccgcccgggcaggtacaggatgggaaggctttgctatggatcccagcctttctagggctgggtagtgggaacctcccaaaattggagttcgggttaggaaatcctcacatgcagtttgggagaggctcaggaggaggaacctgagccatgtcctctgttctgcagtgaaaagaagattaaatatgaccactacttgatcccaaacgccctgctggagctggccctgctgcttatggagcaagacagaaacgaagaggccatcaaacttttggaatctgccaagtaaggcttgggtaacctcagtctgtcctttgctccctctgaactcagctcangagctggctggggacagagttgcccagagagcagtgagtggagttgctagcaaggccagtctggcagtctagagggtggacctgtgtccctcggaatccagctctcgcctgtcataggaagacttctttcttaatgtataaatgcgcagttagactcccagaggcaggaagtaagttcccaaggtcacatcanaagccaactgcatggctgtgtgaagacccatgcctcctgccttccagggtaggggtctattccctaaaaccaccccttnaagc

SEQ ID NO: 2381 - DNA, 656 bp, Homo sapiens
cgtaataccgactcactatagggcgaattggagctccaccgcggtggcggccgcccgggcaggtacatcagagaaatggccctggtaagctgagcctgcttccagagtgaccacagtgaggcaaattcaaacacgctccatttcattcagtgggctggtggtcacatattttagccatgaaaggaacaagaattcactcaacttctaactcaaaatttcttcttagttttctcactgctaccctgcaagtagtgcaagaagaatcaaagagggatggctattagtcacataactcttaacactaaaaagaacctcttgttatcttgtgtggttcgtcaccctcttcacttcacaaatgagacttgaagacaagaaatgtcaggtgacttgcccacagacacactggtcaagacgcaaagccaaggctggaactggggcccatcctgaggaaatgacactgctgctgctgcctacagctcccctccccaactctcaggagctggtgtgccttgcctatagctggccttagagaagctgctcccagatcctgcctccaccattccttgctgttccttgcttctgactcctaagaagacttgggttttagagctagggaagcaatgaagagcaccacagcagttgctgcacatcatcag

SEQ ID NO: 2382 - DNA, 658 bp, Homo sapiens
  misc_feature 634, 656, 658: n = A,T,C or G
gagcgcgcgtaataccgactcactatagggcgaattggagctccaccgcggtggcagcggccgcccgggcaggtactttttttttttttgtaatagtgcgtgtttatattcaggagtgcttaatccaagaacctgtgatttctgctcttgttttacctcctatgaacgaaaaattgttgtccttacggttttttctgctttctttgaaatgttccttacagaataactacatgaatgtaatcacatgcatttaaaatagtctagagaatatagtgtgaaactataatggtatttttttagatgaggtttctggtggtatattactaaaattttaaactccttgatcttatgctgttaaccaagaagatggggatttgtgttactttagacactgctgggtgccatggtaaattgggatgttattgtaaattgtagctctcacagctgcgtattgcttacaaactcggaaggatagtctcatatcagtaaacatttttatgaacgtagttgaacttttttgtaaattaatgtgctggaaagaataccaaaagggccctaaaaaagtctaaaaggattaaaatttacttatgtaattattggtattttaaaatatttggtagtcacttaaaatgcntaatgacagacaatagggtggnan

SEQ ID NO: 2383 - DNA, 626 bp, Homo sapiens
  misc_feature 626: n = A,T,C or G
actactatagggcgaattggagctccccgcggtggcggccgaggtacgcgggggtagatggaaggaagaacttgtgtgcttagacctgacgctgggaggagatgctgccacctaggttacttgtaggaccctatacggcaacctcctttgccaggaactatttataaacatcctgcaggaaaatgagtctatatgtcagaatacacatttcccaccttgcccaacagtagaaaaacataagaagagaaaaacattaaaaaatgacaaggaagttaatggaagcaatgtgatggtgtttggaggtggagccttcagaaggtaattaatgcccttgtaagaagaggccagagagcttgcgcaccttcttcctgccatgtgaggagccaagaagccggctgtctgcaacctgcaagaggaccctcactagaagctagccatactggcatcctcatcttggctttccaacttccagaactgtgagaagtatatgtttgtggtttagtcaatggtctatggtaatttttttatagcagtcccagccaagacagtgcctcatttactacataccatttatattattatataggctcctttcagaaacccatgttcaaataagagataagatn

SEQ ID NO: 2384 - DNA, 644 bp, Homo sapiens
gtatacgactcactatagggcgaattggagctccaccgcggtggcggccgaggtacgcggggtccttccaccatgtgaggacacagcaagaaggggctgactctgaaccaggaagctgtgctgtgctcaccagacactttgatcttggacttctcagcctccagaactatggggttctgctcttgtcacccagactggagtgaagtggcacaatctcggctcactgcaacctccgcctcccgggttcaagcgattcccctgcctcagcctccagagtagctggactgcaggcgcacgccaccactcctggctaatttttgtatttttagtagagacggggtttcaccatgttggccaagatgttcttgatcttctcaccttgtgatccgcccacctcaacctcccaaagtgctgagagactaagacacctttctagacagagaggaggccgatggcagacattctcagataggtttgtagctattgacctggctgcatcaaaggagatgaaatcccttagaaattgacagcttctatgaaatttacaatcaagaaggcataagaacaactgctgcagcttcagaactatgcagaaaataaaatgtcaacagctgggagaaaaaattctaagtgagcaacagagc

SEQ ID NO: 2385 - DNA, 590 bp, Homo sapiens
  misc_feature 4, 559, 562, 581: n = A,T,C or G
gtanacgactactatagggcgaattggagctccccgcggtggcggccgcccgggcaggtacttttttttttttttttttttactattagaatatttgctctatgcgtttcgacatttcgttctgctcactgttacacgtcctaacacctagaagaatgcctaccacatggtaggcattcagtaaatatttctgaataaatgaataagcaaaagaactttggagccacagacaaaccctcaaaaacaggaaacttggaaaatgcaaaaacacataaaccccgactacaagtgcatggtctttggctgaccataacctacaactgactgtaatgaggaaagcacgcccttttttttttttttgagacggagtttcgcttttgctatccaggctggagtgcaatggtgcaatctcggctcgctgaaacctctgtctcctgggtaaaagcaattctcctgcctcagcctcctgaatagctaggaccacaggcatgagccaccacacccggctaattttggatttttagtagagacggggtttctccatgttggtcaggctggnctngaactcccaaactcaggcnatccacctg

SEQ ID NO: 2386 - DNA, 667 bp, Homo sapiens
cgtatacgactcactatagggcgaattggagctccaccgcggtggcggccgcccgggcaggtacatgaatgtgcagagtgtgactcagtttccaagctcactcatgtggctcttggcagaagacataagttctttgtgacatgggcctctctgtaggacagcttacagtgtgacacctggcttttttcagagtaactgagcaaaaagccagagaggcagagcccccaagattgaagccacggactttttttgagacagaattttgctcttatagcccaggcttgagtgcagtggcgtggtctcagctcactgcaacctccacctcctgggtgcaagcaattctcctgcctcagcctcccgagtagctgccacagactttttatgacctaatcttggatgtacctcggccgctctagaactagtggatcccccgggctgcaggaattcgatatcaagcttatcgataccgtcgacctcgagggggggcccggtacccagcttttgttccctttagtgagggttaattgcgcgcttggcgtaatcatggtcatagctgtttcctgtgtgaaattgttatccgctcacaattccacacaacatacgagccgggagcataaagtgtaaagcctggggtgcctaatgagtgagctaactcacattaattgcg

SEQ ID NO: 2387 - DNA, 650 bp, Homo sapiens
  misc_feature 588, 636: n = A,T,C or G
cgtaatacgactcactatagggcgaattggagctccaccgcggtggcggccgaggtacgcggggtccttccaccatgtgaggacacagcaagaaggggctgactctgaaccaggaagctgtgctgtgctcaccagacactttgatcttggacttctcagcctctagaactatggggttctgctcttgtcacccagactggagtgaagtggcacaatctcggctcactgcaacctccgcctcccgggttcaagcgattcccctgcctcagcctccagagtagctggactgcaggcgcacgccaccactcctggctaatttttgtatttttagtagagacggggtttcaccatgttggccaagatgttcttgatcttctcaccttgtgatccgcccacctcaacctcccaaagtgctgagagactaagacacctttctagacagagaggaggccgatggcagacattctcagataggtttgtagctattgacctggcttgcatcaaaggagatgaaatcccttagaaatttgacagcttctatgaaaatttacaatcaagaaggcataagaacaactgctgcagcttcanaactattgcaaaaaaataaaatgtcaacagctgggagaaaaaattctnagtgagccacagag

SEQ ID NO: 2388 - DNA, 653 bp, Homo sapiens
cgtaatacgactcactatagggcgaattggagctccaccgcggtggcggccgaggtacgcgggggcgttcgtagatggaaggaagaacttgtgtgcttagacctgacgctgggaggagatgctgccacctaggttacttgtaggaccctatacggcaacctcctttgccaggaactatttataaacatcctgcaggaaaatgagtctatatgtcagaatacacatttcccaccttgcccaacagtagaaaaacataagaagagaaaaacattaaaaaatgacaaggaagttaatggaagtcagcaatgtgatggtgtttggaggtggagccttcagaaggtaattaatgcccttgtaagaagaggccagagagcttgcgcaccttcttcctgccatgtgaggagccaagaagccggctgtctgcaacctgcaagaggaccctcactagaagctagccatactggcatcctcatcttggctttccaacttccagaactgtgagaagtatatgtttgtggtttagtcaatggtctatggtaatttttttatagcagtcccagccaagacagtgcctcatttactacataccatttatattattatataggctcctttcagaaacccatgttcaaataagagataagatactgaaa

SEQ ID NO: 2389 - DNA, 648 bp, Homo sapiens
  misc_feature 523, 560, 582, 584, 590, 612, 628, 639, 643: n = A,T,C or G
cgtatacgactcactatagggcgaattggagctccaccgcggtggcggccgcccgggcaggtacaagctggcatacccattgggatgggaggactctgggctttcagagcttcttcaaatggtctttgtatggcagactataagtaactcaataaaattctgtcttctcctccacatgggtgctgtatttcacaaccttccctacaattagttaagtgtggccatacaactgatcatgaccagtggaactgagatgggagaattgccttggccccttcatgggactcctcacaaagggggtggctcatttactcagccaccatgcactcaaaccccttacaggaaggagagaatgcaggtgagctggggtgagcgctgttgggctccggccccatggcagcatctaggggtattacagtgttcctttagctttgccatccatggatggctaagtgttaaccaactcagtggagagtcagggtgacaggctttttataccccgccctcttggtacctcggccgntctagaactagtggatcccccgggctgcaggaattcnatatcaagcttatcgataccgncnacctcnaggggggggcccggtaccccancttttgttccctttantgaggggtaantgcncgctt

SEQ ID NO: 2390 - DNA, 660 bp, Homo sapiens
  misc_feature 4, 441, 525, 559, 570, 571, 582, 604, 646: n = A,T,C or G
gtancgactcctatagggcgaattggagctccccgcggtggcggccgaggtacaactgaagcaaagaggaaagcagacccatggctcaggacacatgggagtcccaccagcttgaaaaaaatttcacagagctggcatttccatcagtgcagacacggctctgaaaacagtaattgctgccttatgggcatgatacgcccatttctactctgacctcctcccaggagaaactcttctgcaaatgaccacagtacctgcccgggcggccgctctagaactagtggatcccccgggctgcaggaattcgatatcaagcttatcgataccgtcgacctcgagggggggcccggtacccagcttttgttccctttagtgagggttaattgcgcgcttggcgtaatcatggtcatagctgtttcctgtgtgaaattggttattccnctcacaattccacacaacatacgaagccgggagcataaagtgtaaagcctggggtggcctaaatgagtgagctaactcacattnattggcgttgcgctcactgcccgctttccagtcngggaaacctgnncgtgccagctngcattaatgaattcggccaacncgcggggagaggcggtttgcgtattgggcgctcttccgcttnctcgctactggctc

SEQ ID NO: 2391 - DNA, 643 bp, Homo sapiens
  misc_feature 2, 12, 204, 611: n = A,T,C or G
tnctatagggcnaattggagctccaccgcggtggcggccgcccgggcaggtaccaaagaacaaacggaagcctaaagatggaccacaaacctttggatatccaggataactgagttaaaaacctaccacacggttaataaaataataatgtccactgagtccatgaccacaaagcaaatcaccagcagcaggatggcatgggcnggcccttttcgctggggagggactggagcagaggctggggctgtgaaggtgatgggatcacctctgatggttaaacaagagtacctcggccgctctagaactagtggatcccccgggctgcaggaattcgatatcaagcttatcgataccgtcgacctcgagggggggcccggtacccagcttttgttccctttagtgagggttaattgcgcgcttggcgtaatcatggtcatagctgtttcctgtgtgaaattgttatccgctcacaattccacacaacatacgagccgggagcataaagtgtaaagcctggggtgcctaatgagtgagctaactcacattaatttgcgttgcgctcactgcccgctttccagtcgggaaacctgtcgtgccagctgcatttaatngaatcggccaacgcgcggggagaaggcggttt

SEQ ID NO: 2392 - DNA, 679 bp, Homo sapiens
  misc_feature 5: n = A,T,C or G
gagcnccccgtaatacgactcactatagggcgaattggagctccaccgcggtggcggccgaggtaccaaccgatgacgggaatacttcagctgcaataggtccccaacttcatctatctcctttaaagcagtatcaagtatttctttggtatgagctgctgacaggcaaaacctggctctggactcaataattggggtggcaggaaatccaaccacaacgacaccgatgttccgcttcagcatctcccgtccaaaggtgccaattttggcaggcatgtagagcatcaaaggcactactggagagtcttcatttccatagacccgcgtacctgcccgggcggccgctcgacctgggtctgcagtaaggagcattgctattggacacatagctgccaagacagtatccaagaattgtccacgtggtccctgggactgccctccactgggacacttagtctgaggtttgttccttggttgagtagttactctgtggacatggacatagtgcattatttcaggggttcctgaaatgtctgtgtgtggtcagaaggaggcttagccccagaaaggaaacacctctgcttcctgcctaactaaacaggcagtgatggtctcttctccatctggagaagcttggggttgagtagagatccagaaggtcttctttatccttctttct

SEQ ID NO: 2393 - DNA, 666 bp, Homo sapiens
  misc_feature 5, 27, 530, 591, 606, 616, 631, 636, 638, 639, 640, 665: n = A,T,C or G
gagcnccgcgtaatacgactcactatnagggcgaattggagctccaccgcggtggcggccgcccgggcaggtacgcagggagcccctcatgggagccggactccctgagactcaagaaaatgcacccgtcctgcgttcctcctgcctggggtgacccataaggaacaccccccccttctcaacaaccacagaagataaatgccaaggggaccaccaacatgggcatggggctgtgatgccaatcttaagggaaaacacaagtaaaattggctccaggactgagctgggggcagctgctctttctgtccatgactttgaggcgggatctcgagcgtctgtctgacgggccttctgtctgctgtcctctcgcaggtttcagacattgaatccaggattgcagccctgagggccgcagggctcacggtgaagccctcgggaaagccccggaggaagtcaaacctcccgatatttctccctcgagtggctgggaaacttggcaagagaccagaggacccaaatgcagacccttnaagtgaggccaaggcaatggctgtgcccctatcttctgagaagaaagttcagtaattcccntgaaaaggtcaaggnaaagatgatngattcttttgatcgnaaatnannngacctcggcccgttctagaactagng

SEQ ID NO: 2394 - DNA, 666 bp, Homo sapiens
  misc_feature 257, 327, 370, 469, 578, 607, 639, 651, 652, 659: n = A,T,C or G
cgtaataccgactcactatagggcgaattggagctccaccgcggtggcggccgcccgggcaggtacgcgggggctttctcttactgatagtaggatatttctgctttagttattgtcaccttaaatatattttcaatgttgaaatcctcacagcatgtttgatgaaatctagttttcaaattttcttaggtatatttcttgtcacgttggcatgataacaaatgcaataacccaaaagaccccaaaagctagtgtantcccttttgcaatccaagcatgaggattcatcttcatgttgacagtgcgtgaatgttcggtaggctttgncaagcttgcatacaataaattatatatgtcccttttcttttangggtctcctgttaaagatggtcttctgaagggctaactgcggaatgaaagtttctattccaacctaaagccttaagaattgatggacatgcaaactttnaaagcaggagcctcccgagaaagccatctgccttcgagcctgccattgaaatgcaaagtctgttccaaataaagccttggaaattgaagaatgaacaaacattgagagnagatgagatactcccatcagaatccaacnaaagggactatgaagaaaggtcttgggattcngagagtctctgnnggactgnttcacag

SEQ ID NO: 2395 - DNA, 667 bp, Homo sapiens
  misc_feature 469, 534, 546, 562, 569, 570, 571, 577, 578, 580, 583, 588,594, 595, 605, 607, 611, 613, 618, 619, 620, 621, 623, 625,628, 634, 635, 640, 641, 642, 643, 644, 645, 647, 648, 649,650, 651, 661, 663, 664: n = A,T,C or G
gagcgcgcgtaataccgactcactatagggcgaattggagctccaccgcggtggcggccgcccgggcaggtacacacaaagacaaacctgaacttaatttcaaggaaaacttaaacccatgcacaaataattggtgagccttcatttccctgacttcaagtttccatgtgaggactcatgctctctccactttcttcttgggaggagggaagatttacctaatgggtaaatttgggcaaagcacattgagtgtgcttgtttggctctgagtctctttgcaaacatgtgtctgcccacagtgacatgagtttgcgttgactgtcatgtctgcaggaagctgcctgctcctgtggccatgtcaagcaattctttctttcaactgcaactgtgtgtaagagcttagtctgagaagaaatgttcagaagctcactgtggctgcacatctgagccatgtcttcccattagttgncatgagtcagcaataaagcgggtatgttgatgtctatcaatctaattcctatgttctgaactcanggaaagaaatangagaatcatttgcagnctacccnnntacctnngncgntctanaactannggatcccccngnctgnangaatnnnntntnaancttatnnatccnnnnnncnnnnnggggggcccngnnccc

SEQ ID NO: 2396 - DNA, 673 bp, Homo sapiens
  misc_feature 509, 560, 567, 568, 569, 572, 573, 574, 575, 576, 577, 578,579, 580, 581, 582, 583, 584, 585, 586, 587, 588, 589, 590,591, 592, 593, 594, 595, 596, 597, 598, 599, 600, 601, 602,603, 604, 605, 613, 616, 625, 632, 651, 659, 663, 669: n = A,T,C or G
  misc_feature 673: n = A,T,C or G
gagctttcgtaatacgactcactatagggcgaattggagctccaccgcggtggcggccgggggccattgagactgccatggaagacttgaaaggtcacgtagctgagacttctggagagaccattcaaggcttctggctcttgacaaagatagaccactggaacaatgagaaggagagaattctactggtcacagacaagactctcttgatctgcaaatacgacttcatcatgctgagttgtgtgcagctgcagcggattcctctgagcgctgtctatcgcatctgcctgggcaagttcaccttccctgggatgtccctggacaagagacaaggagaaggccttaggatctactgggggagtccggaggagcagtctcttctgtcccgctggaacccatggtccactgaagtttccttatgctactttcactgagcatcctatgaaatacaccagtgagaaattccttgaaatttgcaaggtaggaggcatcttgggtattactctcanattagctttgttgctggagctatgtgctttctagggacgtgtactcctaancaaaccnnnttnnnnnnnnnnnnnnnnnnnnnnnnnnnnnnnnnnggtccctnggnccgttttanaactagngggatcccccgggcctgcnggaattcnaatntcaaancttn

SEQ ID NO: 2397 - DNA, 666 bp, Homo sapiens
  misc_feature 6, 529, 554, 577, 579, 584, 585, 599, 600, 605, 613, 620,621, 627, 628, 632, 635, 637, 640, 644, 645, 647, 648, 650,653, 655, 657, 658, 660, 661, 662, 663, 664: n = A,T,C or G
gagctntccgtaatacgaccttcactatagggcgaattggagctccaccgcggtggcggccgaggtaccatgcggtcagccaaatgtgtaaggaacttgttttgagaggagagaagaaaattctatagtaggcgagacaggcttctctctcctgctcctcctccctttctttttctctctctcctctttcttccctccttctctccctctttctctttctctcacacagttcctacatttctgcactgggggacaaaccaggcttctgatcaaaggcaatctgagacttgggttcaaaagctttgatgaagattggtacctgctatgcagatggggggagggaagaagagactagcctaggggcttttatatttctttaaagcatcagccattaatgggctaagtttaccactgggacccagagagctagtccccaaacacaagctcaaaatgtatgcattttccaattcatggttttcaaggacatgttcccccgcgtacctgcccgggcggccgctctagaactagnggatcccccgggctgcaggaattcnatatcaagcttatcgatacccgncnacctnnagggggggcccggnncccancttttgtncctttanngagggnnaatngcncnctnggcnnannanggncnanntnnnnnct

SEQ ID NO: 2398 - DNA, 668 bp, Homo sapiens
  misc_feature 402, 416, 450, 471, 474, 486, 493, 499, 500, 514, 520, 526,527, 529, 536, 543, 551, 556, 558, 559, 563, 564, 566, 568,569, 570, 571, 572, 573, 574, 576, 577, 578, 580, 584, 585,586, 587, 588, 591, 592, 593, 594, 595, 596, 597, 598: n = A,T,C or G
  misc_feature 600, 601, 603, 604, 607, 609, 611, 612, 614, 616, 617, 618,619, 620, 621, 622, 623, 626, 627, 628, 629, 630, 631, 632,633, 634, 635, 636, 637, 638, 639, 640, 641, 642, 643, 644,645, 646, 647, 648, 649, 650, 651, 652, 653, 655, 656: n = A,T,C or G
  misc_feature 657, 658, 659, 660, 661, 662, 663, 664, 665, 666, 667: n = A,T,C or G
gagcgcgcgtaataccgactcactatagggcgaattggagctccaccgcggtggcggccgaggtactaggttttggttgggtaggagagaccaaaaccagggaaaagcttagaaatcctttattggggtttctgcaggaaatgcaaggcaggtcacagttaacagcttattattggctagtttgaataattccagtgggccctggggcacaggtatctagttgtctggtcccagctctgagatgatttaaaacagggaaatactggcttagtgtgtgagagtgagaaaaggagctgattgtggctttatacttgggattcattggtatgtatatgaaagacatattctcagtggaccccctcactaaactgcccaggaagggcaatcttttcccaggtctgnaaggccccccaggnccctgcccggccggccgtctagaactagtggatncccccggcctgcaggaattcnatntcaagcttatcnataccgncacctnnaggggggccccggnccccancttttnntncctttantgagggntaattgcnccctngnntaannangnnnnnnntnnntncctnnnnnaannnnnnnncnntnncantncnnanannnnnnnnccnnnnnnnnnnnnnnnnnnnnnnnnnnnncnnnnnnnnnnnnna

SEQ ID NO: 2399 - DNA, 663 bp, Homo sapiens
  misc_feature 556, 611, 627, 640, 663: n = A,T,C or G
cgcgtaataccgactcactatagggcgaattggagctccaccgcggtggcggccgcccgggcaggtacagtcaacatgcatgatgtgtaactccatctccataggctagaggcatcctaagtgctgcagaccagacctggacaataaatgtcaagagtcaccaccaccccgaaaagaactagaagtctgtagatctgctgaggagcccagtcattaaaatacaggatggggttcacagagactcaaggtctgcctctgaagcttttcttggtaggatctgaaaacccagaagatgctttaaatcctcaccctagtgaacagatgcaggttccctggtccttggcctgactgcagtcagagagcccaggagttagctggttttctccctccatttttggtgtgaaaagagccactgccacagcagccatggacttaggatgctagagtgcatggtctggatgcaaaacttttgccctgaaatgtggcatcaacacaaatacagagtccagattttttcatcttcctctggtgatgactcaccattagtgtccatacnttgtaggtgcttatgaaataaccctcagccaggacagctactcttctggaactgnaggaagtgttcttatnccttttttttcanattaaactgattaatacccttan

SEQ ID NO: 2400 - DNA, 664 bp, Homo sapiens
  misc_feature 549, 600: n = A,T,C or G
gagcgcgcgtaataccgactcactatagggcgaattggagctccaccgcggtggcggccgcccgggcaggtaccctggactcatacctgaaagcagtgttcaaccttagcaaaatctccaaccagcgcatgaacaattttctacatcacaacgacctggttttcaaattcagctctcaaggccaaatcttttctaaatttaaccaagaacttcatcagttcacagagaaagtaatccaggaccggaaggagcctcttaaggataagctaaaacaagatactactcagaaaaggcgctgggattttctggacatacttttgagtgccaaaagcgaaaacaccaaagatttctctgaagcagatctccaggctgaagtgaaaacgttcatgtttgcaggacatgacaccacatccagtgctatctcctggatcctttactgcttggcaaagtacctcggccgctctagaactagtggatcccccggggctgcaggaattcgatattaagcttatcgataccgtcgacctcgagggggggcccggtacccancttttggttccctttagtgagggtaattgcgcgcttggcgtaatcattggncatagctgtttcctgggtgaaattggtatccgttacaatttcacacaaataacaaccggggagc

SEQ ID NO: 2401 - DNA, 651 bp, Homo sapiens
gagctttccgtaatacgactcactatagggcgaattggagctccaccgcggtggcggccgaggtactttgttacagcagcctgaaaggactaagacaccgacctagtctccctgatgaaaaagtttctctcagacttctaccctttccaatgtggccaaagcttttcattccgaagaagtttcctttctgagaacgctcattgtgtcgtttggctttccccgtctctgcttgacacatgaaccaaaacagaggcagccaaagcagggaaaaaaaaaatcctaggatcagagtccactctatgcccttttgagcttcaaaaggagaaagagacaaaagccaaaagcaatggaggtcaagctgcccggtacctgcccgggcggccgctctagaactagtggatcccccgggctgcaggaattcgatatcaagcttatcgataccgtcgacctcgagggggggcccggtacccagcttttgttccctttagtgagggttaattgcgcgcttggcgtaatcatggtcatagctgtttcctgtgtgaaattgttatccgctcacaattccacacaacatacgagccgggagcataaagtgtaaagcctggggtgcctaatgagtgagctaactcacattaattgcgttgcgctcac

SEQ ID NO: 2402 - DNA, 664 bp, Homo sapiens
  misc_feature 395, 456, 463, 473, 476, 488, 491, 499, 503, 505, 512, 514,518, 522, 534, 535, 536, 538, 539, 541, 545, 548, 549, 551,555, 556, 557, 558, 559, 560, 561, 562, 563, 564, 569, 570,573, 574, 576, 577, 578, 579, 581, 582, 583, 584, 592: n = A,T,C or G
  misc_feature 593, 594, 597, 598, 599, 600, 601, 603, 604, 605, 606, 609,610, 611, 612, 613, 614, 615, 616, 617, 618, 619, 620, 621,623, 624, 625, 626, 627, 628, 629, 630, 631, 632, 633, 634,635, 636, 637, 638, 639, 640, 641, 642, 643, 644, 645: n = A,T,C or G
  misc_feature 646, 647, 648, 649, 650, 651, 652, 653, 654, 655, 656, 657,658, 659, 660, 661, 662, 663, 664: n = A,T,C or G
gagcgcgcgtaataccgactcactatagggcgaattggagctccaccgcggtggcggccgaggtacgcggggacttcctcatagaccttggatgtgggaggattgcattcagtctagttcctggttgccggctgaaataacctgaattcaagccaggaagaagcagcaatctgtcttctggattaaaactgaagatcaacctactttcaacttactaagaaaggtattaagcgcctttctgagagctctcagtgggcttcctaagcacgttcactctgcctcctttaagtcttatatttatgatcaagatgaaagggagggatgtatcacttgcaccagagattctacaagtgggatatataaaagctaataatggttttcagtgagctcttctntggcaactactttccaagtgctttcagcatttccaccttgaaccacaacgttaataatgcncaatttnttatgttcanccncaaaaggtcacntgngatttggntacnanatattgntntatncagncctttaacaaannngnntntttnaanngncttnnnnnnnnnnaattnnaannannnntnnnnttaaaaannnaannnnngnnnnggnnnnnnnnnnnnnannnnnnnnnnnnnnnnnnnnnnnnnnnnnnnnnnnnnnnnnn

SEQ ID NO: 2403 - DNA, 681 bp, Homo sapiens
  misc_feature 5, 386, 400, 412, 421, 461, 481, 482, 484, 496, 500, 513,518, 520, 526, 529, 532, 536, 539, 541, 544, 549, 555, 562,564, 567, 573, 580, 581, 582, 584, 585, 589, 590, 591, 592,594, 596, 598, 600, 601, 602, 604, 605, 606, 607, 608: n = A,T,C or G
  misc_feature 610, 611, 612, 613, 614, 615, 616, 619, 622, 624, 625, 627,628, 629, 631, 636, 637, 638, 639, 640, 641, 642, 643, 644,645, 646, 647, 650, 651, 652, 653, 654, 655, 656, 657, 658,659, 661, 662, 663, 664, 665, 666, 667, 669, 670, 671: n = A,T,C or G
  misc_feature 672, 673, 674, 676, 677, 678, 679, 680, 681: n = A,T,C or G
gagcnccgcgtaataccgactcactattagggcgaattggagctccaccgcggtggcggccgaggtactttgtgggttgagggtaggaggctaagactgccagggaggaggtcccggcttcctgctcctaccggggagcagcaggtgaaactctgaccacgttactgcaatcctgacatgctccagtggagtggcgacatttttcttctcgaggcagcttttggggatctgtattactttcatgtggaccacttgctagttttgatttcaatgataatttcttccttcctttttttttttttcaagcctgtcttcatagtgatgacaacacatttaacatttgttttgattttaccctctcctctctccccactctcagtctgcanccaggagagcaggnacgtcctgtgcnaactgtcanaccaccacaaccacactctggaggaggaatgccaatgggnaccctgtctgcaatgcctgnngnctctactacaancttnacaatattaacanacccntnactatnaanaangaangcntncanaccanaaaccnaaaaatntntancaaatncaaaaannncnnaaannnncntnantnnntnnnnnannnnnnnaanaananntnnntnaaccnnnnnnnnnnnnaannnnnnnnnncnnnnnnntnnnnnnannnnnn

SEQ ID NO: 2404 - DNA, 633 bp, Homo sapiens
  misc_feature 23, 25, 153, 212, 216, 351, 372, 377, 422, 444, 485, 490,494, 506, 521, 523, 546, 621, 625, 627: n = A,T,C or G
gactcactatagggcgaattggnanctccaccgcggtggcggccgcccgggcaggtactttttttttttttttttttttttttttacgtaatacacgttcctatgttttcaaaaattaaataacaatttaaaacgcatccattgttatactgntcctcactataattcctgaacctccatgtaaacccatttttatatctatcaatttttgntggngtcaatttcatgtttttaaatagcatgacatgcctttttattttgaagtttttggcatgatatattgacctatctctaatggaaaactgaagtttatctatgttacattatgccactgaaataaacatatcccanctgttgaacaagtgacacttnctgtntaccaccagaaacagcagccccaggatacgatcacactgcatggntttgcagcatcaagttgccaanaagtccacgatttactcagatgataaacagatcaacagctntactnactnagagacagagcnagatcagattttatngngggcataggtctccatggccagngggtctggccctgaagtggacacagggagatagtatacatgatacctcttgtcctgcaggcaagaccccattctntttntntgcgac

SEQ ID NO: 2405 - DNA, 495 bp, Homo sapiens
  misc_feature 2, 3, 146, 202, 267, 307, 436, 465, 474, 491, 492: n = A,T,C or G
gnntttgaccgcgaaacgactactatagggcgaattggagctccccgcggtggcggccgaggtactttttttttttttttttttttgcaggttgaatgcagggttttattgagtggtggaggtggttctctgaaggatggatgcanagctggaagcggggatggcacgggaagataatcttcctgctgggtggccaaacctntccgaccaccctcggctgaactcctctcggcgttcaaatgttcctcttctctctttctctactgnatccgtttcaccattcatctgcttgtctgggatggtgaanacaactgtttgctcatttgcttggcgataggtgattgtctcgccgctcagctataggcgatggtctcaccactcggtgataaggccgattgtcccatctaggtcgccaaaatgtgccttggaattggtnggggttctttcgtctcacttgacttcaanaaattgaancccgcggacactcgcanntga

SEQ ID NO: 2406 - DNA, 468 bp, Homo sapiens
  misc_feature 359, 371, 402: n = A,T,C or G
ggcgaattggagctccccgcggtggcggccgaggtacgcggggtcctgcgtttgtagatggaaggaagaacttgtgtgcttagacctgacgctgggaggagatgctgccacctaggttacttgtaggaccctatacggcaacctcctttgccaggaactatttataaacatcctgcaggaaaatgagtcaaggaaagctttttcttttgagctatttacagcttttagcaattgagtaaagtatactcctgtgaacaaaatttggaacatatttgtttctctctaactgatttctccagaatttggaactagttagtctatatgtcagaatacacatttcccaccttgcccaacagtanaaaaacataagnaagagaaaaacattaaaaaatgacaaggaanttaatgggaaagcaattgtggatggtgtttggaggtgggaagccttcagaaaggtaattaatgccc

SEQ ID NO: 2407 - DNA, 731 bp, Homo sapiens
  misc_feature 1, 2, 3, 5, 8, 9, 11, 12, 15, 16, 18, 20, 21, 22, 25, 27,29, 31, 34, 37, 38, 39, 40, 41, 43, 47, 51, 52, 57, 58,59, 60, 62, 63, 65, 72, 85, 88, 93, 95, 96, 98, 99, 100,101, 102, 103, 105, 106, 107, 108, 109, 110, 111, 112, 113: n = A,T,C or G
  misc_feature 116, 117, 118, 316, 350, 378, 394, 410, 444, 451, 453, 467,473, 497, 500, 514, 530, 544, 556, 575, 588, 635, 712: n = A,T,C or G
nnntntanntnnttnntntnnnttntncnanttntannnnnantttntttnnttaannnncnntntttgttnttatctaattttntanttttntnntnnnnnntnnnnnnnnnagnnngggcctaaacgactcatatagggcgaattggagctccaccgcggtggcggccgaggtacttagagtccaattttcctaccttggcttgtgcatgaggttgcctggttgccacggtgcctgcttttctccctgtgtcacctccactgcctcctgaataacagtctcaggtttgtctatggcctctgcagggagccgggnattcccagacaggagcaaggccaactttaaaatnaagggtgggggacggccctcttcccccntctttggggcccgggnagttcccaaaacttcncaccgcaagggcaaccaggaagaatcccccaagnatggggncnccccccaagttttntggtgnaggaaaaaccaacatttttcaatnctngttcccaaaaaccncccaaaaaaggaaatngggaaccttcaagnaagaaccaccanaaaaagcaaaacaaaattngggaaaaggaagnaagaaattttttttaaaattggggttggaattccggttgccaaaggnaaatgggggttggtccttgggttagggccaagggccccccggccggttaccacttggccccccgggggccgggggcnccgggccttccttaagaaa

SEQ ID NO: 2408 - DNA, 880 bp, Homo sapiens
  misc_feature 1, 3, 4, 9, 10, 12, 13, 14, 20, 21, 23, 26, 30, 32, 33, 34,36, 37, 38, 40, 41, 42, 43, 45, 46, 47, 49, 50, 56, 59,60, 61, 62, 65, 68, 72, 73, 77, 78, 79, 82, 87, 89, 90,91, 96, 97, 98, 102, 104, 106, 108, 110, 111, 113, 115,116: n = A,T,C or G
  misc_feature 118, 122, 123, 134, 138, 345, 395, 434, 440, 478, 486, 500,524, 529, 544, 556, 565, 643, 644, 646, 647, 652, 660, 667,671, 680, 689, 693, 711, 740, 777, 815, 820, 841, 846, 857,865, 875: n = A,T,C or G
ntnncctcnntnnncttttnntnatntcgntnnncnnngnnnntnnntnntagatnttnnnnatnttnctgnngttnnnttnttttntnnnttttnnntttncngntncnntntnntnaggnnaggggtctccncaancgactcctatagggcgaattggagctccaccgcggtggcggccgcccgggcaggtacgcgggcaactattgcaatgaaaaatttcaacaattttttaatgaaaggattctgaaggaggaacaagaactttatcaaaaagaaggtttaggtgttaatgaagtgcattatgtggataatcaggactgtatagatttaatttgaagccanaattaagtggggggaaataccttgggaatatttttttggggaattgaaangaaaaaaaatccgccccttttcccccccaagccccaaangttggnattccaaaaccaaccttttttaaccaatttctttggcnaaggtctnccaacccccaaaanaaaaggcccaacccaaaagggggnaattnccaattttttttttncgggaacctttncaaaccttnaatttttcccccccaaggcaaaaaaaaaattcccttaaaaagggccttggggggcccaaggttttttccaatttaagnngnnaaaanttaatttncaaaggnaagntaaacccgnaaacccggnaaanaagggggccctttttccnaatttttaaatttccaaagggggcccaantttttttttggggcccggggggggggggggcccaaanggttggggtttggccctttaatttgggaaaaaaaaccnaaaanccccccccaaaggtttttttnggttnggggggaaggnaaaaaaanaaaaattaanaattt

SEQ ID NO: 2409 - DNA, 991 bp, Homo sapiens
  misc_feature 1, 3, 4, 5, 6, 7, 8, 9, 10, 11, 13, 14, 15, 16, 17, 18, 19,20, 21, 22, 23, 24, 25, 26, 27, 28, 29, 30, 31, 32, 33,34, 35, 36, 37, 38, 40, 41, 42, 44, 45, 46, 47, 49, 50,51, 52, 53, 54, 55, 56, 57, 58, 59, 60, 61, 62, 63, 64,65: n = A,T,C or G
  misc_feature 66, 67, 68, 69, 70, 71, 72, 73, 74, 75, 76, 77, 78, 79, 80,81, 82, 84, 85, 86, 87, 88, 89, 91, 92, 93, 94, 95, 96,97, 98, 99, 100, 101, 103, 104, 105, 106, 107, 108, 109,110, 111, 112, 113, 114, 115, 116, 117, 119, 120, 121, 122: n = A,T,C or G
  misc_feature 123, 124, 126, 127, 128, 129, 130, 131, 132, 133, 136, 137,138, 139, 140, 141, 142, 143, 144, 145, 146, 147, 150, 151,152, 153, 156, 159, 161, 163, 166, 369, 426, 535, 572, 626,636, 673, 676, 693, 816, 906, 968: n = A,T,C or G
ncnnnnnnnnntnnnnnnnnnnnnnnnnnnnnnnnnnntnnncnnnntnnnnnnnnnnnnnnnnnnnnnnnnnnnnnnnnnngnnnnnngnnnnnnnnnnngnnnnnnnnnnnnnnntnnnnnncnnnnnnnnctnnnnnnnnnnnnagnnnnagnggngncncgnacgactcactataggggcgggacattggagctccacccgcgggtggcggcccgcccgggcaggtaccaagaaaactccatccacaagtccttgctgaataatcaatcgctgagcctcatctctagaaaattttggtgggtggaaaccatggctggggacccggtggggaatagccattgtttggtgggcaagagcctctgtgnaaagaagggccaggtggggggggcctacccggttggaaggttgcccccagggccgtnaaaaaccattcccttttttttttcccttccccaaaggccggaggttccccttttcctttccaaacccccggccaaaaccttggaaaaaaggggggcctttttccaaggnttgggggggaatttttttttccttaaatttaaaaccnttcctttggcctttttttttttccttgggggcccccttgggaagggaaaaaggnttcccccaantttttgggcctttaacccccaaaggggggggaaaaanttntttcctttcccttgggnaatttaatttaacccttttttcctttccaaattaaaggggggtttgggaaattaaatttgggccctttcccttgggttgggaaaaaacccttggggccaaagggccccccaaacccttttttncctttaaacccccttttttgggaaattaaatttggggggaaaattgggcccaaatttaaatttaaaaaattttttccctttggggggttncccccctttccggggggccccccggccctttccctttaaaggaaaaaacccttaaggggttnggggggaaatttccccccccccc

SEQ ID NO: 2410 - DNA, 442 bp, Homo sapiens
ctatagggcgaattggagctccccgcggtggcggtccgtagctgagacttctggagagaccattcaaggcttctggctcttgacaaagatagaccactggaacaatgagaaggagagaattctactggtcacagacaagactctcttgatctgcaaatacgacttcatcatgctgagttgtgtgcagctgcagcggattccctctggagccgctgtctatcgcatctgcctgggcaagttcaccttccctgggatgtccctggacaagagacaaggagaaggccttaggatctactgggggagtccggaggagcagtctcttctgtcccgctggaacccatggtccactgaagttccttatgctactttcactgagcatcctatgaaatacaccagtgagaaattccttggaaatttgcaaggttgtcttgggttcatgtct

SEQ ID NO: 2411 - DNA, 878 bp, Homo sapiens
  misc_feature 8, 9, 10, 12, 13, 15, 17, 18, 20, 23, 28, 40, 48, 55, 57,60, 70, 75, 78, 79, 80, 81, 82, 83, 84, 85, 87, 88, 89,91, 93, 95, 97, 99, 104, 108, 109, 110, 111, 112, 113, 114,116, 120, 128, 134, 135, 339, 349, 354, 359, 362, 409, 481: n = A,T,C or G
  misc_feature 483, 485, 488, 496, 505, 527, 552, 581, 584, 591, 598, 623,629, 637, 645, 672, 688, 695, 706, 719, 726, 748, 751, 754,758, 761, 768, 769, 794, 851, 865: n = A,T,C or G
ttcttctnnntnncntnntntanttatnctttcccttctntatcctanctatttntnttntttatttccnttctnatnnnnnnnncnnntncntntntntaatntaannnnnnncnagtntcagtgcngtttannatcctatagggcgaattggagctccaccgcggtggcggccgaggtacgcgggggaagttaatggaagcaatgtgatggtgtttggaggtggagccttcagaaggtaattaatacccttgtaagaagaggccagagagcttgcgcaccttcttcctgccatgtgaggagccaagaagccggctgtcctgcaactctggcaaggangaccccttcncttanaaaanctnagcccattaccttggggccattcccttcaatctttgggcctttttcnccaaaccttttccccaggaaaccttggttggaaggaaaaggttaattaattggttttttggttggggttttntnanggntccaaaantgggggttnccttaaattgggggttcaaaantttttttttttttttaaattaaggncccaaggtttcccccccaagtcccccaanaangaaaccnaaggttngggcccccttttccaattttttttnaacccnttaaaccnaatttaancccccaaatttttttaaatttaatttnttaaatttttaaattnaatttanggggggccttnccccctttttttnccaaggnaaaaaaaacccccccaatttgnttnttnccanaanaatttannacgggaaagggaatttaaaaaaggnaaattaaccctttgggaaaaaaaacccaacccaatttaaaacccaaccccctttttncaaacctttaaggntttttttttttaa

SEQ ID NO: 2412 - DNA, 472 bp, Homo sapiens
  misc_feature 2, 3, 4, 5, 11, 41, 136, 196, 216, 231, 239, 241, 275, 283,287, 301, 329, 354, 366, 373, 408, 420, 448, 451, 453, 459,463: n = A,T,C or G
gnnnngggcgnccgcgtaatacgactactatagggcgaatnggagctccccgcggtggcggccgaggtacttttttttttttttttttttttgcctggagagagagagatgttttatttttgccaaagcatgtganagtaagtagcaaacatcatgacacttcacccctcaaatattttcccacgtatcacttaanaacaagggcattcattctgntacatgaccacaatnccaatccncnccaagataggatattaacattgacacaatgctcngatgtatnggtntctactatgcagtncataatcaaataagggttttggtaactngggatccataaatggtctgcaaggncagcccctgtanacctacncttagtgggtgccactttccctgggctcaggtgcntgctctactggngaataattttcactgggctctgtatgcntcncnttaaanaatntttttctcc

SEQ ID NO: 2413 - DNA, 801 bp, Homo sapiens
  misc_feature 1, 2, 3, 5, 7, 8, 15, 18, 20, 24, 25, 26, 27, 30, 34, 35,48, 50, 66, 69, 72, 74, 77, 83, 84, 86, 88, 89, 90, 92,98, 103, 105, 110, 112, 113, 114, 115, 120, 124, 126, 135,142, 345, 352, 354, 369, 370, 392, 436, 450, 457, 461, 466: n = A,T,C or G
  misc_feature 479, 495, 501, 506, 509, 520, 532, 535, 539, 543, 550, 586,590, 600, 626, 627, 629, 637, 653, 659, 662, 684, 699, 704,711, 712, 730, 744: n = A,T,C or G
nnntncnnttctctntantntatnnnnttntctnncacttttcactcngntctttggcttcctcgnatngantngtncttttnntntnnntntttatnattcntntttcntnnnnttccnggtntngggcccttnacgatcntatagggcgaattggagctccaccgcggtggcggccgaggtacaaaaggtctgtcttccatcagacccagtgatgctgcgactcacacgcttcaattcaagacctgaccgctagtagggaggtttattcagatcgctggcagcctcggctgagcagatgcacagaggggatcactgtgcaggtgggaccacccttacttgggnctttttncnagccaaggggttttnntgggggatggttttttacaagngggttcaaaaaaataccttcctgtttttaagcaggccaaagggngccttcaccaaaanaccaagnaaanattancttggtcaattgnggaagggctggccttngaaaancaacnagngggggaaaagnggttctttgtgnttncccnttgnccacacngggggccggggcctccggccttcttaaggaaaaacnttanggttgggggnaattccccccccccggggggccttgnncnaagggganaatttttccggaattnatttcnaanagggcctttttaattccggganttaacccccgtttcnggaanccccttnntggaaagggggggggggnggggccccccccgngggttaacccccccaaggcctttttttttttgggttattcccccctttttttaaagc

SEQ ID NO: 2414 - DNA, 494 bp, Homo sapiens
  misc_feature 475, 492: n = A,T,C or G
cgaattggagctccccgcggtggcggccgaggtacaacctgagaatcacaagcggtgtggtggtgtgtcagtgtggcctgtccatcccatctcatgtgagtgttccacacacagatttcatgatacttcttcccacatggatctactttcttgaagatcctccagtgctgacttggagcccattgtgcatatttcttcccagttttatgttcagtggtgtcacattggtagcttcaaatcagccatggtgagaatatctatggcatgaaaattggcaaacagtacctgcccgggcggccgctctagaactagtggatcccccgggctgcaggaattcgatatcaagcttatcgataccgtccgacctcgagggggggcccggtacccagcttttgttccccttttagtgaggggttaattgcgccgcttgggcgtaatcatggtcataagctggtttccttgtggtgaaaattgnttatcccgcttcacaantt

SEQ ID NO: 2415 - DNA, 916 bp, Homo sapiens
  misc_feature 5, 6, 7, 8, 10, 11, 12, 13, 16, 23, 26, 27, 28, 29, 32, 34,35, 36, 38, 39, 41, 42, 43, 45, 47, 49, 50, 51, 53, 59,72, 74, 76, 77, 79, 81, 84, 87, 88, 90, 92, 93, 94, 96,97, 99, 101, 102, 107, 108, 110, 111, 115, 117, 119, 120,127: n = A,T,C or G
  misc_feature 130, 310, 319, 326, 342, 558, 603, 638, 706, 718, 792, 797,814, 829, 830, 831, 834, 835, 848, 854, 856, 857, 863, 875,884, 885, 886, 887, 892, 894, 897, 905, 910, 913, 914, 915,916: n = A,T,C or G
ctctnnnntnnnnctnatgtttntannnnatntnnntnncnnntntntnnntntttttntcgttttttcctntntnntntntgngtnnantnnntnntntnntatcnntnntatntntnncgaggtnttncctatacgactcctatagggcgaattggagctccaccgcggtggcggccgaggtacgcggggaacagaaagcagcccaacttgctactgaaattgcagcatataaagtcaaagtatgatgaagtaaaggagtcttcgagaagctgctgaacaataaagtgacaccgtcttggacaggaangaattacanacaatangagggccaacctgtanattcaaaggatcttggaaaggaccggggaaaccttgcttcaaggaaggaccccttggggtatttaaggaaaagaatgggtttggccccgttgcctaaaaaaggaaaaaaggaaacctgggggtcccaaaaggtttccaaaaaccaccttaaattggggattaaaaccaattggaccccttttggggaaaccggttggaggccggaaggaaaattcnttggaaaaaaaaaccttcaaaaaaaggaattggaaaattggccanaaaaaaaaattttggccaagggtccaccaaaattnaattggccttaaggccttccaaggaaggggccccacccaaaatttaaaaggccccccaaggcctttanaagggggaaggnttggaaaaccttttggccccaaaaaagggggccccccccccccaagggggaaaaaggtttgggcccttggttanttaanttgtaaaaccctggccncccccccggggggannnaannatttctatctcanttaacntnnttcttnttggcattgttncttctttgnnnntcatntngtntcgtctgnatttntcnnnn

SEQ ID NO: 2416 - DNA, 574 bp, Homo sapiens
  misc_feature 2, 3, 4, 5, 9, 11, 185, 228, 278, 303, 320, 322, 353, 367,369, 370, 382, 393, 420, 427, 433, 441, 450, 453, 459, 462,480, 506, 507, 509, 515, 521, 537, 545, 556, 568: n = A,T,C or G
gnnnngtgncncgcgtaatacgactactataggggcgaattggagctccccgcggtggcggccgaggtactttttttttttttttttttttttttgagagtactttcacatgctataccacatttaattaattctaacaacagcactggaaaataagtataattatgctctttagttccttctanacagaaagctttcatggggatgaaagactgttccttagctcanagtagggaatcaaagtaggcggggcttagttcagagtgggcggggcttanctcaaaattggccatcaatttgtanaattgaagtgtgaactntnaggatgaaaaaacagggctgccaggggtgtntaacttgcaccaantnnccctacttttanatttgggcccnaacccggcccaactttaagttttttcnaaaatgntttaantaaagggngcctttganccnctgganttnccttttggcccttgtttnaaaatgggtttggaaattttcccctnngncccccnggggcntttttttttttttttnccccgggnaaatgggaaanccaaaaaaaccntggggg

SEQ ID NO: 2417 - DNA, 448 bp, Homo sapiens
  misc_feature 192, 195, 207, 216, 238, 296, 308, 338, 384, 401, 423, 428,444: n = A,T,C or G
actacttagggcgaattggagctccccgcggtggcggccgaggtacgcgggggtagatggaaggaagaacttgtgtgcttagacctgacgctgggaggagatgctgccacctaggttacttgtaggaccctatacggcaacctcctttgccaggaactatttataaacatcctgcaggaaaatgtgaagtanaanagacaggggatnttcccaganggttattgcaaaacatcaagangaagatgagaggagtctatatgtcacgaatacacatttcccaccttgcccaacagcanaaaaaaaaaaanaaaaaaaaaagtacctgcccgggcggccgntctagaactagttggatcccccgggctgcaggaattcgatatcaancttatcgatacccgtcnaccttgagggggggcccggttncccancttttgttccctttantgga

SEQ ID NO: 2418 - DNA, 462 bp, Homo sapiens
  misc_feature 210, 212, 220, 225, 405: n = A,T,C or G
tatcactactatagggcgaattggagctccaccgcggtggcggccgcccgggcaggtacatagccccagaagggcggactggccggagtccagggatggcagccaacgccccataacagagatcagcattggactacaagaagaggcaaggagaaatcaaggatcaaaatttaagtaaaagaaaagccaagtcattaaaaatagaccccntnatttgaanaagtngggaaccgtaggtgttgatgttctggcataaggagtgaaaaagaaaaagctctattacttgaagcttttcaccaggggcagagggaatggccggaagtgagaaacgtgtgtgtggatgcttacaccgatgccgttctcctaatattggaacatggctccagaaaggagaaccaattattnctaattccacggggcggcattctcttgactcccaaacttccaaagtggaggggcagg

SEQ ID NO: 2419 - DNA, 867 bp, Homo sapiens
  misc_feature 8, 11, 21, 22, 27, 28, 29, 30, 37, 39, 40, 42, 46, 56, 58,60, 61, 65, 68, 74, 79, 81, 91, 96, 105, 108, 113, 115,116, 119, 120, 121, 122, 123, 127, 128, 130, 131, 133, 145,149, 381, 398, 406, 436, 458, 495, 497, 501, 521, 534, 539: n = A,T,C or G
  misc_feature 567, 570, 583, 586, 592, 601, 610, 611, 614, 617, 631, 635,638, 640, 645, 651, 659, 661, 668, 673, 675, 679, 684, 686,711, 719, 720, 722, 727, 749, 754, 765, 770, 776, 778, 789,791, 794, 797, 820, 832, 833, 835, 839, 849, 853, 858: n = A,T,C or G
ctcctctntcnttttaaaaanntatannnnttttctntnntnctcnttttctttcntntnncttnttncttctnatttntnctttttctcnatctnctatatttnttnttttntnnttnnnnntagnntnngnggccgcgtctcnaacnactcactatagggcgaattggagctccaccgcggtggcggccgcccgggcaggtacagaagggcggtcctgctgacttggctgggctagaggatgaggatgtcatcattgaagtgaatggggtgaatgtgctagatgaaccctatgagaaggttggtggatagaatccagagcagtgggaagaatgtcacaccttctagtcttggtgggaaaaggaaaggcccctttttgantttattttttccccaanggccttanagaaaaaaattcctcctaattttggttttntcccctccccccttgggtcctnggattccacaaccttttggtaactatccctccccttncnccantgaattcttcttaaaaaagnaaaagggggaatntttanggtttggggattggggtaagctttccantanaccaccaattgcnaanctttcnggccaaacnaagttgggnntcnaanaaaaaaggaaaaanccgnggngnccacntctatnccaaggtntnacccccnttccngngccncccgncntttccttaaagtaaaaacccttaanggtttggnngnaattncccccccccccccggggggtcntttgntcttaagtggnaaaantttttncnggtaatttaantntcnaanacggcctttttaatttccagcantttaacccccgnntntcgnaaaccccttnccgntaggnggggggggg

SEQ ID NO: 2420 - DNA, 709 bp, Homo sapiens
  misc_feature 1, 2, 3, 4, 5, 8, 17, 18, 25, 447, 454, 455, 456, 457, 458,459, 460, 461, 462, 463, 464, 465, 466, 467, 468, 469, 470,471, 472, 473, 474, 475, 476, 477, 478, 479, 480, 481, 482,483, 484, 485, 486, 487, 488, 489, 490, 491, 492, 493: n = A,T,C or G
  misc_feature 494, 495, 496, 497, 498, 499, 500, 501, 502, 503, 504, 505,506, 507, 508, 509, 510, 511, 512, 513, 514, 515, 516, 517,518, 519, 520, 521, 522, 523, 524, 525, 526, 527, 528, 529,530, 531, 532, 533, 534, 535, 536, 537, 538, 539, 540: n = A,T,C or G
  misc_feature 541, 542, 543, 544, 545, 546, 547, 548, 549, 550, 551, 552,553, 554, 555, 556, 557, 558, 559, 560, 561, 562, 563, 564,565, 566, 567, 568, 569, 570, 571, 572, 573, 574, 575, 576,577, 578, 579, 580, 581, 582, 583, 584, 585, 586, 587: n = A,T,C or G
  misc_feature 588, 589, 590, 591, 592, 593, 594, 595, 596, 597, 598, 599,600, 601, 602, 603, 604, 605, 606, 607, 608, 609, 610, 611,612, 613, 614, 615, 616, 617, 618, 619, 620, 621, 622, 623,624, 625, 626, 627, 628, 629, 630, 631, 632, 633, 634: n = A,T,C or G
  misc_feature 635, 636, 637, 638, 639, 640, 641, 642, 643, 644, 645, 646,647, 648, 649, 650, 651, 652, 653, 654, 655, 656, 657, 658,659, 660, 661, 662, 663, 664, 665, 666, 667, 668, 669, 670,671, 672, 673, 674, 675, 676, 677, 678, 679, 680, 681: n = A,T,C or G
  misc_feature 682, 683, 684, 685, 686, 687, 688, 689, 690, 691, 692, 693,694, 695, 696, 697, 698, 699, 700, 701, 702, 703, 704, 705,706, 707, 708, 709: n = A,T,C or G
nnnnngangcgcgttanngacttantatagggctgattggagctccaccgcggtggcggcccgaggacgcggcaatagaagccggcgtaaagagtgttttagatcactccctccccttctactcaacctggtgactcatctctccgattgcaaagagcaagacacgccactccgcttcaacgccaaagcggggatctgctggggcacagtatgcaatttaaggaaaacccccaaaggctacaggcgacctgctgatcaggaaagaatttcgctcttgtcaagtacctgcccgggcggccgctctagaactagtggatcccccgggctgcaggaattcgatatcaagcttatcgataccgtcgacctcgagggggggcccggtacccagcttttgttccctttagtgagggttaattgcgcgcttggcgtaatcatggtcatagctgnttccgannnnnnnnnnnnnnnnnnnnnnnnnnnnnnnnnnnnnnnnnnnnnnnnnnnnnnnnnnnnnnnnnnnnnnnnnnnnnnnnnnnnnnnnnnnnnnnnnnnnnnnnnnnnnnnnnnnnnnnnnnnnnnnnnnnnnnnnnnnnnnnnnnnnnnnnnnnnnnnnnnnnnnnnnnnnnnnnnnnnnnnnnnnnnnnnnnnnnnnnnnnnnnnnnnnnnnnnnnnnnnnnnnnnnnnnnnnnnnnnnnnnnnnnnnnnnnnn

SEQ ID NO: 2421 - DNA, 727 bp, Homo sapiens
  misc_feature 5, 10, 12, 13, 17, 21, 37, 398, 399, 400, 401, 402, 403,404, 405, 406, 407, 408, 409, 410, 411, 412, 413, 414, 415,416, 417, 418, 419, 420, 421, 422, 423, 424, 425, 426, 427,428, 429, 430, 431, 432, 433, 434, 435, 436, 437, 438: n = A,T,C or G
  misc_feature 439, 440, 441, 442, 443, 444, 445, 446, 447, 448, 449, 450,451, 452, 453, 454, 455, 456, 457, 458, 459, 460, 461, 462,463, 464, 465, 466, 467, 468, 469, 470, 471, 472, 473, 474,475, 476, 477, 478, 479, 480, 481, 482, 483, 484, 485: n = A,T,C or G
  misc_feature 486, 487, 488, 489, 490, 491, 492, 493, 494, 495, 497, 498,499, 500, 502, 503, 505, 506, 507, 508, 509, 510, 511, 512,513, 514, 515, 516, 517, 518, 519, 520, 521, 522, 523, 524,525, 526, 527, 528, 529, 530, 531, 532, 533, 534, 535: n = A,T,C or G
  misc_feature 536, 537, 538, 539, 540, 541, 542, 543, 544, 545, 546, 547,548, 549, 550, 551, 552, 553, 554, 555, 556, 557, 558, 559,560, 561, 562, 563, 564, 565, 566, 567, 568, 569, 570, 571,572, 573, 574, 575, 576, 577, 578, 579, 580, 581, 582: n = A,T,C or G
  misc_feature 583, 584, 585, 586, 587, 588, 589, 590, 591, 592, 593, 594,595, 596, 597, 598, 599, 600, 601, 602, 603, 604, 605, 606,607, 608, 609, 610, 611, 612, 613, 614, 615, 616, 617, 618,619, 620, 621, 622, 623, 624, 625, 626, 627, 628, 629: n = A,T,C or G
  misc_feature 630, 631, 632, 633, 634, 635, 636, 637, 638, 639, 640, 641,642, 643, 644, 645, 646, 647, 648, 649, 650, 651, 652, 653,654, 655, 656, 657, 658, 659, 660, 661, 662, 663, 664, 665,666, 667, 668, 669, 670-727: n = A,T,C or G
agttnccgananngacncaangactgactatagggcnaattggagctccaccgcggtggcggccgaggtactcaatggaccaatctgaattaagcttttcctgtttttcatagaagtgttcttttctctaaactgctgtaatttttcttgacttattaggctggaggacgtgtgccagtgttagacacactcatagaacttgttacacgaggccgatctatccccgtacctgcccgggcggccgctctagaactagtggatcccccgggctgcaggaattcgatatcaagcttatcgataccgtcgacctcgagggggggcccggtacccagcttttgttccctttagtgagggttaattgcgcgcttggcgtaatcatggtcatagctgttcctggnnnnnnnnnnnnnnnnnnnnnnnnnnnnnnnnnnnnnnnnnnnnnnnnnnnnnnnnnnnnnnnnnnnnnnnnnnnnnnnnnnnnnnnnnnnnnnnnnngnnnncnngnnnnnnnnnnnnnnnnnnnnnnnnnnnnnnnnnnnnnnnnnnnnnnnnnnnnnnnnnnnnnnnnnnnnnnnnnnnnnnnnnnnnnnnnnnnnnnnnnnnnnnnnnnnnnnnnnnnnnnnnnnnnnnnnnnnnnnnnnnnnnnnnnnnnnnnnnnnnnnnnnnnnnnnnnnnnnnnnnnnnnnnnnnnnnnnnnnnnnnnnnnnnnnnnnnnnnnnnnnnnnnn

SEQ ID NO: 2422 - DNA, 710 bp, Homo sapiens
  misc_feature 1, 21, 30, 31, 449, 450, 451, 452, 453, 454, 455, 456, 457,458, 459, 460, 461, 462, 463, 464, 465, 466, 467, 468, 469,470, 471, 472, 473, 474, 475, 476, 477, 478, 479, 480, 481,482, 483, 484, 485, 486, 487, 488, 489, 490, 491, 492: n = A,T,C or G
  misc_feature 493, 494, 495, 496, 497, 498, 499, 500, 501, 502, 503, 504,505, 506, 507, 508, 509, 510, 511, 512, 513, 514, 515, 516,517, 518, 519, 520, 521, 522, 523, 524, 525, 526, 527, 528,529, 530, 531, 532, 533, 534, 535, 536, 537, 538, 539: n = A,T,C or G
  misc_feature 540, 541, 542, 543, 544, 545, 546, 547, 548, 549, 550, 551,552, 553, 554, 555, 556, 557, 558, 559, 560, 561, 562, 563,564, 565, 566, 567, 568, 569, 570, 571, 572, 573, 574, 575,576, 577, 578, 579, 580, 581, 582, 583, 584, 585, 586: n = A,T,C or G
  misc_feature 587, 588, 589, 590, 591, 592, 593, 594, 595, 596, 597, 598,599, 600, 601, 602, 603, 604, 605, 606, 607, 608, 609, 610,611, 612, 613, 614, 615, 616, 617, 618, 619, 620, 621, 622,623, 624, 625, 626, 627, 628, 629, 630, 631, 632, 633: n = A,T,C or G
  misc_feature 634, 635, 636, 637, 638, 639, 640, 641, 642, 643, 644, 645,646, 647, 648, 649, 650, 651, 652, 653, 654, 655, 656, 657,658, 659, 660, 661, 662, 663, 664, 665, 666, 667, 668, 669,670, 671, 672, 673, 674, 675, 676, 677, 678, 679, 680: n = A,T,C or G
  misc_feature 681, 682, 683, 684, 685, 686, 687, 688, 689, 690, 691, 692,693, 694, 695, 696, 697, 698, 699, 700, 701, 702, 703, 704,705, 706, 707, 708, 709, 710: n = A,T,C or G
ngacgcgcgtaaacgacttantatagggcnnattggagctccccgcggtggcggccgaggacgcggcaatagaagccggcgtaaagagtgttttagatcactccctccccttctactcaacctggtgactcatctctccgattgcaaagagcaagacacgccactccgcttcaacgccaaagcggggatctgctggggcacagtatgcaatttaaggaaaacccccaaaggctacaggcgacctgctgatcaggaaagaatttcgctcttgtcaagtacctgcccgggcggccgctctagaactagtggatcccccgggctgcaggaattcgatatcaagcttatcgataccgtcgacctcgagggggggcccggtacccagcttttgttccctttagtgagggttaattgcgcgcttggcgtaatcatggtcatagctgtttcctgannnnnnnnnnnnnnnnnnnnnnnnnnnnnnnnnnnnnnnnnnnnnnnnnnnnnnnnnnnnnnnnnnnnnnnnnnnnnnnnnnnnnnnnnnnnnnnnnnnnnnnnnnnnnnnnnnnnnnnnnnnnnnnnnnnnnnnnnnnnnnnnnnnnnnnnnnnnnnnnnnnnnnnnnnnnnnnnnnnnnnnnnnnnnnnnnnnnnnnnnnnnnnnnnnnnnnnnnnnnnnnnnnnnnnnnnnnnnnnnnnnnnnnnnnnnnnnnnnnnnn

SEQ ID NO: 2423 - DNA, 688 bp, Homo sapiens
  misc_feature 312, 441, 456, 505, 603, 642, 648, 657, 668: n = A,T,C or G
gacccgtaatacgactactatagggcgagattggagctccccgcggtggcggccgcccgggcaggtacgcggggctgcctggggtgacccataaggaacaccccccccttctcaacaaccacagaagataaatgccaaggggaccaccaacatgggcatggggctgtgatgccaatcttaagggaaaacacaagtaaaattggctccaggactgagctgggggcagctgctctttctgtccatgactttgaggcgggatctcgagcgtctgtctgacgggccttctgtctgctgtcctctcgcaggtttcanacattgaatccaggattgcagccctgagggccgcagggctcacggtgaagccctcgggaaagccccggaggaagtcaaacctcccgatatttctccctcgagtggctgggaaacttggcaagagaccanaggacccaaatgcanacccttcaagtgaggccaaggcaatggctgtaccctatcttctgagaanaaagttcagtaattccctgaaaagtcaaggtaaagatgatgattcttttgatcggaaatcagtgtaccttggccgctctagaactagtggatcccccnggctgcaggaattccatatcaagcttatcgataccgtcnacctcnagggggggnccggtacccancttttggtccctttaattga

SEQ ID NO: 2424 - DNA, 841 bp, Homo sapiens
  misc_feature 24, 564, 626, 637, 659, 692, 696, 712, 719, 746, 758, 778,779, 780, 781, 782, 783, 784, 785, 786, 787, 788, 789, 791,793, 794, 795, 796, 797, 798, 799, 800, 801, 802, 803, 804,805, 806, 807, 808, 809, 810, 811, 812, 813, 814, 815: n = A,T,C or G
  misc_feature 816, 817, 818, 819, 820, 821, 822, 823, 824, 825, 826, 827,828, 829, 830, 831, 832, 833, 834, 835, 836, 837, 838, 839,840, 841: n = A,T,C or G
gcgcgtatcgactactatagggcnaattggagctccccgcggtggcggccgaggtactgtatattttgtaaacaaaaatgactggcttttcaaccaccccctagtcaaatccaccacagactttcctggtagatttaagaaacccagtcttaaactgctgtttgcatatgtcttctgatgttgattatttaaaaaaaaacaaaaaacggccatttcggaaatttcatattgacagttttcatttatagtacgcggggactgggagagcgggctgaatgcaatggagtgtgcattacatttggaaaaaaatgtgaatcagtcactactggaactgcacaaactggccactgacaaaaatgacccccatttgtgtgacttcattgagacacattacctgaatgagcaggtgaaagccatcaaagaattgggtgaccacgtgaccaacttgcgcaagatgggagcgcccgaatctggcttggcggaatatctctttgacaagcacaccctgggagacagtgataatgaaagctaagcctcgggctaatttcccatagcccgtggggngacttccctggtcaccaaggcagtgcatgcatgttggggtttcctttaccttttctataagntggcctgcccnggccggccgtctaaaactaagnggatccccgggctggaggaattcaatatcagcntatngatccgccaacttganggggggnccggtcccaacttttggtccttatganggttaattggcncctgcgtaacatggcataannnnnnnnnnnncngnnnnnnnnnnnnnnnnnnnnnnnnnnnnnnnnnnnnnnnnnnnnnnnnn

SEQ ID NO: 2425 - DNA, 870 bp, Homo sapiens
  misc_feature 2, 3, 4, 5, 6, 7, 8, 9, 12, 13, 33, 37, 67, 578, 580, 581,582, 583, 584, 585, 586, 587, 588, 589, 590, 591, 592, 593,594, 595, 596, 597, 598, 599, 600, 601, 602, 603, 604, 605,606, 607, 608, 609, 610, 611, 612, 613, 614, 615, 616: n = A,T,C or G
  misc_feature 617, 618, 619, 620, 621, 622, 623, 624, 625, 626, 627, 628,629, 630, 631, 632, 633, 634, 635, 636, 637, 638, 639, 640,641, 642, 643, 644, 645, 646, 647, 648, 649, 650, 651, 652,653, 654, 655, 656, 657, 658, 659, 660, 661, 662, 663: n = A,T,C or G
  misc_feature 664, 665, 666, 667, 668, 669, 670, 671, 672, 673, 674, 675,676, 677, 678, 679, 680, 681, 682, 683, 684, 685, 686, 687,688, 689, 690, 691, 692, 693, 694, 695, 696, 697, 698, 699,700, 701, 702, 703, 704, 705, 706, 707, 708, 709, 710: n = A,T,C or G
  misc_feature 711, 712, 713, 714, 715, 716, 717, 718, 719, 720, 721, 722,723, 724, 725, 726, 727, 728, 729, 730, 731, 732, 733, 734,735, 736, 737, 738, 739, 740, 741, 742, 743, 744, 745, 746,747, 748, 749, 750, 751, 752, 753, 754, 755, 756, 757: n = A,T,C or G
  misc_feature 758, 759, 760, 761, 762, 763, 764, 765, 766, 767, 768, 769,770, 771, 772, 773, 774, 775, 776, 777, 778, 779, 780, 781,782, 783, 784, 785, 786, 787, 788, 789, 790, 791, 792, 793,794, 795, 796, 797, 798, 799, 800, 801, 802, 803, 804: n = A,T,C or G
  misc_feature 805, 806, 807, 808, 809, 810, 811, 812, 813, 814, 815, 816,817, 818, 819, 820, 821, 822, 823, 824, 825, 826, 827, 828,829, 830, 831, 832, 833, 834, 835, 836, 837, 838, 839, 840,841, 842, 843, 844, 845, 846, 847, 848, 849, 850-870: n = A,T,C or G
gnnnnnnnnggnngccttatacgactactatanggcnaattggagctccaccgcggtggcggccgangtacatccaagattaggtcataaaaagtctgtggcagctactcgggaggctgaggcaggagaattgcttgcacccaggaggtggaggttgcagtgagctgagaccacgccactgcactcaagcctgggctataagagcaaaattctgtctcaaaaaaagtccgtggcttcaatcttgggggctctgcctctctggctttttgctcagttactctgaaaaaagccaggtgtcacactgtaagctgtcctacagagaggcccatgtcacaaagaacttatgtcttctgccaagagccacatgaatgagcctggaaactgagtcacactctgcacattcatgtacctgcccgggcggccgctctagaactagtggatcccccgggctgcaggaattcgatatcaagcttatcgatacccgtcgacctcgagggggggcccggtacccagcttttgttccctttagtgaagggttaattgcgcgcttggcgtaatcatggtcatagctgttttcngnnnnnnnnnnnnnnnnnnnnnnnnnnnnnnnnnnnnnnnnnnnnnnnnnnnnnnnnnnnnnnnnnnnnnnnnnnnnnnnnnnnnnnnnnnnnnnnnnnnnnnnnnnnnnnnnnnnnnnnnnnnnnnnnnnnnnnnnnnnnnnnnnnnnnnnnnnnnnnnnnnnnnnnnnnnnnnnnnnnnnnnnnnnnnnnnnnnnnnnnnnnnnnnnnnnnnnnnnnnnnnnnnnnnnnnnnnnnnnnnnnnnnnnnnnnnnnnnnnnnnnnnnnnnnnnnnnnnnnnnnnnnnnnnnnn

SEQ ID NO: 2426 - DNA, 699 bp, Homo sapiens
  misc_feature 1, 2, 3, 4, 5, 6, 8, 9, 10, 11, 12, 22, 25, 43, 632, 687: n = A,T,C or G
nnnnnnannnnngacgcgcgtnatncgacttactatagggccngattggagctccaccgcggtggcggcccgaggtacgcgggggaccttggatgtgggaggattgcattcagtctagttcctggttgccggctgaaataacctgaattcaagccatgaagaagcagcaatctgtcttctggattaaaactgaagatcaacctactttcaacttactaagaaaggtattaagcgcctttctgagagctctcagtgggcttcctaagcacgttcactctgcctcctttaagtcttatatttatgatcaagatgaaagggagggatgtatcactgcacagagattctacaagtggatatataaagctaataatgttttcagtgagctcttctctggcaactactttccaagtgctttcagcattccaccttgaagcacaacgttaataatgcacaatttcttatgttcagccacagaatgttcaccgtgtgatttggttacaacatattgctctatccaggcctctaacaaaactgacttctttcaaatggacttgcagttgctgaattccaaatcaacactttatcttaaaaacagaaaaggaagggaagggtggaaggaggggaacagaaanggtcctgcccggccggccgtctagaactagtggatcccccggctgcaggaattcnatatcaagctta

SEQ ID NO: 2427 - DNA, 847 bp, Homo sapiens
  misc_feature 22, 285, 368, 437, 527, 565, 602, 624, 631, 655, 671, 687,693, 701, 709, 713, 741, 743, 750, 769, 802, 814, 823, 826,828, 830, 835: n = A,T,C or G
agcgcgttatcgacttactatntggctgattggagctccccgcggtggcggccgaggtacccgtagggtttttaataccaggttcaccacaaacacgagtaatgtgttgtctgtggagttatgacaggtggtagaaagttccccgctctattataatattatgggaccagcattgtatacacagtccatccttaaccaaaacatcattatgctgccatgacaacatttgtttggttttcttgtttgttgtttgtttttaagaccaggtctggccctgtcgcccangttggagtgcaggaagaaaactaggagagtatggtgtcaccgaagcccagggaaaagcgttcccgaaagggagcggtccacangacacatgaagttagagtatccggaggattgagcaacatggagattgctgctcatcgcaactacagcantttcaattgagttaaggacctgaacgccagactacagcggaggtgacaagaagtaagaaagtgaagactaaaaatgtaaataatttcagntgtaattgtgaaaggagagatgattcaaagataagttnaggaagaagtggagcaaaggcattacttctttttttncccttcctcgctttctttcttnctaagangaagacaggcacctttaaaggctnaaaaaggtgaaaatanttgaaactaatactantagaangagggccntccaattntaanagaatgactctataaacaggaaagactncntcccttngggattcggacaaaaaaangaggttgctgatcctttcagggttaagaaagtnagggtaaaatcncaaaaaatnttncncntttancctaggcccgga

SEQ ID NO: 2428 - DNA, 867 bp, Homo sapiens
  misc_feature 1, 15, 25, 26, 590, 602, 666, 677, 696, 707, 734, 751, 759,774, 790, 805, 815, 817, 826, 842, 845, 849, 863: n = A,T,C or G
nagccgtatcgactnacttatggcnnataggagctccccgcggtggcggccgaggtacgcggggggctttttctctgaaagcaaacgtgtgtcttttacaccagggctttctccccaccccagggggtgtcttccatccttttgtggctcagttgaaggcgaaaagggctccaaaccactaactaaccagaggagagccccttcttccacctccagggagaatttcagatttaatttgtccgaagatagcgtgctctcttcttactcatttgccatcattacgaggaaaacaaaccaccaccttggcttcaagatcctgggtagaggctcacggtcttttcaaccatctttggcgaggccttgcttccttccactcgagcctgttgactggggctgcttttaaccctttcctatttgctgagaatgcagccgtgtgacagtaactgaacattggtctaaagtctttccaaaaggtcaaggttcacaagaacatctgctcaaattaatgaccatgggggatatgaagaccccagactttgatgacctcctggcagcatttgacatcccagatatggtcgatcctaaagcanctattgagtctngacaccatgaccatgaaagccacatgaagcaagaatgctcaccggagaggatgacttccacccnccattatcttntgatgtgggtgtcaaccgntatcgtcaaanaagttcggaacatttgactctttccanggccggggagaaagaanggcccaanccccctggcaatggnttacattatggggttnttaaagattctcccntgaaggttcngnaaaaaaggngccaagtccttgaaanganattncccccttttgaggngaac

SEQ ID NO: 2429 - DNA, 861 bp, Homo sapiens
  misc_feature 7, 8, 9, 10, 11, 14, 23, 29, 40, 41, 304, 384, 499, 557,611, 650, 716, 723, 726, 727, 736, 737, 738, 739, 740, 741,742, 743, 744, 745, 746, 747, 748, 749, 750, 751, 752, 753,754, 755, 756, 757, 758, 759, 760, 761, 762, 763, 764: n = A,T,C or G
  misc_feature 765, 766, 767, 768, 769, 770, 771, 772, 773, 774, 775, 776,777, 778, 779, 780, 781, 782, 783, 784, 785, 786, 787, 788,789, 790, 791, 792, 793, 794, 795, 796, 797, 798, 799, 800,801, 802, 803, 804, 805, 806, 807, 808, 809, 810, 811: n = A,T,C or G
  misc_feature 812, 813, 814, 815, 816, 817, 818, 819, 820, 821, 822, 823,824, 825, 826, 827, 828, 829, 830, 831, 832, 833, 834, 835,836, 837, 838, 839, 840, 841, 842, 843, 844, 845, 846, 847,848, 849, 850, 851, 852, 853, 854, 855, 856, 857, 858: n = A,T,C or G
  misc_feature 859, 860, 861: n = A,T,C or G
agcgcgnnnnnggncgccgttancgactnactatagggcnnattggagctccccgcggtggcggccgaggtaccaaaagaattaggcacagaaaactgttttaattagggtaacagaaagcagctgcaatacagagtgatgaatgtgagctttgaaagtaaatttggtgggtttcaggatttctgaggagggaagtcaaacagttctaaagagttggcaaggccaattgagagggtggtaagctatcctaagccctttcttctacattaactctgctttccagttagtcttcaggtgctttaanaatttgagatccttttttctcattgtgtggtccatggactagaagtattagcactacctggaaacttgttcaaaatgcanaattctgggccccaaaacagacctactaaataaaagtctccattttaaagagattgctaaatgattcataacttgttaaagtttgagaggcattaccttagattctgtcttcttnttacctttcaaacccagctgaaagtgggtttgtatttccctttactttcgacctttanggaagtacctgcccgggcggccgctctaaaactagtggatcccccgggctgcangaattcgatatcaagcttatcgataccgtcgacctcganggggggcccggacccagcttttggtccctttagtgaaggttaattgcgcccttggccgtaatcatnggcatanttnntttttccgnnnnnnnnnnnnnnnnnnnnnnnnnnnnnnnnnnnnnnnnnnnnnnnnnnnnnnnnnnnnnnnnnnnnnnnnnnnnnnnnnnnnnnnnnnnnnnnnnnnnnnnnnnnnnnnnnnnnnnnnnnnnnn

SEQ ID NO: 2430 - DNA, 878 bp, Homo sapiens
  misc_feature 25, 596, 633, 637, 659, 674, 682, 705, 710, 715, 733, 743,745, 754, 755, 758, 762, 764, 776, 796, 797, 800, 815, 821,830, 832, 833, 834, 835, 836, 837, 838, 839, 840, 841, 842,843, 844, 845, 850, 851, 852, 853, 854, 855, 856, 857: n = A,T,C or G
  misc_feature 858, 859, 860, 861, 862, 863, 864, 865, 866, 867, 868, 869,870, 871, 872, 873, 874, 875, 876, 877, 878: n = A,T,C or G
gcgcgtatcgactcactatagggcnaattggagctccccgcggtggcggccgggggccattgagactgccatggaagacttgaaaggtcacgtagctgagacttctggagagaccattcaaggcttctggctcttgacaaagatagaccactggaacaatgagaaggagagaattctactggtcacagacaagactctcttgatctgcaaatacgacttcatcatgctgagttgtgtgcagctgcagcggattcctctgagcgctgtctatcgcatctgcctgggcaagttcaccttccctgggatgtccctggacaagagacaaggagaaggccttaggatctactgggggagtccggaggagcagtctcttctgtcccgctggaacccatggtccactgaagttccttatgctactttcactgagcatcctatgaaatacaccagtgagaaattccttgaaatttgcaagttgtctgggttcatgtctaaacttgttccagctatccagaatgcccacaagaattcaactggatctggaaagaagaaagaaactgatggcgttaactgaacccattttgattgagacctcacanggctgatgtcattcatttggaaaccgcaacaaacttngctntttccttgccctgggaatattnggtttttgagaatcntttttggncctcggccgtcttaaaactaagnggatnccccnggctggaggaattcgatnttaaaccttntngattcccgnngancctnangggggggccggnccccacttttgttcctttanngangggtaattgcccccntggcgnatcatgggntnnnnnnnnnnnnnncccgnnnnnnnnnnnnnnnnnnnnnnnnnnnnn

SEQ ID NO: 2431 - DNA, 870 bp, Homo sapiens
  misc_feature 10, 16, 21, 25, 599, 626, 659, 660, 663, 664, 665, 666, 667,668, 670, 672, 673, 674, 675, 676, 677, 678, 679, 680, 681,682, 683, 684, 685, 686, 687, 688, 689, 690, 691, 692, 693,694, 695, 696, 697, 698, 699, 700, 701, 702, 703: n = A,T,C or G
  misc_feature 704, 705, 706, 707, 708, 709, 710, 711, 712, 713, 714, 715,716, 717, 718, 719, 720, 721, 722, 723, 724, 725, 726, 727,728, 729, 730, 731, 732, 733, 734, 735, 736, 737, 738, 739,740, 741, 742, 743, 744, 745, 746, 747, 748, 749, 750: n = A,T,C or G
  misc_feature 751, 752, 753, 754, 755, 756, 757, 758, 759, 760, 761, 762,763, 764, 765, 766, 767, 768, 769, 770, 771, 772, 773, 774,775, 776, 777, 778, 779, 780, 781, 782, 783, 784, 785, 786,787, 788, 789, 790, 791, 792, 793, 794, 795, 796, 797: n = A,T,C or G
  misc_feature 798, 799, 800, 801, 802, 803, 804, 805, 806, 807, 808, 809,810, 811, 812, 813, 814, 815, 816, 817, 818, 819, 820, 821,822, 823, 824, 825, 826, 827, 828, 829, 830, 831, 832, 833,834, 835, 836, 837, 838, 839, 840, 841, 842, 843, 844: n = A,T,C or G
  misc_feature 845, 846, 847, 848, 849, 850, 851, 852, 853, 854, 855, 856,857, 858, 859, 860, 861, 862, 863, 864, 865, 866, 867, 868,869, 870: n = A,T,C or G
agcgcgtatngactantatanggcngattggagctccccgcggtggcggccgaggtactttactcacccttcctctgacagaaaaggatgaagtcaagggcctggtagaggcaccactaagaaaggcatctgaaaggaccaaagagagtgaccagcaagcattttttgcaaggctgaggagctgacagcttccatgaaaggctggaccacccagtggtgaaaagcatcatctgggttaccttgtgctgccataaaacacaccacagacttggtgacttaaaccacagatatttatcttctcacaatcctggaggctggaagtctgcaatcacggtgccagcatggtcaggttctggtgagggcctctttccttctcactgtgtgctctttcttgtgcatggagagggagagcatgaacaagccctctactgtccctcttagaagggcactaatcccataataagacatccaccctcctgacctcggctaaccctagttaagtacctgcccgggcggccggctctagaactagtggatcccccgggctgcaggaattcgatatcaagcttatcgataccggcgacctcaaggggggcccngtcccaacttttgttccctttaatganggttaattgccgcctggcgtaatcatggcatanntgnnnnnncngnnnnnnnnnnnnnnnnnnnnnnnnnnnnnnnnnnnnnnnnnnnnnnnnnnnnnnnnnnnnnnnnnnnnnnnnnnnnnnnnnnnnnnnnnnnnnnnnnnnnnnnnnnnnnnnnnnnnnnnnnnnnnnnnnnnnnnnnnnnnnnnnnnnnnnnnnnnnnnnnnnnnnnnnnnnnnnnnnnnnnnnnnnnnnnnnnnnnnnn

SEQ ID NO: 2432 - DNA, 882 bp, Homo sapiens
  misc_feature 8, 15, 19, 20, 517, 520, 521, 522, 523, 524, 525, 526, 527,528, 529, 530, 531, 532, 533, 534, 535, 536, 537, 538, 539,540, 541, 542, 543, 544, 545, 546, 547, 548, 549, 550, 551,552, 553, 554, 555, 556, 557, 558, 559, 560, 561, 562: n = A,T,C or G
  misc_feature 563, 564, 565, 566, 567, 568, 569, 570, 571, 572, 573, 574,575, 576, 577, 578, 579, 580, 581, 582, 583, 584, 585, 586,587, 588, 589, 590, 591, 592, 593, 594, 595, 596, 597, 598,599, 600, 601, 602, 603, 604, 605, 606, 607, 608, 609: n = A,T,C or G
  misc_feature 610, 611, 612, 613, 614, 615, 616, 617, 618, 619, 620, 621,622, 623, 624, 625, 626, 627, 628, 629, 630, 631, 632, 633,634, 635, 636, 637, 638, 639, 640, 641, 642, 643, 644, 645,646, 647, 648, 649, 650, 651, 652, 653, 654, 655, 656: n = A,T,C or G
  misc_feature 657, 658, 659, 660, 661, 662, 663, 664, 665, 666, 667, 668,669, 670, 671, 672, 673, 674, 675, 676, 677, 678, 679, 680,681, 682, 683, 684, 685, 686, 687, 688, 689, 690, 691, 692,693, 694, 695, 696, 697, 698, 699, 700, 701, 702, 703: n = A,T,C or G
  misc_feature 704, 705, 706, 707, 708, 709, 710, 711, 712, 713, 714, 715,716, 717, 718, 719, 720, 721, 722, 723, 724, 725, 726, 727,728, 729, 730, 731, 732, 733, 734, 735, 736, 737, 738, 739,740, 741, 742, 743, 744, 745, 746, 747, 748, 749, 750: n = A,T,C or G
  misc_feature 751, 752, 753, 754, 755, 756, 757, 758, 759, 760, 761, 762,763, 764, 765, 766, 767, 768, 769, 770, 771, 772, 773, 774,775, 776, 777, 778, 779, 780, 781, 782, 783, 784, 785, 786,787, 788, 789, 790, 791, 792, 793, 794, 795, 796-882: n = A,T,C or G
agccgtancgactantatnnggctaattggagctccccgcggtggcggccgaggtaccgggcagcttgacctccattgcttttggcttttgtctctttctccttttgaagctcaaaagggcatagagtggactctgatcctaggatttttttttccctgctttggctgcctctgttttggttcatgtgtcaagcagagacggggaaagccaaacgacacaatgagcgttctcagaaaggaaacttcttcggaatgaaaagctttggccacattggaaagggtagaagtctgagagaaactttttcatcagggagactaggtcggtgtcttagtcctttcaggctgctgtaacaaagtacctgcccgctctagaactagtggatcccccgggctgcaggaattcgatatcaagcttatcgataccgtcgacctcgagggggggcccggtacccagcttttgttccctttagtgagggttaattgcgcgcttggcgtaatcatggtcatagctgtttcntgnnnnnnnnnnnnnnnnnnnnnnnnnnnnnnnnnnnnnnnnnnnnnnnnnnnnnnnnnnnnnnnnnnnnnnnnnnnnnnnnnnnnnnnnnnnnnnnnnnnnnnnnnnnnnnnnnnnnnnnnnnnnnnnnnnnnnnnnnnnnnnnnnnnnnnnnnnnnnnnnnnnnnnnnnnnnnnnnnnnnnnnnnnnnnnnnnnnnnnnnnnnnnnnnnnnnnnnnnnnnnnnnnnnnnnnnnnnnnnnnnnnnnnnnnnnnnnnnnnnnnnnnnnnnnnnnnnnnnnnnnnnnnnnnnnnnnnnnnnnnnnnnnnnnnnnnnnnnnnnnnnnnnnnnnnnnnnnnnnnnnnnnnnnnnnnnnnnnnnnnnnn

SEQ ID NO: 2433 - DNA, 860 bp, Homo sapiens
  misc_feature 116, 492, 523, 538, 542, 548, 579, 587, 652, 655, 660, 662,663, 664, 665, 668, 671, 672, 673, 674, 675, 676, 677, 679,680, 681, 682, 683, 684, 685, 686, 687, 688, 689, 690, 691,692, 693, 694, 695, 696, 697, 698, 699, 700, 701, 702: n = A,T,C or G
  misc_feature 703, 704, 705, 706, 707, 708, 709, 710, 711, 712, 713, 714,715, 716, 717, 718, 719, 720, 721, 722, 723, 724, 725, 726,727, 728, 729, 730, 731, 732, 733, 734, 735, 736, 737, 738,739, 740, 741, 742, 743, 744, 745, 746, 747, 748, 749: n = A,T,C or G
  misc_feature 750, 751, 752, 753, 754, 755, 756, 757, 758, 759, 760, 761,762, 763, 764, 765, 766, 767, 768, 769, 770, 771, 772, 773,774, 775, 776, 777, 778, 779, 780, 781, 782, 783, 784, 785,786, 787, 788, 789, 790, 791, 792, 793, 794, 795, 796: n = A,T,C or G
  misc_feature 797, 798, 799, 800, 801, 802, 803, 804, 805, 806, 807, 808,809, 810, 811, 812, 813, 814, 815, 816, 817, 818, 819, 820,821, 822, 823, 824, 825, 826, 827, 828, 829, 830, 831, 832,833, 834, 835, 836, 837, 838, 839, 840, 841, 842, 843: n = A,T,C or G
  misc_feature 844, 845, 846, 847, 848, 849, 850, 851, 852, 853, 854, 855,856, 857, 858, 859: n = A,T,C or G
agccgtatcgactactatagggcgaattggagctccacccgcggtggcggccgcccgggcaggtactttactcacccttcctctggcagaaaaggatgaagtcaagggcctggtanaggcaccactaagaaaggcatctgaaaggaccaaagagagtgaccagcaagcattttttgcaaggctgaggagctgacagcttccatgaaaggctggaccacccagtggtgaaaagcatcatctgggttaccttgtgctgccataaaacacaccacagacttggtgacttaaaccacagatatttatcttctcacaatcctggaggctggaagtctgcaatcacggtgccagcatggtcaggttctggtgagggcctctttccttctcactgtgtgctccttcttgtgcatggagagagagagcgtgaacaagccctctactgtccctcttagaagggcactaatcccataataaggcatccaccctcctgacctngctaccctagttaaagtcctcgccgctctanaactaatggatcccnccgnctgcangaattcgatatcaaacttatcgataccgtcnacctccanggggggcccggtcccaacttttggtccctttaatgagggttaattgcgcgcttggcgtaatcatnggnataantnnnnttncgnnnnnnnannnnnnnnnnnnnnnnnnnnnnnnnnnnnnnnnnnnnnnnnnnnnnnnnnnnnnnnnnnnnnnnnnnnnnnnnnnnnnnnnnnnnnnnnnnnnnnnnnnnnnnnnnnnnnnnnnnnnnnnnnnnnnnnnnnnnnnnnnnnnnnnnnnnnnnnnnnnnnnnnnnnnnnnnnnnnnnnnnnnng

SEQ ID NO: 2434 - DNA, 844 bp, Homo sapiens
  misc_feature 402, 512, 517, 548, 553, 558, 565, 623, 650, 667, 694, 708,742, 770, 805, 808, 827, 839, 844: n = A,T,C or G
gccgtatcgactactataggggcgaattggagctccccgcggtggcggccgcccgggcaggtacgcggggagaacttgtgtgcttagacccgacgctgggaggagatgctgccacctaggttacttgtaggaccctatacggcaacctcctttgccaggaactatttataaacatcctgcaggaaaatgagtctatatgtcagaatacacatttcccaccttgcccaacagtagaaaaacataagaagagaaaaacattaaaaaatgacaaggaagttaatggaagtcagcaatgtgatggtgtttggaggtggagccttcagaaggtaattaatgcccttgtaagaagaggccagaagagcttgccaccttcttcctgccatgtgaggagcccaaaagccngctgtctgcaacctgcaagaagaccctcactagaagctagccttctggcatcctcatcttggcttttcaactttcaaaactgtgaaaagtatatgtttgtgggttaatcnatggnctatggtaatttttttattaccagtcccagnccaanacagngcctcanttactacttccatttattttattatataggctccttcaaaaacccatgttcaaattangaagattagatcctggaacccataccnccttcctagttttaatntacaaatttgaaaaatagttggtattnactatcttatccanaaagccaaatctgtggttctaattttatttatantgccaaatgaaaaacttaccccttcctnattttacttgcccaaaaaaaaaaaaaaaaaaaaanccngggccttaaaaaaaagggncccccggccganaaatn

SEQ ID NO: 2435 - DNA, 857 bp, Homo sapiens
  misc_feature 16, 25, 524, 569, 593, 604, 618, 658, 711, 726, 757, 761,762, 787, 796, 804, 823: n = A,T,C or G
gcgcgtatcgacttantatatggcngattggagctccaccgcggtggcggccgcccgggcaggtacgcggggaggagatgctgccacctaggttacttgtagggaccctatacggcaacctcctttgccaggaactatttataaacatcctgcaggaaaatgagtctatatgtcagaatacacatttcccaccttgcccaacagtagaaaaacataagaagagaaaaacattaaaaaatgacaaggaagttaatggaagtcagcaatgtgatggtgtttggaggtggagccttcagaaggtaattaatgcccttgtaagaagaggccagagagcttgcgcaccttcttcctgccatgtgaggagccaagaagccggctgtctgcaacctgcaagaggaccctcactagaagctagccatactggcatcctcatcttggctttccaacttccagaactgtgagaagtatatgtttggggtttaatcaatggtctatggtaatttttttatagcagtcccaccaanacagtgccttatttactcataccatttatattattatataggctnctttcagaaacccatgttcaaatnagaaatagatnctgaaccattacancttccttgtttttaatttcaaatttgggaaatagttggtnttactttctcttccaaaaatgccgaatcatggtgcttctaatttttatatatnattggccaaatgaanaaacttaacaccattcttaaattttacttgncccnngaatggaaagaatgaaaaaaaaatntttgaaaanccccaagnggatttggatctaattatnggtaaatggatttgttaccaacaaaatacccctt

SEQ ID NO: 2436 - DNA, 872 bp, Homo sapiens
  misc_feature 2, 16, 20, 282, 290, 292, 595, 601, 616, 637, 661, 684, 690,693, 707, 709, 748, 749, 754, 763, 765, 767, 769, 791, 792,793, 797, 798, 803, 805, 816, 830, 832, 840, 858, 868, 869,871, 872: n = A,T,C or G
ancgcgtatcgactantatntggctgattggagctccaccgcggtggcggccgccgggcaggtacgcgggctttgaccaaagagtgctctgacacactgcattccctttcccctaggggtagcccatgttgagggcaagacctccagaaatcctgcagcacctccgggtcttgacagttcccctgtagttgccacggtctcagtgggttctaccgggttgtttgcaggaaatcaactcacgtggagacattaagggctgagattctctgggcagaatggcancacacagncnataaagtgcccacctcctcagcttgggtttgacgtgagggtgaatgaaactttgcgaactggcctcctgatgctctgctcccaaggactcctcaaatggccaccagcagcagttcctgggcttgggggtgcagaggagctcaccaccattttggcagtcagcaatctggggcaggtggaaggggagcaaagaaacacccaacctactcttttcatgggattacaaagttcctcaaggggcattaactttcaaactcttgctgccttcttttttttgcgccccagattcattccatgggttctntgacangttcggaaactcttnctttagtattctacttttggncatgatcatttacctgtaactttnggttttattttcttaaaaaaaancagtanctnattggctggagtcnancatttttggaagccaaaaaaaaaaaaaaaaaaaaaaccnnccccnttttaaaanangngnacccccggggggggggaatttnnntaannttttnanccccccccccnggggggggccggcncncctttttnccctttaagggggaaaanccccccgccnnann

SEQ ID NO: 2437 - DNA, 493 bp, Homo sapiens
  misc_feature 8, 28, 387, 465, 477, 484: n = A,T,C or G
gacgcccnaatacgactactatagggcnaattggagctccccgcggtggcggccgcccgggcaggtacgcacaagcagggcccagcttgggagacgctaggataactaagacctggtcagcgccctgaggagtcttgtctggataaagggagacacacactagcttggacttatgcgtgcagcggagctgtgtagagcaggagtgcgtggagagggcagcaatgaactttggctggagagccagagaaagcttcgtgagctggaacacggggtaaagtaggagctttccagggcggaggggacttctgaagtggaggaaactgcctgttcaggacatggaggtagggatcaaagttctgagtcatgttgggtgggcacagagcagangatggctggggcggtctcagggataaggaagaagtttggggaccagactgttttgtcaccgtatctgcatccctgcancctgcacgccanaatgtangcgccagga

SEQ ID NO: 2438 - DNA, 885 bp, Homo sapiens
  misc_feature 3, 5, 31, 458, 489, 544, 649, 659, 672, 701, 706, 728, 752,756, 762, 783, 786, 815, 826, 834, 848, 869, 872: n = A,T,C or G
agngngcgcgtaatcgactcactatagggcnaattggagctccccgcggtggcggcccgaggtaccacaacactcaccaggactggagtgccacctatgacctcattgcgtaatgggatggcttgtcctcaaatgggcccggtcttggacgagcctgaggatgtctacaagtggaagaaaagaaccactggagcagaaggtggggaggataaaatttggagcaagattctcaaggaagcaacaagatcctaaggaaaggagaaagagaccacctactgcatttctgtcactcgctgaaaaggacactctgtcagaaaatcttctagcaaacttcaaagggcaaaatcaccccttgttactgataaagcccagagagcttcagcagctaacattccctggacagggcacagcaaggatttgaacctaggtcaatctggccagaacacccacaagctttncttaactcagtgtgctatctcccacgactanggtcgctactgctttataatcacctttgtagccaccaatggattttgttcatcantatttttcaggcaattgatactttaaatattcagcttcaagacgtatgcaattttcattgacatcttttggaaaaactgaccaaacctggactttgatttaatgncttttggaanccttccaagatgntatattacttttaaatagaaaggcttggncctcnttatgtcaaggaattgtcccanttcttattttccccttaaattaancccntttgtnccccaaagtccaaggagtcangcngaagcccttgccttggggctttttagaanaaacaacaaancctggacntttgttttcaacangggtttgcattagggagtggnttnaccaaatcctcat

SEQ ID NO: 2439 - DNA, 522 bp, Homo sapiens
  misc_feature 2, 3, 4, 5, 6, 9, 23, 40, 294, 414, 474, 477, 482, 522: n = A,T,C or G
gnnnnnagngatcgacgccgtanacgactactatagggcnaattggagctccaccgcggtggcggccgcccgggcaggtacgcgggggaggaagtgcagactgacatgggagagcatggcaggcaaacttagcctgtaagggtggaggtgctggagagacacttcctgcaggaagtggcctgtaggctgatacttgaagaatggttaggagttaggcaattggggtgggagggaggaaatgaagctgagacaaagaatagcaagggccaaaacctagaaacaagagactgtaanctatagcaaaggaagtggggtaatgcatgttttaggtcctgtgtggggtgtttgtgaatacacatgcggggtgtggagcgtgatgagagacaaagctgagaagtgtggtggaaaaggaanagagagctgaggcagacgatgtaagatctgctgttacttcttgctgtgtgaccttgggtnaantgaantgggtgtgccttggatcacacacagctgtgcaataccaan

SEQ ID NO: 2440 - DNA, 488 bp, Homo sapiens
  misc_feature 14, 324, 394, 395, 466: n = A,T,C or G
actactatagggcnaattggagctccccgcggtggcggccgaggtacgcggggtgctcctctgagaaccatctgttggtctgatggtgctagatctgaagctggtgagcctcttggggcggcctcaagggctaacaagatctcaaatgcccttctctccatcatttgtggtatcctggattattgtgaaaatgtatagggattcctggggaagagttaaggattaaaatataaaggtttaaatataaataactttatatatatatgttttttcttgtaaaccaatatgttatatagtaggaagtttaattccttaactttggtntttctccctagcctttttatagccaacaagagcaaaagcacactgcaatgtccaaacgaattgcaggcgnnttctgctccctgaagcctgggaattaatttatatactcagtcccttttcccttggctggccattgaagtantttgaaccacagggattggact

SEQ ID NO: 2441 - DNA, 729 bp, Homo sapiens
  misc_feature 33, 505, 534, 559, 566, 588, 590, 595, 596, 598, 617, 632,663, 665, 666, 670, 671, 672, 673, 674, 675, 676, 678, 679,680, 681, 682, 683, 684, 685, 686, 687, 688, 689, 690, 691,692, 693, 694, 695, 696, 697, 698, 699, 700, 701, 702: n = A,T,C or G
  misc_feature 703, 704, 705, 706, 707, 708, 709, 710, 711, 712, 713, 714,715, 716, 717, 718, 719, 720, 721, 722, 723, 724, 725, 726,727, 728, 729: n = A,T,C or G
gagccccgcgtaatacgacttactatgagggcnaattggagctccaccgcggtggcggccgaggtactttactcacccttcctctgacagaaaaggatgaagtcaagggcctggtagaggcaccactaagaaaggcatctgaaaggaccaaagagagtgaccagcaaacattttttgcaaggctgaggagctgacagcttccatgaaaggctggaccacccagtggtgaaaagcatcatctgggttaccttgtgctgccataaaacacaccacagacttggtgacttaaaccacagatatttatcttctcacaatcctggaggctggaagtctgcaatcacggtgccagcatggtcaggttctggtgagggcctctttccttctcactgtgtgctctttcttgtgcatggagagagagagcatgaacaagccctctactgtccctcttagaagggcactaatcccataataaggcatccaccctcctgacctcggctaaccctanttaagtacctgcccgggcggccgctctanaactagtggatcccccgggctgcangaattcnatatcaagcttatcgatacccncnacctnnanggggggccccggtccccancttttgttcctttantgagggttaattgccccttggcgtaatcatngnntctnnnnnnncnnnnnnnnnnnnnnnnnnnnnnnnnnnnnnnnnnnnnnnnnnnnnnnnnnnn

SEQ ID NO: 2442 - DNA, 489 bp, Homo sapiens
  misc_feature 5, 6, 7, 14, 18, 116, 157, 164, 459, 476: n = A,T,C or G
gcttnnngacttantttngggctgattggagctccccgcggtggcggccgcccgggcaggtacgcggggtggctggcgagcagcggcctccccgcagggccaggcaggtgggccanagcttttggtttgctgaggtttgtcagattttccagctcanggcccanccagctggcaggaagcaggacagaggtcacttgaattcagaccacatgtccctgttaaatacattagcttttaaatcaatctttgttcaaagtccagtgagttgcaagcctaatgctcacctgcagagacagaattcctgagtgaacgaacagagcagctcctcttccatctccagaaatgacctccaccttcaacccccgagaatgtaaactgtccaagcaagaagggcaaaactatggcttcttcctgcgaattgagaaggacaccgagggccacctggtccgggtggttganaaagtgtagcccagcanagaaggctggcct

SEQ ID NO: 2443 - DNA, 689 bp, Homo sapiens
  misc_feature 5, 32, 376, 454, 489, 503, 518, 539, 544, 569, 576, 591,598, 606, 618, 620, 625, 633, 640, 644, 657, 664, 665, 678,679, 680, 681, 682, 683, 686, 687, 688, 689: n = A,T,C or G
gagcncgcgtaatacgactcactatgagggcnaattggagctccaccgcggtggcggccgaggtaccttggttttcaggttatctgacaaaggcagctttgattgggacatggaggcatgggcaggttctcctttctttggaaacacatccatgctgggatgcacagttcttttcctaaggattgtgtttactcctgactgcaacgtcttggccactgtttggagcagtttggtctgaaggtcattaaggatctgcttgcatcttgtttcatgtcctccgtgacagactgcagaccatgttagaagagaaggaaggtttgtggatcaagagggttgacattaggtttggtgagatgagttgcttggcacagatcancagaacaggaccctggtgataaggcatctggctttgctaaccacttatcatcttccattattctctttcttaactaantagacccgaaagtgcacttttgaagtctggtttanatggcgagattccnaatctacaatgatcnagtacctgcccgggcggccgntctanaactagtggatcccccgggctgcangaattcnatatcaagcttatcnataccgncaacctcnagggggggcccngncccancttttgtncctttantganggttaattgcccncttggcnnaatcatggctatnnnnnnccnnnn

SEQ ID NO: 2444 - DNA, 692 bp, Homo sapiens
  misc_feature 3, 4, 15, 22, 33, 477, 487, 544, 557, 562, 601, 608, 624,644, 646, 650, 667, 668, 676, 680, 688, 691: n = A,T,C or G
gannccgcgtaatangacatantatgagggctnattggagctccaccgcggtggcggccgcccgggcaggtactttcacagcaacatttagactagtgtttgaccaacaactgggcaccacggtcaagccaagttggcatatagaattagccagcaaacttggtattcacaatctgtcattatagtcttgtctataaacctaaggtttagagaaacgctggtcattctgaacaattccctgtgaatgcagagatcaaggagcctccccttaactgggtaggcagtgtgaaatacctgcagtgtgcttgaccttactgttcacccactggcagctgttcctacagcttggcttcagatatataatattacattggctaacttcaaagagcattgttttccaaggatagagatggtgatggtgtatattacttttaccagccccagacctgtaagaggttctcatctcttttgtttaanattttgttgnttttttttaatgctcaataaaagaagctttattctttcattaaaaaacaaatctcanaaaaacagggaanaaganggtagcctatgaaagtgtgattggtatttgatccatcgngacttancttggtttcacctaanactctgaaattctattctgntnttgngaaatttgggctgagtnnactacttncctnttaactgnatna

SEQ ID NO: 2445 - DNA, 709 bp, Homo sapiens
  misc_feature 34, 75, 76, 77, 80, 91, 92, 98, 105, 132, 153, 163, 181,182, 194, 195, 196, 381, 411, 431, 447, 462, 464, 490, 491,492, 493, 494, 499, 500, 501, 502, 503, 504, 505, 506, 507,508, 509, 510, 511, 512, 513, 514, 515, 516, 517, 518: n = A,T,C or G
  misc_feature 519, 520, 521, 522, 523, 524, 525, 526, 527, 528, 529, 530,531, 532, 533, 534, 535, 536, 537, 538, 539, 540, 541, 542,543, 544, 545, 546, 547, 548, 549, 550, 551, 552, 553, 554,555, 556, 557, 558, 559, 560, 561, 562, 563, 564, 565: n = A,T,C or G
  misc_feature 566, 567, 568, 569, 570, 571, 572, 573, 574, 575, 576, 577,578, 579, 580, 581, 582, 583, 584, 585, 586, 587, 588, 589,590, 591, 592, 593, 594, 595, 596, 597, 598, 599, 600, 601,602, 603, 604, 605, 606, 607, 608, 609, 610, 611, 612: n = A,T,C or G
  misc_feature 613, 614, 615, 616, 617, 618, 619, 620, 621, 622, 623, 624,625, 626, 627, 628, 629, 630, 631, 632, 633, 634, 635, 636,637, 638, 639, 640, 641, 642, 643, 644, 645, 646, 647, 648,649, 650, 651, 652, 653, 654, 655, 656, 657, 658, 659: n = A,T,C or G
  misc_feature 660, 661, 662, 663, 664, 665, 666, 667, 668, 669, 670, 671,672, 673, 674, 675, 676, 677, 678, 679, 680, 681, 682, 683,684, 685, 686, 687, 688, 689, 690, 691, 692, 693, 694, 695,696, 697, 698, 699, 700, 701, 702, 703, 704, 705, 706: n = A,T,C or G
  misc_feature 707, 708, 709: n = A,T,C or G
gagccccgcgtaataccgactcactatgagggcnaattggagctccaccgcggtggcggccgctctagaactagnnnatnccccgggctgnnagaatnctatatnaatcttatcgataccggccacctccanggggggcccggtcacccaganttttgttccntttaaagagggttaatcnnctgcgcttggcnnnatcatggtcatagctggtttcctgggcagtttgttccactcaacgctgggtaaattagtgccagtgttttgtgcaggggttccccatcctcttcgacttcctccagaatttgcgccatttccacttccccatgatgtacctcggccgctctagaactagtggatcccccgggctgcaggaattcnatatcaagcttatcgataccgtcgacctcnagggggggcccggtacccancttttgttccctttantgagggttaattgcncncttggcgtaatcatggtcatagctgnnnnnctggnnnnnnnnnnnnnnnnnnnnnnnnnnnnnnnnnnnnnnnnnnnnnnnnnnnnnnnnnnnnnnnnnnnnnnnnnnnnnnnnnnnnnnnnnnnnnnnnnnnnnnnnnnnnnnnnnnnnnnnnnnnnnnnnnnnnnnnnnnnnnnnnnnnnnnnnnnnnnnnnnnnnnnnnnnnnnnnnnnnnnnnnnnnnnnnnnnnnnnnnnnnnnnnnnnn

SEQ ID NO: 2446 - DNA, 873 bp, Homo sapiens
  misc_feature 16, 18, 20, 32, 51, 76, 115, 332, 350, 439, 441, 442, 454,456, 469, 493, 518, 545, 564, 566, 567, 578, 588, 594, 623,659, 674, 676, 677, 683, 693, 713, 716, 719, 722, 737, 745,752, 754, 761, 776, 779, 780, 784, 785, 787, 790, 791: n = A,T,C or G
  misc_feature 813, 827, 831, 852: n = A,T,C or G
agccgtatcgacgccntntngacttacttgcngcccgcggaggcggccgangtaccaaatgaagtgtgaagacaangccatccaccactttatagagggtgtaaaaataaaccanaaatcaagggagaaagaaaagatgaaagacaaactgcaaaaaattgccaaaatgcgactttctaaaaatggagcagattctgaggctttgcatgtcttggcattccttcaggagctgaatgaaaaaatgcaacaagcagatgaagactctgagaggggtttggagtctggaagcctcatcccttcagcatcaagctggaatggggaatgaagaatanagatgtggtgcccactangctactgcttgaaaggggagctgaaattcctcccccaagtttggtgttcaaaatattgtaatgactggtattgcaaaaagaatggactnannaccttggccttncnctggacagggttntttttaccccctgatttgcttggntcttgagaaaaccccaagggagttntgggaaagggaccaaaattggggggtngggtccccggccttggggntnnaattttttttnaattgacttnttgggngccattttgacctttaccattttctttantccctttttgggggtattccactggccttggttttntttttttatttaaancnncccaanccttttttgnaatttggaacccattttttncanggnggncccttccttgggatntttttgcntcccttngnggggggnccttgccttcccctnaanngccnnanttnntcccaaacctgggggcccaaantttaaaaggggccntttnccccccaagggtttttttttnccccttcccccctttccagag

SEQ ID NO: 2447 - DNA, 858 bp, Homo sapiens
  misc_feature 26, 576, 590, 597, 619, 623, 624, 626, 627, 628, 629, 630,631, 632, 635, 637, 638, 641, 642, 644, 645, 646, 653, 654,655, 657, 658, 661, 665, 667, 668, 669, 674, 675, 676, 677,678, 679, 680, 683, 684, 685, 690, 691, 692, 693, 694: n = A,T,C or G
  misc_feature 695, 696, 697, 698, 699, 700, 701, 702, 703, 704, 705, 706,707, 708, 709, 710, 711, 712, 713, 714, 715, 716, 717, 718,719, 720, 721, 722, 723, 724, 725, 726, 727, 728, 729, 730,731, 732, 733, 734, 735, 736, 737, 738, 739, 740, 741: n = A,T,C or G
  misc_feature 742, 743, 744, 745, 746, 747, 748, 749, 750, 751, 752, 753,754, 755, 756, 757, 758, 759, 760, 761, 762, 763, 764, 765,766, 767, 768, 769, 770, 771, 772, 773, 774, 775, 776, 777,778, 779, 780, 781, 782, 783, 784, 785, 786, 787, 788: n = A,T,C or G
  misc_feature 789, 790, 791, 792, 793, 794, 795, 796, 797, 798, 799, 800,801, 802, 803, 804, 805, 806, 807, 808, 809, 810, 811, 812,813, 814, 815, 816, 817, 818, 819, 820, 821, 822, 823, 824,825, 826, 827, 828, 829, 830, 831, 832, 833, 834, 835: n = A,T,C or G
  misc_feature 836, 837, 838, 839, 840, 841, 842, 843, 844, 845, 846, 847,848, 849, 850, 851, 852, 853, 854, 855, 856, 857, 858: n = A,T,C or G
agcgcgtaatcgactactatagggcnaattggagctccccgcggtggcggccgaggtacgcgggggaccttggatgtggaggattgcattcagtctagttcctggttgccggctgaaataacctgaattcaagccatgaagaagcagcaatctgtcttctggattaaaactgaagatcaacctactttcaacttactaagaaaggtattaagcgcctttctgagagctctcagtgggcttcctaagcacgttcactctgcctcctttaagtcttatatttatgatcaagatgaaagggagggatgtatcactgcacagagattctacaagtggatatataaagctaataatgttttcagtgagctcttctctggcaactactttccaagtgctttcagcattccaccttgaagcacaacgttaataatgcacaatttcttatgttcagccacagaatgttcacgtgtgatttggttacaacatattgctctatccaggcctctaacaaaactgacttctttcaaaatggacttgcagttgctgaattccaaatcaacactttatcttaaaaacaanaaaaagaagggaanggtgganggaaggggaacaaaaaaggggnctgnncnnnnnnnggncnnaanntnnnggataannntnnggnggangnnnaaaannnnnnnccnnnccggnnnnnnnnnnnnnnnnnnnnnnnnnnnnnnnnnnnnnnnnnnnnnnnnnnnnnnnnnnnnnnnnnnnnnnnnnnnnnnnnnnnnnnnnnnnnnnnnnnnnnnnnnnnnnnnnnnnnnnnnnnnnnnnnnnnnnnnnnnnnnnnnnnnnnnnnnnnnnnnnnnnnnnnnn

SEQ ID NO: 2448 - DNA, 872 bp, Homo sapiens
  misc_feature 3, 4, 74, 104, 106, 668, 684, 738, 744, 753, 760, 780, 796,800, 807, 810, 811, 823, 827, 852, 860, 871: n = A,T,C or G
ggnntttaacgcctatttaatactcagggcgaattgtttctcaccgcggcggcggccgaggtactttgttacancagcctgaaaggactaagacaccgacctantntccctgatgaaaaagtttctctcagacttctaccctttccaatgtggccaaagcttttcattccgaagaagtttcctttctgagaacactcattgtgtcgtttggctttccccgtctctgcttgacacatgaaccaaaacagaggcagccaaagcagggaaaaaaaatcctaggatcagagtccactctatgcccttttgagcttcaaaaggagaaagagacaaaagccaaaagcaatggaggtcaagctgcccggtacctgcccgggcggccgctctagaactagtggatcccccgggctgcaggaattcgatatcaagcttatcgataccgtcgacctcgagggggggcccggtacccagcttttgttccctttagtgagggttaattgcgcgcttggcgtaatcatgggcatagctgtttcctgtgtgaaattgttatcccgttacaattcccacaacatacgagccgggagcataaagtgtaaaacctggggtgcctaatgagtgagctaacttcacattaattggcgtttgcgctcactggcccgcttttcaagtcngggaaaactgtcgtgnccaactgcatttaattgaaatcggcccacccccccgggaagaggccggtttgcnttattngggcgcctntttccgntttcttggttaattgacttngcttgggcttcggtcnttcnggttgcnggnnagccggtttaancttnactcaaaaggcgggaaatcccggtnttcccaanaatcaggggant

SEQ ID NO: 2449 - DNA, 548 bp, Homo sapiens
  misc_feature 16, 104, 107, 207, 256, 318, 354, 374, 391, 461, 522: n = A,T,C or G
agggcgctaatacgcntaatacgactactatagggcgaattggagctccccgcggtggcggcccgcccgggcaggtactttttttttttttttttttttttttngcngcttaaaacaacagccattttatttaatatctcatgattttgtggtcaggaatgtggacagagctcagctgggagattgttccactccatgtagcatcanaagacaggtctcttggtgatattcagctggagaataagttaatatgcanagttcaagatggtttcactcacattgacaccttggcagggatggctggagggctgggctcanccagatcagttaactggcgtgcctgcatatgcactntccaccatgggggtctctanaattgactcaaatctanaattggctggaagacatagtgggagaaataaacttagcagccacatttagtctaccacatggagtaaganagaaagaaaggagtcaaaggggcctagtttatttcaatgtggatttaaaattgtgacaacntagaaataaccaaaatatccaactgt

SEQ ID NO: 2450 - DNA, 854 bp, Homo sapiens
  misc_feature 2, 18, 28, 263, 264, 657, 662, 663, 667, 699, 702, 708, 714,723, 738, 746, 757, 764, 765, 767, 776, 786, 789, 792, 794,805, 811, 829, 833, 843, 844, 846, 851: n = A,T,C or G
tnggacgcgcgtatacgncttactactnctatagggcgaattggagctccaccgcggtggcggcccgcccgggcaggtacgcgggggtagatggaaggaagaacttgtgtgcttagacctgacgcgggggaggagatgctgccacctaggttacttgtaggaccctatacggcaacctcctttgccaggaactatttataaacatcctgcaggaaaatgagtctatatgtcagaatacacatttcccaccttgcccaacagtnnaaaaacataagaagagaaaaacattaaaaaatgacaaggaagttaatggaagtcagcaatgtgatggtgtttggaggtggagccttcagaaggtaattaatgcccttgtaagaagaggccagagagcttgcgcaccttcttcctgccatgtgaggagccaagaagccggctgtctgcaacctgcaagaggaccctcactagaagctagccatactggcatcctcatcttggctttccaacttccagaactgtgagaagtatatgtttgtggtttagtcaatggtctatggtaatttttttatagcagtcccagccaagacagtgcctcatttactacataccatttatattattatttaggctcctttcaaaaacccatgttccaaataaganatttnnttcncgaaacacataaaaacctttactaagtttttngtntccaanttttgnaaatagttngtttttaactttccncatcccanaaaatgcaaantcatggnngnttttaattntttatatatnagnggnanaatggagaaancttacncccttccttaattttagngtgnccaaaaaaannanaaaanaat

SEQ ID NO: 2451 - DNA, 468 bp, Homo sapiens
ggcgaattggagctccaccgcggtggcggccgcccgggcaggtactcacagttgagataggattaaaccccaatttcaaagccccttacagagttccacttaccaggttatttcagccggcaaccaggaactagactgaatgcaatcctcccacatccaaggtcccccgcgtacctcggccgctctagaactagtggatcccccgggctgcaggaattcgatatcaagcttatcgataccgtcgacctcgagggggggcccggtacccagcttttgttccctttagtgagggttaattgcgcgcttggcgtaatcatggtcatagctgtttcctgtgtgaaattgttatccgctcacaattccacacaacatacgagccgggagcataaagtgtaaagcctggggtgcctaatgagtgagctaactcacattaattgcgttgcgctcactgcccgctttccagtcggg

SEQ ID NO: 2452 - DNA, 869 bp, Homo sapiens
  misc_feature 3, 4, 8, 531, 535, 537, 540, 542, 543, 544, 545, 549, 552,553, 554, 556, 557, 558, 559, 560, 569, 589, 604, 621, 626,629, 639, 642, 646, 647, 664, 668, 675, 677, 705, 706, 708,716, 719, 725, 726, 729, 730, 733, 738, 741, 745, 749: n = A,T,C or G
  misc_feature 751, 758, 760, 767, 774, 777, 779, 781, 793, 794, 800, 802,803, 806, 808, 811, 826, 827, 832, 835, 841, 847, 853, 854,855, 857, 860, 869: n = A,T,C or G
ganntggncgcgcgtaatacgactcactatagggcgaattggagctccccgcggtggcggcccgcccgggcaggtaccaaaatttaccagagaattacagcaaaagtattctgactcttaatgtctttctcactggtgggaagccattagggatggaagcacctgaccatggagagctgtgttctatttgccataggtgagaataagcatgtctgcatggccacacatgtatataatttgtcatatacactccgtatagaccagaaattttcatagaaaatcagcggaaaacctagttaacaattcacactgtgattcagctgacttgggattctgcatttttaaaaagttctcaggtgatgctgatgctggtggtccttggacgttgctctgggtagcaagaggagaggccttttgtgggaaaaatgtggaagcagagcaactggatagaaaggtcaggacagaaaaggtcaggagaaaacatcatgggtcctctttaattttgaggatgtttttaagtcaggggagganggananatnannnngggnatnnnannnnnggttccttnggcccgctttaaaactagtnggatccccgggctgnaggaattcattttcaanccttntcngataccgganaancctnnaggggggggcccggtanccancttttgntnccttttaatggaggggtaaattggcccnntnggcgtaancantgggtnntanntgnttccntgngtanaaantngtatttngntcccaantccacanaananancaagccggggannataaantnntananccntgggggtgcctaaanngtggnccnacccanattatnttgggnnncnccncctgccccn

SEQ ID NO: 2453 - DNA, 885 bp, Homo sapiens
  misc_feature 491, 540, 572, 575, 601, 603, 607, 608, 611, 615, 619, 627,648, 649, 652, 665, 674, 676, 679, 680, 688, 690, 700, 702,704, 705, 711, 715, 720, 723, 725, 726, 734, 735, 736, 740,747, 750, 751, 756, 760, 764, 765, 772, 774, 780, 782: n = A,T,C or G
  misc_feature 783, 784, 787, 788, 789, 790, 792, 793, 794, 797, 798, 800,801, 802, 813, 814, 816, 818, 819, 820, 821, 824, 825, 828,830, 832, 834, 836, 841, 843, 844, 846, 847, 849, 851, 853,855, 861, 862, 865, 868, 870, 871, 874, 876, 878, 879: n = A,T,C or G
  misc_feature 882, 884: n = A,T,C or G
gggcggcgtaatcgactactatagggcgaattggagctccaccgcggtggcggccgcccgggcaggtacttgtgacaggcagacgtgattgcagccacgaacacgatgaactcactgaagtccacctgggcatctccattgacgtccaggtccttgagcaatttatccacggcatccttgtcttttcactctcagggacacagctcctggggagggcggcagagaccctgacagtctcgcctcgcaggcgtctttctccaggctagaaaccaatgactcatctctcaggctctctagcaaacagcggggcccacacaccacagtttgtggtcgaatgtttccctgagggctacggagtctggtcttgccgaatacccccgcgtacctcggccgctctagaactagtggatcccccgggctgcaggaattcgatatcaagcttatcgataccgtcgacctcgagggggggcccgggtacccagcttttgttnccttttagtgaagggttaaattgcgcccttggcgtaatcatggtcatancttgttttccttgtgtgaaattagttatccgnttnacaaatttcacacaacatacagagcncnggannatnaaantgtnaaagcctnggggtgccctaatgaggtgannttnacctcacattaantggcgtttncnccnnaattggcncnattttccatncngnnaaaacntgtnttttncancnngctttgtnnnaatntgttcanccnnggggngatnaggnnggatttngntttttngnnntannnntnnnttnntnnntaacataagtnntntnnnnttnngtntntntnanatagnannanntnantntnaattanntanatngnntgnanannaanang

SEQ ID NO: 2454 - DNA, 764 bp, Homo sapiens
  misc_feature 1, 2, 3, 4, 5, 6, 10, 17, 21, 26, 30, 35, 39, 43, 44, 48,52, 53, 59, 61, 64, 74, 76, 77, 79, 83, 84, 92, 94, 96,97, 100, 106, 108, 116, 117, 119, 125, 126, 128, 137, 141,144, 351, 372, 386, 401, 415, 422, 426, 450, 466, 476, 495: n = A,T,C or G
  misc_feature 522, 528, 537, 570, 579, 598, 623, 629, 637, 643, 655, 667,668, 674, 682, 687, 688, 693, 694, 696, 704, 717, 720, 735,744, 750, 753, 756, 763: n = A,T,C or G
nnnnnntcgncttttanattnataantttntatgntttntatnnactntacnnttgttnanatnaatattattntnncnattnnttaatatncntnnctntttttntntttatatnntnttaganntnagtgtccgntttnctnttactactcactatagggcgaattggagctccacccgcggtggcggccgcccgggcaggtacagtggccccccgtgaaagacagaattgtggttttcctggtgtcacgccctcccagtgtgcaaataagggctgctgtttcgacgacactcgttcgtggggtcccctggtgcttctatcctaataccatcagacgtccctccagaangaggagatgtgaaatttttanacacttcttgcagnggtatcttgcctgcnattccttgacgcgngtgcacntccnctagcacgggttgaatttatgttncccaagaagtctcggncttgccaacnctccactcgggaacaaccntcaagaaacaccgctttcttggcaagncctgtnggcccttcngggcttccaccaaaccaccaataatttggaacntggccttcntggaccttattgaacttancttcaaaaaaaatttggggcccttnaacaanaatttaanaaaagnaaggaattccgnattaggttctcnnattatntaacattntagtnntattnntnttattaanaaatattatgttnacncctttggggctccgntttcttaanaaaacntanagntggggant

SEQ ID NO: 2455 - DNA, 468 bp, Homo sapiens
actacttagggcgaattggagctccccgcggtggcggccgaggtactttaactcagccattttctctctcctctatgtgtggtgacttcaggaaacccaggcccagaggatataaagccacaatgcttctttctccttcaaaccactctttggatattccggttcccactgcttcactgcgcttcactggtcagtgcgtcactcaaactagctgaaagaattgtctaactcatacacagggacaaagtccagcaagcttatttaaccggttacacaattgcctttggtttttacagtttgttcctaagtgtttccagaggcttggttcctcttcacctgaggtagagattgaccaattatttattccagttaaaagtaggcttatttcaaaaggcagagaatttgaagctatcggggaaaggaactgtggcagatagtgcctgctgtgtgtggtggaggattctctgc

SEQ ID NO: 2456 - DNA, 464 bp, Homo sapiens
  misc_feature 266, 305, 375, 379, 403, 405, 407, 423, 432: n = A,T,C or G
actacttagggcgaattggagctccccgcggtggcggccgcccgggcaggtacttttttttttttttttttttttttttacggcttggaatatcttgaatttaaactagtaattcagctcctcttcagcactcacaatatagtctgttgccaatgcctgatgagacacatagcttatgaccattgcacttctctttttttccatggtttgcatttaggaggtaattttcttcagctactagaggatatccttcctcatcaatttanagaaatatttggtcaaatgatttttaaataaaaaacggntcttaccttctaattttccatttattttatctatttctttttgatgcgcagccttgggtaaacacacatncttntgtgaaacagtctcacagagactntnanaatcccaagaactttnttcataagnccttttgtttggattctggatgggagtatctc

SEQ ID NO: 2457 - DNA, 845 bp, Homo sapiens
  misc_feature 5, 11, 70, 473, 548, 571, 588, 620, 656, 657, 667, 686, 705,721, 727, 729, 765, 812, 823, 826, 830, 832: n = A,T,C or G
acccntatttnactcactatagggcgaattggagctccccgcggtggcggccgcccgggcaggtactttntttttttttttttttttttttttttaagtgacagaaaacaggttatacgtaacgttaaaaataataaaatggaagactatgccttcggggctcatttctatagtttgttgttagagaagtttctctgaacgtgtggagcacagggaaaaaattggtctataggttgttgggttatagacccttccttttatattcatatgtatttatatgagaataaacatgacccaaatattctacacttaatattttgcaatcaggaaaaaatgacttgatagaagtatttaccctgccaggcgtggtggctcacacctgtaatcccagcactttgggaggccgaaccaggaggatcatctgaggacaggagttcgaggacagcctggccaacatcatgaaaccccatctntaccaaaaatacaaaaaattagccaggcatggtggtgcacacctgtaatcccagctacttaggaagctgaggcangaaaaattgtttgaacccaggangcggagtgagatccatnattgcactccacctgggcgataaagaaccaangcttttcttaagaaaaaattaaataaattaaattcnngtcaggcccngggggtcacttctgtaatnccacacttttggaggccangggggccattcacganggcaananatcgaaacatcctggctaaaacggggaaaccccttntttcttaaaatccaaaaatttccccgccttatggtgggccccttttnccacttctcanganggtngnggcaggaaaatct

SEQ ID NO: 2458 - DNA, 855 bp, Homo sapiens
  misc_feature 615, 625, 693, 708, 729, 737, 810, 835, 841, 844, 855: n = A,T,C or G
gccgcgtatacgactactatagggcgaattggagctccccgcggtggcggccgggggatgcgaggctcggagcacccttgcccggctgtgattgctgccaggcactgttcatctcagcttttctgtccctttgctcccggcaagcgcttctgctgaaagttcatatctggagcctgatgtcttaacgaataaaggtcccatgctccacccgcaaaaaaaaaaaaaaaaaaaaaagtacctcggccgcgaccacgcttcgagcggccgcccgggcaggtacaatcaaagtccttggccacattgtagaactttgggggaagctcgctccaaccgactactatcaccttcgccgttccggttttcaaatcctgagtcaagccaataaaaaacaaaacaaaaaatgaaacaagaaaacaaataaagcccgccaatctcatgttgttttctgagaagtttggttttgtcaagaaagggtgtaacgcaactaagtcagagtccacctagaaacatttgcggtggacaatggaggggcctgactcatcatactcctgcttgctgatccacatctgctggaaggtggacaggcgaggccaggatggagcccccgaccccacngagtaccttnggccgttctaaaactagtggatcccccgggctgcaggaattcgatattcaagcttatcgatcccgtcnacctcgagggggggncccggacccaactttgttccnttagtgangggtaattggccccttggcgtaatatggcatagcttgtttcctgggggaaaatggttttccgttcacaattcncacaaatacaaccggaacataaagngtaaanctngggtgcctaan

SEQ ID NO: 2459 - DNA, 850 bp, Homo sapiens
  misc_feature 631, 641, 645, 648, 649, 650, 653, 656, 657, 660, 661, 663,664, 666, 674, 708, 710, 718, 749, 763, 770, 799, 814, 819,837, 843, 848: n = A,T,C or G
ctactatagggcgaattggagctccaccgcggtggcggcccgcccgggcaggtactgtgtttagaagggattaccaaaggctggagcaatttaagctatgcactagccttgccctcttaggttgcattctctttaggccactggttctcaaacattagggtgcactgtaaccattacagagcttgtgaaaagtgcagaaacctgagcctcaccttatgagattctgattcagccagggggaggacaggaatctgtatttttcatagcaacctcaagtaatctttattctgagggtctcgggattgcaggttgaaaaacacaaccttaatcagcagtaaattcttctctactcggccaggcgcagtggctcacgcctgtaatcccagcactttgggaggccgaggtgggtggatcacaaggtcaggagttcgagaccagcctgaccaacatggtgaaaccccatctctactaaaaatacaaaaattagccgggcgtggtggtgctcgcctgtaatcccagctacccaggaggctgaggcaagagaaatcacttgaacccgggaggcagggggtgcagtaagcccgagattgcaccactggactccaagccctagcgacagaaccgagacttntgtctcaaanaaanatnnnatnagnnaanngnnanttcttctntacccatttgggctttaaacaattccaagaaagngntttcattnttttaaaaaataattaatagtaaatgaaagncaattttagagggnggaaaantccttaaaaatgggaatcattttgcattntttgacaaatgaganaaggngacatgactttggcttanggcatncttcnaa

SEQ ID NO: 2460 - DNA, 857 bp, Homo sapiens
  misc_feature 55, 478, 499, 559, 586, 654, 660, 674, 682, 689, 702, 720,803, 850, 857: n = A,T,C or G
cgcgcgtaatacgactactataggggcgaattggagctccaccgcggtggcggcncgcccgggcaggtacgcgggggcacccgtcctgcgttcctcctgcctggggtgacccataaggaacaccccccccttctcaacaaccacagaagataaatgccaaggggaccaccaacatgggcatggggctgtgatgccaatcttaagggaaaacacaagtaaaattggctccaggactgagctgggggcagctgctctttctgtccatgactttgaggcgggatctcgagcgtctgtctgacgggccttctgtctgctgtcctctcgcaggtttcagacattgaatccaggattgcagccctgagggccgcagggctcacggtgaaaccctcgggaaagccccggaggaaagtcaaacctcccgatatttctcctcgagtggctgggaaacttggcaagagaccagaggacccaaatgcanacccttcaaagtgaggccaangcaatggcttgtgccctatcttctgaagaaaaaagttcaataattccctgaaaagtcaangtaaaagatgatgattctttttgatcnggaaatcagtgtacccttgggccgctctaaaaactaagtggatccccccggcttgcaggaattcgatntaagcntatcgatcccgtcnacctcganggggggnccggtacccaacnttttgttcctttaatgangggtaattgcccccttggcgtaataatggcatacttgtttctgggtgaaaatgttttccgttaaaattcccaaaaaatacaanccggaacataaatgtaaaacctgggtgcctatgagtgactactaaantattgcn

SEQ ID NO: 2461 - DNA, 856 bp, Homo sapiens
  misc_feature 24, 619, 632, 661, 663, 682, 710, 745, 765, 771, 779, 786,795, 822, 824, 826, 840, 847, 850, 851: n = A,T,C or G
tatagggcgaattggagctccacncgcggtggcggcccgcccgggcaggtacttaactagggttagcccgaggtcaggagggtggatgccttattatgggattagtgcccttctaagagggacagtagagggcttgttcatgctctctctccatgcacaagaaagagcacacagtgagaaggaaagaggccctcaccagaacctgaccatgctggcaccgtgattgcagacttccagcctccaggattgtgagaagataaatatctgtggtttaagtcaccaagtctgtggtgtgttttatggcagcacaaggtaacccagatgatgcttttcaccactgggtggtccagcctttcatggaagctgtcaagctcctcagccttgcaaaaaatgcttgctggtcactctctttggtcctttcagatgcctttcttagtggtgcctctaccaggcccttgacttcatccttttctgtcagaggaagggtgagtaaagtacctcggccgctctagaactagtggatcccccgggctgcaggaattcgatatcaagcttatcgatacccgtcgacctcgaagggggggcccgggaccccactttttggttcccttttagtgangggttaattgccncgcttggccgtaatcatgggcatagctgntntcctgtgtgaaaatgatantcccgctcacaattccacacaacatacnaagcccgggagccataaagtgtaaagccctggggngcctaatgagtgagcctaantcccanttaattgncgttggncttactggnccttttccaattgggaaaaccttgagngncnacttgcattaatgnatacggnccnncgccg

SEQ ID NO: 2462 - DNA, 835 bp, Homo sapiens
  misc_feature 623, 679, 686, 706, 709, 719, 749, 769, 822: n = A,T,C or G
tagggcgaattggagctccccgcggtggcggccgaggtacaactgaagcaaagaggaaagcagacccatggctcaggacacatgggagtcccaccagcttgaaaaaagtttcacagagctggcatttccatcagtgcagacacggctctgaaaacagtaattgtgccttatgggcatgatacgcccatttctactctgacctcctcccaggagaaactcttctgcaaatgaccacagtacctgcccgggcggccgctctagaactagtggatcccccgggctgcaggaattcgatatcaagcttatcgataccgtcgacctcgagggggggcccggtacccagcttttgttccctttagtgagggttaattgcgcgcttggcgtaatcatggtcatagctgtttcctgtgtgaaattgttatccgctcacaattccacacaacatacgagccgggagcataaagtgtaaagcctggggtgcctaatgagtgagctaactcacattaattgccgttgcgctcactgcccgctttccagtcgggaaacctgtcgtgccagctgcattaatgaatcggccaacgcgcggggagaggcggtttgcgtattgggcgctcttccgcttnctcgctcacttgactcgctgcgctcggtcgttcggctgcggcgagcgggattagcnttacttnaaggcgggaataccggttantcncaagaattanggggataccgcaggaaaaaacatgtgaacnaaaggccagcaaaaggccangaaccgtaaaaaggcccggtggttggcggttttccaaaggctccgccccctgncaagcataacaat

SEQ ID NO: 2463 - DNA, 849 bp, Homo sapiens
  misc_feature 48, 119, 120, 121, 123, 143, 152, 237, 242, 450, 523, 548,566, 612, 628, 630, 660, 670, 671, 684, 687, 690, 691, 696,705, 715, 746, 749, 751, 757, 758, 773, 785, 802, 820, 828,834, 840, 841, 842, 843: n = A,T,C or G
tatagggcgaattggagctccacccgcggtggcggccgaggtactttntttttttttttttttttttttttttgcaaatttacacagttttcttaggaatgctctttcttttttttttnnntngggactctacattcctgtanctcctattnttcaagggcacagggcttacttaaacataaaattttacaacttaactggaagggtgccctgcttgcaaatggaaaactgccacanagcanacttaactgcagcaagcaggtgacagagcaaggaacaggatccaaaattatgattttttgtgtgctactgaagtaaaagaatttaagaaggttttactcagggtcataggctgggttggaagactgggaaaaggaaatcagtagtatctatatctaattatggggacagaatttcacagacatctataacctaggtcaaacgtcaaanacatgaacacctaagacactttcacacatccctgagcatcatgattaaattcagatagttggggatctgtccncaggaccagaatcctattctgttangggcctctaaataataanactttatgtgtctcttccccaacaaagagttggaagtggttaccanctggggagaacaaaananactttccaagttaggggtttttcaccttcntttaaccctnncaattaaagaaanggnggnngtttnaactatganataaatattngaaaaaaacaaacttgcatgggtaaaaaaanaanantgctgnngtttaacaacccttntctcatggtggntcccaaacccccaaaanagaacctggtcctgcccngggcggcnttttanaaatannnncccccg

SEQ ID NO: 2464 - DNA, 906 bp, Homo sapiens
  misc_feature 10, 382, 504, 507, 576, 596, 603, 628, 635, 639, 641, 645,648, 649, 657, 659, 663, 670, 671, 672, 676, 677, 679, 687,688, 689, 692, 694, 698, 703, 706, 711, 715, 719, 722, 731,732, 733, 736, 741, 743, 751, 759, 760, 762, 771, 773: n = A,T,C or G
  misc_feature 774, 779, 785, 792, 796, 807, 811, 813, 816, 817, 820, 821,822, 827, 829, 835, 837, 844, 845, 847, 855, 863, 867, 870,876, 883, 884, 897, 898, 899, 905: n = A,T,C or G
atgggttctnatctactactatagggcgaattggagctccccgcggtggcggccgaggtacttgaaaatgtaacccgatacagcacaagacatccccaccactgtggataccaaagatttacctccaacggccatgccaaagccacagcatacattttctgactcacagtcccctgctgagtcatctctgggccttctctttcactgtctgcacccgctcctggggatgttcccaaagacacatgtgttcaatcacccataagcagtttcccatgcactgatctaaaagtgtcagaaaaccataaaggatgtgttttgcctgtgtctcgttagaacaatgagaaaatgccacttttagaacttggaggagaaacaacccctnctttgtccacagagccgtagtccaaaagctgtgggaagtgagtgtccattcagagtcctcgtccaggtcaggtccttcgtgctcccccgtggagagcacccaggatgtgagctcccagggtnatnccaggagagctctgaagttaagaagaagtgcaagttgccaacttgtcacagtaaatgaacctgaaaggnggttttccgttgcaagttgngcctccnccacaaggaggaagtaccctgcccnggcgggnaatnangaanaanncatttgananttangagattnnnaatnngngtataccnnnatnanaggnccgcnatntttgngttntttnatnttagtattnnncanacctntnaatctctngaaaatgnncnatatccctntnnttcgnttattntatgaantgtntaatactcgtnattnanaannacnnntattnanctctgngnaaatgtnntnaaattatnattggcanaatnccnctattntaaaatnngcatattagtgannntttttna

SEQ ID NO: 2465 - DNA, 937 bp, Homo sapiens
  misc_feature 564, 656, 660, 675, 682, 710, 746, 764, 766, 787, 789, 799,801, 808, 810, 841, 862, 863, 870, 876, 880, 891, 897, 903,907, 909, 921: n = A,T,C or G
acgtatcactactatagggcgaattggagctccccgcggtggcggcccgcccgggcaggtaccgggcagcttgacctccattgcttttggcttttgtctctttctccttttgaagctcaaaagggcatagagtggactctgatcctaggattttttttttccctgctttggctgctctgtttggttcatgtgtcaagcagagacggggaaagccaaacgacacaatgagcgttctcagaaaggaaacttcttcggaatgaaaagctttggccacattggaaagggtagaagtctgagagaaactttttcatcagggagactaggtcggtgtcttagtcctttcaggctgctgtaacaaagtacctcggccgctctagaactagtggatcccccgggctgcaggaattcgatatcaagcttatcgataccgtcgacctcgagggggggcccggtacccagcttttgttccctttagtgagggttaattgcgcgcttggcgtaatcatggtcatagctgtttcctgtgtgaaattgttatccgctcacaattccacacaacatacnaacccgggagcataaaatgtaaaagcctggggtgcctaatggagtgaagctaactcacattaattggcgttgcgctcactggcccgcttttncaantccgggaaacctgtnctgccancttgcatttaattgaaatcggccaaccnccccggggaagaggcgggtttgcctattgggcgctntttccctttctttgcttnantgacttcgcttggcctcggtngntccgggtgcngngaacggnantcacctcactcaaaagggggtaatccggttntccaccaaattaggggatacnncggaaanaacatntgancaaaaggccancaaaangccagnaacngnaaaaggcccgtnctggcgtttttcatag

SEQ ID NO: 2466 - DNA, 927 bp, Homo sapiens
  misc_feature 3, 12, 428, 471, 497, 564, 578, 587, 617, 651, 662, 668,680, 682, 711, 715, 723, 729, 730, 735, 740, 746, 748, 757,762, 771, 776, 785, 792, 800, 801, 805, 811, 816, 821, 823,827, 828, 829, 835, 838, 846, 856, 858, 881, 886, 892: n = A,T,C or G
  misc_feature 895, 899, 900, 907, 914: n = A,T,C or G
tgncgcgtatcnactactatagggcgaattggagctcccccgcggtggcggccgcccgggcaggtactttttttttttttttttttttttggtaacagatctaatcttccacgtaagcctctttactggagaagagtagatgggagggcaggtgggatctatttagacaaatccgatatattcagaatgattcagtaggcaaagaattcctcctggtaacgaatctgtgtgtcaaggtccttaccttggctctcactgtcctcaggattatggaggggaagatgatgcagaattcgcacatgtcttctggatcatgggggactttgctgagtgtgcctgccatggtcccgatctctgattgataggagtgactgctgagatcctggatctgaccactgagatatgtggcccaagtgccattcaccctngcagggtaacattctggcttccatggggcaaaagcccattggncctaaattggcagtctcccatctcanaagtcccctcaacacaccatgccttgccttctccattctggaccccttaactttcaaacaggtcagnaagcttgggccctncccttccgnggaaacacacaccaaatttttttgaaattnttttggcaaacccttgcccaatgccaagggggangccctaaaagngcctanttccacccattnangttcccccaatgaaaattaaggcaggctnttgnacccaaanggttgnnatttnttttnggtttngnaaacctttnccaanccttggccncttanctgggcatngtaaaancctccttnnaccnggcaanggaangtttntnaaannncctttntantttgattnttcccccggnancctgggcccgtttaaaaaataangggancccccnggntgcnngaattcnattaaantttttcgaacccc

SEQ ID NO: 2467 - DNA, 857 bp, Homo sapiens
  misc_feature 647, 804, 820, 835, 844, 853, 856: n = A,T,C or G
actactatagggcgaattggagctccccgcggtggcggccgaggtacgtaacaagaaggggaacactccattgtggctagcagcaaatggtggacacctcgatgtggttcagttactggtgcaagcaggtgcagatgtggatgcagcagataaccgcaagataactcctttatggcagcatttagaaagggtcatgtgaaggtggtgcgctacttagtcaaagaagtcaatcagtttccatcagattctgaatgtatgagatacatagcaaccatcactgataaggagatgctgaagaagtgtcatctttgtatggagtcaatagtacctgcccgggcggccgctcgacccgggcaggtacccacagaatgtggccccaaatgattcaattacagctagaagttgttctcttcccaaagcacgagtcttttgcattcacaggatattttttctttcataaacattcctgcgagaatgtaagtgcggatgaaagattgtgttctgtcttcttcttgtcttttttctgtttactctgattttataaaatgcagtgtcatgtcttaggacaaattatcctcagtttgccagcaagtgagtttataaattattttattcaaatgagaaaatttccgcttagaaccaatagnaaaggatggtgagtttccagctgacccacaatgacgtatttaactcacaagtgaaactcagctctgcgggtttaataagtttccttttatttctaagagcaagggagcctatggttctaataattggacatgtctggaactgtccctaccatttgcnagtttttcccccttgnccggggttagggganatccccccncctcattcncant

SEQ ID NO: 2468 - DNA, 861 bp, Homo sapiens
  misc_feature 25, 62, 84, 369, 392, 481, 566, 607, 621, 633, 660, 670,672, 729, 744, 747, 751, 753, 767, 777, 787, 803, 814, 817,841, 846, 857, 860, 861: n = A,T,C or G
gtaatacgactcactatagggcganattggagctccccgcggtgggcggccgaggtactttntttttttttttttttttttttncttttttaaaagatcattttttaacttttcattttgaagtaattacagggttttaacaagttgcaaaaacagtagaaaagttcctgtggactcttcatccaacgtccccaaaagttagctttgaggctgggcgcggtggctcacgggcactcatcacagcactttgggagaccgaggtgggtggatcagctgaggtcgggagtttgagatcaggctggtcgacatggtgaaaccccgttttcacactcatggagccaggaggaccaatccatgagcacagggcanctcggagtcccgggcgggcattntccggcgtccttcttctgaagcttctgaaaagttgctgtaggactccttttcccaggttggggtttctatctgcgttttagctgcttgngttgccatgtggatctccccgcgtaccttggccgtctagaactagtggatcccccgggctgcaggaattcgatttaagctttatngataccgccacctcgagggggggccccggacccacttttgntccctttaagtgangggttaattgcncgcttggcggaaacaatgggcataagntggttcctgngngaaaattggttatcccgctcacaaattccacacaacaaaccagcccgggagcataangggaaagcctggggngcntaangnggggacctaactcncattaattgnggtgccttcnttgccccttttcaagncgggaaacctngcngggccacttgcattaaaaatcggncaccncccgggggganggnn

SEQ ID NO: 2469 - DNA, 878 bp, Homo sapiens
  misc_feature 88, 105, 151, 229, 247, 257, 299, 359, 391, 417, 485, 487,504, 517, 518, 553, 567, 571, 576, 581, 587, 594, 618, 627,669, 694, 703, 707, 708, 723, 728, 739, 752, 761, 772, 773,777, 778, 782, 793, 794, 820, 821, 837, 844, 845, 866: n = A,T,C or G
  misc_feature 867: n = A,T,C or G
ctactatagggcgaattggagctccaccgcggtggccggccgcccgggcaggtacctgtgcaggattgttgtggctactagagaacangagggaaagtagggcanaaactggatacagttctgaggcacagccagacttgctcagggtggncctgcacaggctgcagctacctaggaacattccttgcagaccccgcattgccctttgggggtgccctgggatccctgnggtagtccagctcttctncatttcccancgtggccctggttggaagaagcagctgtcacagctgctgtanacagctgtgttcctacaattggcccagcaccctggggcacgggagaagggtggggaccgntgctgccactactcaggctgactggggcctgntcagattacgtatgccctttggtggnttagagataatccaaaatcagggttaggtttggggaaagaaaatcctccccttccttccccgccccgntncctaccgcctacactcntgccagatcattnncttcaaatttcctttgacctatacgcttaaaaaangaaaggcttatttnaagncacanggcancctttncctgggncttttgcttttctagcacaaattntgggttacnttcctttttcttaaccaaaaaagaatgtttgaattccttctngggggaaccttattgtctggaattngaaaccctnttgnnaaggttattgtcttnggttnacctaataganccaaggtgagttngtccgggcnttacttttggnnaggnnttgntttggaaaaanntggattttcattctattttttgaatnnccagttaagtgatccncaaaggnnttgataaattttgggaagggnnaaaaataaaat

SEQ ID NO: 2470 - DNA, 841 bp, Homo sapiens
  misc_feature 2, 610, 691, 709, 724, 760, 786, 795, 800, 805, 812, 824: n = A,T,C or G
gnccgtatacgactactatagggcgaattggagctccccgcggtggcggccgggccccggtagttgtcttctttcccagtcatgtcttttgttaggctgctggtgacaatgatgacatcctctgcaatgcaagacatctccttgatggtcaagtagcacatccgacggagtgtgggatcattggactgaaagagcttggtcatggcaaagaaggcctcggtcgcttccgtggtccccaggtgctccccctggtttatgagataaagaatcttggtgaggatgtgggcacatttccgagggttgatgggagtttcattaaatacacgggcctcctggagtacgcggggaggcgaattctggggctgctggatgcttacttgaagacgaggacttttctggtgggcgaacgagtgacattggccgacatcacagttgtctgcaccctgttgtggctctataagcaggttctagagccttctttccgccaggcctttcccaataccaaccgctggttcctcacctgcattaaccagccccagttccgggctgtcttgggcgaaagtgaaactgtgtgagaagatggcccaatttgatgctaaaaagtttgcanagacccaacctaaaaaggaccaccacggaaagaaaaaggttcacgggaaagaaaagcagaagccccaggcttgaaccgaangaggaaaaaaaaggcggntggccctgctctgangaaggagatggatgaatgtgaacagcactggcttgntgaacccaaggccaaggaccctttgnttaacttgnccaanaaaancttgccnggccggccggtntaaaaaatagtggatct

SEQ ID NO: 2471 - DNA, 858 bp, Homo sapiens
  misc_feature 1, 8, 10, 12, 666, 680, 684, 693, 707, 733, 741, 800, 841: n = A,T,C or G
ntgggcgncncntatacgactcactatagggcgaattggagctcccccgcggtggccggcccgcccgggcaggtaccagtgcattaatttgggcaaggaaagtgtcataatttgatactgtatctgttttccttcaaagtatagagcttttggggaaggaaagtattgaactgggggttggtctgcctactgggctgacattaactacaattatgggaaatgcaaaagttgtttggatatggtagtgtgtggttctcttttggaatttttttcaggtgatttaataataatttaaaactactatagaaaccgcagataagtttttttctctttgaaagatagagattaatacaactacttaaaaaatatagtcaataggttactaagatattgcttagcgttaagtttttaacgtaattttaatagcttaagattttaagagaaaatatgaagacttagaagagtagcatgaggaaggaaaagataaaaggtttctaaaacatgacggaggttgagatgaagcttcttcatggagtaaaaaatgtatttaaaagaaaattgagagaaaggactacagagccccgaattaatccaatagaagggcaatgcttttagattaaaatgaaggtgacttaaacagcttaaaagttaatttaaaaggtgtangtgattaaaataanttgnaagcgatcntttaaaaaagagantaacccgaaggtggattaaaagaccntggaaatncatgacccaagggagaattgcctcatttaaaggcctagttaacccatttacttaacccnaacccaaaatgggaaaaattaattgggagtgggtaggatgnaaaaattttggaaaaat

SEQ ID NO: 2472 - DNA, 897 bp, Homo sapiens
  misc_feature 2, 16, 22, 23, 27, 28, 30, 36, 39, 73, 462, 481, 540, 559,590, 604, 634, 636, 676, 680, 772, 774, 809, 849, 870, 873,876, 886, 893, 895, 896, 897: n = A,T,C or G
gnccgtatcgactcantatagnncacnnantatacngcnacattggagcctccacccgcggtggccggcccgnccgggcaggtacaaaaatccccagagccacatagacgggggtggtagtgcgaaccatagcaatattggcataggtgccaatctgtagctcttccagagacttggacatgaactctggcttggggaactcagtgataaacaatttgaggaacttcagaatgcgcttgtgggtgaggatgtacatgccggcttcccttaagttgattagatgggaaaccaaacaccgtctttcaagtgtgaggctgtgccatgctccctcagggaggaggggcgctgggtctgaccaggtctgcctctgccctcaccagctggcagacgtgaactggagaacagcaccagaaaggctggtggttggcagctgctcacgacacagttgctgacctgcagcanatcggctgtgggtgagcangacagtcaaggccctcacaagcactgttctggagtttcgtctgactaggtgaacccttntggcttttcgaggacgcanggtacctcggcgctttaaaactagtgggatncccccgggctgcangaattcgatatcaagcttatcgatcccgcnanctcaaggggggggcccggacccaacttttggttcctttantgangggttaaattgccccctggcgtaaatcatgggcatagcttgtttccttgggggaaaattggtattccgttcacaattccacacaaaaatacnancccggggagcattaaagtgtaaaagccctgggggngcctaatgaagggaaccaacctcacattaattgcgttggncttccctggccccttttccantcnggnaaacttgtcnggccaantnnn

SEQ ID NO: 2473 - DNA, 848 bp, Homo sapiens
  misc_feature 2, 4, 6, 539, 606, 664, 708, 742, 758, 790, 803, 816, 827,846, 848: n = A,T,C or G
tngngncgcgcgtaatacgactcactatagggcgaattggagctccaccgcggtggcggccgggggccattgagactgccatggaagacttgaaaggtcacgtagctgagacttctggagagaccattcaaggcttctggctcttgacaaagatagaccactggaacaatgagaaggagagaatttactggtcacagacaagactctcttgatctgcaaatacgacttcatcatgctgagttgtgtgcagctgcagcggattcctctgagcgctgtctatcgcatctgcctgggcaagttcaccttccctgggatgtccctggacaagagacaaggagaaggccttaggatctactgggggagtccggaggagcagtctcttctgtcccgctggaacccatggtccactgaagttccttatgctactttcactgagcatcctatgaaatacaccagtgagaaattccttgaaatttgcaagttgtctgggttcatgtctaagcttgttccagctatccagaatgcccacaagaattcanctggatctggaagaggaaagaaactgatgggtgttaactgaacccgttttgattgaaacctacacanggctgatgtcattcattggaaaccgcaacaaacttggctatttcctttgccgtgggantattggtttttgaaaatcttttttggtacctcgggccgtctaanaactaatgggatccccccggcctgcaggaattcnatatcaaagcttatcnatacccgtccaaccttaaggggggggcccggnacccaacttttgnttcctttaatgangggtaattgcncccttggcgtaatcatggncn

SEQ ID NO: 2474 - DNA, 844 bp, Homo sapiens
  misc_feature 6, 71, 74, 391, 560, 641, 734, 753, 791, 796, 826, 843: n = A,T,C or G
atgggncgcgcgtaatacgactcactatagggcgaattggagctccccgcggtggcggccgaggtactttnttntttttttttttttctctaaagaaaaaacttaatgacctttcaaaatgaataggcccgatttatgataaatgattagttaacaattgaagttttttagtttctttctttcttgggaaacaaaaaatactcacttttattattaagcccataatatttggtagtaatacaaatatttcctagtggctcccattctctagcagcaagtcaaacagcctcaagagaaaagtattaaaattgtgctattatgacatagcagataatctggaataaaacaaatccctctaggatcattatatcctaaaagttctttgccccantcttagaacatggcacttttgagcatgctaaaatcatgataaggacatatttctcttctcatttcacaccaataaaggaggaaaaaagccttgtcctataggcaccatcaaaataatctacccacccccaactatgccaggctcctgtctctgtggagttcggtggctnctcactagcaggaaagtataagcagagagaccattagttattgacatggaaactctaactgataatgctgactcacttcangggctattatactataaacagggggctgaaagccatttatttgcattttaaggataaacagcagaaaagcctcaatttaatagaatggcaagnaaataaactggctgtgtcnaaccaagtgaagcttccttttgaaaagaaaaactgggnattgnataaaaatcaatttggggcattcgggaagntaaaccggaaattcacnt

SEQ ID NO: 2475 - DNA, 867 bp, Homo sapiens
  misc_feature 6, 8, 9, 10, 22, 26, 29, 30, 41, 47, 49, 166, 171, 296, 631,697, 702, 709, 711, 718, 722, 725, 726, 736, 738, 756, 759,760, 772, 778, 779, 790, 792, 808, 817, 819, 835, 841, 846,849, 850, 860: n = A,T,C or G
gagttngnnncgactattatanggtntanntggaactgcangcgtgncngcggccgcccggccaggtacgcgggggagatgctgccacctaggttacttgtagtgaccctatacggtaacctcctttgccaggaactatttataaacatcctgcaggaaaatgcantgaantagaagagacagggatatccagaaggttatgcaaaacatcaagagaagatgagaggagtctatatgtcagaatacacatttcccaccttgcccaacagtagaaaaaaaaaaaaaaaaaaaaaaanggtacctcggccgctctagaactagtggatcccccgggctgcaggaattcgatatcaagcttatcgataccgtcgacctcgagggggggcccggtacccagcttttgttccctttagtgagggttaattgcgcgcttggcgtaatcatggtcatagctgtttcctgtgtgaaattgttatcccgctcacaattccacacaacatacgagccgggagcataaagtgtaaagcctggggtgcctaatgagtgagctaactcacattaattgcgttgcgctcactgcccgcttttcagtcgggaaacctgtcctgcccacctgcattaatgaatcggnccaccccccggggagaggcggtttgcgtattgggcgccttttccgctttcttggttaattgacttncttgncttcggncntttcggntggnggnnaaccggtttnancttaatttaaaggggggnatnnccggtattcccnaaaatnngggggtaaccncnggaaaaaaaattttancaaaaggcncnaaaagggccgaaaccntaaaangcccngtnnttgggttttncaaaggt

SEQ ID NO: 2476 - DNA, 894 bp, Homo sapiens
  misc_feature 1, 2, 5, 535, 541, 581, 587, 639, 677, 695, 757, 769, 786,787, 788, 807, 851, 857, 870, 889, 894: n = A,T,C or G
nnggncgcgtatcgactcactatagggcgaattggagctccccgcggtggcggccgccgggcaggtactttcatccataaaggcctgcagctgtttcactgatccttgcagttcatccatcaccaactccatacagtcaaagactttgctctggttctgtaatattttctggtagtcaggttttgattaagaacttcattctgagaagacccaagatatgtcataggttccactttgacctcagtaattttggcctcagttgatcctctggacaatatctctttagcctcctgctggtagtgaagcaagagctgatcccaagtctgacgttctaaagaaaactttgttatgtattccttcatctcagccacagatgcttccaaagaaaaatctgatgcttttccatttgaatcttcaaaacatttttgtagaagttccatcagtttccaagtccgtctgcaaaatgtttcaattcttcaaaaagagaaaaatgcttttggctctaaaactttcaaagactgaagcccttagtgtnccttangaaagggtcaagtttctgaatagagaactgggaaactggnaagcanggaacagccaagcccgttgctttctggttaaatcgaccctgataggacccgnctgagcttctgggatgccctgggtggaatgggatgcancgaccttccgccggtcgnttcttttcatacctgctcgccgccaaggaatggcctcctggtcttgataaccgggaaaatgntcttgagggggncaaatgaaagggacttnnnactgaaattttttcctggnggctgaaaaccaaatttcccccttttaagggcttaagccaaggngaattntttcttttgaaanccttgattattttcagggnggcgn

SEQ ID NO: 2477 - DNA, 930 bp, Homo sapiens
  misc_feature 2, 5, 6, 8, 9, 10, 11, 27, 28, 35, 37, 55, 63, 374, 467,473, 493, 501, 514, 542, 549, 551, 559, 560, 568, 578, 581,583, 584, 585, 595, 597, 607, 614, 621, 625, 630, 634, 639,643, 648, 651, 657, 666, 671, 678, 681, 682, 684, 706: n = A,T,C or G
  misc_feature 709, 711, 720, 721, 734, 737, 738, 744, 747, 751, 752, 764,767, 769, 779, 781, 783, 785, 787, 793, 798, 816, 822, 824,826, 827, 835, 840, 842, 843, 845, 848, 851, 853, 857, 860,863, 866, 867, 870, 874, 877, 879, 885, 890, 892, 893: n = A,T,C or G
  misc_feature 896, 899, 901, 902, 904, 905, 907, 915, 918, 920, 926: n = A,T,C or G
gnggnncnnnntttaaaagcccatttnnaaaaccncnggcgaattggagctccancgcggccncggccgcccgggcaggtacgcgggatagcagtcccagccaagacagtgcctcatttactacataccatttatattattatataggctcctttcagaaacccatgttcaaataagagataagatactgaaacacataacaccttcactagtttttagtatacaaatattgagaaatagtttgttattaactatctcatccaagaaatgcacgattcatgttgtttctaatttttatatataattgacaaaatgaagaaacttaacaccatcctagattttagctgcccaaaaaaaaaaaaaaaaaaaaaaangtcctcggccgctctagaactagtggatccccgggctgcaggaattcgatatcaagcttatcgataccggccgacctcgagggggggcccggnacccantttttgttccctttagtgangggtaaantgcgcgcttgggngtaaatcatggggcattagcctggtttncctgggntngaaattgnntattccgntcaccatttncanannnaaattcccantnccggggagcnataaagngtaaaancctnggggngccnaaatnaggngggcntanccccanttaattggnttgcngcttaantgnncnattttccagttggggaaacccngcntngccaacttnnattaaatgaattnggnncaaacnccncggnnagaaggtcgctnttncntcttgggacncnantncncgattntgcanattaaagtaaatcctttntgcttngncnnttaacatnaggananntngtnttnantttnaanagngcnntanatcncgngnatcccnataanannggnatncnncnnantgcaaatnttnanttaccncccc

SEQ ID NO: 2478 - DNA, 879 bp, Homo sapiens
  misc_feature 2, 3, 15, 31, 535, 542, 604, 606, 616, 617, 618, 619, 668,676, 701, 703, 704, 708, 724, 728, 732, 734, 740, 745, 747,753, 757, 765, 774, 797, 806, 807, 817, 819, 834, 845, 850,855, 863, 875, 878: n = A,T,C or G
gnnccgtatcgactnctatagggcgaattgnagctccaccgcggcggcggccggtatgacctcagcattcctaaagtgctgggataaagtgtctcacaagggcaagtggaccctagagagacagccatccctgacctctgggctccacatcacctgacttgctgctccaccactttgcttgtttctgggtgctccatcccagagacgagtgagttagcaatcacttagtgtaatcagcccaggatggagggtctgtgctgtgggcccaagccagggttccctgtctggtgatgaagtagtggagggtgtgtggtacctcggccgctctagaactagtggatccccgggctgcaggaattcgatatcaagcttatcgataccgtcgaccttgagggggggcccggtacccagcttttgttccctttagtgagggttaattgccccttggcgtaatcatggtcatagctggttcctgtgtgaaaatggtattcccttacaattcccacaacataccaacccggaaccttaaaatgtnaaagctnggggggcttattaagtgacttacttaaaattaattgcttgcgcttacttgccccttttcaancnggaaacctgnnnngccacttgaattaatgaatcggccaacccccggggaaaagcggtttgcnattgggcnctttttcgtttcttggttaattgantnnttgnctcggcctttggttgngggnagcngntttagnttaantnaaaggngggnaatccggntttccccanaaatagggggaaaccccggaaanaaactttgnncaaaaggccncnaaaggccagaacccnaaaaaggcccngttgntgggntttttcanaggtcccccccngant

SEQ ID NO: 2479 - DNA, 893 bp, Homo sapiens
  misc_feature 456, 466, 486, 532, 537, 546, 579, 580, 588, 605, 631, 699,700, 707, 709, 710, 723, 726, 742, 746, 754, 792, 804, 805,808, 811, 813, 814, 817, 820, 825, 828, 831, 835, 838, 844,846, 854, 857, 858, 862, 866, 873, 879, 888, 892: n = A,T,C or G
gcgcgtatacgactactatagggcgaattggagctcccccgcggtggcggcccgaggtacatcatttccagagcaggcactggcagcgagatagggttggaggagaagtagcgccgggacttccggatggcaaacttctctgtgggtagagatttcccagcaatcttgagcttcaggcctggacagctcgaaataattccacttcgtcgtccccgaacggcttgtggtcctccttcccaaacatgctgaggtaggcggccttcatgtaaatgtaggtggcctttttaagtcagatcatgtcagttccttctggaaatctggttatattccatcacactcaggagacatctcctacaatttccttgacacctgcagcactcccgcgtacctgcccgggcggccgctctagaactagtggatcccccgggctgcaaggaattcgatatcaagcttatngataccgtcnacctcgagggggggcccggnacccaacttttggttccctttaagtgagggttaattggcgcccttngcgtnattcatggncatagctgtttcctgtgtgaaattggttaatcnnttcacaanttccacaacaacatacnaacccgggagcataaaagtgttaaangcctgggggtgccctaaatgaggtgagcctaacctcacatttaaattggcttggcgctcactgccccnntttccantnngggaaacctttcntgnccacttgcattaatgnaatnggcccacnccccgggggagaggccggtttgggtattggggcgcttnttccctttcctnnttnatngnnttnttnccttngtngtncggnttngggcancnggtttcanctnncttnaaanggggtantacggnttttcccanaaant

SEQ ID NO: 2480 - DNA, 898 bp, Homo sapiens
  misc_feature 456, 620, 660, 661, 665, 671, 673, 676, 681, 691, 695, 701,707, 721, 741, 742, 745, 746, 750, 751, 764, 770, 772, 778,779, 782, 793, 794, 801, 810, 812, 817, 818, 824, 827, 828,830, 831, 832, 837, 841, 842, 843, 847, 850, 853, 855: n = A,T,C or G
  misc_feature 856, 857, 859, 863, 864, 865, 866, 867, 869, 871, 873, 886,891, 897: n = A,T,C or G
gcgcgtatacgactcactatagggcgaattggagctccccgcggtggcggcccgaggtacccctcccattgtggtagtcccagcagtttaccaaacactagttcccctagtagagccagcctatgagaagaaaagctttgttggccaagttcttacattaatgacttcatagtaagaaactgtttcaaagtgaattaaggaaatcatcacagagaatattttcaaacagatgtttctctttttaaaaagtgatagtaagatgaacttgtaaaaaatttcctctgatgttaattgtagagttgtgggggacggcctatttttctctaccgttgggactggcagggcattgcccaccatataccatagtggtcaccaaaaaagaaacctcttcaacttgaaaagggaagtgaacatgagccatgagaagagatttaaaaagacccctgtgcttgcagntaatgccacgttgattggattatctgtgcttcaaagggcacagaaatcttaaagggatttttagccccatggtagaatattggccttttggccctgctttaataaaaaagccgttgctataatggtattaagtggggtctcggggtttccaaaataacccccgngggcttaggctgcttgggaaaaaaagcactggttctggtnncctnccaatntnctnggtanacctctggtngggnttatanaacttntggggaagcccagngggtttttacttaataaccnnggnncccnntttattccccggnttttgntnttcccnngtnccttgcccggnngggccgnttttaaaantnagggnncccccnggnntnnnggaantttnnnattnagnttntnnnancccnnnnncntnangggggggcccggnccccncttttng

SEQ ID NO: 2481 - DNA, 888 bp, Homo sapiens
  misc_feature 4, 8, 9, 611, 691, 744, 775, 782, 826, 828, 830, 861, 873,881, 885, 886, 887: n = A,T,C or G
gccncgtnngcgcgtatacgactcactatagggcgaattggagctccaccgcggtggcggcccgaggtacgcggggagtctagttcctggttgccggctgaaataacctgaattcaagccaggaagaagcagcaatctgtcttctggattaaaactgaagatcaacctactttcaacttactaagaaaggtattaagcgcctttctgagagctctcagtgggcttcctaagcacgttcactctgcctcctttaagtcttatatttatgatcaagatgaaagggagggatgtatcactgcacagagattctacaagtggatatataaagctaataatgttttcagtgagctcttctctggcaactactttccaagtgctttcagcattccaccttgaagcacaacgttaataatgcacaatttcttatgttcagccacagaatgttcacgtgtgatttggttacaacatattgctctatccaggcctctaacaaaactgacttctttcaaatggacttgcaagttgctgaattccaaatcaacactttatcttaaaaacagaaaaaggaggggaagggtggaagggaggggaacaagaaagggtacctgccngggcgggccgctctagaactagtggatcccccgggctgcaggaatttcgatatcaagctttatcgataccgccaacctcnagggggggccccggacccagcttttggtccctttaagtgagggttaattggcncccttgggcgtaaatcatgggcatagctggnttcctgngtgaaaattgtaattccgcttcaccaattccacacaacataccnancncgggagccataaagggttaaagccttggggngcctaaaggagngagcttanctcnnnt

SEQ ID NO: 2482 - DNA, 875 bp, Homo sapiens
  misc_feature 529, 558, 567, 574, 599, 619, 623, 639, 647, 653, 660, 661,666, 669, 672, 674, 685, 705, 714, 715, 720, 726, 734, 735,741, 757, 762, 771, 777, 779, 782, 793, 795, 810, 814, 815,818, 819, 820, 822, 837, 848, 857, 861, 863, 864, 865: n = A,T,C or G
  misc_feature 866, 867, 868, 869, 871: n = A,T,C or G
gcgcgtatacgactactatagggcgaattggagctccaccgcggtgggtcgagcggcccgcccgggcaggtaccacacaccctccactactcatcaccagacagggaaccctggcttgggcccacagcacagaccctccatcctgggccgattacactaagtgattgctaactcacatgtctctgggatggagcacccaggagacaagcaaagtgttggagcagcaagtcaggtgatgtggagcccagagggctgggacagctatctctctagggtctacttgcccttgtgagacactttatcccagcactttaggagtgctgaggtcatgccagccacatctcatgtgcaagattgcccagcagagatcaggtccaagagttcctgttttaaaaaaggggacttgcttaataaaagaagtctagccatgtttgtgtagagcaactgtgcttgtgctgggggttcacttttgagagagttcttctctgagacctgatctcttggaggctgggcagtctttgcacatganatggggcttggtttgatggcaacactccntaatctggnttggctnttccatgggcctagcctgggcccancatgcttacaagggcacttnttanatgcccccactattancttgccgngctagnggactgnnccctnggncgntntaaaaattagngggttcccccgggcttgcanggaatttgnnttaancttatngatcccgnnaacctnaagggggggcccgggncccancttttggtncctttnanggngggtaaatggncnccttggggaaaaaangggnnaannngnttcctgggggaaatngttttccttcncaaattccnaaanannnnnnncngggg

SEQ ID NO: 2483 - DNA, 882 bp, Homo sapiens
  misc_feature 2, 603, 606, 614, 639, 646, 648, 649, 660, 664, 672, 684,693, 705, 723, 727, 731, 747, 753, 768, 769, 796, 798, 820,821, 823, 826, 834, 836, 838, 848, 859, 861, 881: n = A,T,C or G
gnccgtacgcgcgtatacgactactatagggcgaattggagctccccgcggtggcggcccgggggccattgagactgccatggaagacttgaaaggtcacgtagctgagacttctggagagaccattcaaggcttctggctcttgacaaagagacaaggagaaggccttaggatctactgggggagtccggaggagcagtctcttctgtcccgctggaacccatggtccactgaagttccttatgctactttcactgagcatcctatgaaatacaccagtgagaaattccttgaaatttgcaagttgtctgggttcatgtctaagcttgttccagctatccagaatgcccacaagaattcaactggatctggaagaggaaagaaactgatggtgttaactgaacccattttgattgagacctacacagggctgatgtcattcattggaaacccgcaacaaacttggctattcccttgcccgtgggaagtattggtttttgagaagtctttttggacctcggcccgctctagaactagtggaatcccccggcttgcaggaattcgatatcaagcttatccatcccgccaccttcaagggggggnccnggacccanccttttgttccctttaatgagggtnaattgcncnnttggcggaaantaanggccatancttgtttcctgnggtggaaantgggtaatccgnttccaaattccccacaanatancaancccgggagcataaaanggaaanccctggggggctaannaggggagctacctcccattaaatggcntnggcttcactggcccttttccanncnggnaaacctgncngnccactttcanttaaaaaaacngnccaacccccccggggggaang

SEQ ID NO: 2484 - DNA, 846 bp, Homo sapiens
  misc_feature 401, 471, 475, 477, 485, 524, 541, 548, 576, 588, 623, 624,629, 656, 660, 667, 676, 682, 700, 702, 704, 728, 729, 733,760, 766, 768, 794, 811, 814, 820, 827, 831, 832: n = A,T,C or G
ggagctcaccgcggtggcggccgccgggcaggtacgcgggttctcattcttttctcctttatcttcactctgatttttcttttgtcattcaacgcttactcccttccccatacctcagtcctccaggtgacacctgggcgcttttctgctgaacagcatttcccaccaacggccacagcagtcggtcagtgtcctcttgagcacctcctgaagctgcagtgtcatttgctgtttgccctaaaaagccacgcccagatttcttctaccgctgcttccctgatgggctagcccattctgacttgatgtgtacctcggccgctctagaactagtggatcccccgggctgcaggaattcgatatcaaagcttatcgataccgtcgacctcgagggggggcccggnacccagcttttggtccctttagtgaggggtaattgcgcgctttggcgtaatcatgggcaatagctggttnctgngngaaaatgntattcgctcacaatttcacacaaacatacgagccgggancataaaagtgtaaaagnctggggnggctaaatgagggagctactcacaattnaattggggttgngcctactggccccttttcagttcgggaaacctgtnntggcnactgcatttaatgaaattgggccaacncccngggagangggggttgngtattnggggctttttccgctttntngnttaattgaaatcctgggctcgggnngttngggtggggggaaggggggttaacttanttaaangnggggataccggttttccccaaattcnggggaaaccccggaaanaanattttngcaaaanggcnncaaaagggccggaa

SEQ ID NO: 2485 - DNA, 419 bp, Homo sapiens
  misc_feature 5: n = A,T,C or G
gagcnccccgtaatacgactcactatagggcgaattggagctccaccgcggtggcggccgcccgggcaggtactcagtggatgacgagtgcttggtgaaattgttgaaaggcctgtgtctgaaatacctgggccgtgtccaggaggccgaggagaattttaggagcatctctgccaatgaaaagaagattaaatatgaccactacttgatcccaaatgccctgctggagctggccctgctgcttatggagcaagacagaaacgaagaggccatcaaacttttggaatctgccaagcaaaactacaagaattactccatggagtcaaggacacactttcgaatccaggcagccacactccaagccaagtcttccctagagaacagcagcagatccatggtctcatcagtgtccttgtagc

SEQ ID NO: 2486 - DNA, 415 bp, Homo sapiens
  misc_feature 403: n = A,T,C or G
gagcgccccgtaatacgactcactatagggcgaattggagctccaccgcggtggccggccgcccgggcaggtactgaagtcctcagcctagtgcctcccgatgcgttattttcacacaagcgatcgggttaacgccacagttccacatggctggggtggcctcacaatcatggcggaaggtgaaggaggagcagaggcaggtcttacatggtggcaggcaagagagcctgtgcagggaaattccttcccaggccacagaaatggaaaagccagacacgctgaaaatgaactcagtccttcagttctggaggctggaagtctggggtcaaggttgtggccaatcctgtgtctggcaaggctgcttcctggtttgcagacaccatttttcctccctgtccttcancccacagcagtg

SEQ ID NO: 2487 - DNA, 408 bp, Homo sapiens
  misc_feature 5, 133, 223: n = A,T,C or G
gagcnccccgtaatacgactcactatagggcgaattggagctccaccgcggtggcggccgaggtacttttttttttttttttttttttttttggtaacagatctaatcttccacgtaagcctctttactgganaagagtagatgggagggcaggtgggatctatttagacaaatccgatatattcagaatgattcagtaggcaaagaattcctcctggtaacnaatctgtgtgtcaaggtccttaccttggctctcactgtcctcaggattatggaggggaagatgatgcagaattcgcacatgtcttctggatcatgggggactttgctgagtgtgcctgccatggtccgatctctgattgataggagtgactgctgagatcctggatctgaccactgagatatccc

SEQ ID NO: 2488 - DNA, 413 bp, Homo sapiens
gagcgcgcgtaataccgactcactatagggcgaattggagctccaccgcggtggcggccgaggtactttttttttttttttgtctggagagagagagatgttttatttttgccaaagcatgtgagagtaagtagcaaacatcatgacacttcacccctcaaatattttcccacgtatcacttaagaacaagggcattcattctgttacatgaccacaatacaatcagcacagatagatattaacattgagacaatgctctgatgtattgggtatctactatgcagttcataatcaaataagggttttggtaacttgggatccataaatggtctgcaaggtcagcccctgtagacctgcacttagtgggtgccatttccctgtctcaggtgcctgctctactggtgatattttc

SEQ ID NO: 2489 - DNA, 410 bp, Homo sapiens
  misc_feature 5: n = A,T,C or G
gagcnccgcgtaatacgactcactatagggcgaattggagctccaccgcggtggcggccgcccgggcaggtacttttttttttttttttttttttttttgggagagagatgttttatttttgccaaagcatgtgagagtaagtagcaaacatcatgacacttcacccctcaaatattttcccacgtatcacttaagaacaagggcattcattctgttacatgaccacaatacaatcagcacagatagatattaacattgagacaatgctctgatgtattggtatctactatgcagttcataatcaaataagggttttggtaacttgggatccataaatggtctgcaaggtcagcccctgtagacctgcacttagtgggtgccatttccctgtctcaggtgcctgctctat

SEQ ID NO: 2490 - DNA, 407 bp, Homo sapiens
  misc_feature 3: n = A,T,C or G
gcncgcgtaatacgactcactatagggcgaattggagctccaccgcggtggcggccgaggtacgcggggggaaaaaacacctgatgaggctgcacccttggtggaaagaacacctgacaccggctgaaagcttggtggaaaaaacacctgatgaggctgcatccttggtggagggaacatctgacaaaattcaatgtttggagaaagcgacatctggaaagttcgaacagtcagcagaagaaacacctagggaaattacgagtcctgcaaaagaaacatctgagaaatttacgtggccagcaaaaggaagacctaggaagatcgcatgggagaaaaaagaagacacacctagggaaattatgagtcccgcaaaagaaacatctgagaaatttacgtgggcagcaaaa

SEQ ID NO: 2491 - DNA, 408 bp, Homo sapiens
  misc_feature 5: n = A,T,C or G
gagcnccgcgtaatacgactcactatagggcgaattggagctccaccgcggtggcggccgcccgggcaggtaccagattttcaccgctatgcctcctttcactctgggagtcttccagaggtcttgcactcgggagagcatgctcaggtttccccagctctacaaaatcacccagaatgccaaagacttcaacacaaggatactgtgttgaccagtggtcatgccactgcctgttgatttgttgaaaatattgtttacacgtatgttcttgttactgattgtcagaaagctggttttgagactgcagcttggactaaattcagtcatctggctgtctggggaagcatgctgaccagtctggtgttctttggcatctactcagccatctggtccaccattctcattgcc

SEQ ID NO: 2492 - DNA, 410 bp, Homo sapiens
cgcgtaatacgactcactatagggcgaattggagctccaccgcggtggcggccgaggtacctgaatgagcctggcctggtgctgtgtctccagactcgacacagcccagaaagaaacaggtgaacacactcctgagagccgaaactggactcttgctgatggactcatggcaatactccagccaaaggctgctccgagtcctagaagggctcggaactgtcctgggtaagcctgtcgacacagtagggacagagaggggttagtgtcctctttcacagcactaagcatgttgttgcccacatgcaacagttatgacaagaacagcaagtccaattcaggaaatacatgtctttatcaaagaaaatagatgtgactgacacaaaggcttgctccagaagcaaaggcgcaca

SEQ ID NO: 2493 - DNA, 415 bp, Homo sapiens
  misc_feature 5: n = A,T,C or G
gagcnccgcgtaatacgactcactatagggcgaattggagctccaccgcggtggcggccgaggtacgcggggagaccgtgtgtttccaaaatggcggcagcgatggatgtggataccccgagcggcaccaacagcggcgtgggcaagaagcgctttgaagtgaaaaagtggaatgcagtagccctctgggcctgggatattgtggttgataactgtgccatctgcaggaatcgagcggccgcccgggcaggtacgcgggtgtttgtggtttagtcaatggtctatggtaatttttttatagcagtcccagccaagacagtgcctcatttactacataccatttatattattatataggctcctttcagaaaacccatgttcaaattaagagataagatactgaaacacataacac

SEQ ID NO: 2494 - DNA, 414 bp, Homo sapiens
gagcgcgcgtaataccgacctcactatagggcgaattggagctccaccgcggtggcggccgcccgggcaggtactgaacactacatgctatgcactgctccaacatttttaagtgtcctaatttattaaactctcacacatttgaatagggaggtttcactgatcaggaaatagaggatcagagcatttaagtaactagctcgaggtcacagagctaataaagggaagagctaagattcaaactcagacaatctagcttcagaactgatgcttaatgtgtaaacatcctttctttcatgtccttcaacattcccatttcccatctgtaaccaaacatatggaaggcataaatttcttttatgggtcctaacatcaccacagagccctagataaatcttaagtaggtgctggatg

SEQ ID NO: 2495 - DNA, 414 bp, Homo sapiens
gagcgcgcgtaataccgactcactatagggcgaattggagctccaccgcggtggcggccgaggtacaactgaaacaaagaggaaagcagacccatggctcaggacacatgggagtcccaccagcttgaaaaaaatttcacagagctggcatttccatcagtgcagacacggctctgaaaacagtaattgctgccttatgggcatgatacgcccatttctactctgacctcctcccaggagaaactcttctgcaaatgaccacagtacctgcccgggcggccgctctagaactagtggatcccccgggctgcaggaattcgatatcaagcttatcgataccgtcgacctcgagggggggcccggtacccagcttttgttccctttagtgagggttaattgcgcgcttggcgtaat

SEQ ID NO: 2496 - DNA, 415 bp, Homo sapiens
  misc_feature 5: n = A,T,C or G
gagcnccccgtaatacgactcactatagggcgaattggagctccaccgcggtggcggccgcccgggcaggtacaatctggagctggcctttcatcatcatctctgcaagactcatcgccaaagcatcctggcaaagctgccacccaaggggaagcttcggagcctgtgtagccagcatgtggaaaggctgcagatcttccagcacctccaccccatcgtggtccaagccgctttccctccactctacaaggagctcttcagcactgaaaccgagtcacctgtggggctgtccaagtgacctggaagagggactccttgcctctccctatggcctgctggcccacctccctggaccccgttccaccctcacccttttcctttcccatgaaccctggaagggtggtccccaccagct

SEQ ID NO: 2497 - DNA, 412 bp, Homo sapiens
  misc_feature 6, 412: n = A,T,C or G
gagctntccgtaataccactcactatagggcgaattggagctccaccgcggtggcggccgcccgggcaggtacatgacgttgcttacaagtttgatgtaggacaattaatccttttcaaacacttctaatttagattaaatcactgaccagcattaacaaagaaactctataataatagggttccctcctggcacccaaaactgccaggagaagctcctgccatctgcaaacctgaactgcaataagcaggttggaaaaggatcaagtgaacgaatggaaagtacctcggccgctctagaactagtggatcccccgggctgcaggaattcgatatcaagcttatcgataccgtcgacctcgagggggggcccggtacccagcttttgttccctttagtgagggttaattgcn

SEQ ID NO: 2498 - DNA, 422 bp, Homo sapiens
  misc_feature 5, 7, 16, 187, 373: n = A,T,C or G
gagcncncgtaatacngactcactatagggcgaattggagctccaccgcggtggcggccgaggtacttttttttttttttttttttttggaatactcaaaaaacatatatttgcatgtgccaggaaaaggtaaggaaaagggagccttcatgtgccagcccctgtgctgagccctggagctgtaaanatgagtgaggtggattttttgtctgtaaagagtttgccgatgggaccaagtctgtcatctctctttcctggcctgaccgaggacaagcacttcttagtaaccctgtgaataccgatgcatcccgtcagtcagcagcttgtttgcggaacaccagctgcaggccaggcaccgtgctgcaaggcgtanatatgttgctgaacatgactcccttccagatgttcaggatttaacaggc

SEQ ID NO: 2499 - DNA, 420 bp, Homo sapiens
gagcgcgcgtaataccgactcactattagggcgaattggagctccaccgcggtggcggccgaggtacgcggggaaagggcagcaggccgcctgccaggcagtgtgtgtcagaatcccacaactctctgggcctccttaggccacagggtctggactctatgaacagttggtgctaggcatggggaagatagaaatgttccttgtggcctagattcaaccaggaggcctccctggaggaagtgtcccctctgaaggtgtgagacttcctgcctatatctgtgagctggggcaggggagagtggaggctctggactggcccaatttaacttcatttaccacactttaagaaatcttccccaggctgggagcagtggttcacacttgtaatcccagcactttggaaggtcaaggtgggaggat

SEQ ID NO: 2500 - DNA, 419 bp, Homo sapiens
  misc_feature 5: n = A,T,C or G
gagcnccgcgtaataccgactcactatagggcgaattggagctccaccgcggtggcggccgcccgggcaggtacttcctgtaattgacagccttgccttgttcctcatggcatcattcaaggtcatcttaaatgagagaggagggaaagaaagaaaaagaaatcataccgttatggttttcaaatgcatccagaggaaaggcagggttgtttttgaaaagtttacttctatctgaaagcttctagcaaatgaaagcaaacagtgcaaagctgaactacaaataataaagcacaattatggcaggaatctgtccacattcacccaagctactgtgccattaaagaggaaaatagacagttgagctgcaggttagtcaccaactgggaacatggaagaacgtcaacaatacatacaggatg

SEQ ID NO: 2501 - DNA, 417 bp, Homo sapiens
gagcgcgcgtaatacgactcactatagggcgaattggagctccaccgcggtggcggccgaggtacagctcccaggaatccccttctcaggcctgtttcagttcaaactggacatattcctgggttttcagattgaagaaacaagattttgctacgatttttgttaaccctcttttttgcagtctttttggttatttgctggtttgtatctgtgtttgaatcagttgcaattttggtttctggcattttagcagcctatgctatactatgagaaatagatattttttaaaggcacttttttcagcagctaccattttcctaaaagttttcaatcagtagtatttccatcaaaatgctaattattgttgttgttgttgtgattaaagacagggtctccctctgtcacccccggctggag

SEQ ID NO: 2502 - DNA, 874 bp, Homo sapiens
  misc_feature 4, 8, 12, 306, 351, 361, 369, 374, 396, 439, 456, 520, 521,534, 572, 574, 580, 588, 590, 605, 610, 611, 614, 615, 620,622, 639, 660, 674, 696, 719, 720, 736, 743, 745, 751, 754,768, 769, 776, 777, 783, 785, 786, 788, 798, 805, 808: n = A,T,C or G
  misc_feature 812, 817, 819, 822, 823, 824, 825, 829, 837, 840, 841, 845,846, 847, 852, 853, 855, 870, 872: n = A,T,C or G
agcnatcngtgnatacgactcactatagggcgaattggagctccccgcggtggcggccgaggtactttttttttttttttttttgagaagacatcattacctgtatatgccccctcttctcagttccctcaatggacattggcattgatgagcccataagtacatgataagcctacaaggacaatagtgagtttatatttttatgtaatgattttagaacatgggataatatccagagtgatggaggtaaaactattcacatttccatattccaaactacttcaagaatcactagagtgcagaagntataactctaaatgcttgaatggagaaatcatctgtcccaagaantacacccatntgactttncaatnaatctatctcaaaaggcctacnatttaacaacaaccagcatacaacaaaactttaaaagaacccnaatgaaagttttgtatnaaggttggtgtctttttttctatacattttgaattgacaaaaaagctgctgggagctcacctgnnttttattttattntaaaccattcttattttataaaaaacaacagcccttantncctganaaaaaaantnttgggaactaaatgntgggnnaannccatnanatttgggggctcccatntgaaccctaagaaagaacccnaagggaatgccgtnattaaggactgcccccattggnttggaaatattggtttttaaggnnttaaaaagagctaaantcccctngnccaatngcntcaaaacaggggcnntggcccnnaataananntnttggaaagcntttttanggngttnaaaancnggnnnntgcnttccaatnganntttnnngaaanngnaatccccggaatttntntt

SEQ ID NO: 2503 - DNA, 888 bp, Homo sapiens
  misc_feature 3, 4, 5, 281, 282, 301, 327, 345, 346, 362, 372, 393, 400,442, 455, 468, 477, 478, 483, 494, 515, 516, 521, 523, 526,540, 542, 546, 551, 601, 613, 625, 632, 638, 640, 642, 664,678, 684, 686, 695, 700, 714, 725, 726, 728, 731, 732: n = A,T,C or G
  misc_feature 735, 743, 745, 747, 753, 754, 762, 763, 764, 774, 775, 791,792, 798, 799, 800, 801, 810, 811, 815, 821, 822, 825, 826,832, 834, 847, 848, 849, 860, 862, 866, 867, 871, 874, 875,876, 879, 882, 885, 887: n = A,T,C or G
agnnncgacgaatacgactactatagggcgaattggagctccaccgcggtggcggccgaggtactgtgtcactttatggggttggtgcttgccacacttcttacagaaagtccggcgggttttagggacgttaaccatgcttgcgtccccgcgtacgcgggggggggaattggaggcttctaggaggtggcacggtgcacgccaagatggctgtgtccacagaggagctggaggccacggttcaggaagtcctggggagactgaagagccaccagtttttnnagtccacatgggacactgntagccttcattgttttcctcaccttnatgggcaccgagctgctnntgctgctgctggtcgntggccactgntgttgctgcagctcccccggncccccanggaaaagcctcaggaaggaaagacccaagggaagtggataanttggccctggaancctgaccctgtgntctctgccnngtggnaaaacaaaacntttttgtcttgtcccgagganntatantncantattaaattacctncncggntgggnccgcttttagaactaagttggaatccccccgggcttgttaggaatttctntatttcaaagcnttatcgattccncgaccgnatcctnangnggggggggccctgggacccaanctttttgttcccantttaantnaaggggttnaattngccccctttgcaanaaatattgggnnanagnntgnttttcttntntngaaaanntgtaatcnnnttaaaaattnnataacaaactaactcnncctggnnnnaaaaaaatnntaangtttgnnggnnctaaanangggcgctataccnnnaatttaattgntnttgnnctanttnnnccnttntanang

SEQ ID NO: 2504 - DNA, 839 bp, Homo sapiens
  misc_feature 3, 579, 609, 623, 678, 714, 715, 731, 736, 743, 776, 777,796, 828, 834, 839: n = A,T,C or G
agnatcactactatagggcgaattggagctccccgcggtggcggccgaggtaccattgagttcaaccacatccttactgattttctgcctgctacatctgtcctgtgctgactgagggattttaagtctcctactacagtagtggatgcatctcttcacgggtctatcgtttttggcctcacgtgttatgatgctttgttgttaggtgcatgcacattaagtattgctctgtcttcttagataattgacctctttatgattatgaaatgcagactgtaatttaactgagatggttagaaaaggcctttcagggaagttggccaaacttctggcaaagctgatggggcaaaggtgaaggctgacaattgcctgcaccagaagcagccaaaaggtcccatcacagtgcaggtcatcaccaccggaaacctcagccctggctttgcattagccctagaataagccaatccaagcctgacccacaaatcctgtgagatctaggcccatcccgtcctcttggcatgatacttatcttccttccctaagctcaagctgccctggagagggcctacccgtctcttnctctaaccagagagctggtgcctacctcangcttacacattccntttcctctaccaaggatgccagttccccctgggcaatgcctaagtcaacttgctntacaagccttggctttcatgccacctttttcaggcnngccttacctgacgaanccatntaacttnttactgggatatcctggggaatttcctccagannaacccaaacaggtgaaaanaaattggcattatattggaaattccttggaangccatnggtgn

SEQ ID NO: 2505 - DNA, 849 bp, Homo sapiens
  misc_feature 2, 3, 587, 615, 622, 647, 652, 661, 662, 669, 670, 674, 679,680, 702, 704, 705, 717, 726, 731, 756, 761, 772, 792, 794,798, 801, 802, 819, 827, 830, 839: n = A,T,C or G
anntatcactactatagggcgaattggagctccaccgcggtggcggcccgaggtacttccaagactgagatttgggtgctatagcctttttgctttacaggaaagcaatggaaaatagaacaatttccttcagcgctggttgtagatcccgcgtacatccaggagctatggagaaagaagcagtctgatgtcatgcgctttcttctgagggtccgctgctggcagtacctgcccgggcggccgctctagaactagtggatcccccgggctgcaggaattcgatatcaagcttatcgataccgtcgacctcgagggggggcccggtacccagcttttgttccctttagtgagggttaattgcgcgcttggcgtaatcatggtcatagctgtttcctgtgtgaaattgttatccgctcacaattccacacaacatacgagccgggagcataaagtgtaaagcctggggtgcctaatgagtgagctaactcacattaattgcgttgcgctcactgcccgctttccagtccgggaaacctgtccgtgccagctgcattaatgaatcggccaacgcgcggggagaggccggnttgcgtattggggcgccttttccgcttncttcgcncacttgacttgcttgcgctcggttngttcnggctgctgnnaggcggnntcanctcanntcaaagggcgggtaataccggntnntccacagaaatngggggaatnacgcnaggaaagaacattgtttgccaaaangccancaaaagggccngaaccgtaaaaagggcccgntngctngcnnttttccatagggtccgnccccctgncgngccattaanaaaaatttct

SEQ ID NO: 2506 - DNA, 866 bp, Homo sapiens
  misc_feature 3, 550, 579, 595, 641, 654, 684, 693, 718, 738, 761, 778,781, 786, 790, 793, 796, 800, 803, 804, 806, 808, 810, 813,815, 816, 824, 835, 836, 837, 841, 843, 848, 857, 860, 863: n = A,T,C or G
agnggcgcgcgtaatacgactcactatagggcgaattggagctccaccgcggtggcggcccgaggtacacacaaagacaaacctgaacttaatttcaaggaaaacttaaacccatgcacaaataattggtgagccttcatttccctgacttcaagtttccatgtgaggactcatgctctctccactttcttcttgggaggagggaagatttacctaatgggtaaatttgggcaaagcacattgagtgtgcttgtttggctctgagtctctttgcaaacatgtgtctgcccacagtgacatgagtttgcgttgactgtcatgtctgcaggaagctgcctgctcctgtggccatgtcaagcaattctttctttcaactgcaactgtgtgtaagagcttagtctgagaagaaatgttcagaagctcactgtggctgcacatctgagccatgtcttcccattagttgtcatgagtcagcaataaagcgggtatgttgatgtctatcaatctaattcctatgttctgaactcaagggaaagaaaataggagaatnattttgcagcctaccttaccacaagcccnaccaaagaatggcttncataataccttggaaaaaatggttcccttacttccttggactttgnaactttatatttnttcaacacaacccccatggttaaccaatanggaaagggntggaagaaaaattgaaaatcaggcnccgggcccgggggcttcacnccttgtaattcccggcactttgnggaaggccaggccagcntantcccnaggncanggngaancannancntnctngnntaacacantggaaaccccnnntttntnttaanaaaaaattnacntgncct

SEQ ID NO: 2507 - DNA, 849 bp, Homo sapiens
  misc_feature 5, 700, 704, 706, 726, 737, 773, 791, 811, 847: n = A,T,C or G
tacgnatcgctcctatagggcgaattggagctccaccgcggtggcggcccgaggtacgcggggacctaggttacttgtaggaccctatacggcaacctcctttgccaggaactatttataaacatcctgcaggaaaatgtgaagtagaagagacagggatatcccagaaggttatgcaaaacatcaagagaagatgagaggagtctatatgtcagaatacacatttcccaccttgcccaacagtagaaaaacataagaagagaaaaacattaaaaaatgacaaggaagttaatggaagtcagcaatgtgatggtgtttggaggtggagccttcagaaggtaattaatgcccttgtaagaagagaccagagagcttgcgcaccttcttcctgccatatgaggagccaagaagccggctgtctgcaacctgcaagaggaccctcactagaagctagccatactggcatcctcatcttggctttccaacttccagaactgtgagaagtatatgtttgtggtttagtcaatggtctatggtaatttttttatagcagtcccagcccaagacagtgcctcatttactacataccatttatattattatataggctcctttagaaacccatgttcaaattagagataaggatctgaagcacataacaccttccttgtttttaggtatacaaaaatttgagaaaaangttngntattaactatcttattccangaaatgcaganttcatggtggttctaattttttatatattaattggncaaaatgaaggaaacttnacacccattcttaaatttancttgcccaaagaattggaaaggattgaaaaaaaatntt

SEQ ID NO: 2508 - DNA, 860 bp, Homo sapiens
  misc_feature 4, 545, 561, 567, 578, 580, 581, 583, 588, 593, 595, 597,598, 604, 607, 611, 613, 626, 630, 632, 637, 641, 644, 646,652, 653, 657, 662, 663, 666, 670, 672, 680, 691, 692, 693,695, 702, 708, 711, 712, 722, 742, 744, 746, 750, 754: n = A,T,C or G
  misc_feature 758, 766, 769, 770, 771, 774, 779, 794, 804, 811, 818, 822,823, 824, 825, 826, 830, 833, 835, 848, 859: n = A,T,C or G
acgnatacgctcctatagggcgaattggagctccccgcggtggcggcccgcccgggcaggtaccataaatgttgtctcttaagagaatgtcaagtttcagtaaatttactttgaacttcaaagtagtgtgcaataactttgataaataagccgatcttatgaaatttgaaagttacgtttataattatattataaaataaaatgttgaattttctgttttaacttccccgatgtcccatattgattttattacattcacagatttttcttttcaaaagtaagcttcacttggtttgacatcagcagcttatttcttgcaatctatttaattgagacttttctgctgtttatcctaaaatgcagataaatggctttcagcacactgtttatagtataatagctcctgaagtgagtcagcattatcagctagagtctccatgtcataactaatggtctctctgcttatactttcctgctagtgaggagccactgaactccacagagacaggagcctggcatagttggggggtgggtagaattatttnggatggggccctttangacaanggcttattttncnncntttantgggngntnncatgcnaangaananatatttcccttanctgnantttancatngcncnaaaagnnattntgganntangaantnggggtaangaaacttttcnnngnacccaangattcntannggggtatttngctaattcccaaaatatctncntncgtntttnatanccctgaanttnnnctnacttnctcttttggggcttnttgacatttnctaattnagaatgnccgnnnnnaggnaantngttgatcgctatnccctcatttgnc

SEQ ID NO: 2509 - DNA, 878 bp, Homo sapiens
  misc_feature 5, 10, 14, 213, 385, 410, 506, 546, 569, 593, 597, 620, 627,642, 654, 655, 686, 687, 691, 703, 704, 720, 725, 738, 761,775, 779, 781, 786, 799, 810, 814, 828, 837, 839, 842, 843,846, 852, 860, 863, 864, 877: n = A,T,C or G
tacgngatcnacgnaatacgactcactatagggcgaattggagctccaccgcggtggcggcccgaggtactttgttacagcagcctgaaaggactaagacaccgacctagtctccctgatgaaaaagtttctctcagacttctaccctttccaatgtggccaaagcttttcattccgaagaagtttcctttctgagaacactcattgtgtcgnttggctttccccgtctctgcttgacgcatgaaccaaaacagaggcagccaaagcagggaaaaaaaaatcctaggatcagagtccactctatgcccttttgagcttcaaaaggagaaagagacaaaagccaaaagcaatggaggtcaagctgcccggtacctgcccgggcggncgctctagaactagtggatcccccnggctgcaggaattcgatatcaagcttatcgataccgtcgacctcgagggggggcccggtacccagcttttgatccctttagtgaggggttaattgngcgcttggcgtaatcatgggtcataagctgtttctgtgtnaaaattggttatccggtcacaantccccaacacatacgagccgggancatnaaagtgttaaatcttgggggtgncttaatnagtgagcttaactcncaatttaattgnngttggcgctcacttgccccgcttttccaatnngggnaaaccctgttcnngccaacttgaattaantgaanttggcccaccccncggggagaaggtcggattacctnataggggcgctaanttcngntttcnttggtttacttgnattcccttgancttnggaacgttcggatngcgggaaancnggnnttngcgttnacttaaangcnnggaaaaacgggtnt

SEQ ID NO: 2510 - DNA, 909 bp, Homo sapiens
  misc_feature 5, 7, 8, 14, 472, 501, 514, 550, 592, 608, 661, 699, 716,732, 735, 754, 755, 756, 759, 766, 785, 790, 799, 807, 837,850, 878, 882, 885, 895, 896, 904, 908: n = A,T,C or G
atatngnncgcgtnatacgactcactatagggcgaattggagctccaccgcggtggcggcccgaggtacgcggggggcccgctttctcttactgatagtaggatatttctgctttagttattgtcaccttaaatatattttcaatgttgaaatcctcacagcatgcttgatgaaatctagttttcaaattttcttaggtatatttctgtcacgttggcatgataacaaatgcaataacccaaaagaccccaaaagctagtgtaatcccttttgcaatccaagcatgaggattcatcttcatgttgacagtgcgtgaatgttcggtaggctttgtcaagcttgcatacaataaattatatatgtcccttttcttttagggtctcctgttaaagatggtcttctgaaggctaactgcggaatgaaagtttctattccaactaaagccttagaattgatggacatgcaaactttnaaagcagagcctcccgagaagccatctgnctttcgagcctgncattgaaatgcaaaaagtctggttccaaataaaagnctttgggaattggaagaatgaacaaaacctttggagaagccngaatgaggatacctcnccatcagaaatccaaaacaaaaagggacttttgaagaaaaggtctttggggantcttgagaagtcttctgttgaagaacttggtttacaanaaaggggatgttgtggnttacccccaagggctnccnccattcaaaaaaggaaatnnnatntaaaatnaattggaaaaattaagaanaaggncttcttganaaaggatngggttttcttgaaaggccccctgccaaaantgaaaagtttttnttccaactaaaagccttaaaaattgatngganatncaaacttttnnaagcaaanaccnt

SEQ ID NO: 2511 - DNA, 889 bp, Homo sapiens
  misc_feature 224, 423, 447, 528, 577, 614, 632, 637, 650, 671, 673, 682,692, 694, 712, 716, 730, 731, 735, 744, 745, 760, 762, 769,770, 778, 781, 785, 801, 811, 815, 816, 820, 821, 824, 839,848, 852, 855, 862, 865, 867, 868, 878, 880, 883, 885: n = A,T,C or G
cgcgcgtaatacgactcactatagggcgaattggagctcccccgcggtggcggcccgcccgggcaggtacgcgggggaggaggtggatttgagagatacctcccctccttctgctcagctgccttgcagtaattaaactctttctctgctgcaacacccctactgttctccgtgtattggcttttctgggcagcagaaaaaagcttggccagaccacaagcggnaatgcaaatgccttaaaagctgcaaacccagatatcctccagactccgttcgacttcttggcagagttgtcttcaaacttatggatggagcaccttcagaatcagagaagctttactcattttatgatctggagtcaaatattaacaaactgactgaatataaaaaagagggcctcaggcaactcgtaatgacattttnaacatttcatgagagaagaaattncaggatgcctctcagcttgccacctgcctttgacctttttgaagccttttcaaaagtgatctgcaactctttcaccatctntaaatgccggaagatgcaggaagttggtgttgggcctatatcccaatantcttcttttgcttcaatcacagctgttgacccccaanctgttccgatttgtgttnaaatngggccccaccctntttacctgcgagcaagtcccnanacatttaangttggggagnanggagccttaaccattttnttanctgggatattgctnnatanaccaattannggagccccccggaancntctttanngggtccanttncctntgtcctttttaagaantaggtggttncccnntagnntgngggaattttattttnaaagttatnaatnccngcggacntananngggggcccgncnccnantttt

SEQ ID NO: 2512 - DNA, 866 bp, Homo sapiens
  misc_feature 1, 606, 660, 689, 703, 744, 779, 787, 795, 800, 819, 826,829, 831, 832, 842, 844, 847, 848, 850, 851, 857, 858, 859,865: n = A,T,C or G
nggcggcgtatacgactactatagggcgaattggagctccccgcggtggcggccgaggtacgtggcgtagcattccatgttcagctttgacatttattttctcatatcaaccctttttacacgtgaaacacaatctcgctcttgaagtcttaactgcatgatctgtgaaacctgtatttatattttcttcagtgtattcttgtcgtgtgtgtcctaaacaaaccaaaagaaaactttccaaatctaaagtattcattctccaattggagcaagaggagtcagttagatactatcacggcattcatttgtggctggcttgtcatatttacttatgattgataataaatctattttgctttttagagcctcccgagaagccatctgccttcgagcctgccattgaaatgcaaaagtctgttccaaataaagccttggaattgaagaatgaacaaacattgagagcaggtaaattttttaatggaactatgcaaagaccaatatttcaatattgggacatttttgatggtccttctatccccaatgctttatttttttcaacttttgatgaaaagatttgatctagggtaatgccaatactggtattgntgtttggaaaagctggtattacaagcacagtaatttttcaatatcttttttttnaaaatggaggcttaatctcagatgtttcnactttttgtatccnggaactgggaatggttttctattttgaacttcggtatttcnttaaggatccaagaggggggaatggttgaaacctncaattttntttttttnagctntcgaaaatttgatttaaanttccacnggntnntttggggggnanccnntnnttaccnnnaataanc

SEQ ID NO: 2513 - DNA, 857 bp, Homo sapiens
  misc_feature 1, 4, 5, 694, 703, 719, 725, 760, 762, 765, 768, 777, 784,806, 826, 830, 832: n = A,T,C or G
ngtnncgactacttagggcgaattggagctccccgcggtggcggccgaggtcgcggggagagcttttggtttgctgaggtttgtcagattttccagctcagggcccagccagctggcaggaagcaggacagaggtcacttgaattcagaccacatgtccctgttaaatacattagcttttaaatcaatctttgttcaaagtccagtgagttgcaagcctaatgctcacctgcagagacagaattcctgagtgaacgaacagagcagctcctcttcatctccagaaatgacctccaccttcaacccccgagaatgtaaactgtccaagcaagaagggcaaaactatggcttcttcctgcgaattgagaaggacaccgagggccacctggtcccgggtgggttgagaagtgtagcccagcagagaaggctggccttcaagatggagacagagttcttaggatcaatggtgtctttgtggacaaagaagaacatatgcaggttgtggatctggtcagaaagagtgggaattcagtgactttactagttctggatggggattcctatgagaaagcaagtgaaaacaccggtggacttgaaagagttgggtcaaaagtcagaaggagcaagggttgagtgataatatactttcccctgtgatgaatggaggtgtgcaaacttggacccagccccgggtntgctatttntgaaaggaaggaggcngctttngcttctttttgaaactgtccaaggggaaaaatcangnaanccngtcatgttnctgtggngggcaaaaaaactgacagcgtntgttggcccaaaatccattnaaananaaccccccgtttgaactgttcccct

SEQ ID NO: 2514 - DNA, 877 bp, Homo sapiens
  misc_feature 2, 50, 71, 82, 137, 225, 230, 258, 279, 282, 284, 448, 505,526, 553, 558, 559, 564, 568, 575, 585, 615, 623, 660, 671,677, 702, 703, 712, 745, 757, 773, 779, 788, 793, 794, 798,804, 832, 833, 873: n = A,T,C or G
tngatcaccgtaagacgtgttttgcgacccggcaccaccgtagttttacngcccggtgaactctgtggagngtagcaagttnttttagaaacaaggaaatggctgtgcgtgccctcgtggcatgtcacgtggcttgncactgccggctgattggctgcggccgctctagaactagtggatcccccgggctgcatgaattcgatatcaagcttatcgataccgtcnacctngagggggggcccggtacccagcttttgntccctttagtgagggttaatngcncncttggcgtaatcatggtcatagctgtttactgtgtgaaattgttatccgctcacaattccacacaacatacgagccgggagcataaaagtgtaaagcctggggtgcctaatgagtgagctaactcacattaattgcgttgcgctcactgcccgctttccagtcnggaaacctgtcctgccagcttgcattaatgaatcggccaacccccggggaaaggcgntttgcgtattgggcgctcttncgcttcctcgctcactgactaacttgnctcgnnccttncggntgccgcnagccgtattnagctcactcaaaggccgggaattccggttntccacaanaatcagggggataacccccggaaaaaaacattttgancaaaaggccancaaaanggccaagaacccttaaaaaggcccnnttgctggcntttttccatagggttccccccccctgacaggcntgaaaaaaaatnacccctcaaatcaaangtgggnaaaaccccnccggnntttnaaaatnccaggcgtttccccttggaagccccttnngcccttttttttccaaccctgcccttaaccggaaaccttnccct

SEQ ID NO: 2515 - DNA, 661 bp, Homo sapiens
  misc_feature 4, 10, 573, 610, 630, 632, 658: n = A,T,C or G
cgcntttttncctcactaagggaacaaagctgggtaccgggccccccctcgggtcgacggtatcgataagcttgatatcgaattcctgcagcccgggggatccactagttctagagcggccgcccgggcaggtggtgaaggcaggctctgagtgagggctggccaccttttcagtgtgctgtggcacactgcctcctgtgcatggcctagctgggaatataagacattgctgtagttcctaatagtattttacgtattacacaatatcggcgtattacaatctaccaaacattttcacgttcactgactcaagtcattcactcattcatcatgccactgcactccagcctgggtgacagagcaagactctgtctcaattgaaaaaaaaaaaaaaaaaaaaaaaaagtcctcggccgccaccgcggtggagctccaattcgccctatagtgagtcgtattacgcgcgctcactggccgtcgttttacaacgtcgtgactgggaaaaccctggcgttacccaacttaatcgccttgcagcacatccccctttcgccagctggcgtaatagcgaanaggcccgcaccgatcgccctttccaacagttgcgcancctgaatggcgaatgggacncnccctgtagcggcgcattaagcgcggnggg

SEQ ID NO: 2516 - DNA, 849 bp, Homo sapiens
  misc_feature 1, 3, 4, 5, 10, 210, 231, 287, 309, 364, 385, 396, 407, 504,508, 618, 630, 651, 671, 679, 688, 691, 698, 700, 708, 721,726, 771, 784, 804, 805, 808, 827, 835: n = A,T,C or G
ngnnncactnctatagggcgaattggagctccccgcggtggcggcccgaggtcgcggggggaaagctgatattgcaattgctccattaactattacccttgtgagagaagaggtgattgacttctcaaagcccttcatgagcctcgggatatctatcatgatcaagaacctcagaagtccaaccagatgttttccttcttgatccttaancctatgagaatctggatgtgncatggtttttgcctacattggggcagggtagtttaattcctggtcagaaaattaancccttacaagtggcacactganggagttggaagaatggaagaagaaccacaaagtagtggaatcaactaatgaattnggattttaatagcttggtttncttgggtgccnttatccggcanggatgcgatattcgccaaaatcccttttgggccccatggtggaggtgtgtggtggtcttacctgacataatctccttctaccggctaacttaactgncttnctgactgtaaaaaggatggtgtcttccatcgaaagtgctgaggatctttctaacaaacagaaattgcttatggaacattaaactctggcttcacttaagaagtttttcangagaactaaaantgcagtggttgataaaaaggnggacctacatgcggagtgcngagccctntgtgtttgngangactacngncgctctanaactaagtggatnccccnggctgcaggaattcgatatcaagcttatcgatcccgccaaccttnagggggggcccgnacccacttttgttcccttanngangggtaatgggccctggggnaacatggnaaactggttcctgg

SEQ ID NO: 2517 - DNA, 850 bp, Homo sapiens
  misc_feature 1, 4, 625, 648, 686, 721, 736, 757, 766, 776, 779, 783, 793,802, 811, 814, 815, 827, 833, 834, 838, 842, 845: n = A,T,C or G
ntgncgcgcaacgactcactatagggcgaattggagctccccgcggtggcggcccgaggtacaggtgtctttttgattgaatgatttattttcctttgggtagatacccagtagtgagattgctaggttgattgttcattctatttttaattctttgagaaatctctattctgttttccataggggttgaactaatttgcattcccaccaacagagtataagtgttcccttttctctgcatccttgccaacgtctattattttatgactttcataataatagccattctgactggtatgagatggtatctcattgtagttttaatttgcatttctctgatgactagtgatgtggagctttttttaaagtttgctgggcacttttgtgtcttcccaaagcatttttaaatctctagaatgatctcacgtaattgcagtgctatattatttggagtagaaatttctaaaggcgaataatgctccttggacttaaagaatgtttgctctaaattaagacagtatataaaacccgaaaatgctttcctgttcaaaagcatgaaacactataatctccatgcaccatgaagatatctttacacattcttctcgggggctctggtttttgntctgatgtttgcccattacaggngaacacctgggtaacaacaattcctcaacgctataaanggtaagccacacgcagttgcttggcataggaaagnttaaaaaagatctgntgggaaaattccccatcttcncagttctgncctccctgcnaanattnaatttctttnaaggatccnaatggatanaannatgctgccagcnaacttnntggngggnccntcttt

SEQ ID NO: 2518 - DNA, 861 bp, Homo sapiens
  misc_feature 3, 12, 16, 189, 570, 672, 720, 726, 810, 823, 824, 825, 838,840, 859: n = A,T,C or G
tcnctcacttanggcnaattggagctccccgcggtggcggccgaggtacgcgggggctgtaggcccgggtggttggaattgaccgctacccccgcaaagtgacagctgccatgggcaagaagaagatcgccaagagatcaaagataaaatcttttgtgaaagtgtataactacaatcacctaatgcccnaaggtacctgcccgggcggccgctctagaactagtggatcccccgggctgcaggaattcgatatcaagcttatcgataccgtcgacctcgagggggggcccggtacccagcttttgttccctttagtgagggttaattgcgcgcttggcgtaatcatggtcatagctgtttcctgtgtgaaattgttatccgctcacaattccacacaacatacgagccgggagcataaagtgtaaagcctggggtgcctaatgagtgagctaactcacattaattgcgttgcgctcactgcccgctttccagtcgggaaacctgtcgtgccagctgcattaatgaatcggccaacgcccggggagaggcggtttgcgtatttgggcgctntttcgctttctcgcttacttgactccttgcgcttggtcgttcggcttgcggcaaccggattaacttactcaaaggcggtaataccggtattcacagaaatangggatacgccaggaaaaacatttgaaccaaaaggccaccaaaagggcnaggaanccttaaaaaggcccgttggtggcgtttttcataaggctccccccccttgccagcattacaaaaattacccttcaattaaaaggnggggaaaaccccnnnggcttttaaaaancnggcgtttcccctggaactnct

SEQ ID NO: 2519 - DNA, 959 bp, Homo sapiens
  misc_feature 2, 3, 401, 427, 451, 489, 493, 517, 521, 572, 582, 592, 625,633, 640, 660, 677, 680, 683, 693, 694, 704, 715, 722, 732,750, 752, 769, 771, 775, 776, 777, 782, 796, 797, 805, 808,813, 814, 845, 851, 854, 866, 873, 876, 888, 898: n = A,T,C or G
  misc_feature 902, 916, 923, 932, 936, 937, 949, 953, 957, 958, 959: n = A,T,C or G
cnngtatacgactactatagggcgaattggagctccccgcggtggcggccgcccgggcaggtacttttttttttttttttttttttttctccgagacggagtctctcactgtcacctgggctagagtgcaatggtgctatctctgctcactgcaacctgcgcctcccaggttcaagtgattctccggctcagcctcctgagcagctgggattacaggcgcctgccaccacacctggctaattttttgtatttttagttagagacggggtttcactacgttggccaggctggtctcgaactcctgacctcatgatctgcccacctctgcctcccaaagtgctgggattacaggtgtgagcccctgtgcccagcctttttttatcttttaaaagtagcctgtnccttcttttaaactaactctcatgtnatacaactaaaagaaataaagttnctaaaaatatcttttcaatctatataaatttaaaaggngggnaggctttttatatttggtttgatnaagnaaaaattaataaagccaattttgaaaattggttaattagtaaactcagagncataattctntcagcacttnaaacattaaaattctttacttctttaatttcanataaaatnttaagcnaggaagaaagcaaaagttcnagtatttgaaaaataantcnctnactttctgannaaattttaanggggggtattnccaaatnaaacatatcnccaaacacccaaaaaacncncatcaatttttttactngngctnnnaaacnccccaaattccgcnnccaacctnganacttnngggctattaccaaaaggaagccttctttganttcacnccnatataaaaaccncctaaanccntttaatttttanaaaagggaanattnccccttttttaaangtaaaanaaacttttntacnnccccccttaatntttntatnnn

SEQ ID NO: 2520 - DNA, 940 bp, Homo sapiens
  misc_feature 2, 18, 26, 28, 36, 67, 283, 368, 377, 389, 485, 486, 533,551, 581, 589, 603, 608, 655, 679, 687, 696, 706, 707, 719,720, 746, 771, 772, 790, 801, 803, 804, 805, 808, 810, 823,824, 839, 844, 847, 848, 849, 852, 859, 863, 870, 873: n = A,T,C or G
  misc_feature 883, 899, 900, 903, 904, 915, 920, 930, 932, 934, 938: n = A,T,C or G
gnatacgactcactatanggcgaatngnagctcccncgcggtggcggccgcccgggcaggtacgcgncgaggcattgaggcagccagcgcaggggcttctgctgagggggcaggcggagcttgaggaaaccgcagataagttttttttctctttgaaagatagagattaatacaactacttaaaaaattagtcaataggttactaagatattgcttagccgttaagtttttaacgtaattttaatagcttaagattttaagagaaaatatgaagacttagaanagtagcatgaggaaggaaaagataaaaggtttctaaaacatgacggaggttgagatgaagcttcttcatggagcagtgagtaccnaagccgcantaaaagtacctnggccgctctagaactagtggatcccccgggctgcaggaattcgatatcaagcttatcgatacccgtcgacctcaagggggggcccggtacccaacnnttgttccctttagtgagggttaattgcgcgcttggcgtaatcatggncatagctgtttcctgtgngaaattgttatccgttccaatttcacccancatacganccgggagcataacngtgtnaagcctggggtgccctaatgaatggagctaactcaacattaattgcntttgcgctcactggccccttttcnctcggggnaacctggcngtgccacctnncttaattgaatnnggcccaaccccccggggagaagccgntttggcttttttgggcccttttccnnttcctcgctactgacttngttgggccttngnnnttngntttccccaaccgnnttatctccttaaaanggggnatnnnggntttcccngaantaagggnttnccccaggaanaaccttttggccaagnnccnnaaaggcccggnacccnaaaagccctntncngccnct

SEQ ID NO: 2521 - DNA, 906 bp, Homo sapiens
  misc_feature 430, 464, 479, 481, 482, 485, 502, 511, 530, 541, 550, 553,584, 607, 616, 622, 630, 663, 682, 694, 699, 754, 775, 782,792, 802, 803, 815, 822, 823, 832, 834, 835, 840, 841, 842,844, 851, 855, 857, 875, 880, 888, 891, 893, 897, 898: n = A,T,C or G
  misc_feature 899, 900, 901, 905, 906: n = A,T,C or G
ccgctactatagggcgaattggagctccccgcggtggcgggctcaaggactcctccagcctcagcctctcgaagtgctgggatcacaggtgtgagccaacgcacctggccacactttgttaatttttgagatgtctgccaaatacccaattacgtattcataagaaatcagtttatctgtcattcttcaagtaaaaataatatttcatgaaaaaccaaataaaaataaggagaaacattggctagttcagctaacaactcaaataatccataagtgcttcttgagacatctcatcatatctcagaatgcggtgaaaacgcaatatgggtgcttcctatttcttcacacagaatattaaaaaggtgtatactcaaggattgagatgtgattaaagtaatttttattccttcatcaaagacattcctaagtnaaacttttttttttttttttttttttttaactgngagtgaaaaatcagngnnggngcccttgcattctgctngggcccctncaaattttattcactttgnctatgcaccgnaaggacctnggncggtctagaactagtggatcccccgggctgnaggaattcggtattaaacctatngatccggcnacctcnaggggggnccggtcccaacttttggtcctttaaggagggtnaatgcgccctggcgtaaanatgggcataggntgttnccgggggaaatggtttcctccaattccacccacataccagcccggggcctaaagnggaaagcctggggggcctaanggggggnccaacccccnttaatgggtnngcctactgcccntttccanngggaaaccngnnggccnnntncttaaanaatngncacccccggggaaggggntgctntgggcccnttncnttcnnnnnatgnn

SEQ ID NO: 2522 - DNA, 496 bp, Homo sapiens
  misc_feature 366, 384, 404: n = A,T,C or G
ggcgaattggagctccaccgcggtggcggccgcccgggcaggtactttgagcttattgtttttattctgtattaaatattttcagggttttaaacactaatcacaaactgaatgacttgacttcaaaagcaacaaccttaaaggccgtcatttcattagtattcctcattctgcatcctggcttgaaaaacagctctgttgaatcacagtatcagtattttcacacgtaagcacattcgggccatttccgtggtttctcatgagctgtggttcacagacctcagcaggggcatcgcatgggaccggcaagggaggggcaggatttccgggacccacctagggccctggaaaaatggaccatttttnacttaaaaaaggttcttnccaaaaaaccatttttcttnaagaacttacctaaagggccctttttaatggtaaaattttcttttaaaatggtgttattttcttaaaggaaattcaaaatttggtaaataaa

SEQ ID NO: 2523 - DNA, 463 bp, Homo sapiens
  misc_feature 2, 3, 4, 5, 9, 11: n = A,T,C or G
gnnnnaggntngcccgtatcactactatagggcgaattggagctccccgcggtggcggccgaggtacgcgggtatctcgatagtgaggaggatgaggagtagccagcagctcccagaacctcttctcccttcttggcctaactcttccagttaggatctagaactttgccttttttttttttttttttttttgagatgggttctcactatattgtccaggctagagtgcagtggctattcacagatgcgaacatagtacctgcccgggcggccgctctagaactagtggatcccccgggctgcaggaattcgatatcaagcttatcgataccgtcgacctcgagggggggcccggtacccagcttttgttccctttagtgagggttaattgcgcgcttggcgtaatcatggtcattagctgtttcctgtgtgaaattgttatccgctcacaattccacacaac

SEQ ID NO: 2524 - DNA, 443 bp, Homo sapiens
  misc_feature 2: n = A,T,C or G
tnctatagggcgaattggagctccaccgcggtggcggccgcccgggcaggtacaacagaaggcactgttatccgcataaatccattgattctgcatggcaaaaacctgagacgtgcaagtctatccaatcctctaaaacaaccttgggcattcagcctttggaacatatgggttgtccttttccgtccaatgattgtttttctttcatttcatacttacagtagctgtttaaaatatatatttcagggtgacaaaggtcaaaggggaaagagtagataaaagtgctgcctaatgccagatggtaactggcacagcaggagggccctaaaagcagcccctcatttcatccccttgaccctcacactcctcttgtgaaataaaatgcagcgatgacatttggtcagctgatgttctttccttcagttgttgctgggcacagtccc

SEQ ID NO: 2525 - DNA, 496 bp, Homo sapiens
  misc_feature 2, 5, 8, 43, 374, 430, 431, 461, 477, 486: n = A,T,C or G
gntancgngattcgccgtaaactactactatagggcgaattgnagctccccgcggtggcggccgaggtacccgtatgtgtgatagggcaggcagagggctccacctgctctgcccttggcaaaggcccttggctacactggtgaaaatgccagctcggcttctgcacggatacactatgttgtgccatccaactggagtgccggttggaccccaaaggcagggcagggcagggggagggggtattttgaaatgttttcaggagctctgtccagctgtctctgtcttccagcccggaactgctgcacaaagctacaaggacactgatgagaccatggatctgctgctgttctctagggaagacttggctttggantgtggctgcctggattctaaagtgttgtcctttgactccatggaagtaatttcttnntagttttgctttggcagatttccaaaaaanttttggatggccttcnttcgttttntggtccttgc

SEQ ID NO: 2526 - DNA, 444 bp, Homo sapiens
  misc_feature 269, 401, 429, 431: n = A,T,C or G
ggcgaattggagctccccgcggtggcggccgcccgggcaggtactgtccaactggatgctgccctggtggctgaaggcacacttcatgatgctgtccagggtcatcagggagacatgttgaaagagctccagacgtgagttttgggcaatgtgttcctcccatttgttcggcatcatccgaacactctcagacatcatggtgatgaatattttcagaatgctgatgttgaagccaggtttcacaatctggcggtgctttttccatttanaaccatccagggtcacaagtcctcgaccaacccaggattcaaggattttgtggctaacagcacttttgggatcttgtcttttcagggagaatcttggcataagtctggggtcatggacactgaagaacatcntaaaagggtccaacccacaagggaacancnacattgggtattt

SEQ ID NO: 2527 - DNA, 464 bp, Homo sapiens
  misc_feature 9, 461: n = A,T,C or G
tttcgactnctatagggcgaattggagctccccgcggtggcggccgcccgggcaggtaccatcacatgctggtcagagtggccatttgtcccaagtcaaaacataacatgctacagtgtggcagcagagaaaagcaaacatggctattctcttggaggtaatgcaaactagatcctaaactgtggaaaccagtctgaagatttctggaaaaaaaaaggatggaaggcagagctatgctttgacccagcaatcctaccccatgcatctaccccagggaaaaacacatgcgtctatcaaaaagacacatgacactcacacgtccacgggagtgttactgacaggaataaagatgtggaactgatctagatgcccaccgaacagaaaactggatttttaaaaatggtggttcctatacatcacagaatgctaaaaagccacttaagggaaaatcaaaccacagnaaa

SEQ ID NO: 2528 - DNA, 579 bp, Homo sapiens
  misc_feature 3, 14, 34, 44, 224, 234, 238, 267, 271, 274, 277, 300, 310,313, 329, 333, 341, 342, 345, 347, 350, 351, 353, 355, 362,363, 376, 382, 384, 387, 398, 399, 412, 415, 418, 419, 420,424, 432, 435, 437, 459, 468, 475, 476, 478, 481, 489: n = A,T,C or G
  misc_feature 499, 508, 514, 521, 535, 537, 540, 544, 545, 547, 556, 572,574, 575, 579: n = A,T,C or G
ggnttcggccgcgnttcgactactatagggcganttggagctcnccgcggtggcggccgcccgggcaggtacttttttttttttttttttttggagaatcaaaacttttccggctttattctttgggaaaacccctggtctgttttcattcctattggtccaggccaccattctatgatatgaaggcctaaattaggaaagctaggtgagctgtgcaaattcanggtgtctgantcanctgttgttatggatgttgtgatgggggtngagnatnaanaatttatgttattatcttatatnatatattatnttnttaattacatatctantttncacatatnnaanantgnntntncattttnnacaataatataantatttnancgnaatttatatanntgtgtatataatnatntcnnnaatntatattanttnanatataataattttatataattntatgttatntaatatnntnatnttattatntatttaattnatataattnatagantttatcncaatcatatatatntnaanatcnntntcttatgancaattatataatcttntnnaaan

SEQ ID NO: 2529 - DNA, 700 bp, Homo sapiens
  misc_feature 3, 14, 20, 51, 295, 392, 492, 499, 520, 532, 543, 549, 551,597, 604, 623, 634, 650, 662, 670, 672, 697, 700: n = A,T,C or G
tgntatcactgacncgcgtnatacgactactatagggcgaattggagctcnccgcggtggcggccgcccgggcaggtacttttagtagagacggggtttcaccgtgttagccaggatggtcttgatctcctgaccttatgatccgcctcggcctcccaaagtgctgggattacaggcgtgagccaccatgcccggctgcttaagtttcttaaatacagaaaggctatgctgatacagtgttttttgccctttaattgttattatttcttaatttaaaaagaaacctagggcttanatagtcctatcttctatttggatgtcagcaaggttaaaaagtgcaatgtcaggagtatgtagctataggtggcctgtggcatttgcttacagaaacnggcagaaggatccgcaggcccaagaggccttgtctaagaaccacaccaccattacaaaagctgtgaaaaggaggcagggacaaacaccagacattctttntcttacnccccgcctcctgaatggttangaccatctattnataataacaanccctcntntttttttaatccaatgtaaatgaagtgaataaaattgaccaatatnttaagantggttgtgtagggggaatnagagccctatnattttgactcgtttantctaatgggggnccctcagnantcttaagggggctaacgcctctgtnggn

SEQ ID NO: 2530 - DNA, 964 bp, Homo sapiens
  misc_feature 155, 246, 261, 296, 302, 343, 353, 355, 360, 362, 366, 375,388, 390, 391, 392, 393, 394, 396, 397, 401, 479, 493, 500,503, 506, 510, 511, 516, 517, 524, 527, 531, 548, 566, 579,586, 592, 599, 602, 609, 610, 627, 628, 636, 639, 661: n = A,T,C or G
  misc_feature 698, 704, 729, 732, 740, 750, 759, 768, 773, 789, 791, 805,808, 818, 833, 857, 878, 882, 934, 938, 942, 964: n = A,T,C or G
ttcctatcgactactatagggcgaattggagctccaccgcggtggcggccgcccgggcaggtacgcgggggtaatgtttcacgagaggtcttggatcacattaaacacctctcagtggcaatgaggaccgactttgtcatgagttacaagaaaanagctttcaatgaattttgaaccatcacactttaaacatttggcacaggtgaggggtcagaggcacagaaactttggtgtgtctgtatcaanacacacaagggtggngactgtatcaggttgctggaatgtccaattatgantacctnggccgctctagaactagtggatcccccgggctgcacgaatnatgatttttnantaatngnttcngtgcacctncagggggggcccngnnnnnanntttngttccctttaatgagggttaattgcgcgcttggcgtaatcatggtcatagctggttcctgtgtgaaatgacaaacacntttctacttatggncaatatntcnccngggnnctttnngtggacnccnttgngggagccttaatgaagngaacttacttgacatttnatttgcgatcgcngcttcanatgccngcctttnccnggccggnnaaaaccttgtggtgccnngcctgccnttnatggaaatgggtcccaaacgcntcccggggaaaaaaggccggtttttgcaataatttgngaagcnttttttcaggctttcctttgggttnaanttgaactnccctttgagnacctttggnaaacccccnaaaanaaagtggtggaagggngnaacttgggctttanttnttgggaaagnccttttttttaaccncccccttggatttaaggggttatngggggttaaaatgggttaccnaaanaaaattattttttttttaaaaaaaaaaaaaccccagttttttaaaaaaaaantttngggnttttcaaagatggtaaccctcn

SEQ ID NO: 2531 - DNA, 974 bp, Homo sapiens
  misc_feature 10, 12, 21, 23, 47, 51, 53, 57, 58, 60, 88, 96, 97, 102,106, 115, 151, 546, 642, 643, 650, 662, 666, 670, 701, 710,744, 753, 761, 764, 791, 792, 810, 811, 812, 814, 815, 816,818, 819, 820, 825, 826, 834, 843, 848, 853, 854, 864: n = A,T,C or G
  misc_feature 868, 869, 870, 871, 872, 875, 877, 883, 884, 885, 894, 895,896, 897, 898, 899, 902, 914, 915, 916, 924, 933, 944, 946,947, 948, 949, 956, 957: n = A,T,C or G
gcgcgaacantnatatccccntntaaacttccggcgaattggataantacnanggtnncngccgcccgggcaggtacttttttttttnacagaccnnctggntttnaagaaggantttatccactaccagaaaccgaaaaatgtctagcanatccaaaaagtgcaaaaaagtgcatgactcactggaggacttccaagaacagctcgtttaacccggccgctctagaactagtggatcccccgggctgcaggaattcgatatcaagcttatcgataccgtcgacctcgagggggggcccggtacccagcttttgttccctttagtgagggttaattgcgcgcttggcgtaatcatggtcatagctgtttcctgtgtgaaattgttatccgctcacaattcccacaacatacgagccgggagcataaagtgtaaagcctggggtgcctaatgaagtgagctaactcacattaattgcgttgcgctcactgcccgctttcagtcgggaaacctgtcgtgccagctgcattaatgaatcggccaacgcnccgggagaggcgggttgcgtattggggcgctctttcgctttcttgcttaattgactcccttgcgcctcgggccgttccggttgcgggcaaaccggnnttaaacnttaaattaaaangggngggnaatacccgggttatttccccaagaaaatcanggggggaanaacccccccggggaaaaaaaaaaaatgttggaancccaaaaangggccccnccnaaaaaaggggccccgggaaaacccccnnaaaaaaaagggccccccnnntnnncnnnggccnntttttttncccaaaaanggggncccgnncccccccccngggnnnnnggncntttttnnnaaaaaaaannnnnnccnccccccaaaaannnaaaaaagnggggggggnaaaaaaccccncnnnnggggggnnatataaaaaaaaaaaac

SEQ ID NO: 2532 - DNA, 856 bp, Homo sapiens
  misc_feature 6, 13, 14, 17, 146, 233, 248, 256, 275, 285, 291, 316, 317,340, 376, 383, 395, 398, 408, 423, 441, 468, 561, 584, 619,623, 625, 627, 630, 636, 649, 651, 664, 679, 729, 734, 746,749, 753, 756, 763, 777, 784, 789, 799, 801, 820, 821: n = A,T,C or G
  misc_feature 827, 835, 836, 847, 852: n = A,T,C or G
agctancactacnncgnaacgactactatagggcgaattggagctccccgcggtggcggccgcccgggcaggtactcaatcagcttcattgctgcattgcaaagccccgcaattgcagttgttttagcaagggatagatggagaanatgaatgtgctttacaagtcaattactactgatcagatcatcttaccaaagggtggaggaagtggccgaggcccaaaaggtccgcanagctgaggtggtggnccatatcnaatgggtggtggtacctcngccgctctanaactantggatcccccgggctgcaggaattnnatatcaagcttatcgataccgtngacctaaagggggggcccggtacccagcttttgttncctttantgagggttaatngcncgcttggccntaatcatggtcatanctgtttcctgtgtgaaantgttatccgctcacaattccacacaanatacgagccgggagcataaagtgtaaaacctggggtgcctaatgagtgagctaactcacattaattgcgttgcgctcactggccgctttccancgggaaacctgtcgtgcccctgnattaatgaatccgccaacgcgcggggagaggcggnttgngnantgngcgctnttcccttcctcgntnaatgattgctggngctcggtccatcggnttgcggcgaagcggtatcacttcacttaaaggggggtaataccgttattncacanaaatcagggggnatnaccnccnggaaaanaacatggggagccnaaaaggnccatnaaaaaggccngnaaaccctaaaaaagggccnngtttgnttggcccnnttttccctaangcttncggg

SEQ ID NO: 2533 - DNA, 450 bp, Homo sapiens
  misc_feature 2, 3, 4, 5: n = A,T,C or G
gnnnnagggccggccgctaatcgactactatagggcgaattggagctccccgcggtggcggccgcccgggcaggtactcgaagtggaaggactttcattttgagaagataccatttgatccagcagaaatgtccaaatgatatcaggtcctcaatcttcagctacagggaatgagtaactttgagtggagaagaaacaaacatagtgggtataatcatggatcgcttgtactcctcagcagagctggaggacagcaaggccaggaccagccccagcatgcagagcgctctggcagccatgaccaccgtgggctccgggacgcagctcaggactccccgcgtacctcggccgctctagaactagtggatcccccgggctgcaggaattcgatatcaagcttatcgatacccgtcgacctcgagggggggcccggtacccagcttttgttcc

SEQ ID NO: 2534 - DNA, 942 bp, Homo sapiens
  misc_feature 2, 3, 4, 5, 6, 10, 191, 257, 271, 383, 405, 418, 439, 522,525, 617, 665, 700, 771, 793, 795, 800, 917: n = A,T,C or G
gnnnnnaggntgacgcgcgtaatacgactcactattaggggccgaaattggggaagcctcccacccgcgggtggggccgggcccgcttcttaagaaaacctaaggttggggaatcccccccgggggccttggcaagggaaatttccgaatattcaaaagcctttaatccggaataccccggtccgaacccntccgaaggggggggggggccccccgggttacccccaaagccttttttggtttcccccttttaagtnggaaggggggtttnaaattttggccgcccgcctttgggccgttaaattcaaatggggttcaattaaggccttggtttttcccttggtggttggaaaaaattttggttttaattcccggcttcaacnaaattttcccaaccaaccaaancaatttaacccgnaaagccccccggggggaaagnccaattaaaaaagggttggttaaaaaaaggccccttggggggggggttggccccctttaaaaattgggaagggttgggaaggnccntaaaaaccctttccaacccaattttttaaaattttttgggcccgggttttttgggcccggccctttccaacctttgggccccccccgggccntttttttcccccaaaaggttttccgggggggggaaaaaaaaacccccnttggggtttcccggtttgggccccccaaaggcccnttgggcccaaattttttaaaaaatttgggaaaaaatttcccggggggccccccaaaaaacccgggcccggncccgggggggggggaaaggaananggggncccccggggtttttttttggggcccgggtttaaatttttgggggggggcccggggccctttcctttttttcccccgggccctttttttcccctttttccgggcccttttccaaaccntttgggaaacccttttccgggcctt

SEQ ID NO: 2535 - DNA, 452 bp, Homo sapiens
  misc_feature 1, 2, 3, 4, 245, 250, 304, 306, 348, 399, 402, 416, 428: n = A,T,C or G
nnnnagggccggccgctaaacgactactatagggcgaattggagctccaccgcggtggcggccgcccgggcaggtacctgtctcttctcaaactagatgataagtggcctcagggcagggactacatactcctgagagctgcttgagctcgaggtgtttattatcctcagtaagcattttttttcaggagcatgacttggcccaaaaaaaaaaaaaaaaaaaaaaaaaaaaagtacctcggccgntctanaactagtggatcccccgggctgcaggaattcgatatcaagcttatcgataccgncnacctcgagggggggcccggtacccagcttttgttccctttantgagggttaattgcccgcttggccgtaatcatggtcatagctgtttcctgngtnaaattgttatccgntcacaattccanacaacatacgagccgggagcataa

SEQ ID NO: 2536 - DNA, 450 bp, Homo sapiens
  misc_feature 2, 3, 4, 12, 15: n = A,T,C or G
gnnnagggaccncgnctaatctactactatagggcgaattggagctccaccgcggtggcggccggtatgacctcagcattcctaaagtgctgggataaagtgtctcacaagggcaagtggaccctagagagacagccatccctgacctctgggctccacatcacccgacttgctgctccaccactttgcttgcttcctgggtgctccatcccagagacaagtgagttagcaatcacttagtgtaatcagcccaggatggagggtctgtgctgtgggcccaagccagggttccctgtctggtgatgagtagtggagggtgtgtggtacctcggccgctctagaactagtggatcccccgggctgcaggaattcgatatcaagcttatcgatacccgtcgacctcgagggggggcccggtacccagcttttgttcccttttagtgagggtta

SEQ ID NO: 2537 - DNA, 450 bp, Homo sapiens
  misc_feature 2, 3, 4, 201, 211, 226, 269, 271, 285, 294, 328, 363, 408,446: n = A,T,C or G
gnnnaggttccggccgctaatcgactactatagggcgaattggagctccccgcggtggcggccgaggtactcagtggccatgtggagctagtggccaccacacttgacaccacggatgcagaacttttccatcactgcagaaagctctgttgaacagtacttttttttttttttttttttttttccgcattaaatcactgngggtcttaancaattcttcaaagcnaactttggtttttacttttgcttcactctcagctgtaggcatntntcagctttatgcanaggactganaatgcaaagcattgactcaatcaggatccttttntcagacataattaaaaaggctttgacaggttgaanattcagccccaggttcccgcgtacctgcccgggcggccgctctanaactagtgggatcccccgggctgcaggaaattccgatntcaa

SEQ ID NO: 2538 - DNA, 451 bp, Homo sapiens
  misc_feature 2, 3, 4, 5, 16, 27, 36, 37, 40, 43, 51, 83, 87, 91, 96, 106,108, 127, 147, 168, 183, 193, 200, 313, 350, 375, 397, 433: n = A,T,C or G
gnnnnaggttgacccntctggaaaccnggcgaagtnntgnggnaaagtccnggcggccgcccgggcaggttcagcagagcccntttnaccngaggntttataaccngngctcttagttacctggggncaactacagtctaaaaatantacatggaaaattccagaaanaaacagttcataggnttacagacgngcgctgntctgagaagcatgatggaatcccgtatcccccgggacatgaatcattctttcatcaagcgtatccatgcgtatacacgacctacccattagtcacctagcagtcaccctcagntatcagatggagtattgcagtctcacagcgcttgtgnacaagtaacccttatttgacttaanaatgctcccaaagtgcaagacnagcgctgtcaaattggatatgccaaaaagaagctgnaaagtgcttccttcagag

SEQ ID NO: 2539 - DNA, 449 bp, Homo sapiens
  misc_feature 2, 3, 4, 5, 11, 13, 26, 73: n = A,T,C or G
gnnnngggccngnatacactttttanggcgaattggagcttaccgcggtggcggccgcccgggcaggtacgcnggcttgctgatcgacttattggggtgacaacagatatgactctggatggaatcacctccccagctgaacttttccacctggagtccttgggaataccggacgtgatcttcttttataggtccaatgatgtgacccagtcctgcagttctgggagatcaaccaccatccgcgtcaggtgcagtccacagaaaactgtccctggaagtttgctgctgccaggaacgtgctcagatgggacctgtgatggctgcaacttccacttcctgtgggaagagcgcggctgcttgcccgctctgctcagtggctgactaccatgctatcgtcagcagctgtgtggcttggggatccagaagactacttaacgtgtggcgagaac

SEQ ID NO: 2540 - DNA, 448 bp, Homo sapiens
  misc_feature 2, 3, 4, 9, 11, 22, 27, 175, 193, 194, 198, 200, 214, 216,218, 219, 225, 229, 232, 233, 237, 240, 245, 247, 255, 260,261, 262, 266, 267, 273, 279, 282, 283, 284, 285, 287, 288,300, 306, 307, 314, 317, 318, 319, 320, 329, 333, 334: n = A,T,C or G
  misc_feature 335, 336, 340, 343, 357, 358, 359, 361, 365, 367, 371, 372,374, 375, 376, 377, 378, 379, 380, 381, 386, 387, 406, 423,425, 427, 429, 436, 437, 444: n = A,T,C or G
gnnnaggancncgaaacacttntatanggcgaattggagcttcccgcggtggcggccgaggtacttttttttttttttttttttttttttttctttttttttttttttttttttttttttttttttttttttttttttttttttttttttttttttttttttttttttttttttnaaaaaaaaaaaatttttnntttnantttttgcaaaaaanananngggaantttnaannaaanggnggggnancccccccntttannngggnnggccanggcccnaannnncnngggaaaaaaaangggggnnaaaaaanggnnnnggttttttngggnnnngggnccntttttttgggtttnnntnccgnanaaannannnnnnnnccaannggggggggaggttaacccnttttaaaaaaaaaaaangncngnaaaaatnnggggccnaaaa

SEQ ID NO: 2541 - DNA, 450 bp, Homo sapiens
cgactactatagggcgaattggagctccccgcggtggcggccgaggtactggttttgagtatcagcaggtggcctttcagccctccatacttactgagcctcccactgaggatcatcttctgcagaatactttgtggcctgaagttcaaaaactatatgggcacggttatgaaatattttgtgttacttgtaacagttcaaagactctgcttgcctcagcttgtaaggcagctaagaaagagcatgcagctatcattctttggaacactacatcttggaaacaggtgcagaatttagttttccacagtttgacagtcacgcagatggccttctcacctaatgagaagttcttactagctgtttccagagatcgaacctggtcattgtggaaaaagcaggatacaatctcacctgagttcgagccagtttttagtctttttgccttcacca

SEQ ID NO: 2542 - DNA, 444 bp, Homo sapiens
atacgactcctatagggcgaattggagctccaccgcggtggcggccgaggtacataaaccttggaatgcccctcagttgtttccctgaaggtggccaggtggtcattacattttcccaaagtaaaagtaagcagaaggaagataaccacatatttggcaggcaggacaaagcatcgactgaatgtgtcaaattttacattcatgcaattggaattgggaagtgtaaaagaaggattgttaaatgtgggaagcttcacaaaaaggggcgcaaactctgtgtttatgctttcaaaggagaaaccatcaaggatgcactgtgcaaggatggcagatttctttcctttctggagaatgatgattggaaactcattgaaaacaatgacaccattttagaaagcacccagccagttgatgaattagaaggcagatactttcaggttgagg

SEQ ID NO: 2543 - DNA, 470 bp, Homo sapiens
  misc_feature 2, 3, 4, 7, 9, 10, 13, 20, 29, 34, 39, 45, 87, 88, 102, 105,470: n = A,T,C or G
gnnnagngnnttnttcgccntttttactnctatngggcntttttnagctccccgcggtggcggccgccacgctggttttgcatcttnnggagacgctcgttnccntcgcgcttctcctcggccaattcgcggaagaagtggctcacgccttccagagccacatcatcgcggtcgaaatagaagcccagagagaggtaggtgtaggaggcctgcaggtaccactacatcattgcaaatctgggatttactgatggagacctattaaaaatccagtttggaggtgcaaatgtctctggatttcagatagtggactatgatgattcgttggtatctaaatttatagaaagatggtcaacactggaagaaaaagaataccctggagctcacacaacaacaattaagtatacttctgctctgacctatgatgccgttcaagtgatgactgaagcctttcgcaacctaaggaagcn

SEQ ID NO: 2544 - DNA, 440 bp, Homo sapiens
  misc_feature 8: n = A,T,C or G
tatcactnctatagggcgaattggagctccccgcggtggcggccgaggtacgcggggctctcttccacaagcacaacccttcttcagacgtccatatacacttctcccaaaatcctgtgcttaacacattgttactgagcacacaggcgtgctggggcaagcgacgcctgggaatatgaagcgaacgccacacactagaacgcgccctgggagctggcctccggtgggggacgcaggtgttgaagacataaccgcatgaccgagaaacctcagttttgctctgaaggccttcaactgcccggccgctctagaactagtggatcccccgggctgcaggaattcgatatcaagcttatcgataccgtcgacctcgagggggggcccggtacccagcttttgttccctttagtgagggttaattgcgcgcttggcgtaatcat

SEQ ID NO: 2545 - DNA, 450 bp, Homo sapiens
  misc_feature 3, 4, 5, 6, 68, 107, 201, 203, 213, 286, 372, 389, 417, 440: n = A,T,C or G
gtnnnngccgcgtaaacactactatagggcgaattggagctccccgcggtggcggccgaggtactttnttttttttttttttttttttttttttaatagtgaataanacttttatgttaatttttcggttattttatttttgaaaaatatttcccaaaagaggtaaggaatatgatgtaggcataggggtatccaagggananaatacagtcntcgagcggccgcccgggcaggtacttcctgtaattgacagccttgccttgttcctcatggcatcattcaaggncatcccctaaattttaacactttcgatgccatatacgttgtaaccttccttataagttgcaaaattctgtgaattctgcgaggaanatgggttaatattctgngcattctttgccaccttcattcgtttcncctcggcccttgacttgtaacanaaactcaatc

SEQ ID NO: 2546 - DNA, 442 bp, Homo sapiens
taatacgactactatagggcgaattggagctccccgcggtggcggccgaggtacttataggtaagagccagctgtagctcatgtggctgggtatattcttgatactcctttattcaccaaaggattcttgttgcctcaggaaatggctgacctatgtaaattacagtggtctgaactccctgctaggcactggaggggtggggaccataatgggtggggctggacctagcatgcccacctacaggtccccgcaatggcaggtacacttgaagccaaatttctaaaacttgtttttcttaaaaaatagttgttgtaacattaaaccataacctaatcagtgtgttcactatgcttccacactagccagtcttctcacacttcttctggtttcaagtctcaaggcctgacagacagaaagggcttggggatttttttttcttta

SEQ ID NO: 2547 - DNA, 872 bp, Homo sapiens
  misc_feature 8, 10, 12, 16, 18, 26, 27, 28, 33, 36, 38, 41, 42, 45, 49,51, 52, 54, 56, 63, 69, 72, 74, 81, 83, 87, 91, 93, 94,100, 102, 104, 107, 118, 126, 137, 141, 144, 197, 200, 208,214, 217, 311, 319, 321, 322, 324, 331, 362, 382, 398, 400: n = A,T,C or G
  misc_feature 401, 402, 403, 410, 415, 433, 438, 448, 451, 460, 465, 484,497, 506, 507, 518, 533, 536, 537, 574, 585, 599, 601, 605,607, 617, 635, 640, 645, 647, 658, 666, 678, 682, 686, 687,691, 703, 709, 730, 748, 752, 753, 762, 787, 789, 803: n = A,T,C or G
  misc_feature 820, 830, 847, 859, 861, 870: n = A,T,C or G
aatacttntntnatcnanatcatagnnnaatanacntnttnntanattntnntngntacaatntatcanaanantatacantnatcnatantnnttaatntntnttntttctttattnttttaatngtaattgggtnactnacnccattaacgactcactatagggcgaattggagctccaccgcggtggcggccgnccnggcaggtncccccnaanaaattacagtgttttcttaatgaacttgcaaaggaatattgctaaaaacaaacaaaaaaaactgttatcgaactttcttttgttgctgctagtntaaaaccntnntntcaactnttatctaccttcttctttgtcgttctcaagngttattgccataccatatanattttctagccaaatntnnnnatctctntaaanaagaaataacctcgtttntgagnatattttaancangtaatgtcntttcntccaccaaacccccttaantttcttttccttnaattacaannaattgcaagangtttatgctttgtgnttnnaatacccttccaagcaaattaataatccaaaacaacnttttcccttcntttcccttaaatancntggngnctttaccttnggccttttcccttaaganggaanccaanangtcctaattcncttccgcnatggccaccacnttcntttnnttantcatgttgctcnttcccnccaccaatttccttttttccnggtcgaaccgggccaagntttnnttaaaatanggaaattgggggaacctttgggaangncccctttttggacnttttcctatcaaccttnggggcccaanggttgaattttgtaaancccttttttggngnataagaatngg

SEQ ID NO: 2548 - DNA, 483 bp, Homo sapiens
  misc_feature 7, 8, 160, 181, 296, 383, 439: n = A,T,C or G
gcgatcnnctcctatagggcgaattggagctccccgcggtggcggccggtagcttctgataatgatgatgagaaacagaattctgatgatgaagaacaaccacagctgtctgatgaagagaaaatgcaaaattctgatgatgagaggccacaggcctcanatgaagaacacaggcattcanatgatgaagaggaacaggatcataaatcagaatctgcaagaggcagtgatagtgaagatgaagttttacgaatgaaacgcaagaatgcgattgcatcttgattcagaagcggatngttgacactgaggtgccaaaagataatagtgggaaccatgggatttatttggaggtgcagatgatatcttcttcaggggaggtgatnggagaaagacaaaacccccctaactcccagggacagccctgtttgattgaaaaatnggatttggcctccagggatccaaccaggggaagaagggaagcct

SEQ ID NO: 2549 - DNA, 441 bp, Homo sapiens
  misc_feature 2, 3, 4, 5, 6, 8, 9, 362, 412, 418: n = A,T,C or G
gnnnnngnnggacgccgaatacgactactatagggcgaattggagctccaccgcggtggcgattcgagcggccgcccgggcaggtactagacggggctgtaatccggtaactgtatgtattttagttctccagtccctgggaaggagacaggagaaggtgggagggaggaaggggccagctgaaatggaaacagatccctgatccggggcggccagtggaacccttcttggtgtgcgagagcctgtgcatttcagaggcagcaaaaaagtaaaaaaaaaaaaaaaaaattgatctttgtttagattaacagacccctgactatgaagaaggaaggcatccagaccagaaaccgaaaaatgtntagcaaatccaaaaagtgcaaaaaagtgcatgactcactggagggacttncccaanaacagctcgtttaacccggcccg

SEQ ID NO: 2550 - DNA, 507 bp, Homo sapiens
  misc_feature 208, 226, 250, 298, 307, 334, 350, 365, 370, 381, 387, 398,403, 407, 424, 426, 427, 430, 441, 442, 445, 447, 449, 451,452, 458, 467, 468, 469, 471, 483, 484, 487, 490, 491, 494,495, 496, 497, 500: n = A,T,C or G
tatacgactactatagggcgaattggagctccccgcggtggcggccgcccgggcacggtacacagtccaatgatgctaaaaagcaagcacatatgtaagtctgcaaaataaccagctgacagcatgacgacaggataaattccacacataccattactaaccttaaatgtaaatgggctaaatgctcccattgaaagacacggggcangctgggtaaagaaccaanacccactggagtatgcccgtcttnaaagcaacccatcttattgtgcagtgccaatacatagggctcaaaaantaaaggganttgggagaaaaaaatattttcaagccnaatgggaaaaaacagnaaaaaaaaagggtgnttgcnaccttcccaantttttntttggacaaanaaacngganctttttttccctttttnannggntttttaaaaannggngngnanngggggncttttttcnnnanggggggggggcnnccncgnnccnnnnttnttaaaaa

SEQ ID NO: 2551 - DNA, 515 bp, Homo sapiens
  misc_feature 2, 3, 4, 5, 9, 280, 344, 347, 348, 351, 373, 375, 379, 380,384, 398, 414, 421, 429, 436, 437, 442, 449, 457, 477, 478,479, 481, 483, 485, 498, 499, 500, 501, 502, 503, 504, 505,508: n = A,T,C or G
gnnnngggnttgacgccgatacgactactatagggcgaattggagctccccgcggtggcggccgcccgggcaggtacattagtaattataacaatgcattaaaattttcatttcatgtcatagagaatcagttttcttcatgatacattatgttttactgagtgagtttgtccctccagagacctttctgggaacatgccttctccagggactgcttcctaagatgcccaggttgcttaccacaggtcatctttggtcatttaaaagcagtcaagctgtntggactgcacccctttcaactggaagttggagccaaattccttttttttttaaaaccctaaccnccnnccnttaataaaaaaaaaaagggggncntttnngggnttgggggccaaaancttttttttttaaacnccctttngggggggngaaaatnnttttnggggggnaaaaaaantttttttttttttttttttnnnancncnaaaaaaaaaaaannnnnnnngtnggggggg

SEQ ID NO: 2552 - DNA, 482 bp, Homo sapiens
  misc_feature 3, 78, 84, 101, 104, 108, 185, 194, 235, 242, 246, 257, 298,304, 331, 346, 361, 369, 370, 381, 382, 385, 387, 414, 425,436, 455, 472, 478, 481: n = A,T,C or G
ctnctatagggcgaattggagctccccgcggtggcggccgaggtactttttttttttttttttttttttttttttttnaaaggnttttgttaaaaactaanacncatnttagcctaggcctacacccggtcaggatcattcatatcactgtcttctgcctccacaccttgtcccactggaaggtnttcaggggngtgatcgttaatactgagtgtcaaacttgactggactgaanaatgcanagtnttgttcctggngtgtctgggagggtgttgccaaaggaaattaacattttgantcactngactgggaaagggaaaacccccccttnattttgggggggccnccattttaattaagntttgcccnncccccattttnnaananaaaaccccggaagggaaaaaaaaaatngggaaaaaaantttgccttttnccaaaaaattctttccccnccccttttttttttttnttttcnccng

SEQ ID NO: 2553 - DNA, 539 bp, Homo sapiens
  misc_feature 2, 3, 4, 5, 8, 9, 12, 13, 17, 306, 322, 331, 369, 372, 376,388, 397, 400, 401, 406, 409, 427, 430, 437, 447, 477, 480,515, 522, 525, 526, 535, 538, 539: n = A,T,C or G
gnnnnagnnggnnccgnatacactactatagggcgaattggagctccccgcggtggcggccgcccgggcaggtacacaagcccaggtaagcataccaagcaagccccctcacaccttttgtctgaaaaaagcttgacttctttgcagcaatgtctcgcccattccagcagcagtatctcagttaacttggttccttttcctccaggctcaaaacaaaatcaaactcttcctgggtcaggggctggattgataatctcatggaccacttagggttgtcctctttttgctaaaatggggtcataaatnggggaattggtttttntcaaacttngggttttgggccttggggtaaaagcctttttttttaancgnaatnttttaatggaanttcccttgnccnnattgnccnttgggccttttttttggnaanatttgcnttaatggggnaaaaaaaaaaaaagggcttttttttttttnccnaaaccttttaattggggttttttaaaagggaaaantttcccnaanncccttggtntann

SEQ ID NO: 2554 - DNA, 446 bp, Homo sapiens
  misc_feature 2, 3, 4, 5, 8, 17, 24, 364, 382, 440: n = A,T,C or G
gnnnnagncggccgcgnatcactnctatagggcgaattggagctccaccgcggtggcggccgcccgggcaggtacgcgggatggtgcaaatggtttccaacaacagcgcacttcaaggttaccttcataattcttttctgccagaacccaaaaaacaatactcttgagctactcagtgttccaattgttaaaaatttcctgaaattttccttcatgtattcaaagtgaaacataaagatctagaaggatggttgtgaaaagtatggactttatagtatctagtgggcattttcattgagcccaaatgataaattctgttttccaagtcttttaagtgaaaaaaaaaaaaaaaaaaaataaaaangtccctcggccgctctanaactagtgggatcccccgggcctgcagggaattcgatatcaagcttatcgataccgtncgacct

SEQ ID NO: 2555 - DNA, 874 bp, Homo sapiens
  misc_feature 2, 10, 115, 179, 480, 633, 668, 683, 706, 711, 720, 733,759, 774, 789, 804, 805, 841, 865, 872, 873, 874: n = A,T,C or G
gncgtatacnactactatagggcgaattggagctccccgcggtggcggccgaggtcttttttttttttttttttttagaacttcttattggggaataatttcaaattaacagcanttatgggaaccagcacaaagaacatatgattcgtatgcagattcagctactattaacatactgnccatttctttttcacttatgcgccgtgctcctgctcatgctctctctcatgtatatatgtatgtatgtcttttcctgacctgttagtaagttgtgcccattaaagccttcttcgctgtgacactttagtgtgtttcttcgaagaaaaagggcactgtcctgcagaaccacaacacaattatcaacttcaacaaatctgtaataacaatgcactattcagattccatttttgttaattgacccaatccttagtgttttttccctacaatacaggatccagtttagaattatgtccgctctanaactagtgggatcccccgggctgcaggaattcgatatcaaagcttatcgataccgtcgacctcgagggggggccccggtacccagcttttggtccctttaagtggagggttaaattggcgcccctggcgtaatcaatgggcataagctggttncctgggtgaaaattggttattccgctcaaaaattncacacaaaaataccnagcccgggagccataaaggtgtnaaagncccgggggngcctaatggaggngagccaacctcacatttaattggggntggcgcctcacttgnccgcttttcaaggcngggaaaaccctgtcnngccaaccttggattaaatgaaatcggccaacccccngggaaaaggccggtttgctatttngggcccnnn

SEQ ID NO: 2556 - DNA, 892 bp, Homo sapiens
  misc_feature 4, 43, 113, 114, 551, 581, 596, 678, 681, 694, 699, 707,719, 732, 756, 785, 793, 841, 864, 865, 887, 889: n = A,T,C or G
gcgnagcgcgcgtatactactcactataggggcgaattggagnttccacgcggtggcggccgcccgggcaggtacgcaagaaagttcagagatgagacctttggttgtattcnncctttgggacatgggggatgtctttagttcaaagtcacaaataaatgcaggttctacaattcagaggcttcatatccctgctggagtattacatgtttattcaggatggaccacttttcttagcaacagtttctaaacctttgccaggtctgggaagtctggcaggagagatttctaagaaccaatcattcctgcacacacttcttgaagataatatacattattccctagttatctcttcctaggtttttgtaggctcatttcaatattacaacaatctttattggaaaaccccaagtattttgtcttgaaaaatcagcaatccaggtattaaaaatagcatggaatgcccaattttactttgataattacatggtaagtcaagtttccgctcctggctaaaagccttggattttcttctggggcaggtcctaaangcacagggtggcatggaaagaaaatcattncattttcatctcctncccttaatttgaattgggggtctgggtaccaaaaagaagtcaatcaaggccctttggaattacccttcttggaactggatcnttntaaaatcgcaagntctanggtttggncacagggaaaanaaaagttaaacgncaggccccacttttggccccattntttaacaaggggaaaagaaccagcttggnccttaaanaattccataacctttttatggccttttttggcccttttcctttaaggntccaaaaatccttcccttgaacnnccatccctgggaaggtattcantnaat

SEQ ID NO: 2557 - DNA, 468 bp, Homo sapiens
  misc_feature 2, 3, 4, 5, 53, 63, 65, 93, 207, 296, 334, 338, 346, 355,363, 372, 378, 396, 460, 466: n = A,T,C or G
gnnnnagattcgacgcatttactactatagggcgaattttagctccaccgccntggcagcggncncccgggcaggtacagggcttgagagcanagctgcccatgtctgctttccctctgaaccctgacagcaaactcttctgaaggagcttttcactctatcaaggtatgataaaacttgaaaagagatggctggattgagtgcggngcgggggtgggtatcagaggtagagaagttccaaggtggccccataactttcctatatccttgaagaatcgtttttcatttgcagaatnaaaaaggaagaaagtctacatatctgaaatgctcttcnatanaccagcanatggtggcntaatcagnatggccaanaacccnagtgggactgccaatatnttactgggatgcccacgggaggggctccacgtctggaacaagggtgggaatgatgtcctcggcncgcttnta

SEQ ID NO: 2558 - DNA, 515 bp, Homo sapiens
  misc_feature 2, 3, 4, 5, 8, 54, 252, 259, 287, 293, 296, 314, 315, 328,332, 333, 339, 340, 348, 349, 353, 356, 357, 360, 366, 376,382, 384, 394, 402, 404, 406, 407, 412, 415, 420, 424, 431,433, 454, 455, 461, 462, 466, 468, 469, 470, 480, 481: n = A,T,C or G
  misc_feature 482, 484, 488, 495, 501, 502, 503, 504, 508, 509, 510: n = A,T,C or G
gnnnnagntggccgcgtaatcactactatagggcgaattggagctccccgcggnggcggccgagggactttttttttttttttttttttttgccctcccagattctcagtcctttggtgatcacttaactggacaatcagaaatgaatgaaatccacttttccaaacaagacataccaagagaagcccgagcagctcacctgggtcattggctaacacagaccccgcgtacctgcccgggcggccgctctanaactagnggatcccccgggctgcaggaattcgatntcaagnttntcgataccgtcaaccttnngggggggccgggncccnncttttnnttcctttnngggnggnnaantggccncttggggggnaaaaantnggggaaaaanggggtttntncnnggggnaanaaaantttnttttctntncctaaatttttttcccaaaannaaaaannaacncnnngccggggggnnncnttanaaattgntaaaannnncctnnnggggg

SEQ ID NO: 2559 - DNA, 453 bp, Homo sapiens
  misc_feature 2, 118, 150, 212, 226, 313, 354, 369, 374, 395, 400, 405,419, 439: n = A,T,C or G
cnaatacgactcctatagggcgaattggagctccaccgcggtggcggccgaggtacttttttttttttttttttttttttttttttgggggaaaagaaaaataaactatagtttttgncattaagtttactagtccaaaataatgtatanaattggttaccaagttggaagaatcaggaatatttatgataaaatcatggcattcctcaaanaaactattttcagngcttcctaaagtctatagcaaacatgatgtaaattataaaacttataactaaaacaacaaataaaagttttctcaattatttaaggnaaaaataaaaaccttggactgcttctcttcaattagggganacctaaagttaagcngaggnggtgagttttcaggaactaanagttntgttnaatggaccccttantcagcaaaaaggttggctangctctatttttaaa

SEQ ID NO: 2560 - DNA, 473 bp, Homo sapiens
  misc_feature 2, 3, 4, 8, 9, 10, 352, 416, 459: n = A,T,C or G
gnnnaagnnnggcgccgtatacgactactatagggcgaattggagctccccgcggtggcggccgaggtacaataaagtccttacttaacatcatcattaggttcttggaaactgtgactttatttttcttttctttccttccttttctttttttttgggagacagggtcttgtcatgctgcccgggctggtctctgatgcctggcctccagtggtcctcctacctaggcctcccaaagcgttgggattacaggtgtgagccacagcacctggccaaaactcaaagtgaaaagttaccaagaacctatccgtgatgctaggttttgacgacttactgtacctgcccgggcggnccgcttctagaactagtggatcccccgggctgcagggaattcgaatatcaagcttatcgatacncgtcgacctcgaggggggggcccggtacccaactttttgtttncctttaaatggagg

SEQ ID NO: 2561 - DNA, 462 bp, Homo sapiens
  misc_feature 390, 462: n = A,T,C or G
ggcgcctatacactactatagggcgaattggagctccaccgcggtggcggccgaggtacacagcagtgctcaccgagcgaaagatgagcagggaggtgagattgacgtagcgcatcagcgtccttctaagcaggcgcccgtgctcgtcgcttccgtgaacactgctagagatgaggaacattagcctgtctggccagggcaaattcacaaactggttccaccatcggttcactaccagagtaacataaaaccctatttatttggtttgtagtctccgacaggaaagagaatcttcaaatttctggctcccccgaaagaggtgccttcaggttcggtgctgcacgcccggtgtcacccttcgctcgtgcacagtcagattttcttttctgntctctggccactgagaggacccagaagtgtgacaaggaacagaaggttaaatggttttttccacttgtagan

SEQ ID NO: 2562 - DNA, 511 bp, Homo sapiens
  misc_feature 2, 3, 4, 5, 8, 9, 134, 227, 299, 313, 322, 329, 387, 414,419, 426, 461, 473, 474, 476, 496: n = A,T,C or G
gnnnnagnnggccgcgtatcactactatagggcgaattggagctccaccgcggtggcggccgaggtactttttttttttttttttttttttttatggagtctttaagattatctctatgttggctggctgcggnggctcatgcctgtaatcccagcactttgggaggccgaagcgggaggccaacactggggctacccaagagttgaccaaaggtggtattaatacntatgcttacttattaccttgttcgcacagttctagtgtaagtcttgaaaatcaagtaaatttggaaacatanttgcacaaactctnttatgagtnacacagntaatccagaatattatttctaagttattcataaaaagccaaccaaagccaaaatattnaatgttacccttgccccggggccgggncccgnttctttnaaactaagtggggaattccccccggggccttggangggaaatttccnnanttttaaaaagccttttattngaattacccccggcc

SEQ ID NO: 2563 - DNA, 460 bp, Homo sapiens
  misc_feature 3, 4, 5, 8, 11, 19, 64, 364: n = A,T,C or G
gtnnnacnccnaatcactnctatagggcgaattggagctccccgcggtggcggccgaggtacantgcggtagtgacgggttacagtcccgtgggcagcctctgcttctactgtcttgccatctggacaaaccagcacgctggtcatcatgccgagagagccatacccttgggccacagagtccgactgcacgtcaccatcatagtttttacaggcccagatgaagcctccctctgatttcatagcttgggccaccatgtcgtcgatgagcctatgctcataccagatcttttgagcttcaaactgggacttgtacctgcccgggcggccgctctagaactaggtggatcccccgggctgcaggnaattcgatatcaagcttatcgattacccgtccgacctcgagggggggccccggtacccagctttttgttccctttagtgaagggtttaaattgcgc

SEQ ID NO: 2564 - DNA, 424 bp, Homo sapiens
ctatagggcgaattggagctccccgcggtggcccgcccgggcaggtacaataagcacacacccagaagagctgaaggctgaagacagagacgatatggcaagaggcagtggcctggaatggggactgaccaccctgcagaagttcagccaggtagatgtggggcaggggaacgctgatggtggtctcagggggaaaactcaggacctgcacataagtggatgaccggaaacaacaataaacattgtgagatctggaaacccttttctccaactggctgaagtggacccgggctcctgggaagtagttcctagtgagggaggcaagtgtgggttcttctatatatacatccaggtgagggggggaattcacattcagcagtctcaagagcgactgttagcttcacacaccttctcatggcccccc

SEQ ID NO: 2565 - DNA, 427 bp, Homo sapiens
  misc_feature 427: n = A,T,C or G
ctatagggcgaattggagctccaccgcggtggcggccgaggtacgcggggactgttgcgactggcatccgcatccggcagatgtagatggaaccaaagtccagaagttacgcgtcacccttgctctacagccaaacatgcaggactctagtaacccgcgaaatgatgggatagccgttgcaaatccttaaaagagtcttaacgaaatcctggctgacattgacttctccactgcaaccatcgagttcattgtctcctaaaccttgccatggaggcctgtggcacctgagccagccattatcatcaccagcacttccatgagctacaagctggacccactgcagtcctcctgacacactgaaatcagagcctgcacacagagcagcagatgcttcaatgtaaaggtcattttccagggtccttgacan

SEQ ID NO: 2566 - DNA, 437 bp, Homo sapiens
  misc_feature 300, 404, 408, 423, 437: n = A,T,C or G
ctactatagggcgaattggagctccaccgcggtggcggccgaggtactttttttttttttttttttttttgcaaatttacacagttttcttaggaatgctctttctttttttttctctttggactctacattcctgtagctcctattcttcaagggcacaggggcttacttaaacataaaattttacaacttaactggaagggtgccctgcttgcaaatggaaaactgccacagagcagacttaactgcagcaagcaggtgacagagcaaggaacaggatccaaaattatgattttttgngtgctactgaagtaaaagaatttaagaaggttttactcagggtcataggctgggttggaagactgggaaaaaggaaatcaggagtatctatatctaattatggngacngaatttcacagaccntttattaaccctan

SEQ ID NO: 2567 - DNA, 860 bp, Homo sapiens
  misc_feature 8, 10, 14, 28, 30, 32, 34, 118, 139, 145, 149, 159, 165,167, 176, 182, 188, 191, 199, 203, 212, 219, 257, 258, 268,279, 280, 295, 318, 351, 367, 368, 371, 383, 385, 386, 406,417, 421, 422, 465, 467, 470, 478, 482, 485, 487, 490: n = A,T,C or G
  misc_feature 503, 517, 528, 531, 541, 546, 550, 553, 555, 566, 573, 574,575, 582, 583, 585, 586, 588, 589, 591, 598, 606, 607, 625,629, 631, 633, 634, 646, 650, 652, 668, 670, 717, 719, 720,726, 730, 736, 739, 743, 761, 762, 769, 775, 779, 780: n = A,T,C or G
  misc_feature 781, 782, 785, 788, 789, 795, 796, 809, 830, 837, 854, 858: n = A,T,C or G
aagggggncngaanaatttggggaaggncntncncactccggccggggtgggggccggggcaccggaaggggttaacccccctggggcacccttcaaattaacccctgggaaaaaggnccaggttgggttttcaaaccncctttnaagnccaaaaaaantccttncncaaaaaccncaaggncgggcnatngaaaaccnaaantttttttcnttaaccnattccaacaaaacccggaaacccctggggttttttttnnaaaaaatttnccaaggccttnnttcaaaaagggggcnccaaaaaattttcttttttttcnttaaaaaatttttaaaacccccaaaaaggaaanacctttttcaatttcnnagnttttcccaccangnnaagaaaaagggggttttatntccccaacccncccnngggggggggggggtattttttttttgggggggggggggaattntnctnaaaaaaanaaanaangnttnttttttttttaanaaaaaaaggggggnggggggggggngtntttttttttnggggngaanaancnttttttttttnggggggnnnccgcccnngnntnnanaaaaccncccccccnntttttttttttttttttnttgngngnnaaaaaatttttncccngngggtgggggggggggngnaaaaaaaccccctctttttttttttttttgtggggggggtggttttntnntaacancccncccccntcntggnggggggggggggtttttnnttcttgngggggngggnnnnccnttnntcggtnnggggggggggggnaaaaaaaaaaaaaaaaatttncccccgnggggggggggggggggngttntt

SEQ ID NO: 2568 - DNA, 751 bp, Homo sapiens
  misc_feature 2, 4, 5, 7, 9, 13, 17, 18, 19, 23, 27, 28, 31, 35, 42, 43,47, 48, 51, 53, 55, 56, 59, 61, 63, 67, 72, 76, 77, 79,81, 87, 92, 97, 98, 101, 104, 105, 109, 110, 113, 118, 123,125, 128, 174, 247, 253, 272, 289, 292, 303, 318, 325, 333: n = A,T,C or G
  misc_feature 344, 361, 362, 364, 379, 392, 394, 423, 438, 440, 449, 451,473, 491, 514, 515, 548, 555, 559, 564, 567, 576, 583, 587,590, 612, 636, 653, 676, 679, 716, 719, 722, 727, 730, 735,740, 745: n = A,T,C or G
cntnncncngctntttnnnatgntatnntantatnctataanntatnntgncnanntcntntntttnttctnttanntntntttaanttttnctttnnttnttnntaannttnttgtntgggngncgnctatacgatcatatagggcgaattggagctccaccgcggtggcggngcgaggtacgcgggtgtgcagccacagtgagcttctgaacatttcttctcagactaagctcttacacacagtngcagtngaaagaaagaattgcttgncatggccacaggagcangcngcttcctgcanacatgactgtcaacncaaaacntcatgttnactggagggcnaggacacaatggttttnncnacaggagtacctcangaggcacaatacnangtcacactcaaattggtggctttttgccncaaaaatattacccncntttagggtnanagattctttcccccttccctgncccaaagtaaaaggaaanaaggtgggaaataaagcaaggcnnatttgaagttacactttcacccaattggggaanaaacctnttgnaaaangtngctaagggngggcaanaaanttngaaaaggggggcctttcaaacnccaaaatttttaatttttttgggnttggcccaatttggggnggcttttttaaaaaggttatttnttncccctttgggaaaaaattttaaaaagggttttccaanggntcnttttnggnacctnttttnggggnggtttt

SEQ ID NO: 2569 - DNA, 468 bp, Homo sapiens
  misc_feature 2, 3, 4, 6, 14, 195, 227, 433, 443, 447, 454: n = A,T,C or G
gnnnanggcccgancactacttagggcgaattggagctccccgcggtggcgtgcctaatgagtgagctaactcacattaattgcgttgcgctcactgcccgctttccagtcgggaaacctgtcgtgccagctgcattaatgaatcggccaacgcgcggggagaggcggtttgcgtattgggcgctcttccgcttnctcgctcactgactcgctgcgctcggtcgttnggcttgcggcgagcggtatcagctcactcaaaggcggtaatacggttatccacagaatcaggggataacgcaggaaagaacatgtgagcaaaaggccaagcaaaaggccaggaacccgtaaaaaggcccgcgttggctggcgttttttccataaggcctccgccccccctgacgagcattcacaaaaaatcgaaccgcttcaaagntcaggaaggntggncgaaaanccccgacagggact

SEQ ID NO: 2570 - DNA, 490 bp, Homo sapiens
  misc_feature 4, 268, 319, 327, 338, 381, 410, 432, 477, 485, 488: n = A,T,C or G
ctancactacttagggcgaattggagctccccgcggtggcggccgcccgggcaggtacagatggggtttcaccatgttggccaggctggtcttgaactcctgacctcagatgatccacccgcctcagcctctcaaagtgttgagattacaggcttgagccattgcgccagccctacctttgttttcttaatagtaggaaaaatatgcctttatttctgttatgatttttcagagaggtagaagataatagatgcaaactctttggaanggaaagcttgtacccttcggccgctctaaaaactaaggtgggatccccccngggcttgnaagggaaattncaatattcaaagcctttattcgaatacccgttcgaaccctttnaaggggggggggcccccgggtaccccaancttttttggtttcccttttaantggaggggttaaaatttggccccgcctttggccgtaaaatcaatngggtccantanct

SEQ ID NO: 2571 - DNA, 446 bp, Homo sapiens
  misc_feature 6, 245, 248, 319, 340, 417: n = A,T,C or G
ggcccnatcactacttagggcgaattggagctccccgcggtggcggccgaggtacttttttttttttttttttttttttgaatcttaaatgtgctctactaagtgaaaaacccatatacatgattcatgggctacatatcacatgattccattcatatgatactttggaaaaattaaaactataggaatgaacagactagggccggggtgtccaatcttttggcttccctgggccacactggaanaanaattgtgccttgggccacacataaaatatactaacactaacaatagctcttgagcaaaaaaagtccatgtntaaatctcataaggtgttaanaaaagtttacgaatttgtgttgggccacattcaaagcccatcctgggcccgcatgcagccccacggggctgtggggnttgggacaaagccttgggacttagccagt

SEQ ID NO: 2572 - DNA, 753 bp, Homo sapiens
  misc_feature 1, 2, 3, 4, 6, 10, 11, 12, 14, 16, 19, 21, 24, 25, 26, 28,29, 30, 34, 37, 38, 39, 41, 42, 43, 44, 45, 46, 50, 52,53, 55, 56, 57, 62, 66, 68, 72, 73, 77, 79, 84, 86, 89,92, 93, 100, 101, 106, 109, 111, 112, 113, 115, 125, 247,270: n = A,T,C or G
  misc_feature 276, 292, 325, 326, 347, 349, 353, 356, 371, 378, 382, 389,392, 427, 428, 433, 435, 438, 448, 459, 478, 482, 491, 494,496, 516, 521, 522, 530, 541, 546, 558, 571, 580, 587, 597,608, 609, 615, 620, 629, 633, 638, 643, 648, 653, 682: n = A,T,C or G
  misc_feature 683, 684, 689, 696, 698, 700, 702, 708, 728, 733, 739, 740: n = A,T,C or G
nnnntntgcnnnancnatntnatnnntnnncatngannnannnnnnattntnntnnntcaancatntnatannttanantttananttntcnnttatttnncatantantnnngnggccctatcnctcctatacggcgaattggagctccaccgcggtggcggccgcccgggcaggtacgcggggggaggcaggttggagccgctgccgtcgccatgacccgcggtaaccagcgtgagcccgcccgncagaagaatatgaaaaagcggancgactnggttaagggaaagccncccgagatgacggggcatttctggctgcacgcnncgcaagtcagaaggggacatngntatnatncattgtcagcaccanagccagnaagnagaggcnaanacggaccaaaaggaagggaagtggaaacaccaatnntacgncnttntggtggggcntatgcggttgntacccaaacccccttttcnttgnccccctttncgntncctggttggttggcccttgngaaanncccaaggngccccccaccncaaanggcctttcaggncggttttttaccntttcccttngttaagngtgggccttncacccaagggnnttctcnccaantccgagccnccgnaattnggggnccaanttttncccccctttttttggcccccctttggaannnttccntgggccnangncngggggntttcccccttttttttgggngggcnttttannccttttccccccg

SEQ ID NO: 2573 - DNA, 412 bp, Homo sapiens
ggagctccccgcggtggcggccgcccgggcaggtacgcgggaagaacggcggtaacagttattggcaaaaagcatgaaaagagaaagcactttgaaatttattactagcttgctacccacgatgaaatcaacaacctgtatctggtatcaggccgggagacagatgaggcgagaggaggaggaggaggaggagaaggctctgggctcctctgcaaaaataaaaataaaaaaataaataaaattttaaaaataataaaaattcactatatacacatataaagaaataaaaagaagtctcagttgccaaaaaaaaaaaagaaaaaaaaagtacctcggccgctctagaactagtggatcccccgggctgcaggaattcgatatcaagctttatcgataccgtcgacctcgaggg

SEQ ID NO: 2574 - DNA, 803 bp, Homo sapiens
  misc_feature 2, 7, 11, 14, 15, 23, 29, 32, 39, 45, 47, 48, 49, 53, 56,58, 60, 61, 62, 63, 64, 66, 72, 76, 79, 82, 84, 86, 87,90, 91, 93, 94, 95, 96, 98, 114, 119, 127, 128, 130, 131,132, 133, 134, 138, 145, 301, 309, 348, 350, 359, 371, 377: n = A,T,C or G
  misc_feature 403, 405, 413, 416, 419, 421, 424, 426, 438, 445, 450, 453,460, 466, 476, 478, 481, 487, 491, 510, 524, 529, 537, 541,542, 548, 555, 567, 575, 589, 603, 609, 614, 615, 617, 621,630, 633, 643, 649, 655, 656, 664, 673, 684, 690, 697: n = A,T,C or G
  misc_feature 703, 711, 715, 717, 719, 738, 739, 741, 745, 756, 759, 760,761, 768, 779, 780, 782, 785, 793, 801: n = A,T,C or G
cntgtgnactnaanntatattantaactntgntctctantatttntnnngttnttntntnnnnnanttaatnattnttnatntntnntanntnnnntnttcattctaacattcntctantttagtanngnnnnntgtncgcgtanacgactcactatagggcgaattggagctccaccgcggtggcggccgaggtacgcgggtattatggagatgctctgttccatccagggaggtgcaggtgaaaagagggcagttcatcctcctcacacttagggcagggagcagccatgcaggggcangcatcagncagtctttgccattgttggacaaaaatcccaccttctcntngcttgcaantatggctcttantgcggnaaatgtttgccatgaacctttaaaantnttttcttnttntgntnaananattggggggggnaaacaancaaanacnagggatncctttnattgcttcancnacnttgggntgtnacctccctaggatatatanagataaacacatanggaanacatagtnaaannggcaanagtgganaggtaaaaacangtatatanatatgtacataganacacatatatcaantataantaatnnanatanaagatatanganagacaaaaanagaggnggttannccccttgnccaccccgnggggcccgggngctccngtctttntttaangaaaaacnttangngntggggaattttcccccccnncnaggnattctttggcnaannnggaaaanttttctgaaanntnttnccaaaagncctttttnat

SEQ ID NO: 2575 - DNA, 534 bp, Homo sapiens
  misc_feature 92, 133, 154, 169, 178, 192, 193, 207, 209, 214, 217, 226,227, 261, 266, 271, 272, 273, 274, 278, 287, 288, 293, 296,297, 298, 299, 303, 304, 308, 316, 318, 319, 320, 328, 329,336, 339, 343, 347, 348, 349, 356, 358, 362, 363, 365: n = A,T,C or G
  misc_feature 369, 380, 381, 385, 387, 389, 392, 395, 422, 423, 426, 427,443, 458, 459, 466, 471, 473, 479, 496, 500, 506, 517, 522,523, 528: n = A,T,C or G
atacgactactatagggcgaattggagctccccgcggtggcggccgcccgggcaggtacttttttttttttttttttttttttttttctaanagttgcaacaattcatctttatttcttattttcctctgganatgcaaaatttggtatatttnaccccaggtatattngggatagtnggctcctcctgggnnaggatggctgggcncntttcnccnggggggggnntttttttttttggggggggggggggggggggggnttttnaaaannnncccnaaaaaaaannccccnctnnnntggnngccnataacccnannngggaacannaaaaaanatnaaantttnnnaaaaaananacannanagtnccccccccccnnctancngnggnagnagaaaaaaaataatccccccccccccnnagnnaaaaaaaaaaaaaagnggtcttttttctttnnaaaaaanaaatngngaaaanccccccccccccccccncctnttttanaaagggggggnggggnngctcnccccca

SEQ ID NO: 2576 - DNA, 468 bp, Homo sapiens
  misc_feature 2, 3, 4, 41, 84, 90, 97, 100, 114, 124, 125, 129, 137, 148,158, 162, 173, 177, 185, 194, 199, 204, 207, 209, 217, 222,224, 230, 233, 236, 239, 241, 242, 249, 251, 255, 259, 263,264, 269, 273, 279, 281, 283, 285, 288, 293, 299, 305: n = A,T,C or G
  misc_feature 314, 317, 321, 322, 329, 345, 354, 375, 403, 410, 416, 417,438, 466, 467, 468: n = A,T,C or G
gnnnacgcccgaaacactactatagggcgaattggagctcnccgcggtggcggccgaggtactttttttttttttttttttgantccaantccccanganggctttattttttnttttcaacannctgntctgcggnttccttggctntttttgcccntatncccaaaaaccnggcnttggcacnggccatacngaaantaacnaangntttgaaantcttntnttcctnaangangantnnagctttntncttnttanaaannttccngacnggcatnancngnccnggcanctgggnggccantttcaattnttncccnngtacctncccgggcggggcggtntaaaactantgggaacccccgggctgcaangaattccgaaattcaagccttaatcganaccgtcnaccttnnaaagggggggggccccggtanccaaacttttttggttccccttttaaannn

SEQ ID NO: 2577 - DNA, 452 bp, Homo sapiens
  misc_feature 17, 92, 124, 211, 282, 285, 390, 421, 422, 447, 449: n = A,T,C or G
ggccgcgaatacgactnctatagggcgaattggagctccccgcggtggcggccgaggtactttttttttttttttttttttttctccaccanaaacacgtgcactttattgaatgccattgtanaaaagtgcgtgaagataaagggctgatacaggactgggctccgggggcagggcgaggtggagtatgtgggattcaggtcatgggcanagctcctggcctggatgatgcctcctgatctatcgataggcttggaagatcaacacccggatgatgatgancanaatggtcatgaggatgtccacaatcagggctcaaatcccgcgtacctgcccgggcggcccgctctaaaactagtgggatcccccgggcttgcaggaatttcgatntcaagcttatccgataccgttccaacctttnnagggggggggccccggtaccccaancnttt

SEQ ID NO: 2578 - DNA, 447 bp, Homo sapiens
  misc_feature 2, 3, 4, 7, 41, 436: n = A,T,C or G
gnnnagncccgaaacactactatagggcgaattggagctcnccgcggtggcggccgcccgggcaggtacccgggcgtgtgaggtgtcagtctgcccctacttgggggtgcctcccagttaggctactcgagggtctgggacccacttgaggaggcagtctgtccgttctcagatctccagctgcgtgctgggtgctgggagaaccactactctccccgcgtacctcggccgctctagaactagtggatcccccgggctgcaggaattcgatatcaagcttatcgataccgtcgacctcgagggggggcccggtacccagcttttgttccctttagtgagggttaattgcgcgcttggcgtaatcatgggtcatagctgttttcctgtgtggaaattgttatccgctcaacaaatttccacaccaacattaccgaanccggggagcat

SEQ ID NO: 2579 - DNA, 511 bp, Homo sapiens
  misc_feature 2, 5, 15, 450, 465, 503, 508: n = A,T,C or G
gngcngctatcactnctatagggcgaattggagctccaccgcggtggcgtgaggtttctcacactcatgaaaatgaaaattatctcttacatgaaaattgcatgttgaaaaaggaaattgccatgctaaaactggaaatagccacactgaaacaccaataccaggaaaaggaaaataaatactttgaggacattaagattttaaaagaaaagaatgctgaacttcagatgaccctaaaactgaaagaggaatcattaactaaaagggcatctcaatatagtgggcagcttaaagttctgatagctgagaacacaatgctcacttctaaattgaaggaaaaacaagacaaagaaatactagaggcagaaattgaatcacaccatcctagactggcttctgctgtacaagaccatgatcaaattgtgacatcaagaaaaagtcaagaacctnctttccacattgcangagatgccttgtttgcaaagaaaaaatgaatgttgatntgagntag

SEQ ID NO: 2580 - DNA, 490 bp, Homo sapiens
  misc_feature 2, 3, 16, 223, 471: n = A,T,C or G
gnngccctatcgactnctatagggcgaattggagctccccgcggtggcggccgaggtactatgttcgcatctgtgaatagtcactgcactctagcctggacaatatagtgagaacccatctcaaaaaaaaaaaaaaaaaaaaaaaggcaaagttctagatcctaactggaagagttaggccaagaaggaagaagaggttctgggagctgctggctacttcctnatcctcctactatcgagatacccgcgtacctgcccgggcggccgctctagaactagtggatcccccgggctgcaggaattcgatatcaagcttatcgataccgtcgacctcgagggggggcccggtacccagcttttgttccctttagtgagggttaattgcgcgcttggcgtaatcatggtcatagcctgtttcctgtgtgaaattgtttatccgctcacaattccacacaacataccgagccgggnagccattaaaagtggtaaa

SEQ ID NO: 2581 - DNA, 508 bp, Homo sapiens
  misc_feature 2, 3, 20, 22, 32, 36, 43, 98, 117, 162, 252, 269, 336, 339,366, 407, 415, 478, 479, 489, 505: n = A,T,C or G
gnnaacttgacactacttangnctaattgganctcnccgctgnggcggccggccgggcaggtacgcgggagcccctcatgggagccggactccctganactcaagaaaatgcacccntcctgcgttcctcctgcctggggtgacccataaggaacacccccnccttctcaacaaccacagaatataaatgccaaggggaccaccaacatgggcatgggggcctgttatgcccatttttaagggaaaacacangtaaaattggctccagnaactgagctgggggcagctgctctttctgtccatgacttttgaggcgggatctcgagcgtctgtctnacnggccttctgtctgctgtcctctcgcangtttcatacattgaatccaggattgcagccctgagggcccncagggctnacggggaagccctcgggaaaagccccggtgggaagtcaaacctccccgatatttctccctttnnagtggctggnaaaacttggcaaaganaaa

SEQ ID NO: 2582 - DNA, 500 bp, Homo sapiens
  misc_feature 2, 3, 5, 7, 8, 9, 13, 17, 18, 31, 121, 201, 294, 371, 432,448, 455, 471: n = A,T,C or G
gnnangnnncttncttnnggctaattggagntccccgcggtggcggccgcccgggcaggtacgcggggagcatataaaatgcagttctgatcctgtcacctctctgcttaaaactcttcanaggttcaccatcgcttccagaaaaagatcaatactcctgacgtggcaacctgtcgagactcaggaccgctaggaaatcanctcttgtttacccctctatccattacactacgatccagctgggtttaaggcatcactttcctctgagcaatcctccctgatgtcatgaggcanttgctgagtgccttctctggaccctctgtttacttgcctgttaaatcctgaacatctggaagggagtcgtgttcaancaaacatatctacgccttgcagcacggtgcctggcctgcagctggtgttccgtaaacaagntgctgactggacgggnatgcatngccaattctagatttnagtcaatttctagagaccaccatgggtgg

SEQ ID NO: 2583 - DNA, 599 bp, Homo sapiens
  misc_feature 16, 181, 238, 245, 249, 252, 262, 312, 315, 318, 319, 327,329, 335, 337, 343, 351, 353, 355, 366, 370, 376, 378, 396,398, 405, 420, 431, 434, 436, 440, 444, 448, 452, 489, 496,497, 499, 506, 507, 508, 509, 515, 520, 522, 523, 525: n = A,T,C or G
  misc_feature 530, 531, 537, 547, 548, 550, 552, 557, 561, 568, 569, 570,571, 582, 583, 586, 591, 594, 598, 599: n = A,T,C or G
gggggctaatacactnctatagggcgaattggagctccccgcggtggcggccgaggtacacgagtgggatggtcaggacctgggccattgcaaccaaaatggggacttcctgggtagggaggtcactccctctactcactgagctaggattagggagggttattgccccaaccattgcaangggaggtggagggacaggctcagccttctcattgtctaaatgaggcctaaatgtgtnaagtgcnattnctncttttgtgtncctgcccgggcggccggctctagaactagatggattcccccgggctgcanganttnnatatcaancntattcnantcccgntctacctntnangggggggcccngtanccccangntttttgttcccttttaananaaggggnttaaaattggccccnctttgggcctnaantnaatngggnccanaaanctgttttcccttgttttgaaaaatttgttttattccncttttannanattctcnnnnccaaanattancnnangcctnntgatgnctattaaaanntntnaaaancccnttggggnnnncctctaaatcnnagntgtanccnaaann

SEQ ID NO: 2584 - DNA, 499 bp, Homo sapiens
  misc_feature 3, 4, 6, 10, 23, 93, 221: n = A,T,C or G
aanncncttncttagcgctatanggcgttttggagctccccgcggtggcggccgaggtacgcgggatttataaacatcctgcaggaaaatgantctatatgtcagaatacacatttcccaccttgcccaacagtagaaaaacataagaagagaaaaacattaaaaaatgacaaggaagttaatggaagcaatgcgatggtgtttggaggtggagccttcanaaaggaaattaatgcccttgtaagaagaggccagagagcttgcgcaccttcttcctgccatgtgaggagccaagaagccggctgtctgcaacctgcaagaggaccctcactagaagctagccatactggcatcctcatcttggctttccaacttccagaactgtgagaagtatatgtttgtggtttaagtcaatggtctatggtaaattttttttattagcagtcccagccaaagacagtgcctcatttacctaccataccatttatattatttatat

SEQ ID NO: 2585 - DNA, 512 bp, Homo sapiens
  misc_feature 2, 11, 106, 259, 265, 280, 321, 335, 349, 414, 446, 461,478, 483, 490, 492, 505, 506: n = A,T,C or G
gnacggtttgncgtctacttttactatagggcgaattggatttccccgcggtggcggccgaggtaccctctttcccttcccaccccccaattaaaggcaaacaatntcactttgctcttgcttaacctagattgtgcttcaaaaactattaaaatgtaaaagacttaacaaaaaaacaaaaagacgtttaacagatgtcaaaaagctccttagtgtttgaaaattaatgctttaaacaaaagacaacatattttatatnaaacangtttgaagagccctnaattgcagcattctgtaacataaacaaacaaaaagctggtntaggatttattgtnaaaggcagaatttnttcacgcaggtaaataaggaggtggtggttctttttcaagcattttcacggccatttcatagggntggcaaaaacataccttttccgggccggccgnctctaataactaggnggatccccccggggctncatgnaattccntnttcaagctggtcnnaatccc

SEQ ID NO: 2586 - DNA, 514 bp, Homo sapiens
  misc_feature 2, 9, 11, 12, 14, 27, 32, 55, 76, 97, 103, 140, 149, 200,233, 260, 272, 312, 329, 338, 409, 416, 417, 451, 472, 483,490, 492, 493, 502, 506, 511: n = A,T,C or G
gnagcattncnncntacttttactatngggcnaattggatttccccgcggtggcngccgcccgggcaggtactttnttttttttttttttttttttnactggnggaaatgacacaaactgacaagtatttatttagcctnattcccatnactcaccactgccacccaaaaaagtgtcacctgagtatttattgcatgcanccccaacactaaagaaagatcagaaattttttnttcccgtgggtggaaaataaagggctntttgcccacgtntccaggctttctttggaaagcattttgggaatcattccanaaattcaatttccaggngtgtgtttntttaaggaaatatttgtggagcttgagaaggaaccgcactgtgcaggtgccattggctgtgggcgttgctntggcaannatcaacctttattactgaatagcaaaaggaaggnagtcacccattaaaacacaanatgaacaggcnggagttncnncacccccgntggnctttngga

SEQ ID NO: 2587 - DNA, 740 bp, Homo sapiens
  misc_feature 2, 4, 5, 7, 8, 10, 14, 15, 23, 25, 29, 32, 33, 35, 37, 38,41, 43, 46, 47, 49, 50, 51, 57, 67, 74, 75, 76, 78, 82,84, 90, 91, 94, 101, 103, 105, 110, 119, 121, 122, 129,131, 134, 163, 174, 365, 372, 390, 391, 411, 427, 428, 440: n = A,T,C or G
  misc_feature 443, 462, 466, 502, 524, 543, 550, 553, 563, 568, 576, 597,600, 611, 615, 617, 620, 621, 628, 631, 634, 661, 662, 663,670, 683: n = A,T,C or G
tncnncnntnttcnnctattgtncnctantcnnantnnttntnatnnannnttactnttttggttanaacttannntnatantntttttnnttnatcatantntntttanttttttttntnnctttagntntgngccgcgtatcgatcactatactggctatngggcgaattgnagctccaccgcggtaggcggctcgcccgggcaggtacttttttttttaatttttttttttttttggtatttttagtagagacaggttttgctatgttggctatgttggccatgttgaccaggctgttctaaaactcctgacctcaggtgatctgcccacctcagcctcccacagtgctgggggacttgcancttgtgnagccacccgcgccttggnnccagacttttttttttatgnaagaggaaaaaaccannatttacttatgngantttacccaatgttttaacnatgnaagtgttgttagtagtcaataaagttcttggaaagnggagatttgccgcataacccanttattgggaccattgttgngaccacnctngggaaagagngaccnttttttancgccatggagtttttaccatnaanagttcccgaanaagncnccnnttaaaanacnaangccaccattgcccttgtaaattattcnnntggaggnattcaaggggagnggccctgccgttataggccaaatggtaaaaggcccataaatttcttgttggaaggaa

SEQ ID NO: 2588 - DNA, 488 bp, Homo sapiens
  misc_feature 4, 5, 6, 8: n = A,T,C or G
gggnnntngccgctaatacgactactatagggcgaattggagctccccgcggtggcggccgaggtacttaactagggttagccgaggtcaggagggtggatgccttattatgggattagtgcccttctaagagggacagtagagggcttgttcatgctctctctctccatgcacaagaaagagcacacagtgagaaggaaagaggccctcaccagaacctgaccatgctggcaccgtgattgcagacttccagcctccaggattgtgagaagataaatatctgtggtttaagtcaccaagtctgtggtgtgttttatggcagcacaaggtaacccagatgatgcttctcaccactgggtggtccagcctttcatggaagctgtcagctcctcagccttgcaaaaaatgcttgctggtcactctctttggtcctctcagacgcctttcttagtggtgcctctaccaggcccttgacttcatccttttct

SEQ ID NO: 2589 - DNA, 474 bp, Homo sapiens
gcgcctatcactacttagggcgaattggagctccccgcggtggcggccgaggtacctcagcacagcacaagccacgctacaaaaacgtggccagactcttgtttacgtcagtccctgaccacatttctagtcagtgggtgaagtctttcaaccagggtctctggctaccttgactgctgttgtctggctgacagaggtctcaggcttccctgagtcagggctgccagggggaggaccagattgtcatctttgctttttgggcgacccagccatttcagccttagggcttcagagtgtctgaggtgaccaggggctgaagtgaacccccagcacagcacagctgctctataaaaacgtggccagactttttttttaaagcaagtccctgtgcttgttcctcctgactaggtaagactcctcaacttgcctccagccacatcttataggtgtgttcagattggcaacaggttcgtt

SEQ ID NO: 2590 - DNA, 528 bp, Homo sapiens
  misc_feature 4, 5, 7, 62, 95, 127, 132, 194, 205, 219, 225, 254, 313,331, 349, 377, 418, 452, 458, 505, 517, 519, 525, 527: n = A,T,C or G
gtannancactacttagggcgaattggagctccccgcggtggcggccgcccgggcaggtacncgggggtagtaagccatggcggccatgagtttnttgcggcgggtttcggttactgcggtggcagntctgnctggccggccccttggcactcgcctcggatttgggggcttcctcactcgtggctttccgaangctgcttgctnctgttcgacacaanttgganaccatgggaaaaagactatttgtcatcanaccttctagattctatgacaggcgttttttgaagttatttgggattctacattgcattnactggggatttccagtancaatctttcataactccnggtgaatgtattttcattggtcaaggcntggaactagcagaagatttcccaggaaaggctatgtcccanaaacacctggggaatatttataaggcatcccatnttcaancatgggatttgcccgtaaatttttctatgatagtccctggaaaaagnatttttttgaanangaaacngng

SEQ ID NO: 2591 - DNA, 519 bp, Homo sapiens
  misc_feature 2, 18, 19, 23, 104, 120, 168, 187, 201, 232, 240, 241, 247,248, 254, 271, 280, 283, 300, 306, 315, 339, 346, 361, 374,375, 382, 384, 400, 403, 410, 421, 422, 428, 429, 433, 454,455, 478, 492, 504, 516: n = A,T,C or G
gnacgtatcactaatacnntcantatagggcgaattggagctccccgcggtggcggccgtggcggaccccgcgtacttttttttttttttttttttttttaaantgttttctgggtgaantttattctgttttcacatctaggttgttggggagagtgatagacaaanttctggattctgggcatcntcagcgcatgcttntaatcctacttgggaggttgagacaggaagnatcacttnnggctannagttgnaggctgcattgtacctnggcccactntanaactagtggatcccccnggctgnaagaattcnatatcaaaacttatcgatacccgncgacctnaagggggggccccgnaacccaacttttnnttccttnantgaggggttaattggngcncttgggnaattattattnncaatannatgnataccggtggtgaaaattgtnntgccgctccaaattttccacacnaataattcccaatncccggggaagcnattaaaaatttntta

SEQ ID NO: 2592 - DNA, 515 bp, Homo sapiens
  misc_feature 2, 4, 5, 7, 8, 10, 339, 346, 435, 488, 489, 501, 507: n = A,T,C or G
gnanntnncnctacgactactatagggcgaattggagctccccgcggtggcgccgcccgggcaggtacgcggggacaccctgatcttcactgcagaatgtaaaggtttcaacgtcttgctttaataaatcacttgctctccaaaaaaaaaaaaaaaaaaaaaaaaaaagtacctcggccgctctagaactagtggatcccccgggctgcaggaattcgatttaaaagcttatccgataccgtcgacctcgagggggggcccggtacccagcttttgttccctttagtgagggttaattgcgcgcttggcgtaatcatggtcatagctgtttcctgtgtnaaattgntatccgctcacaattccacacaacataccgagccgggagcataaagtgtaaaagcctgggggtgcctaatgaggttgagcctaaacttnacaattaaatttggcgtttgcgcctcactggccccgtttttccaatttccggnnaaaccttgttcntgccancttgcatt

SEQ ID NO: 2593 - DNA, 890 bp, Homo sapiens
  misc_feature 5, 8, 9, 11, 18, 21, 25, 27, 29, 43, 48, 56, 57, 62, 63,67, 69, 70, 73, 76, 80, 83, 84, 89, 90, 91, 93, 116, 126,129, 131, 137, 172, 210, 220, 253, 281, 291, 314, 324, 332,349, 352, 356, 371, 375, 378, 379, 389, 393, 395, 410, 412: n = A,T,C or G
  misc_feature 429, 430, 436, 441, 447, 460, 464, 465, 482, 490, 493, 494,495, 498, 499, 500, 502, 520, 528, 537, 542, 543, 547, 551,561, 566, 573, 574, 577, 578, 587, 590, 592, 596, 597, 603,627, 630, 632, 634, 641, 644, 652, 669, 675, 682, 683: n = A,T,C or G
  misc_feature 684, 686, 693, 713, 714, 724, 745, 758, 772, 774, 776, 791,803, 805, 815, 820, 838, 839, 840, 841, 843, 849, 854, 863,869, 880, 881, 889: n = A,T,C or G
actanttnncnttatttnttncttncntntaaatttttatatnatttntttacttnntttannttancnnttntanttanctnntaatnnnanatttatatttattttatatttantatttatagntgngncccgcntacgatcatatagggcgaattggagctccaccgcngtggcggccgaggtactgggctgtggcacagccttcanagacaacacnggtgtatctctgatcctgccctacctaggcttnaaggggcttctgtctggagaaatgcccntcaaagggtnaccagtaggtgttggcattgaantggccagttnttagcatntacaagcccatcacccnagnattnaatttttggccctgncccnttnngggccccccnttananggtttattagaactngnttatttcaaatccaatnngtaggnccccnttcccncagccttggggtntgtnnctttaagggaaataagnccccccanccnnnggnnnantggtaaaggggggtatgncccctttnttttctaantgggnnggcnatcntttggggaanaattnctttttnntgnnttgtccccnaantngcgnnggtccntttttttttttttttccaattctnaantnanacccccnggngctgtaanattaaccccctttgccnccccgnggggccnnngngctcccnacttttccttaagaaaaacnntatggtctgnttaatttcccccccccgggtntccttggaacaantggaaattttcttnantnaattccaaaaggccnttttaatttcgngnattaaccccngtttnggtaaccccttcccttannnngngggggnggggngaccccccnggtttnaccccctaaanntttttttng

SEQ ID NO: 2594 - DNA, 587 bp, Homo sapiens
  misc_feature 88, 157, 199, 209, 223, 248, 253, 270, 281, 311, 338, 339,341, 363, 365, 373, 374, 376, 383, 390, 391, 409, 425, 429,434, 435, 437, 452, 456, 476, 477, 487, 502, 509, 510, 515,517, 518, 523, 532, 570, 571, 572, 573, 581: n = A,T,C or G
atccctatcgactcctatagggcgaattggagctccccgcggtggcggccgaggtacgcgggatcaaaagcaagtgagaaacttgctncattacaaaacaagttatgtagctagatattgggttgaatcttttgatattttaagaaactatcccacngatcagagagttgatagaccgttattaaacatagttgatganttatctgggnagatcagtcttttnccaaacttcaaaattccaaatctgntggantaatgtggaaaatttanttttatctaanccaatgtgcttacacacaaaaccttactgntgtcttcagggcctgagtttttaaagnngncaagcttttgcaatggttttgntnattgattnngngaaaatnttattanntaaattttcttaactttncagttttttttccccntttnaattnncntttaaatttcctttnccanaaaaaaaccccccttatttnnggtaaaaaantttccccccaatttnacttaannggggncnnggttnccctaaatnaaaaaaaaatggggtttttttttttcccccccccaaannnntttttttnttttgg

SEQ ID NO: 2595 - DNA, 477 bp, Homo sapiens
  misc_feature 4, 7: n = A,T,C or G
gtgnccnagccgcgtaatcgactactatagggcgaattggagctccccgcggtggcggccgcccgggcaggtacgcgggggtggctgcatgccagccagacacccagtcttgcaagactgtcattgaaaatctccgttttgctgttctccgggtctctgcgtccagtctttgtgtttggacggacctgccgggccatctttctgcaagaagataaaggaagaccaggagtgcctgccgaactcctatggaggaagtctaggagaggaaggggacagggaggaagatggtgtctgcaaaccaggaagcagccttgccagacacaggattggccacaaccttgaccccagacttccagcctccagaactctcctactgcactgagaagcacgtgttctccatttccctgggggagaccattgtattgggcagtttggaacaaaacaccatggactgggaggcttacacaacagaaattt

SEQ ID NO: 2596 - DNA, 494 bp, Homo sapiens
  misc_feature 2, 365, 399, 488: n = A,T,C or G
angccctatcgactacttagggcgaattggagctccccgcggtggcggccgaggtactgggctgtggcacagccttcgagacaacacgggtgtatctctgatcctgccctacctaggcttcaaggggcttctgtctggagaaatgccctcaaagggtaaccagtaggtgtggcattgaattggccagtgttagcatctacagccatcaccgagatgaagttttcccttgcccgaagggccccctaaggttatagacggtatcagcagggaggccgtcccgctggttttctaggagagcccacaggaggaagggagcctcttcaggggcactggaatcttttgtgccaggggcttcttttcatcanagccggggagtacctgcccgggcggccgctctanaactagtggatcccccgggctgcaggaattcgatattcaagcttatcgatacccgtcgaccttcgagggggggggccccggtaccccancttttt

SEQ ID NO: 2597 - DNA, 487 bp, Homo sapiens
  misc_feature 1, 15: n = A,T,C or G
ncgccctatcgactnctatagggcgaattggagctccccgcggtggcggccgaggtacagggtaaacaggaggatccttgctctcacggagcttacattctagcaggaggacaatattaatgtttataggaaaatgatgagtttatgacaaaggaagtagatagtgttttacaagagcatagagtagggaagctaatccagcacagggaggtcacagagaccatccctaaggaagtggagtttaaactgagagaagcaagtgcttaaactgaaggatgtgttgaagaagaagggagagtagaacaatttgggcagagggaaccttatagaccctaaggtgggaaggttcaaagaactgaaagagagctagaacagctggagccgttctccggtgtaaagagggagtcaaagagataagattaaaggatgtgaagattaaagatcttggcggcattcagggattgggcacttcttacaagaaaatcac

SEQ ID NO: 2598 - DNA, 599 bp, Homo sapiens
  misc_feature 6, 212, 257, 261, 268, 324, 326, 341, 345, 352, 368, 396,419, 425, 483, 492, 493, 498, 502, 506, 507, 509, 510, 511,515, 516, 521, 523, 526, 550, 555, 556, 561, 586, 591, 593,599: n = A,T,C or G
ggtttnctatcgactactatagggcgaattggagctccccgcggtggcggccgaggtacgcgggatcctcggaagagcgctcccaggagaaacaagcttgaccactatgctatcatcaagtttccgctgaccactgagtctgccatgaagaagatagaagacaacaacacacttgtgttcattgtggatgttaaaagccaacaaagcaccangattaaacaggcttgtgaagaaagcttgtattgacattgattgtnaccnaaagtcnacacccttgatttccggccttgaatgggggagaaagaaaggcattaatggtttccnanctgggcttcctgganttanccgatgnctttttgggatgtttncccaaccaaaaaaatttggggatcaatncttaaaaacctgggagttcccangcttgncccttaaattttcgtggaaattattactaattattaattattaattaatccttttttnccacccccnnatctntttngaanngnnngatnntaacnanttnataaaaaaggtaaccttggccccntgggnncgggncccgtttttttaagaaatcttaagngggantncccccn

SEQ ID NO: 2599 - DNA, 494 bp, Homo sapiens
  misc_feature 2, 3, 4, 5, 7, 10, 25, 452, 454, 459, 461, 464, 469, 471,473, 474, 476, 477, 478, 487, 490, 491, 494: n = A,T,C or G
gnnnngngcngcgccgaatcgactnctatagggcgaattggagctccccgcggtggcggccgaggtacgcggggaacacatccaagcttaagacggtgaggtcagcttcacattctcaggaactctccttctttggccaggattgctactctgcagtcactgggagcaactggactctccggattgaccaagttcatcctgggctccattgggtctgccattgcggctgtcattgcgaggttctactagctccctgcccctcgccctgcagagaagagaaccatgccaggggagaaggcacccagccatcctgacccagcgaggagccaactatcccaaatatacctggggtgaaatataccaaattctgcatctccagaggaaaataagaaataaagatgaattgttgcaactcttagaaaaaaaaaaaaaaaaaaaaaaaaaaagtaccncnccggnanatnatttnantnntnnntacttttanggnnttn

SEQ ID NO: 2600 - DNA, 488 bp, Homo sapiens
  misc_feature 1, 3, 4, 5, 13: n = A,T,C or G
ngnnnggccgcgnatcgactcctatagggcgaattggagctccccgcggtggcggccgaggtactccttactcaggttctccatatatttctgtagtgctttatgcttccagagcatcttggtgtcttgatggcaatatctcctggaccaattcttacttaacagatgaagaatgcaattcctgttttgtctaaaaacttgcagccttgtatcaagatgtatctgtctaaattgatgagaatggagctggatgtgacactggaggtaaccattaagagatggatgtctaaaaagccaaacacacaggtgacgattcatctcagcatctgaaatacaataaacacagtctttaaaaaaaaatcagctctaaagatacatgcataataaacctggaaggaacatcaagaaatcttgtttcatctactgcctcagccagctccacagtcttaaaattcaactgccggctggcagcagtggctcacgccagt

SEQ ID NO: 2601 - DNA, 487 bp, Homo sapiens
  misc_feature 2, 3, 4, 5, 6, 7, 13, 17, 20, 98, 478: n = A,T,C or G
gnnnnnncgtcgnatcnctnctatagggcgaattggagctccccgcggtggcggccgccacgctggttttgcatcttcaggagacgctcgtagccctngcgcttctcctcggccaattcgcggaagaagtggctcacgccttccagagccacatcatcgcggtcgaaatagaagcccagagagaggtaggtgtaggaggcctgcaggtaccactacatcattgcaaatctgggatttactgatggagacctattaaaaatccagtttggaggtgcaaatgtctctggatttcagatagtggactatgatgattcgttggtatctaaatttatagaaagatggtcaacactggaagaaaaagaataccctggagctcacacaacaacaattaagtatacttctgctctgacctatgatgccgttcaagtgatgactgaagccttccgcacctaaggaagcaaagaattgaaatctcccnaagggggaa

SEQ ID NO: 2602 - DNA, 490 bp, Homo sapiens
  misc_feature 32: n = A,T,C or G
ggttccctatctctactatagggcgaattggngctccccgcggtggcggccgaggtacgcggggctcttgatgcataaaaacagctgggctcccttggagacagagcgccatgggaaaccgggtctgctgcggaggaagctggagctgcccatcaactttccagaagaaaaagaaaacaggaagccaaacaagacggacactgaagccgcagccacaacagctgcagcagaatctcccaaagggccatgaaacaacaggacatacgtatgaacgggtgttacagcagcaagggtctcaagagaggagtccaggcctcatgtcggaagacagcaacttacattatgctgacattcaagtgtgcagccgtccccatgcccgggaagtgaaacacgtgcatttagaaaacgctacagagtatgcgacccttcgcttcccccaggccacacctcgctatgacagcaagaacgggaccctggtgtgagcgcttgg

SEQ ID NO: 2603 - DNA, 468 bp, Homo sapiens
  misc_feature 2, 3, 4, 7, 11, 70, 97, 98, 261, 283, 286, 399, 402, 468: n = A,T,C or G
gnnngtngacnccgttacgactactatagggcgatttggagctccaccgcggtggcggccgaggtacgcngggaagcgtttactttgaaaaaattannttgttcaaagcaggcccgagccgcctggataccgcagctaggaaagcgaatgataagggaaaagttctcagggaattgaagtgttgttgctatggtgacgtccttttgctgtgaataaaggtgctctttgcagcataaaaaaaaaaaaaaaaaaaaaaaaaangtacctgcccgggcggccgctntanaactagtggatcccccgggctgcaggaattcgatatcaagcttatcgataccgtcgacctcgagggggggcccggtacccagcttttgttccctttagtgagggttaattgcnccncttggcgtaatcatggtcatagctgtttcctgtgtgaaattgttatccgctcacaattcccacacn

SEQ ID NO: 2604 - DNA, 484 bp, Homo sapiens
  misc_feature 2, 6, 210, 212, 223, 233, 239, 266, 267, 283, 287, 361, 366,384, 392, 421, 448, 463, 473, 481: n = A,T,C or G
gnggcnccgtatacgactactatagggcgaattggagctccaccgcggtggcggccgcccgggcaggtacctctttgatgaatgagcctggcagaccccgaatcgcatttaagtgaaagccatagccattttcacctttagccagcctgcagagtttaggcttatgatctacttcctctgtagtatctggtggacttgagacttccaacntnacttgaggaantggggagctnggggcnctccttgacatgagccattggggcagnncttgactttgatagtngaanaaatggagaaaaatgagccagtctgtacctcggccgctctagaactagtggatcccccgggctgcaggaattcnatatnaagcttatcgataccgtntgacctcnagggggggcccggtacccagcttttgttncctttaagtgaaggggttaattgctcncttggaaataatcantggggcatancgtgccgncct

SEQ ID NO: 2605 - DNA, 500 bp, Homo sapiens
  misc_feature 1, 6, 95, 376, 449, 457, 466, 493, 494, 499: n = A,T,C or G
ntgccnatcactacttagggcgaattggagctccccgcggtggcggccgaggtactttttttttttttttttttttttttttttggtttttttgnttttttgggggtttttttggcagccacaggagttttagccaattcagatgccttgctccccacaatttggaacattcctttggatttgaccaagtcaggaagagatgggagagaagtgaaacagcaacaataaaccccaaacataaacaaaaagagttaagcaaaacaaacaaatgcgcaattcatgtgattactgagtgttctaatggtaaggagaaattaaaaagcagctggtggggtcatcttaaattttagtccatttaagggaaaaatttttaaanaacaaactctaatttcagctacttaccctgggaaaataaagggcttcaagggcctgggtgaatttgtttcttntggcccantcctttaanatggcttgggaaaaaaaaactttaacnnccttnt

SEQ ID NO: 2606 - DNA, 540 bp, Homo sapiens
  misc_feature 330, 331, 388, 418, 454, 455, 471, 477, 481, 506, 515, 516,525, 526, 532: n = A,T,C or G
agagcctctcactcctatagggcgaattggagctccccgcggtggcggccgcccgggcaggtacatgactgatattacacctcaaggtgtggctatgagagctggagttctggctgatgatcacttgattgaagtgaatggagagaatgtagaggatgccagccatgaggaagtggttgaaaaggtgaagaagtcaggaagccgtgtcatgttcctgctggtggacaaagaaactgacaagcgtcatgttgagcagaagatacaattcaaaaggataaacagccagtttgaaactgttaccccaccagccccgaattgtgggagatgaannaaagggaaagccaatgggcctattgggttttctatcttgaggggccagggcttcaanaaacagaaaaagggtcaaaatcattcaaanggaccattaggatttcttgggaaagttcccagccannaagggaagggctgggnttttgnaaanaaaacaaatggattcttgggttagnttttgcctnnttcaaaccnnggcggnagtttctt

SEQ ID NO: 2607 - DNA, 478 bp, Homo sapiens
  misc_feature 2, 3, 4, 5, 6, 17, 101, 102, 196, 292, 300, 341, 358, 384,453: n = A,T,C or G
gnnnnngttttgacgcnattctactatagggcgaattggagctccccgcggtggcggccgcccgggcaggtacttttttgagcccactgtgtgctgcctgnntttataagacattgaattttgttaatagaatgtaaactccatgaaggcagagatttttgtttattttgttcactgtggaattgctagcacctanaatactgcttgacagacagtaggcagtctgtaaatttatttgtttgtttgtttgtttgtttatttatttatttatttatttatttttgagatggantttcactnttgtcgccctggctggagtgctagcggcacaatctcagttnacttcaacctccgcctnccggattcaagtgattctcctgcctnggcctctagagtagcttggggactaccaggccgttgcaccacccacgccctgggctaattttttggtanttttttaagtaaaagggcgggggtt

SEQ ID NO: 2608 - DNA, 458 bp, Homo sapiens
gcctaacactacttagggcgaattggagctccccgcggtggcggccgtggtggtgaagctgtagccgcgctcggtgaggatcttcatgaggtagtcagtcaggtcccggccagccaggtccagcccgcgtacctcggccgctctagaactagtggatcccccgggctgcaggaattcgatatcaagcttatcgataccgtcgacctcgagggggggcccggtacccagcttttgttccctttagtgagggttaattgcgcgcttggcgtaatcatggtcatagctgtttcctgtgtgaaattgttatccgctcacaattccacacaacatacgagccgggagcataaagtgtaaagcctggggtgcctaatgagtgagctaactcacattaattgcgttgccgctcactgcccgctttccagtcgggaaacctgtcggtgccagcctgcattaatgaa

SEQ ID NO: 2609 - DNA, 546 bp, Homo sapiens
  misc_feature 1, 2, 3, 4, 9, 16, 22, 27, 28, 38, 41, 254, 353, 374, 378,392, 397, 410, 430, 450, 474, 490, 491, 494, 504, 506, 514,520: n = A,T,C or G
nnnngtccnatcactncttacnataanncgaatcgganctncccgcggtggcggccgaggtacatccaagattaggtcataaaaagtctgtggcagctactcgggaggctgaggcaggagaattgcttgcacccaggaggtggaggttgcagtgagctgagaccacgccactgcactcaagcctgggctataagagcaaaattctgtctcaaaaaaaagtccgtggcttttaatcttgggggctctgcctcttntggctttttgctcagttactctgaaaaaaagccaggtgtcacactgtaagctgtcctacagaagaggccccatgtcaccaaagaaacttatgttctttnttgccaagagccacaatgaantgancctttggaaacttnagttnaacaacttttcanattttattgttacccctggncccggggcggggccggcttntaaaaaaaaataaggtgggaattncccccccggggctttnnaanggaaattttncnaatttttnaaaagnctttatttcgaataaccccggtccgg

SEQ ID NO: 2610 - DNA, 458 bp, Homo sapiens
actacttagggcgaattggagctccccgcggtggcggccgaggtacacgtctctgtctgggcctcggccagggtgccgagggccagcatggacaccaggaccagggcgcagatcaccttgttctccatggtggccattgcctcctctctgctccaaaggcgaccccgagtcccccgcgtacctgcccgggcggccgctctagaactagtggatcccccgggctgcaggaattcgatatcaagcttatcgataccgtcgacctcgagggggggcccggtacccagcttttgttccctttagtgagggttaattgcgccgcttggcgtaatcatggtcatagctgtttcctgtgtgaaattgttatccgctcacaattccacacaacatacgagccgggagcataaagtgtaaagcctggggtgcctaatgagttgagcttaactcacattaattgcgtt

SEQ ID NO: 2611 - DNA, 534 bp, Homo sapiens
  misc_feature 182, 195, 211, 251, 269, 274, 284, 294, 297, 317, 319, 321,326, 330, 346, 369, 385, 401, 425, 427, 434, 443, 445, 463,472, 480, 481, 482, 497, 510: n = A,T,C or G
gcggtggccggccgcccgggcaggtacgcgggtccagggccggtggcaccccttcaccaacaagccgaccacgttccgcgggctacgcccccgagaggttcaggatcctgccccagcccatgtgcaagcacagtgaagagttgtcccaccaactgcaggcccaggcttttggactgttactnccggtaaaaggtnggttctttcccctttngggattccaaagcccaggcaaaatgggaaccccatcaatngggcaagtttgacaaganggttntgctttgggnataattgaanaanctgccctgttttctttttcnangnggccnttgnttttttgggggggccngtggacctttagttgaaaacccnacttcaattttttttnttccaaaagttgggcnattctcctttaaaaaaccctggangnatggaanggaaaagancntttcaaaggggttttttnaccaggggncccctttnnnttttttttaaaaatnccaaaaatttggntttaattaaattgatttcctcaat

SEQ ID NO: 2612 - DNA, 451 bp, Homo sapiens
  misc_feature 338, 371: n = A,T,C or G
tacttagggcgaattggagctccccgcggtggcggccgcccgggcaggtacgcgggtggaggggtagacatggaaagaaaggcagatcatgattaaaggttacagaaggagaagtagcaaggctttaatcctagagcccatcctcccagagaataaatggtaaaaatgtttgcctttgtgccttgggaagcgctaggctcctgctgctctttcatcaaaaaaaaaaaaaaaaaaaaaagtacctcggccgctctagaactagtggatcccccgggctgcaggaattcgatatcaagcttatcgataccgtcgacctcgagggggggcccggtacccancttttgttccctttagtgagggttaattgcgcncttggcgtaatcatggtcatagctgtttcctgtgtgaaattgttatccgctcacaattccacacaacatacgagccggga

SEQ ID NO: 2613 - DNA, 440 bp, Homo sapiens
  misc_feature 370, 396, 397, 399, 406, 410, 412, 419, 421, 429, 437: n = A,T,C or G
ggcgaattggagctccaccgcggtggccggccgcccgggcaggtaccactcagaagccttcactgtcaacttcggggacaccgaagaggccaagaaacagatcaacgattacgtggagaagggtacattggacatcctggactgattctgtaattttcgtatcttttttctcccatgttccctttatttgtcttttggttctgctttttgggagattttcttaacttgatctacctgaggctcagtcctcatctgtaaaatgctgataaaaggacctaccacctagcgttgctgtgaggtgtcagtgaaataaaatgtaaaatgcttagcacagtgaactttaataaatggtagttgtggttgcacatanaaaaaaaaaaaaaaaaaagggaaaannanttttaanaaananaaatctnanggtccctnggccgctntaa

SEQ ID NO: 2614 - DNA, 840 bp, Homo sapiens
  misc_feature 1, 2, 4, 5, 6, 8, 9, 13, 15, 18, 21, 24, 25, 29, 30, 34,48, 49, 50, 51, 53, 62, 65, 69, 70, 85, 92, 95, 98, 99,120, 125, 133, 142, 163, 277, 308, 311, 336, 337, 376, 388,392, 399, 403, 404, 406, 422, 425, 427, 435, 450, 454, 469: n = A,T,C or G
  misc_feature 495, 511, 519, 523, 535, 547, 550, 552, 557, 569, 574, 578,579, 580, 583, 590, 602, 604, 605, 615, 619, 623, 636, 643,650, 652, 656, 661, 664, 677, 678, 680, 688, 692, 702, 705,713, 722, 726, 741, 742, 743, 745, 749, 752, 760, 765: n = A,T,C or G
  misc_feature 769, 771, 792, 817, 824, 827, 828, 831, 839: n = A,T,C or G
nnannncnnactnanttnttntanncatnnaacnttcttctatcttannnnantttcttttnttnattnnatcattttattttgnttattgncanttnntttattcttattttcattagntggtncctaaacnctcctatanggcgaattggagctccaccgnggtggcggccgaggtacgcgggtcaactaaaagaggtatgggaagagactgatggattggatcctaatgacttttgaccccaagacatttttcaaatttacatgatgtcaatangttgatggattcctggatgaacaagaattanaanccctattttactaagaggagctttnngaggaaaagtttattaaccccttaaaaaatggaaagtanggatgatcctgngtantaaaatngggnnantaatgtaaaaggggcnttnantaaaatgnaggggcaaaccaatngttntattggaaattgaangggttttggtatttccttataaccanaaaagtaaccatggantatggggnttgnacctttccttgngtagggggaggngtntnttctnttgggataaagnccccnaacnnnctnaaaaaanaaaaaaaccagnanntttattcctntagngggnggtctccaaagcnattaagngccttgngngggnaggtnacnattttttatgganntncaagtccntaanctaagggttntcntttttcanccaacgtangggnaaaaaggaaaacctnnnanatancgnaaatttantttgnaaananaaattacttttaatttctggnctttttaacccaaaagggaaacaanagttggnatnnccntttaaaang

SEQ ID NO: 2615 - DNA, 499 bp, Homo sapiens
  misc_feature 2, 3, 4, 5, 6, 26, 490, 499: n = A,T,C or G
gnnnnntttgacgccgtatacgactnctatagggcgaattggagctccccgcggtggcggccgaggtacgcgggggttgtgactaggaaaggcatgggacgacatgtgtcccaggtgaggtatgtgccacaggcagttacggatgtgttggaggaggaaattccaggaaggggcaagatctggaacgaaggcctggagggaggttcccctgaaggatgctaaaggaatacgcttgaatccataggtgccatcgtggttgagacaagtgcaaaaaatgctattaatatcgaagagctttttcaaggaatcagccgccagatcccacccttggacccccatgaaaatggaaacaatggaacaatcaaagttgagaagccaaccatgcaagccagccgccggtgctgttgacccaagggccgtggtccacggtacctgcccgggcggccgctctagaactagtggatcccccgggctgcaggaattcgatatnaagcttatn

SEQ ID NO: 2616 - DNA, 494 bp, Homo sapiens
  misc_feature 2, 3, 4: n = A,T,C or G
gnnnaggcccgtatcactactatagggcgaattggagctccccgcggtggccggccgcccgggcaggtacagcccccaccccccgtccaaaggtcttgcgttgtaaatgccaccaccattgtccagaagactcagtcaacaatatttgcagcacagacggatattgtttcacgatgatagaagaggatgactctgggttgcctgtggtcacttctggttgcctaggactagaaggctcagattttcagtgtcgggacactcccattccccatcaaagaagatcaattgaatgctgcacagaaaggaacgaatgtaataaagacctacaccctacactgcctccattgaaaaacagagattttgttgatggacctatacaccacagggctttacttatatctgtgactgtctgtagtttgctcttggtccttatcatattattttgttacttccggtataaaagacaagaaaccagacctcgatacagcattggg

SEQ ID NO: 2617 - DNA, 491 bp, Homo sapiens
  misc_feature 2, 3, 11, 282, 405: n = A,T,C or G
gnnaagtcccnctctacgactactatagggcgaattggagctccccgcggtggcggccgaggtacgcggggccttccaccatgtgaggacacagcaagaaggggctgactctgaaccaggaagctgtgctgtgctcaccagacactttgatcttggacttctcagcctccagaactatggggttctgctcttgtcacccagactggagtgaagtggcacaatctcggctcactgcaacctccgcctcccgggttcaagcgattcccctgcctcagcctccanagtagctggactgcaggcgcacgccaccactcctggctaatttttgtatttttagtagagacggggtttcaccatgttggccaagatgttcttgatcttctcaccttgtgatccgcccacctnaacctcccaaagtgctgagagactaagacacctttctagacagagaggaggccgatggcagacattctcagataggtttgtagcta

SEQ ID NO: 2618 - DNA, 508 bp, Homo sapiens
  misc_feature 2, 3, 4, 6, 43, 71, 89, 140, 148, 162, 170, 179, 182, 191,232, 233, 303, 311, 324, 345, 401, 411, 430, 436, 461, 465,470, 475, 477, 490, 492, 495, 504: n = A,T,C or G
gnnnangcccgtatcactactatagggcgaattggagctccancgcggtggcggccgcccgggcaggtacncggggaggcattgaggcngccagcgcatgggcttctgctgagggggcaagcggagcttgaggaaaccgnaagataantttttttctctttnaaagatanagattaatncanctacttaanaaaatatagtcaaatccgttactaagatattgctttagcgnnaagtttttaaccgtaattttaataggcttaagattttaaccataaaatatgaagacttataagagtagcntgaggaangaaaagataaaangtttctaaaacatgacggaangttgagatgaagcttcttcatggaggcaaaacattaaaacctaaaaggtaccttcncccgctctanaacaagtggatcccccggngctgcnagaattccattatcaaaccttattngatncccgnccacntngaaggggggcccngnacnccacttttnttcc

SEQ ID NO: 2619 - DNA, 453 bp, Homo sapiens
  misc_feature 4, 421, 445: n = A,T,C or G
actnctatagggcgaattggagctccccgcggtggcggccgcccgggcaggtactggtgttgtgatcggaacgtgtcgatcccctcttctcatcactgctgctccaactggatttattactccgggaatggtctgagggggaaaaccaatgtgtttagcgtgcctgcccacctgcgcctgagcacaactatcctgcaaatctgacctgcccctcctgcacaggaaaccaccttcccctcccaattgatggttcaaacactgccaccgctgactgccctgcatctgtgggtctgtagaacagaaaggtagaacaacttattttttaggatttaacgacaaccggttgaaaaaacggtaggggtgtcatgctcacagagaataaagattttgtaggaaaaggtgcttgaactgcccaaggaanggcattttccttgtgcccggggtntggaaccc

SEQ ID NO: 2620 - DNA, 538 bp, Homo sapiens
  misc_feature 2, 3, 4, 7, 11, 286, 287, 339, 342, 344, 350, 359, 378, 380,397, 407, 412, 413, 415, 420, 427, 429, 435, 453, 457, 461,464, 465, 467, 469, 478, 479, 480, 487, 489, 491, 492, 497,507, 516, 519, 520, 530, 532, 535: n = A,T,C or G
gnnnagncccncgcatcgactactatagggcgaattggagctccaccgcggtggcggccgcccgggcaggtactatcaatgaagccttaccaaaggacgtgtctgaggatccagctaccaagtcaggattgttacccccaccacctgcgctccctccaagaccttgtccatcacagtctgaacaagtgtcggaggccgagttactcccacaagcttgagcagaagccccatcccaggcttgcagaaagtagtccagcaaagaaggatgtacctcggcccgctctannaactaagtgggatcccccgggctgcaaggaattcgatattaaagctttattngananccgttnaaacctttnaaggggggggggccccggnanccccaaattttttttgntccccttttnaaagnngnggggnttaaatntngccccnccttggggcggaaaaaanaatngggncannananttgggtttnnncttgggngngnnaaaanttttgttttnttccgggtngannaaaatttccncnaanaaa

SEQ ID NO: 2621 - DNA, 479 bp, Homo sapiens
  misc_feature 117, 205, 210, 252, 308, 312, 313, 324, 339, 349, 381, 392,402, 409, 421, 432, 437, 446, 465, 470, 478: n = A,T,C or G
ggccctaacactacactactatagggcgaattggagctccccgcggtggcggccgaggtacttttttttttttttttttttttttttaaatgtttttgttaaaaactaagacacatnttagcctaggcctacacccggtcaggatcattcatatcactgtcttctgcctccacaccttgtcccactggaaggtcttcaggggtgngatcnttaatactgagtgtcaaacttgacttggactgaagaatgcanagtattgttcctggtgtgtctgtgagggtgttgccaaaggagattaacatttgagntcanntggactggganaggcaaacccccctnaatctgggtngggcaccatctaatcagctgccagcgcagctngaataaagcangaaggagaanatggaanaatgacttgcanagttcttccanccttnatttttttnccgtgctggatgcctcctnccctnaacatcana

SEQ ID NO: 2622 - DNA, 461 bp, Homo sapiens
  misc_feature 16, 21, 23, 24, 28, 177, 184, 195, 222, 223, 227, 246, 252,253, 256, 275, 415, 417, 453, 457, 461: n = A,T,C or G
ctactataaggcgganctcancnncggnggcggccgcccgggcaggtaccccatgtcctcccacaccaaaagagatcagttctggcaagaaagctccaacgtgccttgatggtgctgttggtaggatgccttaggccaggcaccgtcccagcgatgttctgctggctgaggtacctnggcccgntctaaaaactnagtgggatcccccggggctgcagggannttcnatatcaaagcttatcgatncccgtnnacnctcgagtggggggcccggnacccagcttttgttccctttagtgagggttaattgcgcgcttggcgtaatcatggtcatagctgtttcctgtggttgaaattgttatccgctcacaatttcacacaacatacgaggcccgggagcataaagtgtaaagcntnggggtgcctaatgaagtgagctaactttacattaanttgngttn

SEQ ID NO: 2623 - DNA, 547 bp, Homo sapiens
  misc_feature 2, 3, 6, 232, 268, 290, 320, 325, 326, 341, 343, 344, 364,380, 382, 384, 387, 389, 392, 396, 397, 398, 422, 424, 428,433, 434, 437, 440, 457, 458, 460, 461, 462, 463, 466, 477,486, 488, 494, 495, 498, 499, 501, 504, 505, 511, 512: n = A,T,C or G
  misc_feature 519, 520, 521, 529, 533, 534, 543, 546, 547: n = A,T,C or G
gnnagnccctcaacactacttagggcgaattggagctccccgcggtggcggccgaggtacgcgggtatgggatcttaggaaaaatgagccaatcatcaaagtcagtgaccatagtaacagaatgcattgttctgggttggcatggcatcctgatgttgctactcagatggtccttgcctccgaggatgaccggttaccagtgatcccagaatgtggggatcttcgatttgcnttcctctccacttccgtgtcctggaaaaaccatgcnaggggggattttggcaaattgnttggaacatggcagatcctgaaattgtttnttgannctgttgaaaaaaaantnnttaaaaattttttttggttncaaattcccaaaaaancnanggnanaangggnnntttattttaaaaaaattttccccncnaaanaaaanncanaanggggggggtttttaaannannnntanaaagggggggnggccccccnanaaaaannccnntnttnntttttnnaaaaccnnntttttttntttnnggggggggnatnn

SEQ ID NO: 2624 - DNA, 471 bp, Homo sapiens
  misc_feature 2, 3, 4, 7, 11, 264, 275, 343, 354, 396, 431, 441: n = A,T,C or G
gnnnagncccnaacactacttagggcgaattggagctccccgcggtggcggccgaggtacgcggggacagcaacttccttgatccctgccacgcacgactgaacacagacagcagccgcctcgccatgaagctgctgatggtcctcatgctggcggccctcctcctgcactgctatgcagattctggctgcaaactcctggaggacattggtttgaaaagaccatcaattccgacatatctatacctgaatacaaaagagcttnttcaagagttnataagacaggtgatgcccgcttgcagaggctatggggaaatttcaaagcagtgttttctcaaccagtnacatagaactntgaaaaaacttttggactgatgatgcatacagtgtacctgcnccgggccggccgctctaagaactagtgggatcccnccgggcttgnagggaatttcgatatcaagctttatcgata

SEQ ID NO: 2625 - DNA, 460 bp, Homo sapiens
  misc_feature 205: n = A,T,C or G
ggcgaattggagctccccgcggtggcggccgcccgggcaggtacactaagaacctcacctcctaaatttgttaggtatcttgcaatgcggccactgagatggagagaggctgggagctggacgaacggccatctctccttccatcttggcctcggctctaagaacctaaatccctgactgggatgcgtgcgggagttcaatccangtatcgcctggcggtgctccccggaggcgcctgcgggaaaattcagctttccctctccacgacaggaggcgctgttttcgtggaaatcccccggctgcgaacctgggatccctgacctggatcaagtctccgaagctggcagagtccattctgcatcaccggtcttgggctttgaagaagcctaggagaaattccgcttcggccatcacgctatgaaaagtggatttttttttcttaagtcaatttttttttttt

SEQ ID NO: 2626 - DNA, 831 bp, Homo sapiens
  misc_feature 4, 10, 11, 12, 15, 18, 21, 22, 25, 34, 37, 39, 43, 48, 49,54, 57, 65, 66, 72, 76, 78, 79, 89, 98, 100, 106, 120, 198,203, 210, 251, 254, 256, 258, 263, 268, 277, 290, 293, 321,323, 329, 336, 343, 346, 356, 357, 359, 369, 373, 378: n = A,T,C or G
  misc_feature 386, 410, 415, 419, 420, 426, 428, 433, 438, 447, 448, 452,453, 465, 475, 486, 493, 495, 507, 511, 512, 528, 543, 544,577, 582, 594, 596, 597, 608, 625, 628, 633, 637, 639, 645,658, 675, 696, 713, 719, 721, 723, 724, 747, 755, 756: n = A,T,C or G
  misc_feature 757, 766, 768, 782, 784, 790, 808, 813, 814, 818, 830: n = A,T,C or G
attnatattnnntantanatnnttntttttttgnaantnaatntttannttttnggnaatttatnnaagttnggantnntttataaaanatatttttntnaaattnaaagttagttcccntatacgactcactatagggcgaattggagctccaccgcggtggcccgcccgggcaggtactttttttttttttttttnttttntttttgnccaacgaaattatttattgctagtcaggaggcccaggaccntcnanantgaanagtcnatgggcccntgtgcatgttganagntacacagggaatcgcttgttcacccttntnaagggnataaagncagaaanagnggcccaccannantggcctcatngggnccacnttccgggnggccacaaggggggccccagggcnttggntgcnntcaaanangaacnctcanggccttttnncaanncttttggcattntcccaaaggntaccctttatnttggaanangccccccccacnttgnnttttgggaatggggcnaaaagccttttttannggctttttgctttttgggggaattttggggttngaaanttttttggcttncnnattggaaaatnaaaaaacatttgttttnttnggggnttgntnttttgnttaaggggggaancaaaattggtatttcanttccaaggggaaaaggggggncctttggtttggaaaanaccgcncncnnaaattgggggtacccttttgggnccttcccnnnattaaaatngncaaaaaaaaggggnangggggnttgaaatttttttggaancttgnnttgntgggggccacant

SEQ ID NO: 2627 - DNA, 488 bp, Homo sapiens
  misc_feature 60, 64, 68, 74, 77, 85, 87, 115, 118, 119, 173, 185, 188,197, 199, 216, 231, 233, 394, 398, 431, 432, 434, 444, 451,461, 472, 474, 476, 478, 487, 488: n = A,T,C or G
tatcactacttagggcgaattggagctccccgcggtggcaggcggccgcccgggcaggtncgcnggantaaatngantgtaatangncttcagtaactatttgaggaatgaaatngtnnttgatatattgatttaactgagcaaatccataagtgccacgcttggagtaaagnacagggaatctnatnttttgggtnanttcaaacaaggtagganaccatccactatctntnaaggacaaaggagatttgagtgacaaacatgttccagaccatccaatggtgttattctactacttcatcccagctagtaaaatggggcaataagaaccaaaaagcaggtactgtccctatgtaagtagacttcctagtcctggccaaaacatgaaacaccntcanaaattccaaatatcaatacagtccctcggccgnntntagaactagnggatccnccgggcttgnaggaattccantntnangcttattcnn

SEQ ID NO: 2628 - DNA, 406 bp, Homo sapiens
  misc_feature 4, 6, 258, 295, 306, 388: n = A,T,C or G
agcncnccgtaataccgactcactatagggcgaattggagctccaccgcggtggcggccgccctctgccttttttgttctacgtgggccctcaatggattggatgacacctgtccgcactggtgagggtaaatctttacttggtcttctgattcaaatgtcaatctcttctggaaaccccctcacagacacacctaagaaataacgcttcaccagctctctgggtagtccttagcccagtcaaattcacatacaaaanaaaaaaaaaaaaaaaaaaaaaagtacctgcccgggcnggccgctctanaactagtggatcccccgggctgcaggaattcgatatcaagcttatcgataccgtcgacctcgagggggggcccggtacccancttttgttccctttagtg

SEQ ID NO: 2629 - DNA, 491 bp, Homo sapiens
  misc_feature 2, 5, 11: n = A,T,C or G
gnaangcccgnatcactacttagggcgaattggagctccccgcggtggcttgggacgtgccatggcttgggagaactagtgaggaacatatttctccatgccagtcctcttcctaaaggcccccgcgtacctcggccgctctagaactagtggatcccccgggctgcaggaattcgatatcaagcttatcgataccgtcgacctcgagggggggccccggtacccagcttttgttccctttagtgagggttaattgcgcgcttggcgtaatcatggtcatagctgtttcctgtgtgaaattgttatccgctcacaattccacacaacatacgagccgggagcataaagtgtaaagcctggggtgcctaatgagtgagctaactcacattaattgcgttgcgctcactgcccgctttccagtcgggaaacctgtcgtgccagctgcattaatgaatcggccaacgcgcggggagaggcggtttgcgtatttg

SEQ ID NO: 2630 - DNA, 493 bp, Homo sapiens
  misc_feature 116, 122, 129, 144, 186, 201, 206, 214, 223, 261, 273, 277,279, 280, 281, 284, 288, 289, 290, 328, 342, 356, 360, 361,362, 383, 384, 396, 401, 414, 417, 421, 432, 438, 451, 452,458, 491: n = A,T,C or G
ctatcactacttagggcgaattggagctccccgcggtggcggccgaggtacattttttttctttttttttttcttcgagatggagtcttgcactgttgcccgggctgggttgcggngagccnagattgngccattgcactccancctgggcaacaagagcgaaactccatctcaaaaaaaaaaatnaacaaaaaaaaatcnttgantttagttntatgacctnacagggtcagtataggagtatcactgtgaaaaggttanggacattggttntctntnnnttntctnnnagatggagcctgggcaacaagagcgaaactccatcttnaaaaaaaaaaatcncctgccaactgaanaaannnaaaaagggttcttgcccgggnngcccggttttanaactngggggatcccccnggntgcnggaatttctanatcaancttatcgataccnnccgacnttgagggggggccccggcccccaacattttgtncc

SEQ ID NO: 2631 - DNA, 870 bp, Homo sapiens
  misc_feature 1, 13, 18, 30, 31, 33, 38, 39, 40, 42, 46, 48, 56, 58, 60,61, 64, 76, 80, 86, 96, 100, 101, 102, 110, 111, 117, 118,119, 126, 131, 274, 322, 352, 353, 361, 379, 393, 425, 428,433, 452, 454, 461, 466, 481, 483, 495, 499, 501, 509: n = A,T,C or G
  misc_feature 514, 518, 520, 526, 528, 531, 532, 534, 544, 558, 563, 565,567, 585, 592, 623, 626, 628, 630, 637, 646, 648, 655, 666,668, 671, 674, 677, 678, 685, 689, 696, 697, 698, 703, 704,710, 724, 727, 731, 745, 746, 747, 748, 750, 751, 759: n = A,T,C or G
  misc_feature 762, 766, 774, 779, 780, 786, 792, 793, 797, 799, 800, 801,807, 809, 810, 813, 820, 823, 836, 840, 841, 845, 853, 854,856, 858, 859, 860, 864, 866: n = A,T,C or G
ncaaaccttatcnttttnttaatatcatanntnaatannnantacntntcataatnananncanatatactttaanttcnatcgtnttaacattangttnnntcattatnngtttannnaatccgngggcnaatacgactcactatagggcgaattggagctccaccgcggtggcggcccgaggtactaaggtgagatcatttaattttgactaaagatacttttgttttgttttgtttgagatggagttttgttcttgttgcccaggctggantgagactccatctcaaaaaaaaaaaaaagtaccaaaatgtttaccttnatagttaaaattacaaaaaattctttttgnnttaacgtnaattttatttttccccanagtttttctgtaantgaaaataatgccaccctaattttttataatngantacangtggcccttggctattaancnactcctntaacnttcctttttaattcncnttgacccctttnttcntngttaaagnggatngttncnaaaggngntgnngnaataaattgncttcaattgtttgnaattngntnggaaaaccttaaaatttnacaaaantatttttcttttaataaataccaaaattttnttnananaaaaccngattaggancntttaaanaaaaagcccantnagntcnttnnctttttnaatntattatnnnaaatnnggccangaatttcggggggnacntttnttttccacccaccnnnngnnagttttanatnattnatttaccnttaannaaattngccttnnttanannnaaccantnnccnttatttnggnggccccttttttnattnnttgnacattttnngnannntttncnatgg

SEQ ID NO: 2632 - DNA, 789 bp, Homo sapiens
  misc_feature 4, 8, 10, 11, 13, 14, 19, 23, 27, 30, 31, 32, 35, 36, 37,43, 45, 47, 48, 49, 53, 55, 63, 65, 69, 76, 79, 81, 89,103, 107, 117, 120, 121, 124, 131, 176, 184, 315, 333, 415,548, 550, 571, 621, 639, 651, 655, 659, 666, 673, 695, 722: n = A,T,C or G
  misc_feature 725, 746, 752, 753, 758, 763, 769, 777, 782, 783: n = A,T,C or G
ttantaananntnnattantccnttanacnnnatnnnatttantntnnntcantntttattantntatnaatatanatnantatatatnatttttatattttnttcnaattccagtntannatnggtctanacgatcactatagggcgaattggagctccacccgcggtggcggcncgcccggncaggtacctgttggctttctgcagagatgcttacttttcctctcctatcagagtttaatgtcctgggactctgacattttggcaagtgttttcttaacccgcagggctgtcagccttgatgcaggattgtnaagcccaagcattcttgntcatgaagtttttcccatcttgcctttagacactcatcactgcttccaccggtttgggaaattgaagggggcggtaacttcnttggatggcaccaccaatcttcccctcatggtcccttcataaggaggggtcacttggggcacttagggtcaatgaataaagggaaagcttgggtatttctttcccactaattaccctccctggataccaccantnttcccgtaggccaaacccttnccccaaaaagggaattgaaggggccccaaaaaaccttaattaaccaatgnttcaaagccccagggggngtggtttaaagnaacnttgnggaaaangctggantttttcttggttttcaaaggcnttcttctggtaccaaaccaaccttttnttngggaaggggccaataatttangcccgnnttttngggtnggcccncaaccttnctganngtgggg

SEQ ID NO: 2633 - DNA, 763 bp, Homo sapiens
  misc_feature 2, 3, 7, 10, 13, 15, 17, 21, 23, 35, 36, 40, 43, 50, 55,57, 63, 64, 66, 67, 70, 76, 79, 83, 88, 91, 105, 107, 117,121, 176, 215, 222, 237, 245, 291, 293, 298, 299, 309, 311,318, 329, 374, 391, 405, 426, 448, 454, 468, 469, 474: n = A,T,C or G
  misc_feature 476, 479, 491, 499, 525, 533, 539, 541, 550, 553, 555, 560,562, 563, 569, 581, 582, 583, 591, 592, 596, 608, 615, 626,633, 650, 655, 659, 662, 665, 669, 681, 695, 696, 702, 713,716, 734, 739, 752, 753, 757, 762: n = A,T,C or G
tnnaatnttngantntntttnanttcttaacttannactnaanatatctnaaaancnctttannannaanttaatnaanttanatatnagnaggagcggaggggnangtcctctacnatcntatagggcgaattggagctccaccgcggtggcggccgccacgctggttttgcatnttacaggagacgctcgtagccctcgcgcttctcctcggncaattcncggaagaagtggctnacgccttncagagccacatcatcgcggccgaaatagaagcccagagagaggtangntgtanngaggccttgnangtacctngggcacgcctntaagaactaggtggatccccccgggctgcaggaattcgatatcanagcttatcgataccgtngtaccttcgtaggnggcgggctccgggtaccacanctttttgttttcccttttaagntgaagngggttaattttgcnncgctntnggncggtaaattccntgggttcnattaggcctggtttttccttgctgcnagaaaaantttggntntaattcccngcntncaacnannttttcncaacgacctaannncattaacnntaanccctccgggggnaggccanttaaaaagttngttaaanaggcccttggggggggntggcncttnaanatngaantttgaagacctnaaaactttccaccnnttttanaattgggctgnttnggccggcttcaaccttgnccccnggctttttcccannttcntgggng

SEQ ID NO: 2634 - DNA, 769 bp, Homo sapiens
  misc_feature 3, 8, 19, 30, 31, 38, 39, 40, 42, 45, 48, 49, 50, 51, 59,63, 64, 66, 77, 102, 111, 114, 115, 213, 274, 344, 388,452, 453, 474, 475, 484, 497, 512, 521, 527, 534, 550, 555,562, 580, 584, 623, 628, 639, 642, 649, 659, 674, 684, 690: n = A,T,C or G
  misc_feature 691, 700, 704, 720, 726, 740, 762: n = A,T,C or G
ttnctttnttatttttccnaatttaatttnnattattnnntnatnaannnntattaaanaatnntngttataggggnttaaaaggggggggggggggggggnggggggagntanntccgaccctatacgatcatatagggcgaattggagctccaccgcggtggcggccgctctagaactagtggatcccccgggctgcaggaattcgatatnaagcttatcgataccgtcgacctcgagggggggcccggtacccagcttttgttccctttantgagggttaattgcgcgcttggccgttaatcatggtcataagcctgtttcctgtgtgaaaattgttatcncgctcacaatttccacacaacataccgagctcgggagcataaangttgtaaaagcctgggggtgcctaatggagttgagccttaacttcacatttaaattgccgttgnngcttcacttgcccgctttttnncagatcggngaaaacccttggntccgttgcccaagcntgcaatttnaaatgnaaattcnggggcccaaaccgccntccgngggggangaagggccgggttttttngccngttaatttgggggccggccttcttttaaccgcctttttnccttnggctttcaacnttngaccttncgcctttgancggctttcggggttncggttttccnggcttnngcggggctnaagnccggggttaattcaanaccttnaacccttcaaaaangggccggggttaaattaacctngggttta

SEQ ID NO: 2635 - DNA, 723 bp, Homo sapiens
  misc_feature 3, 4, 11, 16, 21, 22, 23, 24, 36, 39, 45, 53, 58, 66, 69,72, 75, 84, 86, 93, 94, 103, 106, 108, 111, 112, 115, 123,329, 333, 368, 379, 390, 407, 415, 430, 441, 469, 496, 497,503, 506, 529, 551, 562, 571, 576, 585, 592, 612, 613: n = A,T,C or G
  misc_feature 625, 656, 658, 660, 671, 674, 677, 691, 695, 696, 700, 709,714, 722: n = A,T,C or G
aanntttttgnaatgntctcnnnnttttaacctttnttngattanatttaatnttttntaatattnatnatntancaggggggntnaaacggnnggaattttnttngngannaangcctatcnctatacgatcatatagggcgaattggagctccaccgcggtggcggccgaggtacgcgggggtgcttccggtgcggaggtcagggacaagatggtgccaccggtgcaggtctctccgctcatcaagctcggccgctctagaactagtggatcccccgggctgcaggaattcgatatcaagcttatcgataccgtcgacctcgaaggngggnggcccggtacccagcttttgttccctttagtgagnggttaattgcncgcttggccgntaatcatggttcatagnctgattcnctggtgttgaaaaantggttatccgnatcacaatttccacacaaccattacgangcccggggaggcattaaaaggtgttannagcctnggnggtggcctaaattgaaggtggangctaaccctcaccatttaaatntggctattgcngctcactgnccccngcttttttncaagttncggggaaaaacccctggttnngatgcccatgcnttggccattttaaaatggaaaattcgggtcncnanaccgtcttccnggntgnaagaagggccgggntttnngccngttaatttnggggncgccctcna

SEQ ID NO: 2636 - DNA, 873 bp, Homo sapiens
  misc_feature 1, 3, 5, 7, 10, 13, 20, 23, 25, 39, 40, 43, 44, 46, 48, 49,58, 68, 71, 72, 74, 82, 86, 87, 88, 107, 108, 112, 113,115, 118, 135, 177, 221, 229, 283, 296, 297, 304, 318, 321,324, 338, 351, 359, 361, 363, 369, 378, 380, 394, 397: n = A,T,C or G
  misc_feature 416, 418, 425, 430, 448, 453, 456, 462, 463, 471, 487, 499,508, 510, 515, 528, 543, 544, 545, 563, 580, 584, 585, 592,594, 596, 598, 605, 616, 618, 621, 623, 631, 639, 651, 661,666, 667, 668, 675, 681, 684, 686, 690, 692, 711, 718: n = A,T,C or G
  misc_feature 720, 723, 725, 734, 738, 748, 767, 774, 781, 785, 794, 797,803, 804, 813, 825, 826, 831, 832, 833, 834, 837, 843, 845,848, 853, 856, 858: n = A,T,C or G
nantncnttntanctttctnctncntttacctctttccnntanntntnntaataattnttaatctttnttnntntttcttcntatnnnggggggggggggggggggnnggtnntntgngcctctactatcctatngggcgaattggagctccacccgcggtggcggccgaggtacanaagggcggtcctgctgacttggctgggctagaggatgaggatgncatcattnaagtgaatggggtgaatgtgctagaatgaaccctatgaagaaggtggtggatanaatccagagcaanntgggaanaatgtcacactttntanttntgttaaaaagaaangccctaatgattnaattttgncnangcctantgtaataantnccccttaatttcgnttntcgcatcacccttgggccntngaattcnctacntgtgtaacaaccccctcntcccnagnaatttnnttaaatangaaaaggggaaattanggttggggatgngaaaggttncntatanctcaattgtaacnttcggccaaccattnnnggccaaaaaaaaggaaancctgggggtccccccanccannttaactncntngnctccctntgggtctgggncncgncnttccttanggaaaacntttatggttggngactcctccnccccnnnggggctntgccanatngnatantntctcggaatattaccaaanacctttnantcncncattaaccnccgntccagaaacnccttccgtaaggggggggngggggcnccccggngatnaccccccantcntttttnnttttccccnttttagttgaannggggnnnnaanattgcngnccnctttnggncnttacaattaatcggg

SEQ ID NO: 2637 - DNA, 846 bp, Homo sapiens
  misc_feature 1, 3, 15, 17, 19, 21, 22, 23, 27, 28, 29, 35, 38, 39, 40,41, 43, 44, 45, 46, 47, 55, 58, 66, 69, 70, 71, 72, 76,77, 78, 86, 88, 89, 90, 94, 115, 117, 118, 119, 120, 123,201, 206, 261, 310, 311, 317, 321, 343, 344, 350, 357, 360: n = A,T,C or G
  misc_feature 383, 387, 396, 399, 402, 408, 418, 419, 422, 425, 451, 460,465, 467, 474, 479, 486, 487, 504, 505, 506, 507, 515, 519,524, 539, 548, 549, 551, 556, 557, 564, 571, 573, 589, 596,601, 606, 611, 616, 622, 640, 649, 651, 653, 657, 660: n = A,T,C or G
  misc_feature 669, 675, 678, 680, 683, 684, 689, 692, 694, 706, 709, 712,721, 727, 736, 742, 743, 749, 758, 765, 767, 768, 776, 777,780, 781, 782, 784, 786, 789, 791, 794, 802, 803, 809, 819,822, 824, 828, 830, 834, 839, 845, 846: n = A,T,C or G
ntntgtttttttatntntnannnttgnnnattttnttnnnntnnnnncggttctnttntttaattntcnnnntatnnnattggggntnnngggngggggggggggggagtctcgncnnnnctntcttctctcatatagggcgaattggagctccaccgcggtggccaaagatcaaggcacttgggagagagtcaacaatancattntaatactacaagcagacttctcatggggaggaagagagggaagaaaaatgggcanagaggaaaaaggacattgtatttcttgagggtcagaaagagcctactcnncaggantggnagtttattctggtttgggaaannaagcgngtgcganctnttgtaattttaagccactaaggnaagnaaaggaagnaanctngggtgngcctttgtanntanttntccccaccaaattttcctctccccanagataggtntgttnantaaaacnccccnaccccanntctttgtaaacagttcnnnnaatgtaangaanccccnaaggggcaaggtgtntttttttanngncatannagaaatngttttgngntataattaaaaaaaantcccagnggaantttgnctttnaatcnataacncttggtcttcccgggtantgtggatcnangnttanaantatatcctntttgcnccncnaannctccntcntnttgtctttgaancangtntttttaggnctttgnctattgaanacttgnncttatntttttcccnccacttntnnactccttnnggnnncntnttntntgnaaaccttnngttggnaattcccccnggngncttngnattnggtantatccnn

SEQ ID NO: 2638 - DNA, 790 bp, Homo sapiens
  misc_feature 1, 2, 4, 10, 11, 15, 18, 20, 26, 27, 38, 39, 41, 42, 43,45, 46, 47, 49, 55, 63, 64, 68, 77, 78, 79, 80, 81, 87,89, 93, 97, 104, 106, 116, 118, 120, 124, 130, 135, 344,345, 362, 363, 400, 406, 415, 426, 435, 473, 478, 481, 485,498: n = A,T,C or G
  misc_feature 501, 512, 520, 527, 532, 537, 562, 569, 577, 580, 584, 591,603, 611, 612, 613, 615, 629, 634, 640, 656, 659, 665, 671,674, 689, 692, 694, 700, 701, 703, 710, 721, 722, 723, 733,737, 745, 754, 761, 778, 790: n = A,T,C or G
nnanattcgnntttnctncntatatnnatatttaattnntnnnannntntatttnctattcanntttntatttttannnnngggtgntncaantacnattatcntnttggaatagngnangtcncgcgtnatacnactcactatagggcgaattggagctccaccgcggtggcggccgcccgggcaggtacaggtccacctggctgctggtcaggcctgcggaccacctgttaatcgtgtcccggctcagtgcagcgatgactgtgttcatcttccccttgtccggaaggatgaagaagacagttcccattgcccacgttagtttcatcttgcaccagcttggnnagggggcagtctccgcnnttcatggaagggtaactggatggtgcttcgacttgcnaacatntatgggccnccttcacacancagtttgtncttcgttccacattagtaagtgttcttccttcccctgngttgnctntgcnccagtgtacaaanagngggcttgttgnttcccatngttgccnctttnttganaaggaaaagaattattatgttttgnaacccangggaccgnagnggantgtggcnttgggggccttntttcccannntncccctggaaaatanctaangttctngaaccaaatttatttnccncccatngttggncantttaaatatctttangancnattaanncntggtttngaatttcttgnnncttggcttgnggcnttgttttngcccccaanattcccntggggaaaaaattatcnattaaggctccn

SEQ ID NO: 2639 - DNA, 765 bp, Homo sapiens
  misc_feature 2, 4, 5, 6, 8, 9, 15, 16, 19, 21, 24, 26, 36, 38, 51, 64,65, 67, 69, 72, 73, 83, 88, 90, 96, 109, 110, 111, 117,118, 121, 222, 235, 308, 319, 329, 340, 355, 377, 379, 406,471, 481, 499, 506, 523, 537, 539, 554, 564, 589, 592, 595: n = A,T,C or G
  misc_feature 607, 620, 625, 627, 643, 649, 650, 655, 658, 666, 671, 675,680, 683, 684, 703, 709, 717, 731, 742, 743, 746, 761: n = A,T,C or G
cnannncnntcttanntcntnttntnttcttggacntnttctttttttttnatttaatcttttnnantnatnnaaggggattnggggngngggggngggggggggggtnnnagcctnnacnatcctatagggcgaattggagctccaccgcggtggcggccgcccgggcaggtactttgtccagccctggtcatcaggaatctgaattaggactagagcatnaaagccttaaggnaataaagcaaagcatttgaacaaccttgtcctctgaccattaacttcgttttgaggacctctgcagaaagtgngaaagttccanggacaggggncagggtgtttngggatccccgctgcnttccttctatgttttgttctcntntctctcaattctcacacaccccctacnatatcccgctcaattaccaactttcagaaagaagccttttgaatgcaaccaccaaaagattatantaccctgggntgttcaccttattttagnaaaccangggatataaaggaatgnacaacctctttggntntttgggggattccangaaaagttgnaacaagtaaaaattggatttaaacnaanttnaaaaaactttcnagctttccttggnaaacnanaggaattttatttttntggganngggtngcnttgtgccnatttnaacnaaggnccnnaagttgaaaaaaaattgtngccttngctttagnaaacccttgggganaaaaccggttnnacnttcttaaaggggcantttt

SEQ ID NO: 2640 - DNA, 548 bp, Homo sapiens
  misc_feature 4, 180, 334, 352, 407, 438, 439, 446, 453, 457, 460, 461,469, 485, 488, 494, 506, 507, 526, 528, 537, 540: n = A,T,C or G
gccnatcactactatagggcgaattggagctccccgcggtggcggccgcccgggcaggtaccaactgaaaaataagacaaccaatcccatcatggtgccaaccactctagttgtcttgggaaagtcacttatttatccatcttggctttcttgctcaaaaatgatggatagctacacctnacagtgaggattcagtcatgtaagccaaagtgccttgaagacaggaagccagacattataggagcataatttttgccctgaaatgcatttggtatgggttgggcatcagatgtttctgatttgtgaattagtctgagaatgttagacatgcaantggtttaaggatttgctngggagcaaaacagaaccatgttgtgtgttttatggggtaatcagccagtttttgngcaaaccaacccaattggcttgaaactttgnnacccttntggcccncttnttnnaaactagntggggatccccccccnggncttgcnaagggaatttcnnattattcaaagccttattngnattaccccnttngaaccttt

SEQ ID NO: 2641 - DNA, 512 bp, Homo sapiens
  misc_feature 2, 3, 4, 5, 289, 302, 317, 319, 321, 330, 341: n = A,T,C or G
gnnnnagcctatcactactatagggcgaattggagctccccgcggtggcggccgaggtacgcggggactctcgtaggactgctctacactgggcctgtgtcaatggccatgaggaagtagtaacatttctggtagacagaaagtgccagcttgacgtccttgatggcgaacacaggacacctctgatgaaggctctacaatgccatcaggaggcttgtgcaaatattctgatagattctggtgccgatataaatctcgtagatgtgtattgcaaacaccgcttttccanttttcttggttantagtgaagaattttncnantgggtggcnaaacctgttgncccatggttgcaagtcatcgaagtgcacaacaagaaggaacattttgcaggaacacctgatgaggctgcacccttggcggaaagaacacctgacacagctgaaagcttggtggaaaaaacacctgatgaggctgcacccttggtggaaagaacacctgacacggctgaaag

SEQ ID NO: 2642 - DNA, 485 bp, Homo sapiens
  misc_feature 5, 444, 460, 463: n = A,T,C or G
tatcnctcactatagggcgaattggagctccccgcggtggcggccgcccgggcaggtcaagactgtaatgagctatgattgcaccactgcactccagcctaggcgacagagctagattccatttcaaaaaaaaaaggtggtgatggtggggcccggcatggtggtttacacctgtaatcccagcactttgggagtgctgaggtgggagaattgcttgatcccaggagttcgagaccagcctgggcaacattgaaagaccccgtctcttaaaaaaaaaaaaaaagagaggtaatggtggctccctttctctcatcaacacactctgggggatgaaaaggatgataatgtctatgtgtgtgatagattgtagaacgactgccactgtgttgagtgaagaaaaggagtatgtctgctgaacagattaacttctgggtctccaatcantatgtgttggtggccntanggggactgcatgactttaactt

SEQ ID NO: 2643 - DNA, 505 bp, Homo sapiens
  misc_feature 2, 3, 4, 5, 7, 327, 434: n = A,T,C or G
gnnnnangccgcgtatacgactactatagggcgaattggagctccaccgcggtggcggccgtggcgggggtcacaggcagccatcatgttcttggcatcgaagacctgctgggtgagttccggcactgtgagagctcgatactgctggcttccacggctggtgagaggggcaaagccaggcataaagaaatggagacgtgggaaggggaccatgttgactgccaacttgcggaggtcagcattgagctggccagggaaacggaggcaggtggtgacaccactcatggtggctgagacaaggtggttcagatcccccccgcgtacgcngggtggagaagggctgctttttttcagtcctacattccttcattttttttttcattcttgaattcattgttttgtgggatctaagacccaggggtcatttgagaggnttgacagtatcttttctgaccagttgccacatgacttgcttgaccctgagcctgtggaaatggcataggga

SEQ ID NO: 2644 - DNA, 488 bp, Homo sapiens
gcctatcactactatagggcgaattggagctccccgcggtggcggccgcccgggcaggtacgcgggggcccctgcgggcctctctccgtcgccatggaaacgaaagcggccaagtagagctccgtcctgacgcgccgcctcccgtgggctccggccggctaagccgcggcggacaactatgctgaaagccaagatcctcttcgtggggccttgcgagagtggaaaaactgttttggccaactttctgacagaatcttctgacatcactgaatacagcccaacccaaggagtgaggtttgagtcctgctggccggccctgatgaaggatgctcatggagtggtgatcgtcttcaatgctgacatcccaagccaccggaaggaaatggagatgtggtattcctgctttgtccaacagccgtccttacaggacacacagtgtatgctaattgcacaccacaaaccaggctctggagatgataaaggaagcc

SEQ ID NO: 2645 - DNA, 520 bp, Homo sapiens
  misc_feature 4, 8, 11, 21, 43, 52, 165, 190, 334, 341, 351, 359, 370,375, 382, 410, 430, 432, 434, 437, 445, 451, 484, 485, 486,490, 500, 502, 504, 516, 518: n = A,T,C or G
gggngccnctntctactatanggcgaattggagctccaccgcntggcgggcngcccgggcaggtacctgctgtgtgctggacaatgttctgggtgctggagatgtagtcgtgaacaagaacaagccctgagcttacattcaccagggctagtgactgaagacagncagcaaacagagaaacagatgcatnaacgggatcatttcagaagccagaattgttacagagaaaataaaccaggggtccagtgcagcaagtggcattagggtggcaggtgtataacatgggccaggggggtcaggacgaccactctgaatagtgacattggagcacacnttatttngtgttttggnggaaaagnggtgacccacnccaangaaaggnacttgccaagtacttttggcccttggangacctgttgaaccattgtangnanttnccaagganggggangaaaaaattggggccctttattattacgggccnnnaaanggaattaagnantnaaaattgattantngc

SEQ ID NO: 2646 - DNA, 544 bp, Homo sapiens
  misc_feature 3, 76, 123, 124, 127, 128, 129, 133, 135, 139, 144, 149,154, 159, 160, 161, 169, 195, 207, 318, 391, 408, 431, 432,449, 455, 457, 472, 475, 479, 500, 524, 525, 526, 527, 544: n = A,T,C or G
gcncccacccttagggcgaattggagctccccgcggtggcggccgaggtacttttttttttttttttttttttttncttttttttttttttttttttttttttttttttttttttttttttgnnttnnntgtntnactnatttnatgtnatcgnggggnnncaaaggcntttggtctgaaaaaatcaaactgctnaataaaatgccntagtaagtccaactatatggtttcatgtaggggtaaaagtaaccattgtggaaggattacgataaaactgtgtgacaataaatagaataaaagatggcaaaacaatctgtnaattacaaagtgttataaaaatgcatttgaatttctaggtgttcttaccactttccatattcctcattggccncaatgggggggaccctncccttccttaaagttgggcaagnnaaaaaaaagggtttccncccccncnttggcttgaaaggtntgnggcnaaaaacccttttccccaaacntttttaaaaaaaaatcttttatgnnnnaccccccccccaaaatn

SEQ ID NO: 2647 - DNA, 531 bp, Homo sapiens
  misc_feature 16, 73, 93, 186, 189, 218, 227, 232, 264, 270, 316, 329,361, 371, 387, 403, 433, 448, 458, 459, 464, 469, 471, 489,501, 522: n = A,T,C or G
ggggcgccgaacactnctatagggcgaattggagctccccgcggtggcggccgcccgggcaggtacttttttnttttttttttttttttttgntaaatttttagtatcaggatgatacagggttttatagaatgagttaaggaggagtccctctttctcatttcagggcttatttgactggtaggnttntaattactgcttcaatttcattacttgcnttctgttcnattcnaatatttcttgttccttccttgttcaactttngttcangtcttccttgttcaattccttgtgttttccattaatttattcattncctctaagttcgngtaaaataagaatatgctttatagtagcttcntgagggatcnctttgtatttcttggngggggatctatttggngaatgttccacctttttattaaaattttcntaatttgtgcctttngtaatgggannccttntctantncttttgtcttccttttgnttaaaattcctnagcctaaggtgggtttcttanttcaaattc

SEQ ID NO: 2648 - DNA, 470 bp, Homo sapiens
  misc_feature 2, 293: n = A,T,C or G
gncctatcactactatagggcgaattggagctccccgcggtggcggccgaggtactggacagagctaggaaagcaaacccatttgcttcttcctgcaggaaaccccttgaggttaagaccccacaatcacatgaggatggagtggctcaccctcagtcaacaggccagactcaaggggttcctggcaagtcatttctccctcaggccttcggtttcctcacctacaagatgagagggctggaccagatggaaattcagggggtaagggggatgtcctcgctcagcccaccccnacccccacgggaccctggagcctccatcccagttcccaccacgcgcctgctccacaaatcctacccaaggtgctgtcatctatatgatctcagtatttttaaacattcagcttccagcccatatggtggttcatgcttgtaatatcaactgtttgaaagaggcgctctagaactagt

SEQ ID NO: 2649 - DNA, 551 bp, Homo sapiens
  misc_feature 2, 17, 135, 149, 155, 161, 163, 210, 223, 224, 229, 238,241, 254, 264, 265, 269, 279, 280, 287, 298, 327, 330, 331,343, 349, 355, 356, 360, 361, 364, 382, 384, 390, 393, 395,396, 397, 400, 426, 427, 428, 436, 438, 445, 447, 449: n = A,T,C or G
  misc_feature 450, 454, 459, 460, 467, 470, 476, 478, 480, 486, 492, 503,521, 524, 526, 531, 537, 539, 543, 550: n = A,T,C or G
gnccgctaatacgactnctatagggcgaattggagctccccgcggtggcggccgaggtacttttttttttttttttttttttttggcagctcaacccttctttaatgtcatccagggagggggccagggatggangggaggggttgagnagccanaggcanantatttttgggtgggattcaccacttttcccatgaaaaggggaagacntgctttttttggnncaaancatttaaanaanacaaagggtttgntgaaacattnnaccnccggggggannagacatnggtattggccnctaaaaaacaatggccccaaaaaaattcncanntccctttctccntccatngtcatnnacannctntatgccaccccccttttnanaatccnctnannnggntagccctacattttttgacccccccnnntaggggtnantcccccnantnncctngaaannacccttntanggaaancncncaaatnttgaanccccaatcaanatcctcttacaaaaaaanatnangggtnccccangnaaantgggaant

SEQ ID NO: 2650 - DNA, 454 bp, Homo sapiens
  misc_feature 4, 33, 39, 56, 71, 415, 442: n = A,T,C or G
actnctatagggcgaattggagctccccgcggnggcggnccgagggacttttaagnaaagggcggggtttnactatgttggtcaggctggtctcaaactcctaacctcgcgatctgcccgccttggcctcccgaagtgctggaattacaagcatgagccaccatacccggcctgatacttttgcttttcttattgaggtataaaatgtaagcaccttaaaattcccttcccttatatgaacactgcattttgctggatttttcagacacttaatttcaacaaccaagtgaataactcttaacatggaaattagagcttggtcccagtgactcagagctaaggctaatattgagcctgcagaagaaatttaataacggccttgttagttttttctggggagtctctcctgcagatntcccagccttctcactgaagccatggnagaagcctattc

SEQ ID NO: 2651 - DNA, 463 bp, Homo sapiens
  misc_feature 2, 6, 9, 11, 21, 23, 25, 27, 31, 61, 211, 245, 283, 337,340, 353, 359, 363, 370, 379, 409, 436, 445, 446: n = A,T,C or G
gngccnaancnacttctatangncnanttgnagctcccgcgcggcggcggccgacgtacanatggggtcttgctatgttgcccaagctggtcttaaactcctggcctcaagcaatccttctgccttggccccccaaagtgctgggattgtgggcatgagctgctgtgcccagcctccatgttttaatatcaactctcactcctgaattcanttgctttgcccaagataggagttctctgatgcantaaattattgggctcttttagggtaagaagtttgtgtntttgtctggccacatcttgactaggtattgcctactctgaagacctttaatggnttncctctttcatctnctgagnatgnaacttgnaatgggcanctatccaggtgacttgttctgagtaagtgnggttcattaatgttttatttagctctnaagcaaganngatatacttcaggactt

SEQ ID NO: 2652 - DNA, 539 bp, Homo sapiens
  misc_feature 30, 94, 178, 199, 225, 276, 310, 334, 354, 378, 401, 416,424, 435, 450, 455, 464, 465, 470, 476, 494, 495, 501, 509,516, 532, 533, 538, 539: n = A,T,C or G
ttgaaggcccttatacactcctatagggcnttttggagctccccgcggtggcggccgaggtacgcggggaggtgtgccctggtgcataaatagntactcagctgtgctggcacactcagaagcttggaccgcatcctagccgccgactcacacaaggcaggtgggtgaggaaatccanagttgccatggagaaaaattncagtgtcaagcattctttgctccttnggggcccctctcctacactcttggcccaggagatccacagtcaaacctggnagcccataaaagggacaccaaagggacttctcgnacccaaaactgccccagacccttntccaagagggtttgggggtngaccaacttcatcttgggactcanacatattgaaagaagctctattntaaatccaaggacangccaacanaacccctttgntgaattttttaatcnacttnggattgagnngcccnccacangtcaaagcctttttaaannaaaagntgttttgntggaaantttaaagaaattcccnnaaaann

SEQ ID NO: 2653 - DNA, 413 bp, Homo sapiens
  misc_feature 254, 297, 319, 331, 337, 344, 347, 348, 354, 359, 365, 377,381, 382, 384, 387, 389, 397, 402, 408, 411: n = A,T,C or G
gagcgcgcgtaatacgactcactatagggcgaattggagctccaccgcggtggcggccgcccgggcaggtactactcgattgtcaacgtcaaggagtcgcaggtcgcctggttctaggaataatgggggaagtatgtaggagttgaagattagtccgccgtagtcggtgtacgccggggattcccatggctggccagaggaggaacgctttgtgttctcatcggagctgcatgggaagtctgcatacagcaaantgacctgcatgcctcaccttatggaaaggatggtgggctctgncctcctgtggctggccttggtntcctgcattctnacccangcatctncanngcaacnaggtnatgganaccccattgaanccanntngtntnggcttggncctgnactgcnaanct

SEQ ID NO: 2654 - DNA, 407 bp, Homo sapiens
gagcgcgcgtatacgactcactatagggcgaattggagctccccgcggtggcggccgcccgggcaggtacagctaggctcagcagcaaaagtgaagaataagaatgaaaggtgaaaagctgacagatgccacgcagagcaaggacttccatgaaggtcccgtgtcctgtgtgccaaacacagtcaacattccatcattttctcattgctcttaaacgagcaaaaccaaattcttttttctatttaaagaaatattaaatctttattttccccaacataatttgtgatcaggtaaggcaaagataagtccaccatcactggggacagcagcaacatacagacttcagaaatagccctgaatcatcagtaacattctatcgtggtcccgcgtacctcggccgctctaga

SEQ ID NO: 2655 - DNA, 413 bp, Homo sapiens
  misc_feature 4: n = A,T,C or G
agcnccccgtaatacgactcactatagggcgaattggagctccaccgcggtggcggccgaggtacaggtttgggcccagaggtctgacaggaagggcagtaggagaggtggtcgtagatgatgggccagagggcgcagggcctagcaggccatggaaaggactctaggttttacgctaggtaaaatgaggaggcactgcagggctttgagcagcagagtaacacagtctaacttacttttttttttaatggatcctaccagctgctaagttaagaataatttccagtgagggcttttgtagtaaattagagatgatgctggtttgtcaatctccccttccagcagaggaatgtgtgggtaagagagtcacaatgtttctgaacaaagccatagctcctaagtggtgaagctgg

SEQ ID NO: 2656 - DNA, 405 bp, Homo sapiens
  misc_feature 84, 125, 299, 360, 363, 378, 385, 387, 398: n = A,T,C or G
gagcgcgcgtaatacgacctcactatagggcgaattggagctccaccgcggtggcggccgaggtacgcgggggaactgaaaatncacaagacagaatagccagatctcagaggagcctggctaancaaaaccctgcagaacggctgcctaatttacagcaaccatgaggccacttaaggatgcagcaagaaggagccatctgcaatccaggaagaaattccttgccaggaaccaaattggttgtcaccttcatctaggacttctagcctcgagaacttacaaatggtgatgatcatcangtcaaggatagtctggagcaattgagatgtcactttacatgggagttattcattgatgacnatnaaatgcctgatttanaaaacanantcttggatcanattgaat

SEQ ID NO: 2657 - DNA, 416 bp, Homo sapiens
  misc_feature 4, 6, 122, 144, 145, 151, 166, 184, 195, 197, 198, 210, 211,212, 233, 239, 242, 243, 245, 247, 258, 265, 277, 279, 292,302, 307, 324, 328, 340, 344, 345, 356, 368, 374, 389, 395,396, 402, 416: n = A,T,C or G
agcncnccgtaatacgactcactatagggcgaattggagctccaccgcggtggcggccgaggtacttttttttttttttttttttttttgcccaacatcaacccttctttaatgtcatccanggagggggccagggatggaggnnaggggntgagcagctagaggnatctaacttaccttccanttcaaacattntnncaggaactaaannntatactaaatcgtatgacgtnccaagnacnnancnaacgggtttanataaaangcacagcataangncaaaagcaactgnggaaaacaantgagnttgaattgtgccattanacanccttcaaacttnaagnncaacaccggcncctccctgggtntcaagnggattgggtctctgnggattnnaaactngccagcctccaaan

SEQ ID NO: 2658 - DNA, 511 bp, Homo sapiens
  misc_feature 58, 84, 117, 181, 191, 210, 212, 233, 238, 246, 291, 296,297, 319, 320, 395, 398, 400, 405, 411, 416, 421, 423, 429,432, 447, 454, 471, 474, 482, 484, 485, 486, 493, 494, 503,504, 505, 507, 511: n = A,T,C or G
actactatagggcgaattggagctccccgcggtggcggccgaggtacgcggggagctnacaaagagtcaccgcagaaacacttntggcacaccttccatagcagtgtctggaacctntctctcctcagatcagagtcgatctgagttagatttgagtgagtcatgttacagaagactcatnaggatactgntaagcattaaagaaagcantncttgtccctgggggcttttangacantggacttncttggaagaagactgaagaaagcatttgatgccttagtgtccttngcagnntatcgtacaaacactcaccgtnntggcaagtggcctattcaactaccaaccttaagctctaagaactagtggatccccccgggcctgcaggaatttcnatntnatagncttatncgatnaccgntngacccnctnagggggggccccggntacccancttttgttgtccttttnagngaaggggngnnnattggcnnccgcattgnnntnatan

SEQ ID NO: 2659 - DNA, 863 bp, Homo sapiens
  misc_feature 1, 2, 4, 7, 8, 9, 10, 11, 12, 20, 23, 25, 29, 30, 32, 33,34, 35, 36, 38, 40, 44, 45, 50, 51, 53, 56, 58, 64, 70,73, 75, 76, 91, 95, 97, 99, 102, 104, 105, 111, 115, 121,125, 126, 129, 135, 136, 311, 322, 324, 329, 337, 338, 344: n = A,T,C or G
  misc_feature 345, 346, 349, 352, 354, 357, 361, 363, 369, 373, 375, 377,380, 381, 383, 388, 391, 396, 398, 402, 407, 408, 410, 413,418, 421, 424, 425, 426, 430, 431, 433, 434, 440, 441, 443,444, 450, 452, 454, 456, 463, 466, 467, 468, 481, 485: n = A,T,C or G
  misc_feature 487, 490, 491, 492, 494, 500, 510, 511, 526, 527, 528, 530,532, 533, 540, 541, 543, 545, 551, 559, 561, 562, 563, 564,572, 583, 585, 589, 592, 596, 597, 603, 606, 608, 610, 618,631, 635, 657, 658, 660, 661, 664, 668, 678, 680, 682: n = A,T,C or G
  misc_feature 691, 692, 704, 705, 706, 710, 712, 718, 731, 735, 738, 740,741, 751, 758, 760, 767, 774, 775, 777, 780, 782, 783, 786,791, 795, 796, 801, 810, 811, 813, 818, 824, 825, 829, 830,832, 834, 835, 844, 848, 849, 850, 857, 860, 861: n = A,T,C or G
nntntcnnnnnnttaaatcntgncntatnntnnnnnanantatnnttacnntnctnantatttnattttnctnannttaactttttaaagnttcnantnttntnntaaatncttnattaantttnntgncgcgcnnggctatactactcactatagggcgaattggagctccaccgcggtggcggccgcccgggcaggtaccctggcctagatgccagtagcatattccccagttgtcaaaaccaaatagttctcccagcaatgcaaattatcacctcatgtgtgcgtggtattgggggtggaggaacatntgatcacaacntngggtnattttagnntccttnnnatntcntnttntgtncncattcnaggngnanttnntncatantcnttttnanattnttttnngnttntcaanctnacnnnaatnntnnaaaatnntnntatatnantntntcttatnttnnnatcaattttcaanattntnttnnntnttattnaaaattcatnnttatgtaccattatnnntnanntatcttnntncntttttntattaatnannnntttttatnattatctattntnattntcntctnnaccatnttnantncgtacganatttatatacaanattntctcaaatataaattcaaatcnntnnttntttntgcattcttntnancaaatttanntattcttgtacnnntttntntgtacntacacctacaatnttcnttncnnatattggcantttatancntaatctnttctatnnanttntnnatnctacnatgnntttcncggttgaanncntattntatctnnatanncnannttcgcacanctannntatatcntannct

SEQ ID NO: 2660 - DNA, 492 bp, Homo sapiens
  misc_feature 47, 49, 50, 57, 62, 72, 74, 75, 76, 77, 79, 81, 82, 83, 89,90, 91, 97, 99, 103, 107, 111, 112, 113, 118, 120, 124,127, 132, 133, 135, 138, 152, 162, 180, 184, 189, 190, 199,202, 209, 227, 236, 243, 250, 257, 263, 267, 273, 276: n = A,T,C or G
  misc_feature 278, 279, 280, 281, 287, 292, 298, 302, 306, 308, 312, 313,461, 477: n = A,T,C or G
taatcactactatagggcgaattggagctccccgcggtggcggccgncnngccaggnacgtncaggacaagncnnnntnannnaatggnnnatgtgncnccantcangtannncaggntntgtnctncattnngnacnctaatcaaggtaanccaccgcaancaatacatgcagtatgcntggnagtgnntgcaaggancancttactncacattttcctggaatantcgccttcnactgttnggttgtngcactanagcttntttngctggnctnannnnataagnttctnggtggnccantgtnanccannaattaatcaccaattccccatctttatcttggtaattttagttcaacattgctcagctgatggctcattaagccaagaactctcccaggtctcagttaccattttcagacaagacaccttctgggggtgcctgccctgtggtctgaanctcaagatgtggctcngggactcccttcctg

SEQ ID NO: 2661 - DNA, 478 bp, Homo sapiens
  misc_feature 2, 3, 5, 7, 12, 474: n = A,T,C or G
gnnantncccgnatcgactacttagggcgaattggagctccccgcggtggccggccgcccgggcaggtacgcgggacaacagggtttgtgctcctatgagaatttaatgctgctgctgatctgacaggaggtggagctcaggcagcaatgccagcaatggggagctgctgtaaatacagatgaagtttcactcactcgcccaccactaaccttctgctgtgtggcccatttcctaacaggccatgggttggtacatcagtttacttcggtagccagtgattgttatagttaattctgcaaaaaaacaaaaccagttatgcaaaaacaagagtacctcggccgctctagaactagtggatcccccgggctgcaggaattcgatatcaagcttatcgataccgtcgacctcgagggggggcccggtacccagcttttgttccctttagtgagggttaattgcgcgcttggcgtaancatg

SEQ ID NO: 2662 - DNA, 466 bp, Homo sapiens
  misc_feature 2, 3: n = A,T,C or G
gnnagggccctatcactacttagggcgaattggagctccccgcggtggcggccgcccgggcaggtactgcaataacaaaatacagcaataaaacaactggacactcctaggggacaccaaagataaagggcccattaatcaggtggaggccagagaaaccggaaggctattttaaagtgtttaatataatcatgtaaggaaaaaaaaatctccccaaaacaataaagtcaagcaatttcatatctatatgaacttattttcatatctatatgactaaaaaatgaaaatgacctttgctggcattattgctacgcgaatatccatactttcccccttgatatttaaggacatgtgggagaactttataaacaagtaaagtgtgcagagaaggcactgttttggcactagcaaaaagggacagttaatttcacatgaatcaccgtgaactttaataacccatgatatt

SEQ ID NO: 2663 - DNA, 444 bp, Homo sapiens
  misc_feature 106, 130, 158, 166, 194, 196, 200, 202, 203, 204, 215, 216,220, 224, 228, 238, 240, 297, 309, 324, 327, 332, 337, 339,349, 359, 365, 393, 396, 412: n = A,T,C or G
tatagggcgaattggagctccaccgcggtggcggccgaggtacttttttttttttttttttttttttttctctcaaatacataggggcttttcccctgggcagttngcattccacaattacttgtttagngttttccaagctcccagggctgggctgngtctccgngcctgccccaggggctttcatgggaaanangggntnnngaaaaggagcnntaangccntaancttgatttgngngcgaagctttttaggccatccatcattcaaagagctggaaaagatgttgtccccaanatcctacctagnggggaaaaccaagcnggngggcnctttntnaaaagcctgngaaggtgatnccccancccacccaggtccccccattcatcctgnggngacagccggggaaccncgaggttaaaagtgaaaaaaagaaccaggacc

SEQ ID NO: 2664 - DNA, 458 bp, Homo sapiens
ctactatagggcgaattggagctccccgcggtggcggccgaggtactcaaagcacgttgctgggaggcagtggacagactgctcagcaactaaccgctccgtgaactccacatcgttctcaaattctgggaaatgttccatctcaattccaacctataccaacaggagggagaggccaacttatcagaaggaggggagaacaggccaatttcctgtgccagaaattaaggccaggcctaccactcctatggcacagtattgatgagagacatcagtggagctccccacctccaccccaggcttggaacttagggaatgactggtttttgtcatttcacacaacagctgaaggattctgtccccacctcgtcctctgtgaagttctgctggaccgtacctgccagaatcttctgaagatgacgtttgcttgaacactgacccacaggggtttgatggat

SEQ ID NO: 2665 - DNA, 452 bp, Homo sapiens
  misc_feature 452: n = A,T,C or G
ctactatagggcgaattggagctccccgcggtggcggccgcccgggcaggtacgcggggaggtggatttgagagatacctccctccttctgctcagctgccttgcagtaattaaactctttctctgctgcaacacccctactgttctccgtgtattggcttttctgggcagcaggaaggaaaagctgatgcgatgctctcagtgccgcgtcgccaaatactgtagtgctaagtgtcagaaaaaagcttggccagaccacaagcgggaatgcaaatgccttaaaagctgcaaacccagatatcctccagactccgttcgacttcttggcagagttgtcttcaaacttatggatggagcaccttcagaatcagagaagctttactcattttatgatctggagtcaaatattaacaaactgactgaagataagaaagagggcctcaggcaactcn

SEQ ID NO: 2666 - DNA, 451 bp, Homo sapiens
  misc_feature 7, 81, 83, 283, 300, 423: n = A,T,C or G
tacactnctatagggcgtttggagctccaccgcggtggcggccgcccgggcaggtacaagaaaaaaaccccacagcctaantntcacacggcttctcagcaggagttggattaaactgagaaaataattttaatatcaagggataatgcacgcaagatgggaaaactttaaagcaaactctgcagtgaaaagtgtttcccccactcccttgggcgagggaagggagaagaagatagataatgaggagaactataaggccctggattcaggtttctgaaactgntttttttttcaaccctnggaggacaatcagctcttcctgaatccagaaaagcacatcagaaatgcccaatgacagaccacagccaaatatggcagggcaaactgatttggttctgcgatttccattctcctctccacatncgagaaatgccttcagctacagctaaaa

SEQ ID NO: 2667 - DNA, 451 bp, Homo sapiens
ctatagggcgaattggagctccaccgcggtggcggccgcccgggcacggtacgcgggtagaaatgagcatacaataataggaacactatgaaaaagaagggtaatgagaggtgggaccaagtctataagatattaaagggtaagtctctccggcccggtttccctcggtgtgctactgtgcgcgccgatccagcaccatggggaagcgggacaatcgggtggcctatatgaacccaatagcaatggcgagatcaaggggtccaatccagtcttcagggccaacaatacaggattatctgaatcgaccaaggcctacctgggaagaagtaaaagagcaactagaaaaggaaaagaaaggctccaaggctttggctgaatttgaagaaaaaatgaatgagaactggaagaaagaactggaaaaacacagagagaaattgttaagtggaagtga

SEQ ID NO: 2668 - DNA, 433 bp, Homo sapiens
  misc_feature 2, 64: n = A,T,C or G
gntctccccgcggtggcggccgaggtaccagactagacatgggcttccttactatgtcccgacncatgacagataggcatcactattcaagaggactggggcttgcaaccacagattagcatcttatttgccatttaggtcccagattgcttgagcccaggagttcaagaccaagcctgggcaacatagcaagacctcatctctacaaaaataaaaaaaattagccaagcatcatagtgcacgactgttgtcccaactactcaggaggctggggcaggacgattgcttgagcccaggagcttaaagctgcagtaagtggtgacttgccactgcactccagcctgggcaacaaagcaagactctgtctcaaaaaagaagagaaagctgaaagggttagagactcagcagatgtttctagataagaccagtttgt

SEQ ID NO: 2669 - DNA, 465 bp, Homo sapiens
  misc_feature 2, 3, 10, 30, 33, 37, 40, 45, 83, 95, 312: n = A,T,C or G
gnnagttganccatttggaatccggcaatngtntttngcnaaggncgcggccgcccgggcaggtactcgggtgacccaaggtngaccattttaantttctaagttttcaccgagattaacatgcatttgttgaaagacaaacctcttttaccctactcccccagctgcaaatgctttcagggttcacatcatgttggaacatttggttacagtgtttcctaaactttgcgggtaaaaattgttcaagtaggtaaaaatggagcacatacaaaaaaaaaaaaaaaaaaaaaaaaagtacctcggccgctctanaactagtggatcccccgggctgcaggaattcgatatcaagcttatcgataccgtcgacctcgagggggggcccggtacccagcttttgttccctttagtgagggttaattgcgcgcttggcgtaatcatggtcatagcctgtttcctgtgtga

SEQ ID NO: 2670 - DNA, 703 bp, Homo sapiens
  misc_feature 1, 2, 3, 4, 5, 6, 10, 11, 14, 17, 18, 20, 22, 25, 26, 29,30, 31, 33, 34, 37, 38, 42, 43, 45, 49, 50, 53, 56, 61,62, 66, 67, 69, 78, 83, 85, 86, 89, 90, 91, 93, 94, 95,100, 102, 103, 108, 109, 110, 111, 117, 129, 348, 352, 361,384: n = A,T,C or G
  misc_feature 390, 396, 406, 428, 437, 448, 462, 469, 483, 486, 488, 490,499, 525, 528, 532, 535, 575, 600, 625, 651, 652, 656, 672,698: n = A,T,C or G
nnnnnntgcnnatnttnntntntannttnnntnnatnnctcnncntatnnttnttntcttnnttcnntnattatatcntattntnntcnnnannnattgntnntttcnnnntagttnggtccctctctntcctatagggcgaattggatctccaccgcggtggcggccgcccgggcaggtacatgactgatattacacctcaaggtgtggctatgagagctggagttctggctgatgatcacttgattgaagtgaatggagagaatgtagaggatgccagccatgatagaagtggttgaaaaggtgaagaagttcaaggaaagcccgttggtccatggttccttgctnggtnggacaaaangaaaactggacaagccgttcatngtttgnaggcangaaagtatancaaatttcaacagggagtaaancagcccagntttgaaaaacntgtttacccctcantcaaacnccccggaatttgtnggnangnattgaaaanaaaagggaaagcaaattgggcttatnggntttnctnatcttgaaggggccagggccttcagtaaccagaaaagggntccaaaaatcatttcaaagggaccnttagtatttcctgggaaggtcccanccaggagggaagggcttgggcctttnnaaanaaaccaaaatgaattnctggggttagatcttgccttgttccnaaccc

SEQ ID NO: 2671 - DNA, 538 bp, Homo sapiens
  misc_feature 6, 81, 88, 112, 152, 194, 306, 358, 364, 374, 482, 489, 506,536: n = A,T,C or G
gtggcnatcatctatagggcgaattggagctccccgcggtggcggccgcccgggcaggtacaccacaatggctgagcactnactgacnttgctggtagtgcctgccatcaanaaagattatgggttcccaggaagacttcacttcaagtgtnggaacaccacccatgaaaggggcttcaagtgcttgtgggctncaccaactataccggattttgagggactcaccctacttcaaagaagaacagtgcctttcccccattctgtttgcaatgacaaccgtcaccaacacagccaatgaaacctgcnccaagcaaaaggctcaccgaccaaaaaagtagaagggtttgctttcaatcancttttngtatgaacantccgaaacttaatgccagtccacccgtggggttggtgtgggcatgcttgggaatttgggggggtctccgagctgggcttgcccatggattgttgtcccattgtatctngtacctngggccgctctaagaaanttaggtgggattccccccggggccttgcangg

SEQ ID NO: 2672 - DNA, 489 bp, Homo sapiens
  misc_feature 2, 5, 6: n = A,T,C or G
tntgnnctactactactatagggcgaattggagctccccgcggtggcggccgcccgggcaggtacaagggcatgacaggctgggaggtggctggtgatcacatttacacagctgctggagcctcagacaatgacttcatgattctcactctggttgtgccaggatttagacctccgcagtcggtgatggcagacacagagaataaagaggtggccagaatcacatttgtctttgagaccctctgttctgtgaactgtgagctctacttcatggtgggtgtgaattctaggaccaacactcctgtggagacgtggaaaggttccaaaggcaaacaagtcctatacctacatcattgaggagaacactaccacgagcttcacctgggcctttccagaggaccacttttcatgaggcaagcaggaaagtacctcggcccgctctagaactagtggatcccccgggctgcaggaatttcgatatcaagcttat

SEQ ID NO: 2673 - DNA, 505 bp, Homo sapiens
  misc_feature 303, 466: n = A,T,C or G
gttggctatcatcttagggcgaattggagctccccgcggtggcgctgcattaatgaatcggccaacgcgcggggagaggcggtttgcgtattgggcgctcttccgcttcctcgctcactgactcgctgcgctcggtcgttcggctgcggcgaggcggtatcaagctcactcaaaggcggtaatacggttatccacagaatcagggggataaccgcaggaaagaacatgtgaagcaaaaggccagcaaaaggccaggaaccgtaaaaaaggccgcgttgctggcgttttttccataggctccgnccccctgacgagcatcacaaaaaatcgaccgctcaagtcagaggtggcgaaacccggacaggactataaaagataccaggccgtttccccctggaagcttccctcgtgcgcttcttctgtttccgaaccctgccgcttaccgggatacctgtcccgccttttntcccttcgggaaagccgttgggcgcttttctcatagctc

SEQ ID NO: 2674 - DNA, 486 bp, Homo sapiens
  misc_feature 2: n = A,T,C or G
gngtccctatcaactacttagggcgaattggagctccccgcggtggcggccgaggtacatggctgaaagcgaagtccacgttggcggaggctaatccgaggtccacgtgtgtccctcggtcttggttctcctgggtcagattctcctcgtcaagtgggctgttagggtggcagaggacagcagggcagaacccagccgccaagagccccagagccaggagaggtaacattctctccattctcaactctcagggagctggatgtagctggtggattccaaagccgtctgtctggagtccccgcgtacctgcccgggcggccgctctagaactagtggatcccccgggctgcaggaattcgatatcaagcttatcgataccgtcgacctcgagggggggcccggtacccagcttttgtttccctttagtgagggttaattggcgcgcttggccgtaatcatggtcataagctgttttcctgtgtgaaa

SEQ ID NO: 2675 - DNA, 491 bp, Homo sapiens
  misc_feature 2, 4: n = A,T,C or G
gngngctatcatcttagggcgaattggagctccccgcggtggcggccgcccgggcaggtactatggtcggggtggagcggggcatctttactgtcagtcactggcacttgtccactgtgaagacctgatgaaccagagcatttcctcttcttgttctgctcaccagccagctgagggaatgtcgatgctggcaatgggcacagtgagtcccttcaggacactcaggatgctgtggaacggttcccgaacatcgcccttgaagctgaagccaaagatggcatccaccaccagctcatacagttcatcaatcgtcatgggctctgcgggcatttccccaaggaaagggatgtccattttctgacactgggtcaccaatgcaagtgaagagggggcttgttaggccttttggggtaatagatggttggctcgtagccaaagagtttgaggtgtcgagcacaagaccagaccatcttcctccattattccccggg

SEQ ID NO: 2676 - DNA, 485 bp, Homo sapiens
  misc_feature 3, 374: n = A,T,C or G
ggncctatcactcctatagggcgaattggagctccccgcggtggcggccgaggtacttacggagtgacaaagggaaaagtctgctttgaggcaaaggtaacccagaatctcccaatgaaagaaggctgcacagaggtctctctccttcgagttgggtggtctgttgatttttcccgtccacagcttggtgaagatgaattctcttacggtttcgatggacgaggactcaaggcagaaaatggacaatttgaggaatttggccagacttttggggagaatgatgttattggctgccttgctaattttgagactgaagaagtagaactttccttctccaagaatggagaagacctaggtgtggcattctggatcancaaggattccctggcagaccgggcccttctaccccatgtcctctgcaaaaatttgtgttgtagaaattaaacttccggtcaagaagggagggagcccttctttcccaccac

SEQ ID NO: 2677 - DNA, 559 bp, Homo sapiens
  misc_feature 6, 97, 122, 157, 243, 252, 319, 377, 414, 423, 505, 533, 535: n = A,T,C or G
gtgtcnatcacacttagggcgaattggagctccccgcggtggcggcccgcgttagctgaaggccagcagggaccgcaaaagtttttaggccccttangtctttaggttggcatacgtatcanggacagtaactaccatggctcccgaagttttgccnaaacctcggatgcgtggccttctggccaggccgtctgcgaaatcatatggctgtaagcatttccgtgctatccctgggggttgcangcttttgtntaagtttcgtgtgggctgatcaaagaaagaaggcatacgcagattttctacagaaacttatgatgtncatgaaaagatttttgaggagatgaaggaaggctggtatctttcaagagtgtaaagtnatcttgggaatataaaggaattttcttcaggttgaanttaccctangaaagttttggtccactgacctttgtggtttcccttgaaacctattgaccaccattggaaataatggtgggggccttaaagnaaaaattaagtttcccttcttggaatananattaaaaaccaaatttaggccaat

SEQ ID NO: 2678 - DNA, 489 bp, Homo sapiens
  misc_feature 2, 112, 180, 200, 254, 261, 287, 290, 368, 444: n = A,T,C or G
gnggctatcatcttagggcgaattggagctccccgcggtggcggccgaggtactttttttttttttttttttttttttttgcggggggagcatgggacctttattcgttaanacatcaggctccagatatgaactttcagcagaagcgcttgccgggagcaaagggacagaaaagctganatgaacaagtgcctggcagnaatcacagcccgggcaagggtgctccaagcctcgcatcccccggcccgctctanaactagnggatcccccgggcctgcaggaattcnatntcaagcttatcgataccgtcgacctcgagggggggcccggtacccagcttttgttccctttagtgagggttaattgcncccttggcgtaatcatggtcatagctgtttcctgtgtgaaattgttatccgctcacaattccacacaacatacganccgggagcataaagtgtaaagcctggggtgcctaatgagtgagcc

SEQ ID NO: 2679 - DNA, 823 bp, Homo sapiens
  misc_feature 691, 692, 707, 739, 741, 801, 804, 821, 823: n = A,T,C or G
agccgcgtaatacgactactatagggcgaattggagctccaccgcggtggcggcccgaggtacttgtgacaggcagacgtgattgcagccacgaacacgatgaactcactgaagtccacctgggcatctccattggcgtccaggtccttgagcaatttatccacggcatccttgtcttttccactctgcaggaagcctggtagctccttctccatcagcaccttgagctcccccttggtcagggtctgcgtgctgccctcgctgcccgaatatcgggaaaagacgtctatgatcatgcccatggctgtctctagttccgtcatggtgctagattcagacccaccttcctcctgggggctggcagggccgagaaaatgtccccgcgtacgcgggggactcagatcccagccagtggacttagcccctggttgctcctccgataactggggtgaccttggttaatattcaccagcagcctcccccgttgcccctctggatccactgcttaaatacggacgaggacagggccctgtctcctcagcttcaggcaccaccactgacctgggacagtgaatcgacaatgccgtcttctgtctcgtggggcattcttctgctggcaaggcctgtgctgcctgggccctgtcttccctggctgaagatcccaaggagaagctggccaaaaaaacagatnnttccaccatgatcanggatcacccaaccttcaacaagatcaaccccnanctggctgaattccgccttaagcctataccggcagctgggacaccagttccaacagcaccnatntttttttctccccagtnan

SEQ ID NO: 2680 - DNA, 886 bp, Homo sapiens
  misc_feature 4, 5, 6, 7, 518, 673, 682, 686, 702, 707, 729, 736, 748,754, 774, 776, 791, 803, 805, 806, 812, 816, 826, 829, 830,832, 852, 853, 858, 882: n = A,T,C or G
gtgnnnngacgcgcgtaatacgactactatagggcgaattggagctccaccgcggtggcggccgcccgggcaggtacgcgggttctcattcttttctcctttatcttcactctgatttttcttttgtcattcaacgcttactcccttccccatacctcagtcctccaggtgacacctgggcgcttttctgcctgaacagcatttcccaccaacggccacagcagtcggtcagtgtcctcttgagcacctcctgaagctgcagtgtcatttgctgtttgccctaaaaagccacgcccagatttcttctaccgctgcttccctgatgggctagcccattctgacttgatgtgtacctcggccgctctagaactagtggatcccccgggctgcaggaattcgatatcaagcttatcgataccgtcgacctcgagggggggcccggtacccagcttttgttccctttagtgagggttaattgcgccctttggcgtaaatcatggtcataagctgtttcctgngtgaaattggtatcccgctcacaaattccacacaaaataccgaacccgggaggcataaaagtggtaaaagccctggggtggcctaaatgaagtgagctaactcaacatttaattggcgttggcgcctcaactggcccgcttttccaagtccgggnaaaacctgntcgnggccaacttggatttnaatgnaatcgggccaacccccgggganaaaggcnggtttggcgttnttgggngcctttttccgctttccttngnttaattgaacttcgnttgggctcgggncnnttcggnttgnggggaaaccnggnntnaaattacctcaaaaggcggnnatacnggttttccacaaaataaggggganaccc

SEQ ID NO: 2681 - DNA, 482 bp, Homo sapiens
  misc_feature 17, 29, 110, 301, 408, 424, 441, 449, 450, 452, 454, 461: n = A,T,C or G
attgagctccccgcggnggcggccgaggnactgtgctcaaagctgaaaatgtttactgtctttcccctcacaaagttttcagactgctggcctagggttttcagggtggnggatagagacggtattaaccaaaacagaaaaatcatccattattatgatgatgggtcagaaagaaagacggtatcaatcttggagcacttaaatgggaggtgtcaaaggacacacagcaaggcagcccagtgtgaaatggaaagctcatcccactgaaggggcgtggcacttggctatcccctctgcctantacctgcccgggcggccgctctagaactagtggatcccccgggctgcaggaattcgatatcaaagcttatcgataccgtcgacctctagggggggcccggtacccancttttgttccctttantgagggttaattgcgcnctttggcnntnantcattgncatagcttgttccctgtgtaa

SEQ ID NO: 2682 - DNA, 488 bp, Homo sapiens
ggcctatcatacttagggcgaattggagctccccgcggtggcggccgaggtacttagagtccaattttcctaccttggcttgtgcatgaggttgcctggttgccacggtgcctgcttttctccctgtgtcacctccactgcctcctgaataacagtctcaggtttgtctatggcctctgcagggagccgggattcccagacagagcaggccacttaaatcaggtgggacgcctctcccctcttggccggagtccaactccacgcaggcacagagatcccagatgggcccccaagtttgtgagaaacacattcatctgtccaaacccaaagaatggactcagagacacaaaagaacaatggaagagagaattttaatggtgatcgtgcaagaatgggtgtctggtaggcaggccccgcgtacctgcccgggcggccgctctagaactagtggatcccccgggctgcaggaattcgatatcaagcttatc

SEQ ID NO: 2683 - DNA, 501 bp, Homo sapiens
  misc_feature 5, 6, 7, 40, 46, 52, 57, 58, 60, 62, 67, 71, 72, 73, 75,77, 81, 85, 89, 90, 91, 98, 100, 111, 131, 204, 205, 209,226, 257, 311, 340, 341, 357, 358, 360, 374, 383, 385, 403,420, 440, 447, 450, 461, 479, 481, 490: n = A,T,C or G
ggccnnncactacttagggcgaattggagctccccgcggnggcggncgaggnactcnntntngttcntttnnncncnctgncttntctnnnatgctgntnatgtcattcantgggtgcactaaaggatctnttattttatgtaaaacgttgggattgacaagatagatctgacactctgttaagttaccctctgaagctactgnnttgngaaatactaatgacagnatcatcctgccaagcgaaagaggcaggcatnaagcaaggacaaattaaaagggggtaagagccttatcatgatgaggagtcttgntttgacatcttgggaaaagctgtccatanngtgaagtcgtcaattnntnaccatggtttgcantttgactgncnctagttaggtgaagtctntgagtggcacacacctnaagcctgagggtttttcccnttaaacnttncattggagttntccatctccaacatattncnggccttcanggagccaaaaa

SEQ ID NO: 2684 - DNA, 489 bp, Homo sapiens
ggcctatcactacttagggcgaattggagctccccgcggtggcggccgcccgggcaggtacgcggggtggacagactgctttgcctgttgttgctcttcggaggcggcgatccccgaaggcgagctgaaatacggctgcaggctacaatttgcagccgaccattatggatgacaaggagccgaagaggtggcccaccctcagggaccgcttgtgctcggatggcttcttatttccccaataccccattaaaccgtatcatctgaaggggatccacagagctgtcttctatcgtgatctggaggaactgaagttcgttctgctcacgcgttatgacatcaataagagagacaggaaggaaaggaccgccctacatttggcctgtgccactggccaaccggaaatggtacctcggccgctctagaactagtggatcccccgggctgcaggaattcgatatcaagcttatcgatacccgtcgacctcgaggg

SEQ ID NO: 2685 - DNA, 504 bp, Homo sapiens
  misc_feature 2, 3, 6, 7, 8, 40, 60, 99, 133, 136, 151, 168, 175, 177,179, 192, 257, 287, 289, 312, 339, 353, 355, 357, 365, 375,383, 390, 421, 458, 464, 465, 472, 480, 485, 496, 501: n = A,T,C or G
gnnttnnnaccattacttagggcgaattggagctttccgnggaggcggccgcccgggcanggtacttttttttttttttttttttttgcagtcacatgnttggcagggaccagctcaacccttctttaatgtnatncagggagggggccanggatggaggggaggggntgaggancnanaggcacctatttntgggtgggattcaccactttttccatgaacaggggaaacttggctattttggtcaatcattaatnaagacaaagggtgttgttgaacttgacctngngggggatatgacatgggtatggnctctaaaaacatggccccagcagcttngactcactttctcntntntggtcaanacagacttantgcacggncttgganagcttcaaggggtgcctcctctgtgaccccngaaaggttacccccattgctgaagaccttaagtgatncccagnngacccanagacgctnttcanatcataggttncagcnatg

SEQ ID NO: 2686 - DNA, 476 bp, Homo sapiens
  misc_feature 14, 27, 46, 118, 158, 186, 212, 294, 313, 331, 360, 422,423, 436, 448, 457, 458, 468, 476: n = A,T,C or G
ctatagggcgaatnggagctccaccgnggtggcggccgcccgggcnggtacaggaagggccatgctgttattactcttacacaaggaggcagccctcgagccacagggtccagctgtnggctataatagcctaccggtctctgatgatcaccatgttnctggaattcaagccaggaagaagcaccnatctgtcttctggattaaaactgaanatcaacctactttcaacttactaagaaaggggatcatggacattgaagcatatcttgaaagaattggctataagaagactangaacaaattggacttgganacattaactgacattctncaacaccagatccgagctgttccctttgnggaccttaacatccattgtggggatgccatggacttaggcttataggccattttgatcaacnngtgacaagaaatntgggtggatggngtttttcanntcaatcatcntctgtggn

SEQ ID NO: 2687 - DNA, 505 bp, Homo sapiens
  misc_feature 2, 7, 8, 15, 468: n = A,T,C or G
gnctcgnnacacttntatagggcgaattggagctccccgcggtggcaggcggccgcccgggcaggtacaaggcatgctgctttgatgatcttgtggcggggtgtgcgaaggtaaggcctattgactttctgggcaaggtcttcagtgaccatttctaggtctgtttgcattaggttcaaaaatttctttctttgtgcttttaggttccaagaaaaaatccatatgggataagaacacttgagaatgcgccgagtttttaagagcacatgaactgcatcttcaatgaaagtggtatctggacagcctccttcaggtttctttgagagctctgctcaattgctccatcttttctttggctgttttaagaaggccgttgttctagctgataactatgctcatggtttttaaatcttgtataatagtgcataaatctgtcaagttcctgaaatcgtttgtgttttttctcancctccacagtcatttccttggattgctcctccacgtg

SEQ ID NO: 2688 - DNA, 428 bp, Homo sapiens
  misc_feature 51, 53, 69, 120, 127, 129, 133, 163, 186, 192, 193, 216,220, 223, 225, 275, 313, 318, 333, 346, 356, 361, 365, 370,371, 376, 388, 402, 415, 416, 421, 428: n = A,T,C or G
cgaattggagctccccgcggtggcggccgcccgggcaggtaccgggcatgntngacctccattgctttnggcttttgtctctttctccttttgaagctcaaaagggcatatagtggactntgatccnangatnccttttttccctgctttggctgcctctggngagggtcatgtgtcaaagcaganacgggnnaaaagccaaaccgacacaatgancgtnctnanaaaggaaacttcttcggaatgaaaagctttggccacattggaaagggtangaagtgatgagagaaactttttcattcggggaccactnggccnggtgtggggggcccntcacgctgttttnacaaagtacntcggngcgntctannactantgggatcccccnggctgcatagaatncgatatcaagctnnatcgnatacccn

SEQ ID NO: 2689 - DNA, 434 bp, Homo sapiens
  misc_feature 6, 13, 15, 24, 37, 87, 107, 139, 144, 183, 202, 241, 260,274, 292, 297, 298, 306, 319, 329, 332, 335, 367, 374, 382,401, 423, 424: n = A,T,C or G
gggcgnattggancnccccgcggnggcggccgaggtncgcgggagaaataaaatgtggtcctaatgccaggactaaaatggacctantgccaaattagtccaattgnagcctttgcttcagctggatcatcccgtgttngttangagctcagctgtggccattattcatttgttgattgctgncccattcttgggaagtgcntatagcatcccattcatttgaagctgttttcttaaaaantatcattcacatttgatcngttttttccttttnggctgcccaagatagcanttcannatgcctanaaacccaccatgngattacaatntanggngggcactggaacatgaataagggccttatacngaagcangaatgatncccagcaaaatagagaaanaaaaggtctgcatactatatgnnactgtttgcc

SEQ ID NO: 2690 - DNA, 507 bp, Homo sapiens
  misc_feature 2, 6, 16, 64, 78, 101, 122, 165, 196, 197, 203, 234, 254,276, 287, 305, 312, 329, 352, 353, 366, 374, 380, 389, 390,395, 396, 397, 403, 412, 413, 414, 432, 433, 435, 442, 444,449, 452, 457, 459, 460, 466, 483, 484, 486, 490, 491: n = A,T,C or G
gngtcncgcaacactnactatagggcgaattggagctccccgcggtggcggccgaggtactttntttttttttttttntccctaggcaaggagggatgatnatttattagcttctacagatnacacaatggggtgggggtgggctcaaggtgaggtgattttttnggtccaagtctactcaagacaggcataccanncttggnactccaaaatccacccgctctaagaactagnaaggatcccccgggctgtangaattcgaatatcaagcttatnctataccgtcnacctcatagggggggccnggtaccnagcttttgtttcccttnaaatgaggggttaaattgcaccnnttaggcgttaatnccatgggntcaatnaacctgttnnccctnnnttttgnaaaaattgnnnatccccggcttcaccaanntntcccaancngccanccnttacntnntccccnggggaccccgtttaaanngnttgnnaataaagcccctgggg

SEQ ID NO: 2691 - DNA, 427 bp, Homo sapiens
  misc_feature 2, 16, 364, 401: n = A,T,C or G
tnctatagggcgaatnggagctccccgcggtggcggccgaggtacgcggggagcctgagaaggacttttccgaaaaggcaaaaccttcacccaccccattgggagaaaaacccagacgccaggaaaagaagaaacaacaaaggcaggagaacagccactttcagacttgaaaatgacaaaaccctcaatttgagcctgagcccccggcgcgggggctgctacactacaggacacccagcatcggctttgactgcagactgttcacccacacgagccctgtgcttttggtgtaaataatgtacctgcccgggcggccgctctagaactagtggatcccccgggctgcaggaattcgatatcaagncttatcgatacccgtcgacctcgagggggggcccggnacccagcttttgttccctttagtgag

SEQ ID NO: 2692 - DNA, 444 bp, Homo sapiens
  misc_feature 3, 6, 8: n = A,T,C or G
gtnccnanctctacttagggcgaattggagctccccgcggtggcggccgcccgggcacggtacgcggggggagaccattgctctatagcaagaccagactttgcccttcctcctctcagcctactcaacgtgaatataatgaggatgaagacctttgtaatgaccttttcccacataatgaatagccattgggagacacacttctgaacaccaccactggaaaatcacacatgctgaaatgggagagttccctgacccccttgcaggatatgtgacaggagtgtggctcatctgttcagctggagtgcatactcaaaccccttatgagacaaggagtatgcagacaggaaggtgcagggaactggggtgagtacctcggccgctctagaactaggtggatcccccgggcctgcagggaattcgatatcaagccttatcgatacc

SEQ ID NO: 2693 - DNA, 455 bp, Homo sapiens
  misc_feature 1, 2, 34, 118, 120, 146, 153, 255, 270, 287, 300, 327, 333,364, 368, 376, 377, 387, 393, 433, 454: n = A,T,C or G
nnggccctaacatacttagggcaattggagctcnccgcggtggcggccgaggtacttttttttttttttttttttttttttcgcactacctccccgggtcgggagtgggtaatttgcncncctgctgccttccttggatgtggtanccgtttntcaggctccctctccggaatcgaaccctgattccccgtcacccgtggtcaccatggtaggcacgggcgactaccatcaaaagttgaatagggcagacgttcnaatgggtcgtcgccnccacggggggcgtgcanatcggccccacgntgtacctgcccgggcggctcgttctanaactanggggatcccccgggctgcaggaaattcgatntcangcttatcnnatacccgtcngacctngaagggggggggcccggtacccagcttttgttccctttangtgaggggttaaatttgcccnc

SEQ ID NO: 2694 - DNA, 428 bp, Homo sapiens
  misc_feature 294, 341: n = A,T,C or G
actacttagggcgaattggagctccccgcggtggcggccgaggtactgttcccttctgatttggtctagataccagaatccattctcttccgtcaaacggaagacacaaggcacctgaggctgatccttcccagaaattaactccagaggctgccacatctggtatgagcgtccaaacccagcatcgacaatgtagttcctgccatcaatggtcacctgcaggagaaggtgaatcatgccagtgctgtattttttggctggagtgctgtaaacataccctcccaacatcgtggnctcaaaaccaatagtggtcagagcccagtacctgcccgggcggccgntcgagttaattgcgcgcttggccgtaatcatggtcatagctgtttcctgtgtgaaattgttatccgctcacaattccacacaacata

SEQ ID NO: 2695 - DNA, 463 bp, Homo sapiens
  misc_feature 2, 3, 9, 60, 61, 62, 88, 89, 90, 95, 100, 106, 118, 127,128, 129, 130, 132, 133, 159, 162, 163, 164, 170, 183, 203,209, 219, 220, 252, 260, 326, 333, 388, 428, 430, 447, 462: n = A,T,C or G
gnngtcccnaacactacttagggcgaattggagctccccgcggtggcggccgaggtactnnnttttttttttttttcttcttttaggnnntcctntcttnaatttntgggttttcttntgcattctnnnnanngtcaaagcttacccacaatctataancannngagganttaccaggaaccngcgtggtgaggagatgccanaggcanagaagagaannaagtattccaaacatgaggggattccaaaganagaagagngtcccaaacaacatttgcacaaacctgatgaggagagagaatgtggggtggggatggatgatgacnactgaanaagaaagccaggtctaggataatcaggtggccttgtacctgcccgggcggcccgntctaaaactagtcgggatcccccgggctgcacagaaattngnatatcaagcttatcgantaccgttcgacctcna

SEQ ID NO: 2696 - DNA, 458 bp, Homo sapiens
  misc_feature 4, 405: n = A,T,C or G
actnctatagggcgaattggagctccccgcggtggcggccgaggtacgcggggccggtgcggaggtcagggacaagatggtgccaccggtgcaggtctctccgctcatcaagctcggccgctctagaactagtggatcccccgggctgcaggaattcgatatcaagcttatcgataccgtcgacctcgagggggggggccccggtacccagcttttgttccctttagttgagggttaattgcgcgcttggcgtaatcatggtcatagctgtttcctgtgtgaaattgttatccgctcacaattccacacaacatacgagccgggagcataaagtgtaaagcctggggtgcctaatgagtgagctaactcacattaattgcgttgcgctcactgcccgctttccantcgggaaacctgtcgtgccagctgcattaatgaatcggccaacgcgcggggag

SEQ ID NO: 2697 - DNA, 462 bp, Homo sapiens
  misc_feature 1: n = A,T,C or G
nagtccctaacactacttagggcgaattggagctccccgcggtggcggccgaggtacaactttttaacatcctccaaaaacttatccactagcttcaggccctcgctgaggaacaggccattgccggtggtcagctggagctggctgtctggctggttgagggtatggaggagttcctggaagccttcatggatctgagcctccggaaatctccgtgaggtttgaaattcaggccctccaggatttcatcgtgagtgtcagtcttggtccccagggagagcattgcaaaggctgtagcgatgctcagattcactgtcccaggtcagtggtggtgcctgaagctgaggagacagggccctgtcctcgtccgtatttaagcagtggatccagaggggcaacgggggaggctgctggtgaatattaaccaaggtcaccccagttatcggaggagcaaacaggggc

SEQ ID NO: 2698 - DNA, 479 bp, Homo sapiens
  misc_feature 2, 3, 11, 54, 86, 93, 135, 194, 209, 265, 282, 331, 334,351, 352, 360, 374, 386, 388, 390, 393, 416, 442, 443, 456,457, 464, 469: n = A,T,C or G
gnnggccctancactacttagggcgaattggagctccccgcggtggcggccgangtacgcgggaggcattgaggcagccagcgcangggcttntgctgagggggcaggcaggagcttgaggaaaccgcagataantttttttctctttgaaagatatagattaatacacctacttaaaaaacataggcaataangttactaagatattncttacccgttaagtttttaacgtaattctaatagcttaagatcttaagataaaatntgaagtacttaaaaatnagtggcatcgaccgaaggaaaaggataataaggtttctaaaacatgacnggnggttgagcatgaagctnnttcatggnagctccaaattatntgtatacctttnantnaanggattaaatttgtaccctttccncggggcggcctgcttctataaacttnntgggatgcccccnnaacttgnaaagnaaattttcca

SEQ ID NO: 2699 - DNA, 468 bp, Homo sapiens
  misc_feature 2, 3, 17, 18, 24, 82, 180, 378, 384, 443: n = A,T,C or G
gnngtccctaacactannttaggncgaattggagctccccgcggtggcggccgaggtacgaccacagctcactgcatcctcnacctcccaggctcaagcgatcctcccacttcagcctctgaagtctctcatatggtgtccaagaaatggtgacaaatctcacaaagggactaggctcancagggctggaatattcagggaaggtgttaaagaaaaaaagaatgaaacttgagtttggctttttgaagaagatgcataggactcccacaggcagagtgaaataaggggcattttagatggacagacacacagacaaaagcagaaatgtgggtggtgtgactggggtttggtgaggggctgctgtggcttggaatggangggctnccacaaataatgggaaatggtaaatgagggcaaggtaaggttggacctggtggccatancgtcaaggtttgcccagctttatta

SEQ ID NO: 2700 - DNA, 453 bp, Homo sapiens
  misc_feature 3, 122, 127, 132, 173, 178, 179, 187, 188, 192, 195, 198,201, 227, 237, 270, 279, 286, 293, 296, 302, 307, 310, 312,319, 326, 338, 344, 375, 377, 399, 405, 408, 418, 419, 422,423, 428, 449: n = A,T,C or G
ggnccctatcactacttagggcgaattggagctccccgcggtggcggccgaggtactttttttttttttttttttttttttttttattttttttttttttttttttttttttttttttgggnggttnaaaanattttcactttattattatgcttataatattattccaacanactgnnttaaaggnngggntcnctnacncaaaaccccacaggggcgaaaaggcntccgggcccnattgcaggacgtggcctgtcgggccagggtcgntgacatgcnccctggnagctcanacnctggtnccctnaananaggctgnaggaatngggacaagacanatgccnccgggacttttaaaagctttttaataaaatntnatccaaaaacaaaatgggaaangaaacnagnaaccctttcnngcnnaaccncctttaggcccaactgaaatntaat

SEQ ID NO: 2701 - DNA, 459 bp, Homo sapiens
  misc_feature 3, 4, 148, 215, 274, 357, 396, 428, 452: n = A,T,C or G
ggnncctatcactacttagggcgaattggagctccccgcggtggcggccgaggtacttttttttttttttttttttttttttatttagttttgtttaggagtacacgtccctagaagcacatagctccagcaacaaagctaatctganagtaatacccaagatgcctcctaccttgcaaatttcaaggaatttctcactggtggtttttcattanggatactcagtgaaagtagcataaggaacttcagtggaccatgggttccagcgggacanaagagactgctcctccggactcccccagtagatcctaaggccttctccttgtctcttgtccaggggacatcccaggggaaggngaacttgcccaggtcagatgccgatagacagccgctcanagggaatccgctgcagctgcacacaaacttancatgattgaaagttccgtattttngcaaatc

SEQ ID NO: 2702 - DNA, 452 bp, Homo sapiens
  misc_feature 6, 204, 233, 236, 245, 280, 333, 358, 365, 374, 418, 420: n = A,T,C or G
gtcccnatcactacttagggcgaattggagctccccgcggtggcggccgaggtacgcgggagtctagttcctggttgccggctgaaataacctgaattcaagccaggaagaagtagcaatctgtcttctggattaaaactgaagatcaacctactttcaacttactaagaaaggtattaagcgcctttctgagagcctttcaanggggcttccttaagcaccgttcactctgnctnctttaagtnttatatttatgatcaagatgaaagggagggatgtntcactgcacagagattctacaagtggatatataaagctaataatgttttcagngagctcttctctggcaactactttncaagtgnctttcagcnttccacctttgaagcacaacggttaataatgcacaatttctttntnttcagcccacaagaaatgtttcacgtgtgatt

SEQ ID NO: 2703 - DNA, 467 bp, Homo sapiens
  misc_feature 2, 12, 18, 21, 352, 353, 389: n = A,T,C or G
gnagctgaccgnttgaanacnatagggcgaattggagctccaccgcggtggcggccgaggtacttcattccacattcaatcaaagcaagtgcaaccagcacaggtgcccttcccaatcctgcaacacaatgcactgcaacacagcaacctggctcttcacgaaatttggtttttaacaggtttaaccaatcatctactatctgattaggggggtgggagctccatcatcaaatggccaatctagaacgtggattccttctttttcaactggagctttatcatatgtagccccgcgtatctgcccgggcggccgctctagaactagtggatcccccgggctgcagggaatttnnatattcaaagccttatcgatacccgtccgacctcgnaggggggggccccggtacccagcttttttgttccctttagtgagggttaattgcgccgctttggcggtaatcattggg

SEQ ID NO: 2704 - DNA, 473 bp, Homo sapiens
  misc_feature 6, 7, 10, 19, 20, 26, 27, 28, 33, 40, 43, 44, 48, 62, 64,94, 96, 212, 244, 309, 387, 398, 403, 408, 422, 439, 466,468: n = A,T,C or G
gttgannctntttaatatnngtcgannnaattntacctcnacnngggnggcggccgtactgnancctatcctgtccaccttgcgcgcctgaacntnagggccggaccggcccgcgtaagccccatgccccgcacgccggggcattttttttgaccgcacggcaagccgttgctggacaaatggtttttttcgcaaacattttgcctgtcagnaaattatcgtcctacactatttaacagaatcnggccgtgccacactgcgcggctcccgcaagaatatacggccgctctagaactagtaggatccccngggctgcaggaattcgatatcaagacttatctgatgcccgtacgacctcagaggggaaggccccggtacccagacttnttgttcccttntagtngaagngttaaatttggcgncgcttggacttaatccntgggcatagactgtttaacttgtgtgnanaattg

SEQ ID NO: 2705 - DNA, 658 bp, Homo sapiens
  misc_feature 5, 13, 15, 41, 45, 67, 75, 86, 89, 108, 153, 161, 176, 177,180, 181, 243, 245, 247, 262, 271, 318, 325, 339, 362, 368,384, 404, 433, 438, 450, 451, 469, 477, 479, 507, 523, 529,544, 547, 548, 561, 564, 565, 566, 575, 593, 594, 596: n = A,T,C or G
  misc_feature 600, 604, 617, 627, 633, 652, 654, 655: n = A,T,C or G
ccccntccccttngnaaagcctatagggcgttttggagctncccncggtggccggccgcccgggcangtactttnttttttttttnttnttttttttttttaaaacgnctcatcgcagtttattagcctctacagtttttaaatttactaaancagggccnaaaagtacaggtttnngtnnagatttttttgggaggctcacaggcagcatgacatgactttataagggaaaaaggggcaatncnantgggtttttttaaanaattttaantggaacttgaacttttcctgggcctcccaaacaaggccagggcttgngcttgtnagggtaaagccctnttccatccaaggtgggaagggancaccangtccctccagttttanaccaggaggaaaaaatttanggaccccaaaaaaagaatgtaaagttttncccgncggtaacccttnngggcccggcttttttagnaaacctangntggggaattccccccccgggggccttgntaaggggaaattttcngaatantccaaaggccttttnttnnggaataaccccgnacnnnaaccccttnctaggggggggggggggnncncccncggntataccccccaangctttttttnggtatncccccttttttaaagatgngnnggg

SEQ ID NO: 2706 - DNA, 475 bp, Homo sapiens
  misc_feature 4, 193, 195, 306, 324, 339, 347, 386, 399, 400, 404, 413,416, 418, 422, 428, 453, 458, 463, 471, 472: n = A,T,C or G
ggcnaattggagctccaccgcggtggcggccgaggtactgctttgaatgtgactgtttccgttgccaaacccaggacaaggatgctgatatgctaactggtgatgagcaagtatggaaggaagttcaagaatccctgaaaaaaattgaagaactgaaggcacactggaagtgggagcaagttttttggccatngngcccagggcgatcataagccagcaatttctgaacggcttcccgatatcaacatctaccagctgaaggtgctcgactgcgccatggatgcctgcatcaacctcggcctgttnggaggaagccttggtttntatggtacctgcccngggcgggnccgcttttagaaacttagtgggaatcccccggggcttgnaaggaaatttcgnntttnaagccttantcngnatanccttcnaacccttgaaagggggggggccccnggttncccancttttttnnttc

SEQ ID NO: 2707 - DNA, 506 bp, Homo sapiens
  misc_feature 53, 54, 185, 187, 236, 347, 356, 363, 371, 407, 418, 432,459, 466, 472, 480, 489, 492, 495, 498, 506: n = A,T,C or G
gcggtggcggccgcccgggcaggtacgcgggaggcattgaggcagccagcgcnngggcttctgctgagggggcaggcggagcttgaggaaaccgcagataagtttttttctctttgaaagatagagattaatacaactacttaaaaaatatagtcaataggttactaagatattgcttagcgttnanttttttaaccgtaatttttattagctttaagattttaagagaaaatatngaaggacttagaaagagtatcatgaggaaggaaaagataaaaggtttctaaaacattgacggaggttgagatgaagcttcttcatggagtaaaaaatgtatttttaaaagnaaaattganagaaagngactacangagcccccgaatttaataccaattagaaggggcacntgctttttagnattaaaaatgaagnggggactttaaaccaggcttttagaangttttantttttnaaaaaagnttgttaaanggntgnatnttaaaaan

SEQ ID NO: 2708 - DNA, 533 bp, Homo sapiens
  misc_feature 12, 23, 28, 37, 48, 74, 88, 233, 234, 256, 261, 263, 288,448, 518: n = A,T,C or G
gccgcttcgaancctttttggcnaatcngagctcccntttgtggcggncgacgtacgcgggaccacttctctgngacacattgccttntgttttctccagcatgcgcttgctccagctcctgttcagggccagccctgccaccctgctcctggttctctgcctgcagttgggggccaacaaagctcaggacaacactcggaagatcataataaagaattttgacgtttccaanntcaagtaccgtccaaaatgacngaagntnactgcagtgcttgcaggttcaagcnagaattgaaagaaatgcatgggtgggttaaaacttacctcattagcagcatccctctacaaggtgcatttaactataagtatactgcctgcctatgtgaccgacaatccaaaaaccttctactgggactttttacaccaacagaactgtgcaaattgcangcccgtcgttggatgtttattcggggaattagggcatctgcccctgaatgaatggctggcttgtaattcnccccaattcaaaaaa

SEQ ID NO: 2709 - DNA, 570 bp, Homo sapiens
  misc_feature 119, 121, 126, 132, 142, 147, 148, 154, 167, 169, 175, 180,182, 191, 192, 213, 216, 224, 230, 231, 232, 234, 236, 250,258, 266, 273, 274, 292, 296, 299, 300, 305, 336, 350, 353,372, 373, 385, 386, 395, 400, 406, 408, 414, 444, 448: n = A,T,C or G
  misc_feature 449, 455, 456, 462, 471, 472, 474, 475, 499, 505, 515, 525,529, 533, 541, 552, 555, 557, 566: n = A,T,C or G
ggcgaattggagctccaccgcggtggcggccgaggtacttttttttttttttttttttttctttttttttttttttttttttttttttttttggccatcaatttattaaaataaacatntntagcnggtttnaacaattgtnttgtnntttgtngtaaaaagacttnanaaaganaaggngnggtttgcannaatccctaactggtttttcancanaccctgcnattttnnngnanccaaaaggtttttncaaaaagntttaaaantaaatcnncaaaagactgttttgtancccnccnntaccnttgcccggggcgggcccgtttttaaaaaacntagtggggatcccnccnggggcttgcagggaattcnnattttttcaaannttttatttngaatncccgtncngacccntcggagggggggggggcccccgggtaaccncaanntttttnntttccncttttaagnngnngggggtttaaaatttgcccccccntttggnccgttaaatncaagggggtnaaanaaancccttggnttccccctggnggntnaaaaaaaanttgg

SEQ ID NO: 2710 - DNA, 788 bp, Homo sapiens
  misc_feature 2, 3, 6, 11, 12, 14, 15, 22, 23, 24, 27, 28, 30, 32, 33,35, 36, 38, 41, 43, 44, 45, 46, 47, 48, 49, 51, 52, 53,57, 59, 62, 64, 65, 66, 67, 68, 69, 71, 72, 73, 75, 76,78, 79, 80, 85, 86, 88, 91, 92, 93, 95, 96, 97, 106, 113,128: n = A,T,C or G
  misc_feature 130, 133, 134, 147, 148, 150, 151, 154, 158, 159, 161, 294,320, 323, 334, 352, 353, 363, 378, 385, 398, 406, 411, 421,426, 428, 439, 447, 455, 500, 512, 516, 525, 536, 567, 574,579, 591, 600, 608, 614, 615, 630, 645, 647, 653, 672: n = A,T,C or G
  misc_feature 675, 694, 719, 730, 747, 759, 770, 774, 788: n = A,T,C or G
tnntantttanntnntttttannnatnntntnntnntnatntnnnnnnntnnntttntnatntnnnnnntnnntnntnnnttttnntnttnnntnnnggttccctntcgatcntatagggcgatcgcncngcnncggcgggggttcnncnntgngggnncntttccgcttcctcgctcactgactcgctgcgctcggtcgttcggctgcagcgagcggtatcagctcactcaaaggcggtaatacggttatccacagaatcaggggataacgcatgaaagaacatgtgaagccnaaaagggccagcccacaaagggcccnggnaacccggtaanaaaagggcccgccgtttnnctagggcgtnttgtttcccaataanggccttnctcggcccccccncttgtacngaagnccattccaancaaananaaaattccggnaccggccnttcaaaanggttacaagaaaagagggttggggcccggaaaaaaacccccctgnaaccaagggggnaacnttaaattanaaaaagggaanttaacccccaagggggcccgggtttttttcnccccccnccttngggggaaaaagnccctttccnccccttcnaaatannaccggcccttccttncccccttggtttttncnccgganacccccctttggtccccgntcnttttaacccccgggggaantaaccccctttggttccccccggcncctttttttcnttcacccctttttccgngggggaaaaggnccggttggggnccgnccttttttcctttn

SEQ ID NO: 2711 - DNA, 531 bp, Homo sapiens
  misc_feature 224, 388, 465, 483, 507: n = A,T,C or G
gggcgaattggagctccccgcggtggcggccgaggtacgcggggatcggaaatttgaattacctctagaccaggatttgtcagtctctttactattgacattttgggtcagatcattctttcattctttcttggttgaggggttgatattgtttggtgtgtcctcatccaaatctcaaattatagctcccatagttcccatgtgtcatgggagggaacccgggngggagggtaaactgaaaacataagcaaaggtctttcccttgctcctctcatgacaggtgaatttctcatggatatctaaatggttttataaagggggagttcccctgcacacgctctctctcttccccgttgccatgaaagatgtgaccttttgctcctccttncccatgaattgtgaggctttccccagttcacaaagggaaactggtggagttcccattaaaaccctttttttctttgntaaaaaatttacccccanttctttcaagggttaaggggttcnttttttatttacgcccaggccctt

SEQ ID NO: 2712 - DNA, 461 bp, Homo sapiens
  misc_feature 6, 22, 30, 31, 35, 41, 43, 54, 58, 60, 62, 65, 68, 70, 72,74, 77, 79, 81, 83, 86, 87, 96, 130, 169, 175, 181, 191,192, 195, 200, 201, 206, 212, 356, 395, 401, 419, 424, 426,439, 461: n = A,T,C or G
acgcgnagacgtgtttggagcnccgccgcnncggnggggcngncgaaccgggcnggtncncnggnctncntnanttntntntnatnnttatttatnccgttttaccttttagggggggcccggtacccancttttgttccctttagtgagggttaattgcgcgcttggngtaatnatggtnatagctgggnnccnggggnnaaaanttggtnatccgctcacaatttccacacaacataccgagccgggagcataaagtgtaaagcctggggtgcctaatgagtgagctaactcacattaattgcgtggcgctcactgcccgctttccagtacgggaaacctgtcgtgccagctgnattaatgaatcggccaacgcgcggggagaggcggtttgngtattngggcgctcttcccctttncttgntnactgactcgctgngctcggtcgttcggctgcggcn

SEQ ID NO: 2713 - DNA, 465 bp, Homo sapiens
  misc_feature 1, 8, 20, 22, 28, 29, 31, 36: n = A,T,C or G
nagggttngatcactacttngncgggcnngnggtanctccccgcggtggcggccgaggtaccttaaagcagaatccatagttagtcggtgctccatgtttttttttgcctgccagtgacacataaatatcactattgccaaattcgctgaaaaactgcaaatgccgcggttcctggaggcatcacattacccgacttcaaactattacttacaaaggccatagtcacccaaacagtaaagtacctgcccgggcggccgctctagaactagtggatcccccgggctgcaggaattcgatatcaagcttatcgataccgtcgacctcgagggggggcccggtacccagcttttgttccctttagtgaagggttaattgcgcgcttggcgtaatcatggtcataagcctgtttcctgtgtgaaattgttatcccgcttcacaattccacacaacattaccgagccggg

SEQ ID NO: 2714 - DNA, 456 bp, Homo sapiens
  misc_feature 3, 36, 37, 50, 58, 254, 256, 286: n = A,T,C or G
agnccctaacactacttagggcaattggagctaccnncccggcggggcgngccgaagnacttttttttttttttttttttttttgagggggagtcttgctctgtctcccaggctggagtgcagggctgctatcttggctcactgcaagctccacctcctgggttcacaccattctcctgtctcagcctcccgagtagctgggactacaaaggtgcccgccaccacacccgactaattttttgtatttttagtananacggggtttcaccatgttagccaggatggngttgatctcctgacctaatgatctgcctgtttcagcctcccaaagtgctgggattacaggcgtgagccaccatgcctggcctctcacatggccttttactcctttgtggttgctgctcatctttcaactttcctttctaatttgtcaaaatgttttcctatttccagctt

SEQ ID NO: 2715 - DNA, 512 bp, Homo sapiens
  misc_feature 202, 224, 249, 265, 272, 275, 291, 292, 365, 436: n = A,T,C or G
agggcgaattggagctccccgcggtggcggccgcccgggcaaggtacgcggggaggcattgaggcagccagcgcaggggcttctgctgagggggcaggcggagcttgaggaaaccgcagataagtttttttctctttgaaagatagagattaatacaactacttaaaaaatatagtcaataggttactaagatattgcttanccgttaagttttttaccgtaantttaaatagctttaagattttaagnagaaaaattatgaaanactttanaangaagtaggcattgganngaaagggaaaaagaataaaagggtttcttaaaaacatgacggaggttgagatgaagcttcttcatggagtaanaaaaaaaaaaaaaaaaagtacctcggccgctctagaactagtgggatccccccgggctgcaggaattcganattcaagcttatcgatacccgtccgaccttcgagggggggggccccggatacccagctttttgtttccccttttta

SEQ ID NO: 2716 - DNA, 518 bp, Homo sapiens
  misc_feature 2, 183, 207, 241, 262, 265, 329, 364, 371, 411, 418, 446,447, 466, 471, 473, 480, 504: n = A,T,C or G
gnctcactactatagggcgaattggagctccccgcggtggcggccgaggtactcagtggccatgtggagctagtggccaccacacttgacaccacggatgcagaacttttccatcactgcagaaagctctgttgaacagaactttttttttttttttttttttttttttttttcccgcattanatcactgggggtcttaagcaattnttcaaagcgaactttggtttttaatttttggctnaactctaaggtgggaggcatnttnttcagcttttatgcaaaagggacttgaaaaatgcaaagcattgactcaatcagggatccttttntcagacataattaagaaggctttgacaggttgaanattcagnccccaggttcccgcgtaccttgcccgggcggccgttttanaactagngggatcccccgggcttgcagggaattcnnatatcaagcttatccgatncccgncnacctcgnggggggggggcccggtcccccaanctttttgttttccc

SEQ ID NO: 2717 - DNA, 492 bp, Homo sapiens
  misc_feature 220, 221, 222, 224, 236, 410, 476, 478, 486: n = A,T,C or G
gggcgaattggagctccccgcggtggcggccgcccgggcaggtacagtagtggcaaccacgcccgggaaaatccataggatcatttcagaccgcattcaacacagatactcatgtagccccgacgtttcttgtgaagggaattgatgtattgcttgagggggtcgatctctggttctaaggtgttttgtttgtttccatcgtgactcccagaaaattatnnnangggccagacccnattggctcatgcctgtaatcccagccagtttttctaaagttttaatctgtctcctccactaggccatgagccctaggaggagattgtctctagagggtatcccctgtgcctggcacatgcatgcaagttatgatttatgtttgatgaatgaatgaatgaatgaatgaatgaatngaatggtggatgggtccttcttgagggctcttagaaaatagggggttgaagaaggccagcccaggntnttagcatngaaagg

SEQ ID NO: 2718 - DNA, 496 bp, Homo sapiens
  misc_feature 181, 206, 211, 212, 218, 224, 225, 231, 233, 234, 250, 265,279, 385: n = A,T,C or G
ggcgaattggagctccccgcggtggcggccgcccgggcaggtacgcgggcttccttttcagattccctgtctgctcaattaaagatgtttgaatccaaaggaagtcaaggaagaaaaagcatggaaaggaagagaactgattcctactgaaaattcaaattctattaccattctaactttnataaaaagtttgggatcaaaaaacnacttnnttttcntgcccnnggcttntnnttagggggggggattnttaaagggacattanggattggtgctcanaaaatggttaatcattgctgtgtgctagccagggccagctggtacctcggccgctctagaactagtggatcccccgggctgcaggaattccgatatcaagcttatngataccgtccgacctcgagggggggcccggtacccagctttttgttccctttagtggaggggttaattggcgccgctttggccgttaattcatgggtcaataagccttgtt

SEQ ID NO: 2719 - DNA, 503 bp, Homo sapiens
  misc_feature 248, 419: n = A,T,C or G
actactatagggcgaattggagctccccgcggtggcggccggcctattttattttaagatggagtcttgctctgtcgcccaggctggagcgcagtggcacgagctcggctcactgttctccagcctgggtgactgagaaagaatctctctcaaattaaaaaaattaaaaaaaatgtgtgtggtgggggtatcttgactttcctccatgtgtcttaggcccccaactttttacatggggacctttgcanaagagaattccttcaaaccaaatacctttatggtgcttgcctccctgatgggcttggggttctaaacagcagtgccttccccatctgctcagtccttactcacctgggcaccatcctcctggtacctcggccgctctagaactagtggatcccccgggctgcaggaatttngatatcaagcttatcgatacccgtcgacctcgaggggggggccccggtacccagcttttttgtttccctttttaagtgaagggg

SEQ ID NO: 2720 - DNA, 507 bp, Homo sapiens
  misc_feature 1, 2, 112, 204, 207, 216, 218, 226, 385, 387, 394, 405, 475,492, 502, 505: n = A,T,C or G
nnttggagctccccgcggtggcggccgcccgggcaggtacaggcccgatattatctttacaagcatgcctacttttatcctcatttaaaacgatttccagttcagggcagtngtgactcatccgaagaaaatggagatgacagttcagaagaggaggaggaagaagaggagacttcaaatgaaggagaaaacaatgaagaattnaangaagaatgnangactttgngggcttgagaatacccacacttttctgctacagcactggggcttatgggagagggacgccaccgcctgggcacaggggtatacagggttagcttgcaatccagcttcccaagaaggctggggatataacaaaacaaagctacaaaagagaaggaaaatntnaatattnaaaaaataaanaaggttacctcggccgctctaagaaactagtgggatcccccggggcttgcagggaattttcgtatttttnaaagcctttattttganttacccccgnccngg

SEQ ID NO: 2721 - DNA, 561 bp, Homo sapiens
  misc_feature 8, 150, 154, 156, 163, 164, 165, 166, 167, 170, 180, 181,188, 189, 190, 192, 194, 202, 203, 205, 208, 215, 223, 227,230, 233, 235, 242, 243, 245, 253, 262, 266, 269, 271, 273,274, 276, 302, 308, 311, 315, 321, 325, 333, 350, 351: n = A,T,C or G
  misc_feature 353, 358, 367, 369, 370, 373, 375, 376, 384, 385, 386, 387,392, 406, 409, 411, 414, 418, 437, 440, 449, 457, 459, 462,482, 483, 488, 491, 497, 502, 507, 509, 511, 516, 518, 520,521, 524, 527, 542, 544, 553, 556, 557, 559, 560: n = A,T,C or G
gtttacgnaacactactatagggcgaattggagctccccgcggtggcggccgaggtactttttttttttttttttttttttttttatttttttttttttttttttttttttttttttttttttttttttttttttttttttttttttttntttngnggggggnnnnnggncccttttttnntaaaaannncngnccccaaanntnaantttaaanaaaacccntttnccnggnanaaagggnnanaaaaaaanttttaaaanaaanatntncnngnaaaaaaatacaaaaaccctggcaaangggggntcntatnaaaacntttnattccccnggccttttttaaaaaanngngggancccccgggngnnggnannaattttannnnaaaantttttttaaacccntcnanccnttgngggggggggggcccggaanccnaattttttntccccttnanggnggggataaaattgccccctnnggggnaanaaaaangggcnaaaanantnttttncntnnggnggnaaaaaaatttttatntnccccccccnccnncnng

SEQ ID NO: 2722 - DNA, 515 bp, Homo sapiens
  misc_feature 1, 5, 7, 33, 223, 233, 234, 237, 248, 468, 469: n = A,T,C or G
ncgcnancactacttagggcgaattggagctcnccgcggtggcggccgaggtacgcggggacctcattcatttctaccggtctctagtagtgcagcttcggctggtgtcatcggtgtacttcctccgctgccgcccccgcaaggcttcgccgtcatcgaggccatttccagcgacttgtcgcacgcttttctatatacttcgttccccgccaaccgcaaccantgaccccatnnttngggttatttcnagtgaccgagacccgcgggccgctctagaactagtgggatcccccgggctgcaggaattcgatatcaagcttatcgataccgtcgacctcgagggggggcccggtacccagcttttgttccctttagtgagggttaattgcgcgcttggccgtaatcatgggtcatagctgtttcctgtgtgaaattgttatccgctcacaaattccacacaacattacnnagccggggaagcattaaaagttggtaaaagccttgggggggtgcct

SEQ ID NO: 2723 - DNA, 865 bp, Homo sapiens
  misc_feature 4, 5, 17, 27, 31, 32, 33, 35, 38, 41, 44, 46, 48, 50, 58,66, 72, 74, 91, 99, 105, 119, 120, 121, 122, 123, 131, 158,187, 227, 262, 266, 270, 271, 289, 327, 358, 360, 368, 369,372, 379, 381, 386, 392, 393, 405, 428, 438, 468, 471: n = A,T,C or G
  misc_feature 473, 474, 489, 493, 498, 509, 521, 529, 537, 558, 589, 600,602, 611, 623, 624, 626, 646, 649, 651, 660, 661, 670, 671,675, 682, 709, 720, 735, 742, 746, 754, 759, 760, 762, 763,764, 770, 774, 779, 798, 802, 805, 812, 814, 822, 827: n = A,T,C or G
  misc_feature 834, 843, 848, 850, 857: n = A,T,C or G
tcanntttatgtatttncatatctatntgtnnntntanatnaantntncntatgaatnatagtttntcattntnttattaattgtaatatntatttatntttctntctaagtagaggtnnnnnactcgatnatatagggcgaattggagctccaccgnggtggcggccgcccgggcaggtaccagcngaaatcaggacagtcccctaagctactcacttactgggcntctacccgggaatccggggtccctgaccgattcancggnatgnnggtccgggacagaaattnactctcaccatcaacaacctgcaggctgaagatgtggnaagtttataactgtccagccaatatttaatnantaaccttnnttntccactntnatggntcgggnngggaacccaaanggtttgggagtattcaaaaagcntaaacttggnggggcttgcgacccaataccttgttctttncantnnttttctcccccgctncaantcctntgaaatggaangccaagcttttntaaataantcctttgngaaaaaccttggcccccttcnttggttttgggtgggttggcctccttggccntgggaaaattnanaaccttttncgttaatttccnncnaagtaaagtaagggggcccnaananatggattanncacctttcnngggnccccggnatttcttttaggtaaaactttatgggntggggtattcnccccccccggggggnccttggnaaanggggaaanttttnncnnnattaanttcnaaagngccttttaatttcgggaantaanccnctgtatntngaaacccnttacnataaagnggggggggnggggncnccccctngggttaat

SEQ ID NO: 2724 - DNA, 519 bp, Homo sapiens
  misc_feature 2, 3, 4, 8, 10, 253, 406, 441, 444, 504: n = A,T,C or G
gnnnatgnancactactatagggcgaattggagctccccgcggtggcggccgaggtacttttttttttcttttttttttttttttttgcttttttttattttcttttaatgcatcaaacaactgtggccagtgaaaggaaacaaaactggcagtttgtccatttgaatatcagacctagtttcttcttaatttccacactatttctcccatattccttaaacttcttggcatccttcaatgccttacagcttncccaagatgcaataaaagtcattgtaccagtatttcttacaatataagttatatgccaatgttcaagcattttttttttttcacagcactagagaccctgttaaataggggatatgagtcagaatggcttattcacagatggggtccagattnagtgccccgccgtaccttgcccgggcgggccgttntanaactagtgggatcccccgggctgcagggaaatttcgattattcaaagcttatttcgatancccggtcgaaccctc

SEQ ID NO: 2725 - DNA, 513 bp, Homo sapiens
  misc_feature 2, 3, 4, 7, 433, 460, 495: n = A,T,C or G
gnnncgnatcactactatagggcgaattggagctccccgcggtggcggccgcccgggcaggtacctcagaagcaaacccagttcctgcacacagaaaccccattcaggctcctactgcactgagaagcacgtgttctccatttccctgggggagaccattgtattgggcagtttggaacaaaacaccatggactgggaggcttacacaacagaaatttatttcttgctgttctagaaggctgggaaagctcaaggtgctggcttgcatattcattctgaggcctcttctgatgtgcaggcagctgccttctgacttgtgctcacattggagagagggagtcagctttggtgtctcttcttgtaaggacactaaccccattcactagggccccaccctcatgacctaatcacccccaaaggtcctgtctccagnacatatcacatgggggcaagaagcttncaatggtacctcgggcccgctctaagaaacctagntggggatccccccggggg

SEQ ID NO: 2726 - DNA, 523 bp, Homo sapiens
  misc_feature 2, 3, 239, 249, 257, 334, 336, 339, 352, 353, 378, 416, 417,469, 474, 493, 519: n = A,T,C or G
gnngcgtaacactactatagggcgaattggagctccccgcggtggcggccgaggtacgcggggaaatcaggtttttttttttaaagtgaaacttgatgatttttaaacaagtaattaaaaaaatgtccaaaacaccatgtgggccaaacatttgtttgagcctgggggccaccagtttgcgaccactgccttacgtagttaacaccctgagtatgtatacagtcatattttttggtttnggatattggnagtgttanatatacttggggggcgttgatatttgaagtcatctttatctctcagagttaagctttattgtagaagaaaaaaaatntnaanaaaaaaaaaaaannaggtacctgcccgggcggcccgctntaaaactagttggatcccccgggcttgcagggaatttnnatatcaagctttatcgatacccgtcgaccttcgagggggggggcccgggtancccancttttttggttcccctttnaagtggagggggtttaaattgccccncttg

SEQ ID NO: 2727 - DNA, 584 bp, Homo sapiens
  misc_feature 3, 6, 7, 9, 15, 17, 51, 160, 179, 188, 247, 311, 332, 336,352, 371, 418, 438, 459, 511, 518, 548, 568, 580: n = A,T,C or G
gtnccnnanctatangncgaattggaattgcacctccacggcgcggggcgntccgggcaggtacgacacccctcaagaaggtgggcccgaagctttcctgtcttccctgacagagaccatagaaaggaagtccgatgctgaaggatgggcaccggcccangggaacaacagaagccggnagatccgtnctgggaacccctttcaggctccatggaaacatcttacctgggtgcctagatggatcaanacagcatttgggggccagccaactttcaccaggaagccaaaaaggtgtctaagtccaacttaanttgaaaaaggtgggccaaagntatnggtgtggaagcccaangatatggtctaagtgaccntattgccacataccccaaaatttgggtcaaaaagtggtctgaagcanaccagcatttaattgccagnactggggtcaacgaaagccanctcaaatggaaaatcaatttattgaaagaccaccaaggtttgaaaagttcanggggacntaaacacccaaagaaagggccccttccatngccagtggttacctttgggnccggtttttaanaaac

SEQ ID NO: 2728 - DNA, 450 bp, Homo sapiens
  misc_feature 3, 4, 5, 6: n = A,T,C or G
agnnnncctatcgactactatagggcgaattggagctccccgcggtggcggccgcccgggcaggtactgtggatcttggctcactgcagcctccacctcttggattcaagcagttctcctgcctcagcctcccgagtagctgggagccaccatgtccagctgatttttgtatttttagtaaatgagttttcaccatgttggccaggctgggtctttgaactcctgacctcaagtgagctgcctacctggcctcccaaagctctgggattataggtgtgagccactgtgccaggcctgaggttgggagaaattttgtccatttctttagaaccaaaattggcaaccagagagtatttgggatgttacacaaaatatttagtttccctttctagcctaaattggggttgtttatagcacccgtctctccatttgagaaaaatggttaggatg

SEQ ID NO: 2729 - DNA, 869 bp, Homo sapiens
  misc_feature 3, 5, 6, 7, 8, 11, 17, 19, 22, 27, 30, 31, 34, 43, 45, 49,51, 52, 60, 61, 64, 65, 66, 69, 70, 74, 75, 76, 78, 84,88, 89, 90, 91, 93, 94, 103, 107, 111, 112, 115, 117, 119,122, 134, 190, 317, 337, 339, 348, 359, 389, 397, 407, 413: n = A,T,C or G
  misc_feature 430, 441, 457, 458, 466, 479, 481, 483, 484, 485, 489, 501,503, 505, 508, 527, 544, 545, 553, 559, 565, 579, 581, 583,591, 598, 605, 606, 618, 619, 625, 630, 633, 641, 650, 651,654, 671, 676, 678, 681, 682, 690, 696, 697, 698, 705: n = A,T,C or G
  misc_feature 717, 724, 727, 733, 744, 747, 760, 763, 764, 766, 792, 796,798, 818, 833, 835, 842, 859, 867: n = A,T,C or G
tcntnnnnttnttaaananaantttancgnntangtaaataancntatntnntttctatnnatnnnagnnctcnnntnaaatgntggnnnntnngtattaatntttntaanngtntntnttntagtaggcggcncaacgatcatatagggcgaattggagctccacccgcggtggctcgcccgggcaggnacaccctgttcttctctggcttgcccaccagcggcctctggaccgtccaggccatggatcctaacgctgcttatgtgaacatgagtaaccatcaccggggcctggcttcagccaacgtttgactttnccttcaggccttgttattanancacccttangtgggcccttngaaagttcccccaaaataaaagaatacaanttttttanaattccttancccctngttggaagccaaattcntctccatttgnggccccttttaagacnntaatttgncttggttcacccntngnnngccnaacccctttggntngnggnctccaacccaatccatccnggggggcccccccaaannccttttanctttcncaaggnggggcctccttagngngntttttttnaaaaacncccttcnnaccctttggtannaaaagnggatntcnttgggaantaaccttgnnaantgaattccccatccccnaagtngnggnntttttttncccaannncctaacncccttgggccancccccanaancttttncttttttttgntcnaaaaaaaagtttncanngnaaccaacccccaaggggctttttatngtanantatttggaacccccacttgngggggttaaaaattngnccccctnttgggtatttccctttnggaaattngg

SEQ ID NO: 2730 - DNA, 442 bp, Homo sapiens
  misc_feature 4, 95, 116, 151, 230, 237, 238, 240, 243, 254, 258, 274,317, 367, 368, 378: n = A,T,C or G
actncttagggcgaattggagctccccgcggtggcggccgcccgggcaggtactcacatcacaatgtcattttgatatggagcgttttgttattnttacaaggcagaatggggtgnaacagttgaattaaacttagcaatcacgtgctcanagcttttgcctgtcagttgtgtgtgtcccttataggccctttcccccacaagctctttgctgaaagaagtttgccttgntttgttnngntgntttgtatttanccanaggatgtcaaaattantcttctcaaagctttgagtagagtaagtgtgggaataagccantattttttttctgtttctgtaactcaaatgaacgggtttttttcccttgnntgccacttgncctaacatgtccttaaggtgtttaacctgcctctgacctggcttgcaatgcataggtgaggaga

SEQ ID NO: 2731 - DNA, 459 bp, Homo sapiens
  misc_feature 2, 3, 16, 58, 281, 301, 317, 332, 409, 459: n = A,T,C or G
gnnaggttccccatcnttagggcaattggagctccccgcggtggcggccgaggtacancaaaacccacctgtgtaaacacacacagcaaagtgatgtaagaagtttccatataaagggctgcagtatggagaggtaatgtgcaggctggtttgcggctgtaggggccaccttgctgcagctctccactgatatggtacctgcccgggcggccgctctagaactagtggatcccccgggctgcaggaattcgatatcaagcttatcgataccgtcgacctcnagggggggcccggtacccancttttgttccctttantgagggttaattgcncgcttggcgtaatcatggtcatagctgtttcctgtgtgaaattgttatccgctcacaattccacacaacataccganccggggagcataaaagtgtaaaacctggggtgcctaatgagtgagctaan

SEQ ID NO: 2732 - DNA, 462 bp, Homo sapiens
  misc_feature 13, 17, 18, 174: n = A,T,C or G
gtctcccactcantatnnggcgaattggagctccccgcggtggcggccgaggtacgcggccaaaaagaagtcagaaggagccaaatcaggactgtaaggtggatgaatgcctaatgatttcccatcaaagctctcacaaaattgcccttgtttgatgagaggaataagcagaancattgtgatggggaaggactctctaatgaagctttcccaggtgtttttctgctaaagctttggctttctcaaaacactttcataataagcagatgttgttgttctttggccctccagaaaaccaactagaaaaattcctttaacattccaaaagactattgccatgagctttgttcttgaccagtccagttttgctttgactagaccgcttccacttcttggtagccattgctttgattgtgctttatctttaggatcatactggtaaagccatgttttgtctcctgt

SEQ ID NO: 2733 - DNA, 438 bp, Homo sapiens
  misc_feature 260, 308: n = A,T,C or G
attggagctccccgcggtggcagcggccgcccgggcaggtactggaatggccaagtgggactgcttcagctgaccaggttcttttaaaccgtagtcatgctttcccactaactcttaaatccttatgcttagaaaattgaggataaggctgggcacagtggctcaggcctgtaatcccagcactttgggagaccaaggcgggtggatcacaaggtcaggagatcgagaccatcctggctaacatggcgaaaccccgtctntactaaaaatacaaaaaaatagctgggcgtggtggcgggcgcctgtantcccagctactcatgaggctgaggcaggaggatcacttgaacatgggaggcggaggttgcagtgagccaagatggcgccactgcactccagcctgggtgatggccgtgagactccatgtcaaaaaaaaaa

SEQ ID NO: 2734 - DNA, 431 bp, Homo sapiens
  misc_feature 3, 59, 122, 206, 209, 225, 247, 258, 366: n = A,T,C or G
ctncttagggcgaattggagctccccgcggtggcggccgcccgggcaaggtacttccgngcttcttcatttcttcgatagccataaaattttctagctctctatcaccatccttatttattnctggttcttgagatcttttctctggctggccattttcactgcctttaagcctttgtgactcttcctctgatgtcagctttaagnctngctctgggttgctgtnttcagaagagtattttggcatntgtttttcttngtagtcagaaactaattcgcaaatactgtgatactcttcactttcgttgtcaggaaactgctgattttcaggtgttctgctcttcctttgaggaattaatccatcatnaccattgccagcagtgacaccattagtcaggttttctagtaatcccacattattactttgatgct

SEQ ID NO: 2735 - DNA, 464 bp, Homo sapiens
  misc_feature 9, 21, 79, 86, 96, 101, 121, 126, 143, 169, 178, 180, 219,249, 251, 266, 269, 285, 302, 311, 326, 328, 343, 347, 350,358, 363, 394, 398, 406, 409, 438, 463, 464: n = A,T,C or G
ctccactantatagggcgaantggagctccccgcggtggcggccgaggtactttttttttttttttttttttttttggnctcccangacctctttncactnttaaaaatgacatcctaaanggctnttatttatatggatatntactgatattgaccatattcaaattnaaaacaaangnttgaaaatattcactaattcctttaaaaatagctcattnaaaatatgaaaaagatacttttacaaattnantgagaatatcactgnttnataattttgcaaatcncttaatgcctggcttanatgaaaacngctggagtcccatancngtttctgcattaaanttgntgntatatganttttntgcttaaaacctatgaggaaaatgtggcttnaccnaaaaatgnagntgtgaaaaggaaaaggcttataatagccntttctgattaattataggatattcnn

SEQ ID NO: 2736 - DNA, 468 bp, Homo sapiens
gggccctatcatacttagggcgaattggagctccccgcggtggcggccgcccgggcaggtacatcctgtgaaatccaggtggaggctcccaaacctcagttcttgacttctatgcacttgcaggctcaacaccacatgaaagctgccaaggcctggggcttgaaccctctgaacgcatggcctgagtttatactggcccctttcagtcatggctggagcagctgggatgcagggcaccacctttctggactgcacacaccatggggacccttggcccggcccacaaaaccatgttttcctcctaggcctttgagcctgtgatgggaggggctgccatgaagacctgtgacatgtcctggagacattttccccattgtctaggggattaacattcagctcctcattacttttgcaaatttctgcatccggcttgaatttctcctcagaaaatgggattttcttttcttt

SEQ ID NO: 2737 - DNA, 463 bp, Homo sapiens
  misc_feature 6, 238, 252, 260, 388, 434: n = A,T,C or G
gctacnactccttagggcgaattggagctccccgcggtggcggccgaggtacttgagggcttcattgccagaacacattatatacaggatgtcagagctaccagtgtgctgctgggagaaaatgctgcaaaattcatcttttggagggtggggggaaaacccaaaaacaacaacaaaaaaactctcttacagaattttccttaacattaaaaaaaacttgtcatatttttcaaaggcncatttgatactcanaattgctnaaagtatatttaaagacatctagccttccatatgtaaaaaatattttagataaagacagttacaggactcagaataatatattgggtgattcactgtatcctccatttttacatttaaagaaattcanaatacgtgattaaattttttttttttaatggatgggttggttctcngcttaaccacttggggggctagtggtctt

SEQ ID NO: 2738 - DNA, 496 bp, Homo sapiens
  misc_feature 2, 6, 9, 16, 375: n = A,T,C or G
gnaagntcntttgacnctatttagggcgacttggagctccttcgcggtggcggccgcccgggcaggtacgcgggatcaaacaagtcctccaaaagtggttgaaattgggcatcaaaggcaaaaaactcctgagggattgcaagaatcagctaatgtgaaaatctcaggaactttcagcagtgggtggactgtgaggctgcctgagttccagttttcttctcagaacaaagaatatcccgatcgggaagattgcactacagaaaaaggcaaaaagaccactgtagaaacagaagattcttctgtagagaaccctgaacaggatctgtttgtagaacaaaaaaaaaaaaaaaaaaaaaagtacctcggccgctctanaactagtggatcccccgggctgcaggaattcgatatcaagcttatcgataccgtcgacctcgagggggggcccggtacccagcttttgttccctttagtgagggttaattgcgcgcttggc

SEQ ID NO: 2739 - DNA, 495 bp, Homo sapiens
  misc_feature 2, 7, 9, 35, 42, 103: n = A,T,C or G
gnagttnantctactctacttagggcgaattgganctccttngcggtggcggccgggggccattgagactgccatggaagacttgaaaggtcacgtagctganacttctggagagaccattcaaggcttctggctcttgacaaagatagaccactggaacaatgagaaggagagaattctactggtcacagacaagactctcttgatctgcaaatacgacttcatcatgctgagttgtgtgcagctgcagcggattcctctgagcgctgtctatcgcatctgcctgggcaagttcaccttccctgggatgtccctggacaagagacaaggagaaggccttaggatctactgggggagtccggaggagcagtctcttctgtcccgctggaacccatggtccactgaagttccttatgctactttcactgagcatcctatgaaatacaccagtgagaaattccttgaaatttgcaagttgtctgggttcatgtctaa

SEQ ID NO: 2740 - DNA, 473 bp, Homo sapiens
actacttagggcgaattggagctccccgcggtggcggccgaggtacctggtgaatttcttgcacaagttgcggcagctgcctgagcgatacatgatgaacagcgtcctggaaaacttcaccatcctccaggtggtgacaaacagagacacccaggaactgctgctctgcaccgcctatgtcttcgaggtctccaccagcgagcgtggggcccagcatcacatttaccgcctggtcagggactgaagggggaccccaaaactggctcaccccccagaacaccctcctcccagggagggtcctccagctcacctcatgcttcttatttggggagagggctgtgatgtaaaggggttgacctcagaggcctaagcaactggggccatcccccccattagaggggcccccaaaacttggttggagagctgaacaggctgggactgaggaaaggataaaccccgatattgggacctca

SEQ ID NO: 2741 - DNA, 474 bp, Homo sapiens
  misc_feature 1, 2, 4, 13, 79, 99, 103, 116, 120, 130, 132, 135, 137, 141,142, 146, 147, 148, 155, 167, 228, 254, 274, 310, 319, 367,387, 420, 467: n = A,T,C or G
nntntagggcganttggagctccaccgcggtggcggccgaggtactttttttttttttttttttttttttttttggggnttttttctttttctttgttntatngtgccggtttttnggtntttagggggntnttncngccnncacnnnagaattnagccaacgccanatgccttgctccccacaatttggaacattccttttggattttgacccaagtcaagggaaanagatggggaggagaaagttgaaacangcaacaataaaccccaaacntaaaacaaaaagagttaagcaaaacaaacaaatgcncaattcatnttgattactgagtgttctaatggtaaggagaaattaaaagcagctggngggtcatcttaaaattttanttcatttaagggaaaaaattttaagacaaactntaattcagctacttaccttggaaataaaggctcaggctggtgattgnttctctg

SEQ ID NO: 2742 - DNA, 471 bp, Homo sapiens
  misc_feature 8, 9, 41, 43, 96, 105, 249, 427, 431: n = A,T,C or G
gaaattgnnccatttggaatccggcgaattgtttctgggcnanggccgcggccgcccgggcaggtacttcgggattatttctttggaaaaaagagnttttatgtntctgattggtgagtggcaagagttcaacatcgccaggtgtggtggctcatgcctgtaattccagcactttgggagattgaggtgagtggatcacttgaggtcaggagtttgagaccagcctggccaacatggtgaaaccctgtntctaccaaaaatacaaaaattagccaggcgtagtggcatgtgcctgtaatcccagctattcgggaggctaaggcatgagaatcacttgaatctgggaggcgaaggttgccggtgagcagagattgcacctgggttgacaggagttgagaccttgtcccaaaaaaaaaaaaaaaaaaanagtncctcggccgctctagaaactagttggatcccccggggctg

SEQ ID NO: 2743 - DNA, 458 bp, Homo sapiens
  misc_feature 393, 449: n = A,T,C or G
tatacgactcactatagggcgaattggagctccccgcggtggcggccgcccgggcaggtaccttgaagttcagatgagatttcggacttttgagttgatgctgaaacagcttgagatttttggggactactgagagatgataattgtattgtgcaatatgagaaggacatgagatttggtgggcataggtgtgaaatgacattgtttggatgtgtttaccctccaaatctcttgttgaatgtgatcttaaacgttggtggtgggcctagtggaaggtgttgaatcatgggggtggactcttcataatttgcttagctccatccccttggtgatgagcaagtccttgctctgttgtgtcacatgagaagctggttgtttaaaacagcctgccgntgtttcccacttcttgctattcattttctctcttgacaccgttgatacacttggcncctcacttt

SEQ ID NO: 2744 - DNA, 524 bp, Homo sapiens
  misc_feature 20, 42, 71, 189, 197, 199, 205, 257, 276, 293, 309, 326,331, 343, 348, 355, 357, 363, 364, 365, 367, 377, 382, 389,394, 407, 410, 414, 419, 421, 423, 428, 450, 451, 455, 460,471, 474, 475, 476, 478, 480, 484, 485, 493, 496, 508: n = A,T,C or G
  misc_feature 512, 513, 518, 523: n = A,T,C or G
ggcgaattggagctccccgnggcggcggccgcggactttgtncgcgggggttgatggaaggaagaacttgngtgcttagacctgacgctgggaggagatactgtcacctaggttacttgtaggaccctatacggcaacctcctttgccaggaactatttataaacatcctgcaggaaaatgagtctatntgtcagantnccacantttcccaccttgcccaacagttagaaaaacataataaagagaaaaacatttnaaaaaatgacaaagggaangtttaatggaaattcanccaatgtgatgggtgntttgggggtggaacccnttcanaaaggtaatttnattgnccctttntnaagaannnanggcccataanaagcntttggcnccaancctttttttttcnttntccnttgtngnangggangcccaaaaaaaaggccccgggnntttnttttngctaacccttnccnnntnangganncccccttntcntttttaaaaggnttannccctnttccng

SEQ ID NO: 2745 - DNA, 470 bp, Homo sapiens
  misc_feature 2, 3, 4, 5, 9, 10, 18, 20, 99, 326: n = A,T,C or G
gnnnngtcnngctctttncnactcctatagggcttttggagctccccgcggtggcggccgaggtacatctgcatgccatacttaagcaatctaattttnggtcacccagcacgtcctactctgcccttcttctgcacagagcattttcaggtctcggggccctcccgctttgttaggcttaaagcagaatccatagttagtcggtgctccatgtttttttttgcctgccagtgacacataaatatcactattgccaaattcgctgaaaaactgcaaatgccgcggttcagttcttcatggctggggaggcctcacaatcacagcanaaggtgaaaggcacatctcacatggcagtagacaagagaacttgtgcagggaaactcccctggaggcatcacattacccgacttcaaactattacttccccgcgtacctgcccggggcggccgctctaagaactaagtgggatc

SEQ ID NO: 2746 - DNA, 679 bp, Homo sapiens
  misc_feature 1, 6, 51, 74, 81, 122, 157, 239, 308, 324, 364, 365, 381,383, 393, 402, 418, 424, 432, 440, 457, 471, 480, 481, 489,492, 506, 514, 517, 520, 523, 531, 536, 538, 540, 545, 546,547, 548, 549, 554, 556, 584, 587, 589, 594, 596, 607: n = A,T,C or G
  misc_feature 619, 620, 621, 622, 627, 632, 633, 634, 651, 653, 656, 658,661, 664, 668, 669, 672, 678: n = A,T,C or G
ntatcnactactatagggcgaattggagctccccgcggtggcggccgcccngccaggtacccttgacatcacanggggcancccacatcaactgccattaaagaaaagaaatttcagcccanaatttcatatccagcaaaactaagcatcataagtnaaggagaaataagatccttttcagacaagcaaatgctgagagaattccggtatcaccagatctaccttacgagagctggggngaaggaagcactaaatatggaaagaaaagatcatcacctgccactacaaaaacgctctgaagtacctcngccgctctagaactantggatcccccgggctgcaggaattccatatcaagcttatnngataccgtccacctcnanggggggcccntgtacccancttttgttccctttantgaggnttaattgntcgcttgncgtaatcatggtcatancttgtttcctcgtntgaaaattnnaattcccnctnacaattccccacancatatctntcntgnatncataaaanttgtnananccctnnnnntgccntnatgaattgatgcttaactcacatttaanttncnttttntnctcacttgtcntatttttactcnnnnaaacnttttnnntcccactcattaattgnanccncncanccnccgnnganaacccng

SEQ ID NO: 2747 - DNA, 686 bp, Homo sapiens
  misc_feature 88, 184, 240, 242, 243, 252, 254, 278, 315, 327, 353, 383,385, 391, 467, 486, 488, 528, 538, 540, 562, 573, 575, 578,587, 588, 590, 598, 601, 604, 606, 613, 618, 626, 628, 643,644, 650, 654, 661, 668, 673, 674, 675, 685: n = A,T,C or G
cgcgtaatacgactcactatagggcgaattggagctccaccgcggtggcggccgaggtactttttttttttttttttttttggggganggagtcttgctctgtcgcccaggctggagtgcagtggcacaatcttggctcactgcaagctccgcctcccgggttcacgctattctcctgtctcancctcctgagtagctgggactacaggcgcccgccaccacgcccagctaattttttgngnnggttagtananacggggtttcaccatgttagccangacggtctggatctcctgacctcgtaacctgcccggncggccgctctanaactagtggatccccccgggctgcangaattcaatatcaagcttatccgataccgncnacctcnaggggggggcccggtacccagctttttgttccctttaagtgaggggtaattgccccccttgggcgtaaatcatggncataagctgttttccttgngngaaattgttatcccggtcacaattcccacacaacataccnagcccggaancntaaaagtgtaaagccttggggngcctaaatgangngancctaactcnncnttaattgngtngcncntcactgnccccntttccaantncgggaaaacctgtcnnggcccnctgnattaatnaaatcgncccannncgccggggang

SEQ ID NO: 2748 - DNA, 673 bp, Homo sapiens
  misc_feature 5, 88, 249, 579, 585, 611, 638: n = A,T,C or G
gagcnccgcgtaataccgactcactatagggcgaattggagctccaccgcggtggcggccgaggtacttttttttttttttttttttnggggggaagccttgtggtaaccacaaagcaaaaacttacaacagatacactaaaaataaaaagggacaaattaaaatatatattacctgagaaaattgcttaagcacaaaggaggatattaaaaaaaaagagagaggaaaagagaagacattaagaaaganggagaagaagagagaagtaagaaaacaagtagaaagcaagtaacaaaatggcagtagttagttgttacctgttaaaaataacattgaatataaatagaccgaattccccaataaaacatatacagtggttgaatgaatttaaaagcaagactcaactatatgctgtcaacaaaaactcactttacctataaagactcacatagactaaaagtaaagagatggaaaaacatattcaatgcaaatgaaaaccaaaaaagagcagaagtggttatacttatttcagatgaagtagactttaagctaaaaactataaaaggagacaaagaaggncactgnataatgatattattaatgatcatatntaatgattataaataaatttttatgtntaaaaaatttaaaccaataataatctaaaaagaga

SEQ ID NO: 2749 - DNA, 703 bp, Homo sapiens
  misc_feature 1, 3, 118, 130, 131, 159, 164, 169, 187, 198, 215, 219, 232,239, 246, 249, 251, 289, 308, 313, 347, 362, 367, 377, 388,390, 392, 397, 398, 411, 415, 427, 432, 433, 441, 453, 470,471, 482, 484, 487, 506, 518, 526, 527, 528, 531: n = A,T,C or G
  misc_feature 534, 539, 542, 543, 549, 550, 555, 562, 564, 565, 568, 569,570, 582, 592, 594, 600, 609, 610, 611, 612, 617, 623, 631,633, 634, 636, 637, 639, 640, 647, 648, 652, 654, 659, 664,666, 667, 670, 674, 682, 683, 684, 690, 692, 696: n = A,T,C or G
ncnactactatagggcgaattggagctccccgcggtggcggccgaggtactttggcctctctgggatagaagttattcagcaggcacacaacagaggcagttccagatttcaactgcntcatcagatggnngggaagatgaagacagatggtgcagccncaggntcgtnttgattttccaccttggncccttggcccnaaccgttgggggggggnaggnataaatatttggngacagtnatatggntgncncatctttcagccttgcaggctggctgatgggggagagngaaaatcttgtgcccagancccgnctgccactggattcggtcaggggacccccgggantccccgggcaagatngcccnattaaatgantcggtttaagngngngtggnnctgggtttctggntgantacccaactaanggagnngcttattnggtggggggganataaaaaaactttgggnngggcttgcagntnganggggggcccttttcccccngaaacacacccngggagggnnnggnganggggnatnncgatgnntcggnagggcancnnagnnncagacaacgcanaaatgaaggncngggggntggagcccnnnntgcgnggcccnggctgccngnngnngnnccccggnncccngnccggncggcngnngtngagntagggggnnncccggngntcgnaggattt

SEQ ID NO: 2750 - DNA, 679 bp, Homo sapiens
  misc_feature 4, 186, 192, 193, 204, 207, 208, 211, 212, 213, 214, 215,216, 217, 221, 242, 247, 248, 249, 250, 255, 256, 280, 284,291, 292, 299, 300, 304, 305, 320, 330, 331, 332, 334, 335,341, 343, 356, 364, 365, 378, 391, 392, 400, 408, 411: n = A,T,C or G
  misc_feature 416, 429, 430, 436, 444, 449, 450, 451, 456, 463, 464, 468,491, 492, 499, 501, 507, 508, 510, 517, 519, 525, 526, 527,528, 529, 537, 542, 546, 547, 548, 556, 558, 559, 563, 564,567, 575, 580, 581, 589, 596, 598, 599, 601, 618, 619: n = A,T,C or G
  misc_feature 624, 625, 628, 631, 634, 641, 642, 643, 644, 646, 657, 660,672: n = A,T,C or G
agcncgccgtaatacgactcactatagggccgaaattggagctcccaccgcggtggcggcccgaggtacttttttttttttttttttttgggggtttttttttttttttttttttttttttttttttttttttttttttttttttttttttttttttttttttttttttttttttttttttttttnccccgnnaaaaaaaaaanccnntcnnnnnnnaaanggggggggaaaaaaaaaaaanaaaannnnggggnnggggcccacccccccccccccctnaaanccccccnngaaaggnnaaannaaaaaaaccccttangccaaaaaannnanngccccnanaaccccccccccncccccccnnaaaaaaaaaaaanccccccccccccnnaaaaaacnaaaaaaanctnaacanccccccccccccnngggggncccccccnccccnnnttttnccccccnnaaanaaggaaaaaaacccccccccccnnaaaaaananaaaaanncnccccccnanaaaaannnnncccccccnaaaancccnnnaaaaaaananncccnnaanaaaaaaanaaaannccccccgnccccccnanngnccccccccccccccaannccccnnccnccnccnccccccnnnncnaaaaaaaaaanccncccccccccccnaaaaaaa

SEQ ID NO: 2751 - DNA, 683 bp, Homo sapiens
  misc_feature 123, 167, 441, 662: n = A,T,C or G
gagcgcgcgtaatacgactcactatagggcgaattggagctccaccgcggtggcggccgcccgggcaggtacgtttttttttttttttttttttttttttgaatttaaaaaatgttctttaanacccctccttaacggttgatggatttagcaagtagcaatataanatgttcggataaatttaaatttcacgtaacaatactttttccctgtaagcatgtcctaaatattgcatggggcatgattataataaaaaagttattatttatatgaaattcaaatttatctggaatccctgtcctttatctacttttgtttttatgatgatttttatgatgattaaaacaaaagtagagaactaaaaatttattttagtacttcctattgataaaaataaaattagatgttaattatagaaagttcacaaagctaaaaatttanaataaatttgaatggtcaaacctcaatacctgttttattgtgaattttcagcatttaccgcttaattttcattgatctttttgagacatcctatatatgttcagttctctgaatttctatttcatttctgttctgcaaacctttgatcttgccttttaccaaattcaatttttttcttcttttttaacaataagtgtattttgggtataattacccatggngtttgaagcaaaggggctcat

SEQ ID NO: 2752 - DNA, 677 bp, Homo sapiens
  misc_feature 84, 666, 674: n = A,T,C or G
cgccgtaatacgactcactatagggcgaattggagctccaccgcggtggcggccgaggtacttcctgtaattggcagccttgcnttgttcctcatggcatcattcaaggtcatcccctaaattttaacactttcgatgccatatacgttgtaaccttccttataagttgcaaaattctgtgaattctgcgaggaagatgggttaatattctgtgcattctttgccaccttcattcgtttcgcctcggcccttgacttgtaacagaactcaatcaaagccaccagcattgccaaaccaaggcccccggcaaggatgtagaatactccagcaacgttgctcagactgagggcactggtcttttcctaaagaatgtatatgagaagaggttattaggaaggcaaactggtgaatagaagagaacagcaatgtcacatagcattatcacgggaacaacctagtcacacagaatgcatttgaatttgagaaacaatggattttctcttagacccgcgtacctgcccgggcggccgctcgacactgcccgctttccagtcgggaaacctggccgtgccagctgcattaatgaatcggccaacgcgcggggagaggcggtttgcgtattgggcgctcttccgcttcctcgctcactgactcgctgcgctcggncgttcggntgc

SEQ ID NO: 2753 - DNA, 665 bp, Homo sapiens
  misc_feature 511, 562, 574, 581, 595, 609, 622, 637, 641, 653, 655: n = A,T,C or G
cgcgtaatacgactcactatagggcgaattggagctccaccgcggtggcggccgcccgggcaggtacaaaggaaccgaggggggaccacctctgagatgtccttgactttgtcatagcctggggcatattgagcatctctctcacagctgcctttcttatccccattcttgatgtagacctccttccgagtcagctttttctcctcctcagacacaaacagagctttgatatcctgtgcagggagcagctcttcctctggacgaatagactgcgtcacttcagctgctcccaccactgtcatctccccattgcctttgtcactcagtagatgtcccctaagcccttctagagctaggttctgggccaggcatcatctcttcctattgcacctccctctcatgccccacttgtctcttgggatctcatccttatcctcttgccaagtatgtcttactttgttgctggcaagtggtagttggaggaagcctcaaagctcgagttgttccctcngtgcaggggagacaaatgggcctattaaggacaaggagaacagcaaaccangcctgcttcttnaccccantccttcagcctttnccaaccttttcctnagggatctggacnctcttaccctaatantctngcccatattttnancttattcttg

SEQ ID NO: 2754 - DNA, 672 bp, Homo sapiens
  misc_feature 240, 279, 281, 288, 352, 353, 356, 365, 369, 379, 421, 453,455, 458, 459, 463, 469, 474, 493, 561, 572, 573, 606, 615,617, 622, 624, 625, 629, 632, 633, 635, 648, 668: n = A,T,C or G
gcgtatacgactcactatagggcgaattggagctccaccgcggtggccggccgcccgggcaggtacctgccatccaatacggtcattagattgggtcatcttgattagattagattagattagattgtcaacagattgggccatccttactttatgataggcatcattttagtgtgttacaatagtaacagtatgcaaaagcagcattcaggagccgaaagatagtctgaagtcattcanaagtggtttgaggtttctgttttttggtggtttttgttngnttttttntttttacaccttaagggaggatttaatttgctcccaactgattgtcacttaaatgaaaatttannaangaataaaangacntacttctcanctgcaaatattatggagaattggggcacccacaggaatgaanagagaaagcagctccctaacttcaaaaccatntnggnncctnggccgntctanaactagtggatcccccggnctgcaggaattcgatatcaagcttatcgataccgacaacctggagggggggcccggtacccagctttngttccctttanngagggttaattgcgcgcttggcgtaatcatggncatagctgntncctgngnnaaantgnnanccgctcacaattncacacaacatacgagccggnagca

SEQ ID NO: 2755 - DNA, 672 bp, Homo sapiens
  misc_feature 5: n = A,T,C or G
gagcnccgcgtaatacgactcactatagggcgaattggagctccaccgcggtggcggccgaggtaccactccacctatatccctacctttgcatgtctgtccaacctcaaagtccaggtctatacacacgggtaagactagagcagttcaagtttcagaaaatgagaaagaggaactgagttgtgctgaacccatacaaaataaacacattctttgtatagattcttggaacctcgagaggaattcacctaactcataggtatttgatggtatgaatccatggctgggctcggcttttaaaaagccttatctgggattccttctatggaaccaagttccatcaaagcccatttaaaagcctacattaaaaacaaaattcttgctgcattgtatacaaataatgatgtcatgatcaaataatcagatgccattatcaagtggaattacaaaatggtatacccactccaaaaaaaaaaaaaaagctaaattctcagtagaacattgtgacttcatgagccctccacagccttggagctgaggagggagcactggtgagcagtaggttgaagagaaaacttggcgcttaataatctatccatgttttttcatctaaaagagccttctttttggattaccttattcaatttccatcaaggaaattgttagttccac

SEQ ID NO: 2756 - DNA, 681 bp, Homo sapiens
  misc_feature 5, 652: n = A,T,C or G
gagcnccgcgtaatacgactcactatagggcgaattggagctccaccgcggtggcggccgcccgggcaggtacgcgggttcccacgcggtctctgggctggttgagctgcgccgctgcaggtagtgctgagttgctccagtgccactgggttagggtctccacaaccgagctggtctcagcaagtggtgtccatacatggggctcgaacctgggttgaagggtcgccagagcgacggttggagaacgtggaactaagctggaggacacctgagtacctcggccgctctagaactagtggatcccccgggctgcaggaattcgatatcaagcttatcgataccgtcgacctcgagggggggcccggtacccagcttttgttccctttagtgagggttaattgcgcgcttggcgtaatcatggtcatagctgtttcctgtgtgaaattgttatccgctcacaattccacacaacatacgagccgggagcataaagtgtaaagcctggggtgcctaatgagtgagctaactcacattaattgcgttgcgctcactgcccgctttccagtcgggaaacctgtcgtgccagctgcattaatgaatcggccaacgcgcggggagaaggcggtttgcgtattgggcgctcttccgcttnctcgctcactgactcgctgcgctcggtcg

SEQ ID NO: 2757 - DNA, 677 bp, Homo sapiens
  misc_feature 654, 656, 657, 658, 659, 660, 661, 662, 663, 664, 665, 666,667: n = A,T,C or G
cgcgtaatacgactcactatagggcgaattggagctccaccgcggtggcggccgcccgggcaggtacgcggggaggtcacacaggaaagaagcagaccacgaaatgaacttcggctgtcacctgcggtgggcgcactagaggtcttttgaactccttcggctaccgtcgccgcgttctcgctgtgcactcttattctgcgcctgcgcgcggctacagcacggttcgtttttcctttagtcaggaaggacgttggtgttgaggttagcatacgtatcaaggacagtaactaccatggctcccgaagttttgccaaaacctcggatgcgtggccttctggccaggcgtctgcgaaatcatatggctgtagcattcgtgctatccctgggggttgcagctttgtataagtttcgtgtggctgatcaaagaaagaaggcatacgcagatttctacagaaactacgatgtcatgaaagattttgaggagatgaggaaggctggtatctttcagagtgtaaagtaatcttggaatataaagaatttcttcaggttgaattacctagaagtttgtcactgacttgtgttcctgaactatgacacatgaatatgtgggctaagaaatagttcctcttgataaataaacaattaccaaaaaanannnnnnnnnnnnaaaaaaaagt

SEQ ID NO: 2758 - DNA, 677 bp, Homo sapiens
cgcgtaatacgactcactatagggcgaattggagctccaccgcggtggcggccgaggtacgcgggtatacatgaaacccccagcacacgaagaggccaaggcaccttccagaggctttgtggtgcgggacgcaccctggaccgccagcagcagtgagaaggctcctgacatgagcagctctgaggaatttcccagctttggggctcaggtggctcccaagaccctcccttggggccccaaacgataatgatcaaaaagaacagaaccctctccagcctgctgacccaaacccaaccacacaatggtttgtctcaatctgacccagcggctggaccctccgtaaattgttgacgctcttcccccttcccgaggtcccgcagggagcctagcgcctggctgtgtgtgcggccgaggtacctgaatgagcctggcctggtgctgtgtctccagactcgacacagcccagaaagaaacaggtgaacacactcctgagagccgaaactggactcttgctgatggactcatggcaatactccagccaaaggctgctccgagtcctagaagggctcggaactgtcctgggtaagcctgtcgacacagtagggacagagaggggttagtgtcctctttcacagcactaagcatgttgttgcccacatgcaacagttatgacaaga

SEQ ID NO: 2759 - DNA, 681 bp, Homo sapiens
  misc_feature 220, 246, 285, 324, 359, 528, 548, 631, 644, 651, 660, 668: n = A,T,C or G
gagcgcgcgtaataccgactcactatagggcgaattggagctccaccgcggtggcggccgcccgggcaggtactttttttttttttttttttttttttttttttgaaggttgaatgcagggttttattgagtggtggaggtggttctctgaaggatggatgcaaagctggaagcggggatggcacgggaagataatcttcctgctgggtggccaaacctntccgaccaccctcggctgaactcctntcggcgttcaaatgttcctcttctctctttctctgctgnatcgtttcaccattcatctgcttgtctgggatggtgaanacaactgtttgctcattctaaacgacacggaatanaggcgtctcctcatctgctcatctgcttctggagctgcttggcaataggtgattgtctcgccgctcagctataggcgatggtctcaccactcggtgataggcgattgtcccatctaggtcgccaaaatgtgtctggaattggtgggttcttcgtctcactgacttcaanaatgaagccgcggacactcncagtgagtgttgcagttcttaaaggcggcatgtctagagtttgttccttctgatgttcggatgtgttcacaaattcttccttntggtggggttcgnggtctcnctggctcangagtgaanctgtggaccttcc

SEQ ID NO: 2760 - DNA, 679 bp, Homo sapiens
  misc_feature 5, 661: n = A,T,C or G
gagcnccgcgtaatacgactcactatagggcgaattggagctccaccgcggtggcggccgcccgggcaggtaccaaaaagactctcaaaaaccaatactcccacgggcaagggaatagccaagtttgttgcggtttccaatgaatgacatcagccctgtgtaggtctcaatcaaaatgggttcagttaacaccatcagtttctttcctcttccagatccagttgaattcttgtgggcattctggatagctggaacaagcttagacatgaacccagacaacttgcaaatttcaaggaatttctcactggtgtatttcataggatgctcagtgaaagtagcataaggaacttcagtggaccatgggttccagcgggacagaagagactgctcctccggactcccccagtagatcctaaggccttctccttgtctcttgtccagggatatcccagggaaggtgaacttgcccaggcagatgcgatagacagcgctcagaggaatccgctgcagctgcacacaactcagcatgatgaagtcgtatttgcagatcaagagagtcttgtctgtgaccagtagaattctctccttctcattgttccagtggtctatctttgtcaagagccagaagccttgaatggtctctccagaagtctcagctacntgacctttcaagtcttcc

SEQ ID NO: 2761 - DNA, 679 bp, Homo sapiens
  misc_feature 5: n = A,T,C or G
gagcnccgcgtaatacgactcactatagggcgaattggagctccaccgcggtggcggccgaggtacaccgtgtttctgttgtgttctgtggtggtttgctcctcacatgtgagcattcaccgtggccctgtgtttttccaccacacctctgcctggtggcatcctactggatgtctcagccgagccactctgttctgaagatgcccttgtcctccacccctttgctttgggctctgagcttcttctgcctttcatctctgtaggatgaagccccacccgcccttcaggatgccagccttggcaacattgtgagaccctgtttctacaaaaactaaacaagtgtagtggtgcacgcctgtattcccagctacttgggaggctgagatgggaagatcacttgagcctgggaggttgaggctgcattgagctgagatcaagccacggcactccagcctgggagacagagcgaaaccccatctcaaaaaaacaaagaaagtggatgcgtgctgctcctgccattggatcatcgcagcatttttcttttctctgatatgcgcctttttcctcatcgtgggggctcatgttttcgtaattccctctcactactagattgtgagctgtgtgaaggaaggttcatagttgagttgtatgtacctgcccgggcggccggctctagaac

SEQ ID NO: 2762 - DNA, 654 bp, Homo sapiens
  misc_feature 539: n = A,T,C or G
gcgtatacgactcactatagggcgaattggagctccaccgcggtggcggccgcccgggcaggtacacacacatccttctgtgaaacagtctcacggagactctcagaatcccaagaattttcttcaacgttcttttgttttgattctgaagggaacatctgatctgctctcaatgtttgttcattcttcaattccaaggctttatttggaacagacttttgcatttcaatggcaggctcgaaggcagatggcttctcgggaggctctgctttgaaagtttgcatgtccatcaattctaaggctttagttggaatagaaactttcattctgcagggagccttcagaaaaccatcattatcaggagactcttctaattttccatttattttatctatttctttttgatgtgtagccttgggtaaacacacatccttctgtgaaacagtctcacagagactctcagaatcccaagaactttcttcatagtccttttgtttggattctgatggggagtatctcatctgctctcaatgttttgntcattcttcaattccaaggctttatttggaacagacttttgcatttcaatggcaggctccgaaggcagatggcttctccccgcgtacctcggccgctctagaactagtgggatcc

SEQ ID NO: 2763 - DNA, 665 bp, Homo sapiens
  misc_feature 578, 641, 665: n = A,T,C or G
cgtatacgactcactatagggcgaattggagctccaccgcggtggcggccgaggtacgcggggggaggtggatttgagagatacctccctccttctgctcagctgccttgcagtaattaaactctttctctgctgcaacacccctactgttctccgtgtattggcttttctgggcagcaggaaggaaaagctgatgcgatgctctcagtgccgcgtcgccaaatactgtagtgctaagtgtcagaaaaaagcttggccagaccacaagcgggaatgcaaatgccttaaaagctgcaaacccagatatcctccagactccgttcgacttcttggcagagttgtcttcaaacttatggatggagcaccttcagaatcagagaagctttactcattttatgatctggagtcaaatattaacaaactgactgaagataagaaagagggcctcaggcaactcgtaatgacatttcaacatttcatgagagaagaaatacaggatgcctctcagctgccacctgcctttgacctttttgaagcctttgtaaaagtgatctgcaactctttcaccatctgtaatngcggagatgcaggaagttggtgttggcctatatcccagtatctctttactcaatcacagctgngaccccaactgttcgattgtgttn

SEQ ID NO: 2764 - DNA, 658 bp, Homo sapiens
  misc_feature 552, 603: n = A,T,C or G
gcgtaatacgactcactatagggcgaattggagctccaccgcggtggcggccgaggtacgcgggcaggctgagacagtcctcatatcctcttgagccaaactgtttgggtctcgttgcttcatggtatggtctggatttgtgggaatggctttgcgtgagaaaggggaggagagtggttactgccctcagccggctttgaggacagagcctgtccctctcatgacaactcagtgttgaagcccagtgtcctcagcttcatgtccagtggatggcagaagttcatggggtagtggcctctcaaaggctgggcgcatcccaagacagccagcaggttgtctctggaaacgaccagagttaagctctcggcttctctgctgagggtgcaccctttcctctagatggtagttgtcacgttatctttgaaaactcttggactgctcctgaggaggccctcttttccagtaggaagttagatgggggttctcagaaagtggctgattggaaggggacaagcttcgtttcaaggggtctgccgttccatcctggttcanagaaggccgagcgtggctttctctagccttgtcactgtctccctgcctgtnaatcaccacctttcctccagaggaggaaaattatctccccctgcaaagcccggtt

SEQ ID NO: 2765 - DNA, 669 bp, Homo sapiens
  misc_feature 4, 44, 68, 74, 137, 178, 185, 231, 237, 248, 254, 273, 280,288, 295, 311, 323, 325, 335, 356, 357, 362, 363, 374, 375,376, 393, 402, 414, 415, 416, 420, 450, 458, 460, 465, 469,472, 483, 489, 505, 516, 528, 539, 544, 547, 561, 562: n = A,T,C or G
  misc_feature 563, 564, 565, 567, 568, 584, 585, 586, 588, 590, 595, 600,606, 611, 613, 615, 616, 617, 620, 621, 624, 627, 629, 633,635, 641, 643, 645, 646, 647, 654, 658, 660, 661, 663, 665,666: n = A,T,C or G
tatngggccaattggagcctccccgcggtggcggccgaggtacncgggtctacatgaaacccccagcncacaangaggccaaggcaccttccagaggctttgtggtgcgggacgcaccctggaccgccagcaagcangtgagaaggctcctaacatagagcacgttctgagtgaattncccagcntttgagggctcaggtggctcccaagaccctccctttggggccccanacgatnatgatcaaaangaacanatccctctccagcctgctngacccanacccaacncacacantggtttgtctcaatcngacccagcgagntngaccctccgnaaaattgtttgacgctctttnnccctnnccgaggtcccnnnagggagcctagcacctnggctgtgtntgccgcccgagnnncctngaatgagcctggcctggtgctgtgttcttncagattcnanacagnccanaanagaaacaagtnaacacnattcctgagaagccgngaactggactntatgcttgaggnactcatgggcnattcntcncagccagagggctnnnnngnngtccctataaagggcnnngnancttgncctgnggtaancctancnannntannttnggncnaagnanggggtntngnnnctttgtnaatnanntnannatg

SEQ ID NO: 2766 - DNA, 657 bp, Homo sapiens
  misc_feature 5, 98, 104, 136, 153, 199, 313, 364, 404, 426, 429, 462,475, 477, 488, 533, 550, 564, 567, 581, 583, 585, 598, 601,602, 608, 609, 611, 616, 621, 627, 630, 631, 634, 635, 637,639, 640, 641, 643, 645, 646, 647, 648, 649, 650, 652: n = A,T,C or G
gagcnccgcgtaatacgactcactatagggcgaattggagctccaccgcggtggcggccgcccgggcaggtacttttttttttttttttttttttttntgcccnattgcatatttttatataaactgtcttcatanattctttcttctgcttnaaaaattctgctgtccatgctctgtattgcattttacatttattgnatacttcagctccaaaatttgtttgatttcttaaataatttcaacttttcttgtcaggtttctactattgggtgttcattttcctgatttcattgaattgtttctctgtttttnattaaagctcaataagatttcctaaaacaaatattttaaattctttatcanatcatttatatatctcattttctttaggatcagctaccanaagattactatgttcttttggnggnatatcccattgggttttatatacttcttattgnattatactgatgncngcatatttganggaacagtcacctcttgcagactttatgggttagtttcattgganaaatatcttttcctacnaggaggaggagggnggngggttctttcctgngngngggcccagcagtnccnncatcanngnggggngctanctatanagnntgnntncnnntnannnnnntnaaaac

SEQ ID NO: 2767 - DNA, 647 bp, Homo sapiens
  misc_feature 484, 485, 486, 487, 488, 489, 490, 491, 492, 493, 494, 495,496, 497, 498, 499, 500, 501, 502, 503, 504, 505, 506, 507,508, 509, 510, 511, 512, 513, 514, 515, 516, 517, 518, 519,520, 521, 522, 523, 524, 525, 526, 527, 528, 529, 530: n = A,T,C or G
  misc_feature 531, 532, 533, 534, 535, 536, 537, 538, 539, 540, 541, 542,543, 544, 545, 546, 547, 548, 549, 550, 551, 552, 553, 554,555, 556, 557, 558, 559, 560, 561, 562, 563, 564, 565, 566,567, 568, 569, 570, 571, 572, 573, 574, 575, 576, 577: n = A,T,C or G
  misc_feature 578, 579, 580, 581, 582, 583, 584, 585, 586, 587, 588, 589,590, 591, 592, 593, 594, 595, 596, 597, 598, 599, 600, 601,602, 603, 604, 605, 606, 607, 608, 609, 610, 611, 612, 613,614, 615, 616, 617, 618, 619, 620, 621, 622, 623, 624: n = A,T,C or G
  misc_feature 625, 626, 627, 628, 629, 630, 631, 632, 633, 634, 635, 636,637, 638, 639, 640, 641, 642, 643, 644, 645, 646, 647: n = A,T,C or G
gtatacgactcactatagggcgaattggagctccccgcggtggcggccgaggtacaccctgaagcaggtagtgaagctggcagttggccactggttcccacagaaaattgctctagtgatgctagcaaatcccaaaattggggttcaatccaggagggttcctggcttcataaaggaaataattcaagagcaagccaagagtgtaaagtgaaggcaaagcaagtttatgagagcaagagaacaggaaaatggctgctccacagacagagcagggctactccacaggcaaagtagcacccgtggattgttggctagctatatttatagctactccttaattatgtgctaaataagaggtcggttattcatgaactttctagaaaaaggttggagagttcccagaaccaggggttccttctcttttaaactacatgaggtagcttctgggcattgccatagcatttgtaaacccttggccccgggnnnnnnnnnnnnnnnnnnnnnnnnnnnnnnnnnnnnnnnnnnnnnnnnnnnnnnnnnnnnnnnnnnnnnnnnnnnnnnnnnnnnnnnnnnnnnnnnnnnnnnnnnnnnnnnnnnnnnnnnnnnnnnnnnnnnnnnnnnnnnnnnnnnnnnnnnnnnnnnnnnnn

SEQ ID NO: 2768 - DNA, 637 bp, Homo sapiens
  misc_feature 566, 583, 625: n = A,T,C or G
cgcgtatacgactcactatagggcgaattggagctccccgcggtggcggccgcccgggcaggtacacagtccaatgatgctaaaaagcaagcacatatgtaagtctgcaaaataaccagctgacagcatgacgacaggataaattccacacataccattactaaccttaaatgtaaatgggctaaatgctcccattgaaagacacggggcaagctgggtaaagaaccaagacccactggagtatgccgtcttcaagcaacccatctcatgtgcagtgccatacataggctcaaaataaaggaatggagaaaaatatttcaagcaaatggaaaacagaaaaaaggtgttgtactcccagtttctgacaaaacagactctaccaataaagataaaaaaagagaaggacattacaaaggtggtcctgacctttgataaatctcattattgcttgataccaacctgggctatttgtattgcccaaaccaataggataatttgctgaggttgtggagcttctccctttcacagagtccctgatctccgaaaatttggttgagatgtaaggntgattttgctgtacctnggccgctctagaactagtggtcccccgggctgcaggaattcnatatcaagctta

SEQ ID NO: 2769 - DNA, 630 bp, Homo sapiens
cgcgtaatacgactcactatagggcgaattggagctccaccgcggtggcggccgcccgggcaggtacgcggggggctgcatgccagccagacacccagtcttgcaagactgtcattgaaaatctccgttttgctgttctccgggtctctgcgtccagtctttgtgtttggacggacctgccgggccatctttctgcaagaagataaaggaagaccaggagtgcctgccgaactcctatggaggaagtctaggagaggaaggggacagggaggaagatggtgtctgcaaaccaggaagcagccttgccagacacaggattggccacaaccttgaccccagacttccagcctccagaactgaatttccctgcacaggctctcttgcctgccaccatgtaagacctgcctctgctcctccttcaccttccgccatgattgtgaggccaccccagccatgtggaactctcctactgcactgagaagcacgtgttctccatttccctgggggagaccattgtattgggcagtttggaacaaaacaccatggactgggaggcttacacaacagaaatttatttcttgctgttctagaggctgggaagctcaaggtgctggctgcatattcattctg

SEQ ID NO: 2770 - DNA, 641 bp, Homo sapiens
  misc_feature 221, 368, 575, 611, 614, 626: n = A,T,C or G
gagcgcgcgtaataccgacctcactatagggcgaattggagctccaccgcggtggcggccgcccgggcaggtacgcgggcactggtgtgaggggtggtgtggtccaaaggacaggctggatggcgggtgcatcggcgtgggtgtggtcagcatgtgtctgcaatgcctgtgggctctactacaagcttcacaatattaacagacccctgactatgaagaangaaggcatccagaccagaaaccgaaaaatgtctagcaaatccaaaaagtgcaaaaaagtgcatggctcactggaggacttccccaagaacagctcgtttaacccggccgctctagaactagtggatcccccgggctgcaggaattcnatatcaagcttatcgataccgtcgacctcgagggggggcccggtacccagcttttgttccctttagtgagggttaattgcgcgcttggcgtaatcatggtcatagctgtttcctgtgtgaaattgttatccgctcacaattccacacaacatacgagccgggagcataaagtgtaaagcctggggtgcctaatgagtgagctaactnacattaattgcgttgcgctcactgcccgctttccantcnggaaacctgtcntgccactgcattaat

SEQ ID NO: 2771 - DNA, 689 bp, Homo sapiens
  misc_feature 138, 208, 219, 220, 238, 323, 328, 383, 395, 397, 402, 410,414, 416, 431, 432, 437, 440, 448, 491, 524, 529, 555, 557,564, 576, 581, 587, 592, 594, 598, 600, 606, 609, 614, 615,618, 631, 634, 637, 646, 649, 657, 665, 676, 677, 678: n = A,T,C or G
  misc_feature 681, 684: n = A,T,C or G
actacttagggcgaattggagctccccgcggtggcggccgcccgggcaggtacaaaggaaccgaggggtgaccacctctgagatgtccttgactttgtcatagcctggggcatattagagcatctctctcacagctgnctttcttatccccattcttgatgtaggacctccttccgagtcaagctttatctcctcctcgagacaccanacagagctttnntatcctgtgcagggagcngctcttcctctggacgaataagactgcgtcactttcagctactcccaccactgtcatctgcccattgcctttgtgactacagganagtgncccctaagcccttctagagcttaggttctgggccaggcatgatctacttcctatnggacgctccctntnatgcnccacttgnctcntngggatctcattcctnnagctnttngccagaanaagtcttactttgttgcttgcaagtaggtagttgaagggaagnctccaaagcttcgagttgtttccctcggtagcnagggnagagcaaattgggccttttagagggngnagggagnaacagcgagccngggcnctgctncttancnccangngcttcnagncctgnngcngagccttttcctnagnggntcgtggacnctntcaccctngatagatngtgggccgatnnnttnaancttag

SEQ ID NO: 2772 - DNA, 660 bp, Homo sapiens
  misc_feature 631: n = A,T,C or G
gcgtaatacgactcactatagggcgaattggagctccaccgcggtggccggccgcccgggcaggtactctcatccactagactacatctcacaacaaagctttgccattcaatacaaacagagcacacatgatgcacacgaatagtcttgccaatcagtgatactatagatgctgcaactgtgccatcaaaacagacaaggaaaacacacatccctataatcacttaatcttaagtgtttcattaatgttctcattaggccatttactctatttcagtatgttgctgtttcatgcactattatgtatgagttagacatgaacacagactgaaataaatatattaaatgcatatactatatttaaaataaaataaaaacaacaaatcagtaactctgcaggcattaccaaaacatcttaccaaattatgcatctcatgcatatttgcatttacattctatttaagatgggtcattcccactaacacacttgtggtttgattttgctgtttgtgtttgattttgttttttcacataaaacctgcagcaactgaccttacttccagagtccttggctccacattcacctttatcgtcctcggccgctctagaactagtggatcccccgggctgnaggaattcgatatcaagcttatcgatacc

SEQ ID NO: 2773 - DNA, 657 bp, Homo sapiens
gagcgcgcgtaatacgactcactatagggcgaattggagctccaccgcggtggcggccgcccgggcaggtacccccgatgcaatggagctcaacataaagcagctggatcagaaaatgaaatgtctagtttacttgtgatctagcttaaagtatttgccctccaacttgcctttttttaacaaatggaaatctataaaaaactgactgctctgacttcaaagtcactaaagatcgagataagaagactgcttaccagcgtgggaactactctaaagctgctcaataacgtcagacacgtccagagtggagaactctgaaagagcctctggtgacctgacactggcactacccatcagcagagaaaagatggcctcctgtgcctgaatgtgacagccaggcaactatgtaaggcagtatcagagaatctttatgacatcacagtaggaaagaattttttcaacacgataaaaaatatggtgactctaataaatatctgactgtattaaaacaaagagtttctattaattattaaagacatatctaagagaatgaaaaatgacctctgggtcaaggtatcaagacagaacagaagcatctaacttcgttctctccctatattccattaaaaataaaacaaagattcttttcaataaaat

SEQ ID NO: 2774 - DNA, 706 bp, Homo sapiens
  misc_feature 211, 350, 371, 421, 484, 514, 541, 550, 554, 583, 585, 587,593, 594, 597, 604, 615, 643, 648, 668, 673, 690, 693, 701: n = A,T,C or G
taatcgactactatagggcgaattggagctccaccgcggtggcggccgaggtacttgtgacaggcagacgtgattgcagccacgaacacgatgaactcactgaagtccacctgggcatctccattggcgtccaggtccttgagcaatttatccacggcatccttgtcttttccactcttgcaggaagcctggtagcttccttctccatcancaccttgagctccccctttggtcagggtctgcgtgctgccctcgctggcccgaatatcgggaaaaggacgtctatgatcatgcccatggctgtctctagttccgtcatggtgctaggattcagacccaccttcctcctnggggggctggcaggggccganaaaatgtccccgcgttccttgcccggggcggccggttctaagaactagtngggatccccccggggctgcaggaaattcgatatcaaagcttaatcgaataccggtcgaccttngaggggggggccccggttacccaagctttngttccctttaatgagaggttaaattgncgccgcctnggcntaaattcatgggtcataagctggtttccngngnaaaatnngtnatccggntcacaattccncacaacataccaagcccgggagcataanagtgnaaaaaccgggggtgcctaangaagngagcctaattcacattnatntgctttgngctta

SEQ ID NO: 2775 - DNA, 684 bp, Homo sapiens
  misc_feature 152, 154, 565, 566, 573, 586, 591, 598, 605, 609, 611, 620,625, 675: n = A,T,C or G
cgcgcgtatacgactcactatagggcgaattggagctccaccgcggtggcgcctaatgagtgagctaactcacattaattgcgttgcgctcactgcccgctttccagtccgggaaacctgtcgtgccagctgcattaatgaatcggccaacncngcggggagaggcggtttgcgtattgggcgctcttccgcttcctcgctcactgactcgctgcgctcggtcgttcggctgcggcgagcggtatcagctcactcaaaggcggtaatacggttatccacagaatcaggggataacgcaggaaagaacatgtgagcaaaaggccagcaaaaaggccaggaaccgtaaaaaggccgcgttgcttggcgttttccataggcttccgcccccctgacgagcatcacaaaaattcgacgctcaagtcagagggtggcgaaaaccccgacagggactattaaagataccagggcgtttccccctggaagctccctcgtgcgctctccttgttccgaaccctgccgcttacccgaaacctgtccgccctttctcccttcgggaaagcgtggnnctttctnataagcttcacgncttgnaggtatntcaagtncggngntaggtccgntccgnttccaagcttgggcttgtgtgcaccaacccccccgttcaagcccgacccntggggcctt

SEQ ID NO: 2776 - DNA, 687 bp, Homo sapiens
  misc_feature 1, 219, 257, 260, 278, 279, 288, 345, 364, 369, 384, 410,425, 427, 443, 456, 459, 475, 493, 498, 516, 517, 530, 535,546, 571, 591, 619, 620, 623, 625, 627, 630, 633, 635, 636,637, 638, 645, 646, 648, 650, 653, 658, 672: n = A,T,C or G
ncactactatagggcgaattggagctccaccgcggtggcggccgcccgggcaggtacccgggcgtgtgaggtgtcagtctgcccctacttgggggtgcctcccagttaggctactcgagggtctgggacccacttgaggaaggcagtctgtccgttctcagatctccagctgcgtgctgggtactgggagaaccactactccccgcgtacctcggccgntctagaactaagtggatcccccgggctgcaagaattcnatntcaagcttatcgataccnnccgacctcngagggggggccccggtacccaagcttttagtttccctttaatgaaggttaattgccncgctttggccgtaatcatngtcantagcttgtttcctgngtgaaaattgttatccggttacaatntccacacaaacatancnaagcccgagagcatanagtggtaaagccntgngagtgcctaatgagtngagctaattcacattaanttgcngttagcgctcactagccnnctttccaaatcgngaaancctgtccgtgncaagctgcattaaatgattcagccnacgcggcgagaggaagccgnttagcgtatttgggcgctcttccccttnnctngntnatnacncnnnngcgcctnngncngtncggcntgcgaggagccggnatcagcttactaaag

SEQ ID NO: 2777 - DNA, 690 bp, Homo sapiens
  misc_feature 144, 231, 265, 321, 346, 354, 400, 448, 456, 458, 585, 595,605, 622, 645, 662, 677, 682: n = A,T,C or G
cgcgcgtatcgactcactatagggcgaattggagctccccgcggtggcggccgcccgggcaggtacgcgggaggcattgagacagccagcgcaggggccttctgctgagggggcaggcggagccttgaggaaaccgcagataangtttttttctctttgaaagatagagattaatacaactactttaaaaaatatagtcaataggttactaagatattgcttagcgttaantttttaacgtaattttaattagcttaagattttnagagaaaatatgaagacttaagaagagtagcatgaggaaggaaaagataaaaaggntttctaaaacatgaccgggaggttngagattgnagcttcttcatgggaggtaaaaaattgtatttaaaaagaaaattgnagagaaagggactacagagcccccgaattaataccaatagaagggcantgcttttnanattaaaaatgaaggtgacttaaacagcttaaagttttagtttaaaagttgtaggtgattaaaataatttgaagggcgatctttttaaaaaaagattaaaccgaaggggattaaaagaccttgaaatnccatgacccnggagaattgncgtcatttaagcctaanttaacccatttactaaacccagncgaaatggaaagattantgggggtggtagggntgaancattttgg

SEQ ID NO: 2778 - DNA, 675 bp, Homo sapiens
  misc_feature 178, 261, 267, 341, 351, 362, 386, 446, 468, 472, 541, 558,560, 568, 569, 598, 611, 616, 628, 639, 669: n = A,T,C or G
cgcgtaataccgactcactatagggcgaattggagctccaccgcggtggcggccgcccgggcaggtactgggccttacagtaacctgaaattcctgattcttagtcaacctgaaatttacaagtaaggttgggtcattaatcttaaccatgatgctcaccaatattggatagcacctngaggaaatcctagcattttgtgcttagagttggactctgaagaaaatagccattccctcgtgctgcgacagttccattcctanagcagncttacaactaggtctaaggctggccctagtgagaaggcctgaagtgagaagcaagggcttctttgaaattgcanggagaagcangtcaaacctgngccaagggtttccccggtcaaagnacctcggcccctctagaactaagtggatccccccggggctgcaggaatttcgatatcaancttatcgataccgtcgacctcnaggnggggcccggtaccccagcttttgttcccttttagtggagggttaattgcgcgcttggcgtaatcatggncatagcttgtttcctgngngaaatttnntatccgctgacaattccacacaacatacnaagccggggagcntaaantgtaaagcctgngggtgcctaangaagtgagctaactcacattaattgcgttnggcctc

SEQ ID NO: 2779 - DNA, 703 bp, Homo sapiens
  misc_feature 322, 325, 395, 417, 430, 467, 482, 485, 493, 494, 495, 504,511, 522, 523, 525, 528, 532, 534, 553, 554, 565, 582, 584,601, 605, 618, 633, 634, 640, 653, 655, 663, 669, 676, 677,680, 688, 690, 693: n = A,T,C or G
gagcgcgcgtaatacgactcactatagggcgaattggagctccaccgcggtggcggccgaggtaccctggccactcctttccttttggctggccaatgtctcctctgtaggctccagaaggctctcagggatgtaggccggcctcccgcagggttgagtttgcaatgggaacaaagacaagctgtggtcccatagcaccctcatctggtggacatccttgctactgacagtcaaaagaaagccttcccagatgaaattttagtccttctgcgcagccatgctcttctttcagcaaaagagcccccgcgtacctgcccgggcnggncgctctagaactaagtggatccccccgggcctgcaggaattcgatatcaaggcttattcggtacccgtcnacctcgagggggggggcccggnacccagccttttngttccctttagtgagggttaattgcgcgcttgggcgnaatcatggtcataanctngttttctnnngtaaaattnttatccngttcacaaatnncnacnacanancgagcccgggagcataaannagttaaagccnggggtggctaaatgagngnagctaactcaacatttnattngcgtttgcgcctncactggcccgctttnnagattngggaaaccctgtncntgccagcnggaatnaatgatnnagnccaacgcncnggngagaggcggt

SEQ ID NO: 2780 - DNA, 669 bp, Homo sapiens
  misc_feature 669: n = A,T,C or G
cgtatacgactcactatagggcgaattggagctccaccgcggtggcggccgcccgggcaggtacgcggggggttttataagggggagtttccctgcacaagctgccttctcctgtctgccaccacgtgagatgtgcctttcaccttccactatgattgtgaggcctcaccagccatgtggaactagttcaagatttcaacattttaagataatctgaaaaaaattggaatgtgcccccagctgccaatactctctcaacactgtttatcaaaggaaccaatatggaaggaaaaacattgctttgaagggaagatggatggatcccctagtaaactacagcttgaggtgcaatttcctaaagttcaaatgcccgaaaaaaaaaaaaaaaaaaaaaagtacctcggccgctctagaactagtggatcccccgggctgcaggaattcgatatcaagcttatcgataccgtcgacctcgagggggggcccggtacccagcttttgttccctttagtgagggttaattgcgcgcttggcgtaatcatggtcatagctgtttcctgtgtgaaattgttatccgctcacaattccacacaacatacgagccgggagcataaagtgtaaagcctggggtgcctaatgagtgagctaactcacattaattgcgttgcn

SEQ ID NO: 2781 - DNA, 675 bp, Homo sapiens
  misc_feature 502, 508, 570, 575, 599, 645, 656, 662: n = A,T,C or G
gtatacgactactatagggcgaattggagctccaccgcggtggcggccgcccgggcaggtacatgggctgggattgatgggaagggacagatgtagttggcaaccatggttagcatcggatgcccatcccaatggccatgaatgtgccaaaggtgcccgccactctgcatcatggttttcccaatgcccgcccatcagctctcgaccccgcattccgatcctgagacaggaaaaggtgccgaagagcgccccggccgctctagaactagtggatcccccgggctgcagggaattcgatatcaagcttatcgataccgtccgacctcgagggggggcccggtacccagcttttgttcccctttagtgagggttaattgcgcgctttggcgtaatcattggtcatagctgtttcctgtgtgaaattgttatccgctcacaatttccacacaacatacgagcccgggagcataaaagtgtaaaagcctggggtgcctaatgagtngagctnaactcacattaatttgcgtttgggctcacttgccccgcttttccagtccggggaaaccttgncgtgnccagctggcatttaatgaatcggncaaacccccgggggagaggcgggtttgcgtattggcgctcttccgnttcctcgcttnactggnttcgctgcgctcg

SEQ ID NO: 2782 - DNA, 678 bp, Homo sapiens
  misc_feature 5, 363, 370, 385, 448, 475, 524, 525, 570, 571, 572, 585,633, 635, 660: n = A,T,C or G
gagcncgcgtaatacgactcactatagggcgaattggagctccaccgcggtggcggccgaggtactagctgcttgttacaaacaaaatatttgtgttcccccaaaattcctatgaagttctgacctgcaatgtgatagtatttggaggtagggcctttagaaggtaattagggctagatgagatcatgtgggtggggcacccatgatggaattagtgtccttataaaaagaggaagagctggtgttctctgtctaccaactgaggacacagggagaaggctgccgtctgcaggccaggaaaagagccctccccagagctcaaccatgctggcaccataatctcaactcctagcctccagaagnatgaaanataaatgtctgttgnttaagcccccagtcctatggtattttactatgacagctcaaggcagactaagattgctagtancctgcccgggcggccgctctagaactngtaggatcccccgggctgcaggaattcgatatcaagcttatcgataccnncgacctcgagggggggcccggtacccaagcttttgttccctttannnagggttaattgcncgctttggcgtaattcatgggcataggctgtttccctgtgtgaaattngntattccgcttcacaattccacacancatacgaagcccggggag

SEQ ID NO: 2783 - DNA, 656 bp, Homo sapiens
  misc_feature 5, 607: n = A,T,C or G
gagcnccgcgtaatacgactcactatagggcgaattggagctccaccgcggtggcggccgcccgggcaggtacgcgggggcccttgctcactagaaggagccccctgaccctttcttccaaaaatactttttgtctttgtcttcgtttctgcattcatcccccttcgttcactcccataacaaccaacagcgacaactggcacctaggacagggacgtgagtgaaggtctgctggagcagagaaactgacactgacaagaagaacgagaatgagaaaccctgcgacgagtctgctgacagctgatataagtctgcaaaatcagctggaccaccaaacggcaattgagagctgcacaacctgcaattacctttattcaattaatgcaaaaacaaaaatggggagatgttacaggtcgaaagaatgaaggtcgtgaccaactcagtataccactgaaggctatatgagcaaacagaaaactgttctcatgaaagcaggatgttggaaaactaacaactgtgtctgccgccagaagggttgctgagggcagtcatgccccaagcgcagtgttccttgtgattatctatagtaacatctgaagcctgttgnacctcggcccgctctagaactagtggatcccccgggctgcaggaattca

SEQ ID NO: 2784 - DNA, 665 bp, Homo sapiens
  misc_feature 162, 163, 176, 183, 185, 197, 201, 202, 203, 209, 212, 215,219, 223, 229, 246, 254, 255, 261, 263, 273, 285, 288, 291,300, 308, 317, 320, 322, 325, 327, 335, 337, 341, 343, 349,352, 355, 365, 367, 369, 370, 372, 377, 378, 380, 382: n = A,T,C or G
  misc_feature 387, 389, 395, 403, 406, 407, 408, 409, 426, 428, 429, 433,436, 439, 441, 444, 445, 446, 447, 455, 456, 457, 463, 464,468, 473, 478, 483, 486, 489, 492, 496, 501, 504, 505, 512,513, 518, 522, 523, 540, 543, 568, 573, 577, 582, 586: n = A,T,C or G
  misc_feature 587, 594, 601, 605, 608, 614, 615, 620, 622, 625, 632, 634,639, 643, 644, 647, 650, 655, 660: n = A,T,C or G
gagcgcgcgtaataccgacctcactatagggcgaattggagctccaccgcggtggcggccgaggtactttttttttttttttttttttttttttttcttttttttttttttttttttttttttttttttttttttttttttttttttttttttttaaagccnnaaaaaactgcccnggggggnancagggacccttnattnnnaaaaanatnagncccnaaanaaaaantttaaaaaaaacccctngccgggannaaaggnanaaaaaacctnaaaaaaacaggnccnggnaaaaaaaanacccgggnaggggggtnccnanccncnaatccccngnccgntnaaaaanaanggnaccccccggncngnngnaattnnananaagcntnatcaanccccccanccnnnnggggggccccggccccnanntttngtnccntnaannnngggtaaannncccccnnggcnaaaanagggnaaaanctnttnccngggnaaaanggnnatccccnnaaaancccnnaaaaaaaacaacccggnaanaaaaagggaaaacccggggggcccnaaggngggncccancccnnattaatnggggggncccnacncccccnntttcnanggnggaaaancnggcgncccnnctnatnaaaanaaacnccccc

SEQ ID NO: 2785 - DNA, 698 bp, Homo sapiens
  misc_feature 474, 494, 505, 525, 532, 559, 572, 596, 607, 633, 668, 671,676, 683: n = A,T,C or G
gagcgcgcgtaatacgactcactatagggcgaattggagctccaccgcggtggcggccgatacctcaccgtggctgctgtcttccgtggtcggatgtccatgaaggaggtcgatgagcagatgcttaacgtgcagaacaagaacagcagctactttgtggaatggatccccaataatgtcaagacagccgtcttgtgacatcccacctcgtggcctcaagatggcagtcaccttcattgggcaatagcacagccatccaggagctcttcaagcgcatctcggagcagttcactgccatgttccgccggaaggccttcctccacttggtacctcggccgctctagaactaagtggatcccccgggctgcaggaattcgatatcaagcttatccgatacccgtcgacctcgagggggggggccccggtacccagcttttgttcccttttagtgaggggttaattgcgcgccttggncgtaatcatggttcatagcntgttttcctgntgtgaaatttgttatcccgntcacaanttccacaccaacataccaagcccgggnagcataaaagtgntaaagccctgggggtgccctaatngagttgaattnaactcacaattaaatttggcgtttgngcttcacttgccccgcttttccagtccggggaaanccntgtcngtgccancttgattaaatgaat

SEQ ID NO: 2786 - DNA, 650 bp, Homo sapiens
  misc_feature 482, 552, 623, 641, 647, 649: n = A,T,C or G
gtatacgactcactatagggcgaattggagctccaccgcggtggcggccgaggtacacttcacgccggcaaagcagggattggacaggcatccatctgagacaaggagagagagacagtcacagtaaatggttggtctaagctgccatactgccatgctgggcacttaacacagtgtaagatattatagggtatagggaaccgataacttgttgggattatgttgtccacctgcatcttagagcaatcaaatcgctcaggactaaccaagctggaatctcctcgaatgctgactgcagcattcagtaaaagagcaaagctcctgggtcgtttcatcctgggctgcgtggctcaccaattggacagtcctgcttgttgcagatctggttttctgttacatcaccaacgcagtccttgcctccaaactggggtgggggggttggttgcagagacgactacgtttctgtacctgcccgggccggncgctctagaactagtggatcccccgggctgcaggaattcgatatcaagcttatcgataccgtcgacctcnagggggggcccggtacccagcttttgttccctttagtgaggggttaattgcgcgcttggcgtaatcatggncatagctggttcctgtgngaaatngnt

SEQ ID NO: 2787 - DNA, 669 bp, Homo sapiens
  misc_feature 5, 6, 225, 227, 236, 248, 249, 251, 261, 281, 283, 286, 289,290, 293, 297, 298, 300, 302, 306, 310, 311, 316, 317, 319,322, 325, 328, 330, 335, 346, 348, 354, 355, 356, 360, 363,370, 373, 377, 378, 384, 389, 414, 415, 422, 425: n = A,T,C or G
  misc_feature 432, 436, 437, 439, 441, 445, 446, 448, 449, 453, 458, 459,460, 462, 464, 467, 468, 469, 470, 472, 475, 476, 480, 481,482, 483, 484, 488, 490, 491, 494, 495, 496, 499, 500, 501,504, 506, 509, 512, 520, 523, 531, 535, 536, 537, 538: n = A,T,C or G
  misc_feature 542, 544, 545, 548, 549, 554, 555, 558, 559, 560, 562, 565,566, 569, 570, 573, 576, 577, 578, 579, 580, 581, 584, 585,586, 589, 592, 594, 596, 597, 602, 605, 606, 607, 608, 609,611, 613, 615, 616, 617, 620, 621, 622, 625, 627, 629: n = A,T,C or G
  misc_feature 631, 634, 639, 640, 643, 644, 645, 646, 648, 652, 653, 655,656, 657, 658, 661, 664, 667: n = A,T,C or G
gagcnncccgtaatacgactcactatagggcgaattggagctccaccgcggtggcggccgcccgggcaggtacgcggggaaaacatcaaagtggcaaataaagaagcccaaagtatcaacattaagaaagcaacaaaataaacagcttctgaaaaccccaaaatgtgtgtgtgtgtgtgtgtgtgtgtgtgtgtgtgtgtgtgtgtgtgtgtgtttgggtgaagngngctctcaanccaaagcaagtnncngcagctatanccacttgaaaacagaacgananaanaannganaaannananggtncctnnggccnntntanaantantnagatnccccgggctgnangaattnnntatnaancttatcngtnccgnnatcctnagggnggggcccgggtccccagcttttgtnncctttanagngggttanttgnncncntggnngnnattntgatnnntngntgnnnncngtnngaannnnntatntnnttnnnatnnnctntnatnatncagaccgnggnctttaatngtannnncttngnntgnnttttnnttnnncnatnntannttnttnnnnnnttnnnccnctntngnntattnttnnnnntntnannnttnnnttncnancntanttttnnatnnnntntacnntnnnnagnagnttntt

SEQ ID NO: 2788 - DNA, 676 bp, Homo sapiens
  misc_feature 5, 537, 576, 597, 601, 603, 604, 614, 625, 627, 629, 632,633, 634, 636, 638, 643, 644, 649, 654, 655, 657, 667, 668,669, 671, 674: n = A,T,C or G
gagcnccccgtaataccgactcactatagggcgaattggagctccaccgcggtggcggccgcccgggcaggtactgtgtctgatgctccacacagaaggatgaatgggaccaaaggtcctactctaaaccattcacagaggagtagtgagacctattagaaaggatttgaaacaaaagctttcaggtgatctgcaactctttcaccatctgtaatgcggagatgcaggaagttggtgttggcctatatcccagtatctctttgctcaatcacagctgtgaccccaactgttcgattgtgttcaatgggccccacctcttactgcgagcagtccgagacatcgaggtgggagaggagctcaccatctgctacctggatatgctgatgaccagtgaggagcgccggaagcagctgagggaccagtacctcggccgctctagaactagtggatcccccgggctgcaggaattcgatatcaagcttatcgataccgtcgacctcgagggggggcccggtacccagcttttgttccctttantgagggttaattgcgcgcttggcgtaatcatggtcatanctgtttcctgtgtgaaattgntatncnntcacaatttncacacaacatncnanccnnnancntaaanngtaancctgnngngcctaatgannnanctnac

SEQ ID NO: 2789 - DNA, 701 bp, Homo sapiens
  misc_feature 442, 444, 453, 459, 482, 484, 524, 530, 547, 554, 558, 560,567, 584, 621, 622, 625, 632, 640, 651, 657, 658, 664, 668,675, 680, 682, 685, 686, 691, 695, 696, 697, 698, 700, 701: n = A,T,C or G
gagccccgccgtaataccgactcactatagggcgaattggagctccaccgcggtggcggccgtgcgagccctctgccagatcactgatagcaccatgctgcaggctattgagcgctacatgaaacaagccattgtggacaaggtgcccagtgtctccagctctgccctcgtgtcttccttgcacctgctgaagtgcagctttgacgtggtcaagccgctgggtgaatgaggctcaggaggcagcatccagtgataacatcatggtccagtacctcggccgcttctagaactagtggatcccccgggcttgcaggaattcgatatcaagcttatcgataccgtcgaccttcgagggggggcccggtacccagcttttgtttccctttaatgagaggttaattgcgcgctttggcgtaatcattggtcataagctgtttcctgngngaaaattgntatccngttcacaattccacacaacatancnaacccgggagcataaagtgtaaaagcctggggtgcctaantgaagngaagctaactcacattnaattgcnttgngnctcactngcccggttttccagtcnggaaaacctggtcgtgccagcctgatttaaataaatnnggncaacgcnccggggangaagggcgggnttgcgnntttggncggntctttcngcttncncgnntaacntgannnngnn

SEQ ID NO: 2790 - DNA, 673 bp, Homo sapiens
  misc_feature 5, 447, 521, 533, 551, 568, 598, 599, 634, 643, 664: n = A,T,C or G
gagcnccgcgtaataccgacttcactatagggcgaattggagctccaccgcggtggcggccgaggtacgcggggatccagaatacatttccaacaagagcactggccaagtcagcttcttctgagagagtctctagaagacatgatgctacactcagctttgggtctctgcctcttactcgtcacagtttcttccaaccttgccattgcaataaaaaaggaaaagaggcctcctcagacactctcaagaggatggggagatgacatcacttgggtacaatacttgggccgaaatctgtcaggtcagcccaactttccttgtcgtgtcaatgctgtgcctcgtcctataccggagaaaaaatggttcgtggagcctgcggtattgtttgcctgggtggaatttttaccttttggttcaatctttattgaaatgtatttcatctccacntctttcttgggcatataagatctattatgtctatggcttcatgatgcctggtgctggttattcctgtgcattgngactgtctgtgngactattgtgtgcacatnttttctactaaatgcanaaagattacccgggtgggcaatgggacaannttttctctctgcttgcatcaactgcaatctatgtntacatggtnttccttttactactatttttnaaaacaaag

SEQ ID NO: 2791 - DNA, 675 bp, Homo sapiens
  misc_feature 545, 598, 607, 612, 632, 671: n = A,T,C or G
gagccgcgcgtaatacgactcactatagggcgaattggagctccaccgcggtggcggccgtgcagggtgaactccccttccttctcaatcagccacttgttttgaacaaacttctgcagcacctgctccgcttccttcttcctcatcttcttgcctttaagttgatcaaccaggttcaatatgtttgtggaagacgcaaagccggtttctgagtcaataatcagttccagagcctttctaaacaaatccagttcattctctgcaaaatccgtagccattttggaaattgaagttgtagcaagattcaccaacgcataaatgggtctcccatcatcttccgtgactcctctctttatctcaatatacaagggactccaagacactgttaatgttgttgatgaagtcctccaacttatctacggtggcatttgccggtcatggaccctgtagcagtgcgtctgcaagcgcttcacgtcccattcctctagcacgccatgggtcatcagcaactggaggaagcgccggtggacatcaagtcatgacgncccattctcctttgtgctgccctgcatgtgggaacgaacagggagcccaaggngcatcccangccgncccccgcgtcctcgggccgntctagaactaagtggatccccccgggctgcaggaattcnatat

SEQ ID NO: 2792 - DNA, 689 bp, Homo sapiens
  misc_feature 5, 8, 176, 181, 182, 183, 184, 198, 200, 201, 202, 203, 204,205, 206, 207, 219, 220, 221, 222, 223, 234, 239, 252, 253,255, 259, 260, 261, 273, 277, 289, 294, 295, 297, 298, 299,300, 301, 302, 310, 315, 316, 317, 323, 324, 325: n = A,T,C or G
  misc_feature 326, 327, 329, 331, 335, 348, 363, 367, 373, 374, 375, 376,377, 378, 380, 381, 382, 391, 397, 398, 399, 400, 408, 413,414, 415, 419, 424, 425, 428, 429, 430, 431, 432, 433, 435,436, 437, 447, 448, 451, 458, 459, 460, 461, 466, 471: n = A,T,C or G
  misc_feature 484, 494, 499, 500, 508, 509, 510, 512, 513, 517, 519, 520,521, 528, 529, 538, 545, 546, 547, 554, 555, 561, 566, 567,583, 584, 585, 586, 591, 598, 599, 600, 603, 605, 606, 612,613, 617, 619, 626, 629, 630, 631, 632, 633, 634, 635: n = A,T,C or G
  misc_feature 636, 638, 639, 640, 641, 642, 643, 644, 645, 646, 647, 648,649, 650, 651, 652, 656, 658, 659, 670, 676, 677, 678, 688: n = A,T,C or G
gagcnccncgtaataccgacctcactatagggcgaattggagctccaccgcggtggcggccgaggtacttttttttttttttttttttttttttcctttttttttttttttttttttttttttttttttttttttttttttttttttttttttttttttttttttttttttttttnttttnnnntttttttttttttntnnnnnnnntttttttttttnnnnnttttttttttnggggnaaaaaaaaaaaannanaaannnaaaaaaaaaaanaaanttttaaaaaaanccccnncnnnnnngggaaaanccccnnnaaaaannnnncncntttnggggggggggggnccccccccccccccnaaantttaannnnnncnnnaaaaaaaanccgggnnnncccccccnaaaannncccnaaaannggnnnnnncnnnaaaaaaaaannccnttttggnnnnggggnaaacnccccccccccccngggggggggnggggnnaaaaaaannntnncccncnnnaaaaaannggggggggnaaaaaannnaaaaaanncccccnttttnnaaaaaaaaaaaaaaannnnaaaanccccccnnngtntnnaaaccnnaaancnccccccnctnnnnnnnnannnnnnnnnnnnnnncccncnnaaaaaaacacncccccnnnccgggggggna

SEQ ID NO: 2793 - DNA, 702 bp, Homo sapiens
  misc_feature 32, 62, 68, 69, 70, 71, 86, 109, 123, 139, 142, 145, 150,161, 184, 187, 193, 201, 205, 206, 216, 233, 235, 273, 275,283, 295, 302, 329, 334, 338, 339, 345, 346, 352, 353, 361,371, 384, 390, 401, 417, 421, 422, 423, 424, 434, 441: n = A,T,C or G
  misc_feature 442, 443, 446, 447, 451, 454, 455, 457, 460, 461, 463, 465,475, 511, 542, 546, 548, 558, 559, 571, 572, 604, 605, 606,608, 616, 617, 618, 620, 621, 622, 623, 624, 625, 626, 627,628, 629, 630, 631, 632, 633, 634, 635, 636, 637, 639: n = A,T,C or G
  misc_feature 653, 654, 655, 656, 659, 660, 661, 664, 675, 676, 677, 678,679, 680, 681, 682, 683, 684, 685, 686, 687, 688, 689, 692,693, 702: n = A,T,C or G
gagcgcgcgtatacgactcactatagggcganttggagctccaccgcggtgggcggcccgangtactnnnnttttttttttttttntttttttttggggtttttttttntttttttttttttntttttttttttttttnttnttnttttnttttttttttngggggggcccgggggggaaaaanttntttttntttttcanaaannaaaaattttngggggaaaaaaaaaatnanaaaaaaaaaattttttttttttttttggggggtttttngnggggcccncttttttttttnttcttcntctttttggggggggggaaaaaaaaanaaaanaaanntctttnnggcgcnnaaaaaaangaggggggcnctttttatttttntctccnggggggggggntttttttaaaaaaaanatannnncccccccccnccccgcnnnggnnaaanttnntnaanntntntttttttttntccccccccccccccccccggggggggggggggggncccccccctcttttttttttttttttttttntaanangaaaaaaaanncccccccccccnnaaaaaaaaaaaaaaaaaaaaaatttttttttnnnanaaaataannntnnnnnnnnnnnnnnnnnnanaaaaaaaaaaaaannnnggnnnaanaaaaaaaaaannnnnnnnnnnnnnnctnnaaaaaaaan

SEQ ID NO: 2794 - DNA, 703 bp, Homo sapiens
  misc_feature 126, 156, 181, 200, 221, 223, 229, 234, 239, 243, 254, 260,266, 267, 268, 270, 273, 275, 279, 281, 289, 290, 293, 294,302, 304, 309, 310, 315, 317, 318, 321, 324, 326, 329, 331,332, 333, 339, 341, 343, 345, 346, 347, 351, 361, 363: n = A,T,C or G
  misc_feature 366, 370, 372, 374, 376, 379, 382, 385, 387, 388, 390, 392,400, 414, 416, 418, 422, 423, 430, 445, 446, 460, 464, 466,473, 480, 482, 487, 489, 494, 498, 499, 503, 506, 508, 509,515, 516, 517, 519, 522, 525, 526, 529, 531, 534, 535: n = A,T,C or G
  misc_feature 536, 538, 544, 554, 556, 562, 564, 568, 570, 574, 575, 582,584, 587, 589, 591, 597, 601, 608, 609, 611, 615, 620, 641,651, 662, 664, 668, 675, 684, 686, 689, 691, 692, 695, 698: n = A,T,C or G
gagcgcgcgtaataccgactcactatagggccgaattggagctccccgcggtggcggccgccccgggcaggtactttttttttttttttttttttttttttggttttttttttttttttctgggtnaagtttattctgttttcacatctaggttgntggggagagtgatagacaaagaacnggattctgggcatcgtcgncgcatgcttgaaatcctactngngagganaaaanaagangaanaaaaagaagcnaaggantagaannnanaangngacnangaaaacanntannaaaaccanangaacnnaaaanannaanaanancanannnaaaccncnanannntaanaaaacataananggnagancnancnaanaanaanannananaataaaanaataaaaaaaaaanananaacnncaaaaanagaaaaagagagaannacaaaataaaagancaananaaccaanaaacaananagacnanaagangaanncaanaancnnaaaacnnnanacnatnncananaannnanaaaaanaaaaaaacananaaaaananaaananaaanncaaaaananaanananaaaaanacanaaaagannanaaanaaatnaaaaaaaaaaaaaaaaaaaanagaagaaaanaaacaacaaananaaanagaaaanataacaaangnagnannatnaanacata

SEQ ID NO: 2795 - DNA, 693 bp, Homo sapiens
  misc_feature 251, 284, 297, 315, 316, 373, 396, 506, 513, 565, 566, 628,633, 643, 649, 650, 652, 654, 657, 658, 659, 666, 671, 673: n = A,T,C or G
gaccccgcgtaataccgactcactatagggcgaattggagctccaccgcggtggcggccgtcgccaccaacgcgctctcccaaccctcggagtcagttccaaaaccaaaccaaaaaggaggagagcagacaaggcttcagctctgcgactgagaacagggaggcggcacgccttggggaaccgagggcccgaggccataccgcgctaatacaggccagtgtcggcgtaaactttctccgttaccggcccgngccgctctagaactagtggatcccccgggctgnaaggaattcgatntcaagcttatcgataccnntcgacctcgagggggggcccggtacccaacttttgttccctttagtgaaggttaatntgcccgcttggcgtaatcatggncatagctgtttcctgtggtaaaattgttatcccgctcacaattccacacaacattacgagccgggaagcataaagtgtaaagcctggggttgccttaatgaagtgagctnacttcanatttaattgccgttgcgctcacttgcccgcttttccagtcggaaaaacctgnncttgccagcttggcattaattgaattgggccaaggccccggggaagagggcggtttgcggtnttggngcggctcttncgcttnntngnttnnntgactcngttgnanttcggttcgttcagggttgg

SEQ ID NO: 2796 - DNA, 690 bp, Homo sapiens
  misc_feature 103, 147, 156, 206, 319, 321, 353, 361, 413, 462, 475, 478,507, 518, 519, 558, 572, 573, 583, 594, 616, 630, 672, 675,681, 682, 686, 690: n = A,T,C or G
ggcgcgcgtaatacgactcctatagggcgaattggagctccaccgcggtggcggccgaggtacatctttccaaactggacatcaaggaattgctacacagaanaaccacatccaggatagaaaggaccagccagagctcgttcagtngtgtatttnagaatcatcagggaggagcccggtagcagaattatcccgttaacactganaccacatttcacctgttacttatttttctaaatggagtaggagagaaagatgctaaaatgtgatcttgggaggagtcccccagtcccccgaaaaagaagaagaaaaaaaaaangnagaactccaaacccctgtggtcatggcaattncccatcanaactgcccatgttaaaataaacacaagctgcttaaaagtgaatgttaagaanggaaggcactggttagtgggtggtcctgaccaatcccctggagctgganaggggtttttccnacnggcctttggtttaatgtgtctgtaaactncaacaaacctnncgttttcccctgaggtaattctgcaaaaaacatcagttnttcagtccccagannaccatttccntattaaacctnaccccccgaaatcatttcaatngtaacattttgccnttatttttagaagaaacaaatggttcccattatttattcccnagntttttnngaanaatn

SEQ ID NO: 2797 - DNA, 670 bp, Homo sapiens
  misc_feature 410, 462, 469, 471, 474, 491, 495, 502, 518, 519, 523, 527,530, 531, 535, 540, 542, 547, 548, 549, 551, 556, 557, 559,562, 563, 566, 571, 572, 575, 577, 578, 580, 581, 582, 583,584, 588, 589, 590, 591, 592, 597, 599, 600, 601, 602: n = A,T,C or G
  misc_feature 603, 604, 605, 606, 607, 608, 609, 610, 611, 612, 613, 614,617, 618, 621, 622, 623, 624, 625, 626, 627, 628, 629, 634,635, 636, 637, 638, 639, 640, 641, 643, 644, 645, 646, 647,648, 649, 651, 652, 653, 654, 655, 657, 658, 659, 660: n = A,T,C or G
  misc_feature 661, 662, 663, 664, 665, 666, 667, 668, 669, 670: n = A,T,C or G
gagcgcgcgtaatacgactcactatagggcgaattggagctccaccgcggtggctgttggagctttcagaacgttcctcttcttgtgtagacacgagataccgctgtaactttactccatcaccagaaacctgtgccttgagtctagtctctgctcagccctcgagagcatggttggattaaggaaatagtcaaaggcaagcaagacaaactccctaggttgtcttggtcatgcgtcttttaaaaagggaaagaagaaaaaccaccacaacagataaaagcaccgaggcctgggcttgtgtcaggagccagagaggtcgtccttccttgaaatcccgcgtacctcggccgctctagaactagtggatcccccgggctgcaggaattcgatatcaagcttatcgataccgncgacctcgagggggggcccggtacccactttttgttccctttagtgagggtnaattgcncnctnggcgtatcatggcatanctgnttcctgngtgaaattgttatccnntcanaatnccnncaanatacnanccggnnncntaaanngnaannccnggggnnccnannannnnnctannnnnattantnnnnnnnnnnnnnnnnccnnttnnnnnnnnnaaacnnnnnnnncnnnnnnntnnnnnannnnnnnnnnnnnn

SEQ ID NO: 2798 - DNA, 654 bp, Homo sapiens
  misc_feature 6, 585, 588, 624, 634, 637, 642, 653: n = A,T,C or G
gagctnctccgtaatacgactcactatagggcgaattggagctccaccgcggtggcggctggagggcctggctgggaggtttcacccagtgagcagaaatgtatcagggtcccacttaaagaagcagtctcgctatgatctggcaaatccactgtacctcggccgctctagaactagtggatcccccgggctgcaggaattcgatatcaagcttatcgataccgtcgacctcgagggggggcccggtacccagcttttgttccctttagtgagggttaattgcgcgcttggcgtaatcatggtcatagctgtttcctgtgtgaaattgttatccgctcacaattccacacaacatacgagccgggagcataaagtgtaaagcctggggtgcctaatgagtgagctaactcacattaattgcgttgcgctcactgcccgctttccagtcgggaaacctgtcgtgccagctgcattaatgaatcggccaacgcgcggggagaggcggtttgcgtattgggcgctcttccgcttcctcgctcactgactcgctgcgctcggtcgttcggctgcggcgagcggtatcanctnactcaaaggcggtaataccggtatccacagaatcanggggataacncangaaanaacattgtganc

SEQ ID NO: 2799 - DNA, 661 bp, Homo sapiens
  misc_feature 522, 543, 597: n = A,T,C or G
cgtatacgactcactatagggcgaattggagctccaccgcggtggcggccgtagtcctcacaaacacagagggctccgcactccgcatgtaggtccacattttatcaaacactgcaattttagatctcctgaaaaactctttagtggagccagagtctaatgttccataggcaatttctgtttgcttagaaagatcctcagcactttcgatgggagacaccatcctctctacagtcaggaaggcagctaagttagccgtgtaggaggagattatgatcagggtaaagaaccaccacacacctccaacaatgcgcccagagaggggatctaataacaagtatgaaatggatttgtaaagtgaaatgaatgacctaataaaaaaacaagttagcagtattatgcaaatattgacttataggggaatatttaattttatatttttcaatgtatctactagttaatgaaactggaaatcattaaacattttggggcaaggagtacagccggaaacctcgcagccgntccttgcagtccaccggccgntctagaactagtggatcccccgggctgcaggatttcgatatcaagcttatcgtnccgtcgacctcgagggggggcccggacccagcttttgttccctttagtgagggttaattgcccc

SEQ ID NO: 2800 - DNA, 676 bp, Homo sapiens
  misc_feature 526, 529, 567, 621, 654, 676: n = A,T,C or G
cgcgtaatacgactcactatagggcgaattggagctccaccgcggtggcggccgaggtaccatagccaaatctgggacaagcgagtttttaaacaaaatgactgaagcacaggaagatggccagtcaacttctgaattgattggccagtttggtgtcggtttctattccgccttccttgtagcagataaggttattgtcacttcaaaacacaacaacgatacccagcacatctgggagtctgactccaatgaattttctgtaattgctgacccaagaggaaacactctaggacggggaacgacaattacgtgagtatgaccaattccttataagaattaatagtcatggtgaggatcttgactctccagttctattctctgagcaaatgacttattctgggccttaattttcctgccttataaaatgaggaaacagaactgttgtcacttgaagaaatgtttgaggacctgcaaagggccaggcacaaaggttttgtgattgctggttgtacctgcccgggccggncgntctagaactagtggatccccccgggctgcaggaattcnatattcaagctttatcgataccgtcgacctcgaggggggggccccggtacccancttttggttccctttaatgaagggtaaattgcnccccttggcgtaatcatgggcn

SEQ ID NO: 2801 - DNA, 659 bp, Homo sapiens
  misc_feature 5, 629: n = A,T,C or G
gagcnccgcgtaatacgactcactatagggcgaattggagctccaccgcggtggcggccgcccgggcaggtacatcatttccagagcaggcactggcggcgagatagggttggaggagaagtagcgccgggacttccggatggcaaacttctctgtgggtagagatttcccagcaatcttgagcttcaggcctggcacagctcgaaataattccacttcgtcgtccccgaacggcttgtggtcctccttcccaaacatgctgaggtaggcggccttcatgtaaatgtaggtggcctttttaagtcagatcatgtcagttccttctggaaatctggttatattccatcacactcaggagacatctcctacaatttccttgacacctgcagcactccagccacacgacggcctcagggccccgcgtacctcggccgctctagaactagtggatcccccgggctgcaggaattcgatatcaagcttatcgataccgtcgacctcgagggggggcccggtacccagcttttgttccctttagtgagggttaattgcgcgcttggcgtaatcatggtcatagctgtttcctgtgtgaaattgttatccgctcacaattccacacaacatacganccgggagcataaagtgtaaagcctggggtg

SEQ ID NO: 2802 - DNA, 656 bp, Homo sapiens
  misc_feature 610: n = A,T,C or G
cgcgtaatacgactcactatagggcgaattggagctccaccgcggtggcggccgaggtacgcggggaacacatccaagcttaagacggtgaggtcagcttcacattctcaggaactctccttctttggggagcctcagatgggaagggactcgagccccacctgtccctggactctggaatgccacggaattaacccgagcaggcatggaggcctctgctctcacctcatcagcagtgaccagtgtggccaaagtggtcagggtggcctctggctctgccgtagttttgcccctgggggctcaccgtgtgggggagcaaatcatgtatatccagtgctgtgagtggctccagtcatggaggagcaaggatgagttctgcctggaagaatctgggaaggcttcctggaggagggaacaatggcatggaccttgaagagtcagaagctttcaattcattccattcaagcattgctctcatgtggcattcaagcattctatagtgcttgccgtgactcaggcgcacagtgcaaaaggaagcacatctttctctgccatgaggacttattagtgtctgaagagctttttctggactataggagaaagtcatggnctccctcactaataaacactgaccctgcttcggatgagctaacagc

SEQ ID NO: 2803 - DNA, 617 bp, Homo sapiens
  misc_feature 578, 591, 603, 606, 611: n = A,T,C or G
gagcgccccgtaataccgacctcactatagggcgaattggagctccaccgcggtggcggccgaggtacgagatgccacggcacgaagtctacgttctcctgatccgaaacatctttttgaaaatatcaatcattggcattctttgttactattggctcaacaccgtggccctgtctggtgaagagtgttgggaaaccctcatcgaccaggacatctaccggctccttctgatggattttgtgttctctttagtcaattccttcctgggggagtttctgaggagaatcattgggatgcaactgatcacaagtcttggccttcaggagtttgacattgccaggaacgttctagaactgatctatgcacaaactctggtgtggattggcatcttcttctgtcccctgctgccctttatccaaatgattatgcttttcatcatgttctactccaaaaatatcagcctgatgatgaatttccagcctccgagcaaagcctggcgggcctcacagatgatgactttcttcatcttcttgctctttttcccatccttcaccggggtcttgtgcaccctggccatnaccatctggagantgaagccttcanctnactgnggccct

SEQ ID NO: 2804 - DNA, 417 bp, Homo sapiens
  misc_feature 5: n = A,T,C or G
gagcnccgcgtaatacgactcactatagggcgaattggagctccaccgcggtggccggccgcccgggcaggtacagtccactagcacggcagctatagtgtgggcatctaagagtgccctgtaagcatgtgtggccaggctagggccatgggagaggcaagcagactaaggagtgctgccatcagaccagccccatctcatgtgcaagactgcccagcctccagagatcaggtctcagaggagaactctctcaaaagtgaacccctggtccgcctcagacactctgaagccctaaggctgaaatgcctgggtcgcccaaacagcaaagatgacaatctggtcctccccctgggagctctgactcagtgaggcctgagacctctgtcggccagagaacagcagtcaaggtagccagag

SEQ ID NO: 2805 - DNA, 417 bp, Homo sapiens
cgtatacgactcactatagggcgaattggagctccccgcggtggcggccgaggtacttttttttttttaacagttaagaatgtgtgacgttatttatgaccagaaagttcagattgagtctaaaaatcacagtagaggctaacccgtattattattatttaaacacaattaaacatttaaagatgagttctgggggagtaattactcagatgttaacactagtgcccatcaaagaaggatttttaaaagatacattttcacatttcatttattgtaaaatcttgattgtgctactctattaataccatgaataatcttaagtagcaggtaagcaaataaaatacataattgtattttggcttattctgtgtaagtttacaaatctgtttaccttattcaacaacaaaatatttattg

SEQ ID NO: 2806 - DNA, 541 bp, Homo sapiens
  misc_feature 278, 437, 446, 450, 451, 461, 468, 483, 488, 497, 513, 532: n = A,T,C or G
cgaattggagctccccgcggtggcggccgcccgggcaggtacaatgccaggaagatgaatgtgcgttaatgttgctggaacatggcactgatccaaacattccagatgagtatggaaataccactctacactacgctatctacaatgaagataaattaatggccaaagcactgctcttatacggtgctgatatcgaatcaaaaaacaagcatggcctcacaccactgctacttggtgtacgcggggaaatatcgccatcggcatttccccctacgttntttgggtgagtgaatttcagcctgagagaggaatagtaagatacagtgaaaatgtgaataggatcatgtgttcttttaatttgaattatgtattctttttcttctattttccaaactctgcaattatcaccgttaattcttataaactcttaaacaagnagattttgncggnnataaaaaagnaggggtnccttcggcccgtttnttaanaaaactagntgggatccccccgggnccttgcagggaaatttctnatattcaaa

SEQ ID NO: 2807 - DNA, 469 bp, Homo sapiens
  misc_feature 457, 467: n = A,T,C or G
ggcgaattggagctccccgcggtggcggccgaggtacgcgggtaaactttctgaataactgagacatgtcttaaattttgggagttcacaagggaaacaagggtaagaattaaacttcactaatatttctcaccctccaaagccacttcaaccactgcctttctcatttcggttaatagcaactccaatcttccagcagttttaggctgcaaaaccttagctcctctctgtcttacacttcacatccaatctgtcacctattcaaagtatcccccaaatcgagcaatttctcaccatctcttactaatacacctcaggtccaaaccaccagtatacctccctagagtacctgcccgggcggccgctctagaactagttggatcccccgggctgcagggaattcgattatcaagcttatcgatacccgtcgacctcgaggggggggcccggtacccanctttttgttncc

SEQ ID NO: 2808 - DNA, 454 bp, Homo sapiens
ggagctccccgcggtggcggccgaggtaccaaagaacaaacggaagcctaaagatggaccacaaacctttggatatccaggataactgagttaaaaacctaccacacggttaataaaataatgatgtccactgagtccatgaccacaaagcaaatcaccagcagcaggatggcatgggcggcccttttcgctggggggagggacttggagcagaggctggggctgtgaaggtgatgggatcacctctgatggttaaacaaagagtacctgcccggacctgcccgggcggccgctctagaactagtggatcccccgggctgcaggaattcgatatcaagcttatcgataccgtcgacctcgagggggggcccggttacccagcttttgttccctttagtgagggttaattgcgcgcttggcgtaatcatggtcatagcctgtttcctgtgtgaaa

SEQ ID NO: 2809 - DNA, 851 bp, Homo sapiens
  misc_feature 4, 7, 12, 18, 30, 43, 44, 49, 53, 66, 73, 81, 90, 97, 100,111, 114, 116, 121, 179, 277, 305, 306, 326, 333, 345, 361,380, 383, 389, 390, 395, 396, 405, 409, 417, 419, 423, 436,439, 443, 446, 452, 459, 465, 492, 502, 504, 512, 515: n = A,T,C or G
  misc_feature 519, 522, 523, 529, 533, 534, 537, 538, 546, 547, 553, 562,567, 577, 579, 582, 583, 584, 588, 590, 591, 593, 595, 596,597, 617, 619, 630, 635, 647, 651, 658, 665, 672, 687, 704,708, 734, 735, 737, 744, 755, 764, 773, 779, 789, 791: n = A,T,C or G
  misc_feature 832, 833, 837, 838: n = A,T,C or G
tctnttnttaanattttnttttttttttanccccttctttatnnaaatncatnttttattttttanaattctnatcctttntattaattnacctttnttntttttttagtntgngncccgntacgatcctatagggcgaattggagctccaccgcggtggcccgcccgggcaggtacanaaagaggtttgtctgacttaaagtgatttgtcatctttcttttccactctcctaatcatgatctgttccccctcctggcccaataacttaatgcttgnaaactgaggtccacccatttatggaagnnctcttttagtccacaggagntcccttnaacacccctttnttcttgttccctggtngacaaattggtattctggnaanaattannccatnntttgaaaancccncctttttnantagngggtcggttcccnaangtgntgnacctanaaattgngagttnagggccaagattgaacaccatgtccantttaaaaaangnggatatanagnaaantannaaaaanattnnatnnaacaaacnnaggtanaaatattcngtttnttttaaaggnantcnnnatcntnntnannnagggcgaacacacgcaattncngtttttttttnaattnaaaaaaaaaagntggngattttnttctcanaattttnaccaacccaattaantggcccccaattaattntttntcaaccttgggaaaaattccacccanngntgccaantacaatttttntaaattttngggtaaaanaaattnggcccaacanancctttttttaattggttaattccaacccccccaagataaanntggnnaaaaaaatataaa

SEQ ID NO: 2810 - DNA, 492 bp, Homo sapiens
  misc_feature 6: n = A,T,C or G
gggccngaaacactacttagggcgaattggagctccccgcggtggcggccgaggtacttcagctccaccacggtgcaggacagctcctcgtcccggaagtaaggtatagtcaggtgatgcaaactcatcatgggcaccattacccactttttcttgctcaagtagaaccttgactgatgagtatcttgggggtcaaagggcatcccccatttggctttaaagaagatgtaattcaccaggaccatcattgtctgcgagtcaaggtccttgatcaagatctgtgattttccccctagttccattcttcacgtagtcgttgatgagcttcttagctgcagctgagtcctgaaagtcacccgcgtacctgcccgggcggcccgctctagaaactagtggatcccccgggctgcagggaattcgatatcaagcttatcggatacccgtcgacctcggaggggggggccccggtacccagctttttgtttcccttta

SEQ ID NO: 2811 - DNA, 778 bp, Homo sapiens
  misc_feature 5, 7, 8, 9, 13, 20, 25, 26, 30, 33, 35, 36, 42, 45, 47, 51,54, 55, 60, 66, 67, 68, 69, 74, 89, 97, 99, 100, 103, 104,105, 110, 111, 115, 118, 121, 135, 148, 165, 219, 225, 231,264, 268, 284, 289, 321, 326, 328, 329, 337, 340, 342: n = A,T,C or G
  misc_feature 346, 358, 374, 390, 391, 394, 396, 400, 401, 404, 408, 437,439, 446, 449, 456, 463, 465, 466, 468, 475, 476, 484, 502,509, 512, 517, 525, 529, 530, 531, 541, 552, 580, 586, 587,600, 614, 615, 623, 628, 635, 644, 648, 662, 663, 668: n = A,T,C or G
  misc_feature 694, 697, 701, 725, 726, 728, 730, 731, 742, 750, 768, 774: n = A,T,C or G
ttttntnnnttanttttttntttanntatntcnanntatatnaananaatntcnnttttntattannnngactntatttttttaataancttttttntnntgnnngaggnncctntcnatnatatagggcgaatnggagctccaccgnggtggcggccgaggacncggggccttttcacaagatggcgccgaaagcgaataaggaagctcctgcccctnctaaanctgaanccaaagcgaaggctttaaaggccaagaaggcantgtngaaaggtgtccacatncacanaaagaagaagatccgtacgtcacccaccttantgttngnnggatcttnagnantaangtggaatccccncggtgcttgtaagcgnaattccttatatcaanngcntnatannatnaccngttcaacacttagagcgggggggaccccngntaccccnagnttttttnggttttncnntnttatgtnnaaggggtnttatatattggccgacancctttgnacntttanatttcatngggnnngcaattaggnatggtttgtcnccttggtggggtggaaaaaaatgtcgtntgattnnccggcgttcaacnaaaatctccccaannaaccaaanccaantaacccnaagtacccngcgngaaagtccaattannaaaangttggttaaaaaagaacccattgggnggntttngccccttaaaattggaaggtttgnnancnnttaaaaccctncaaccaantttaaaattttggccggntttggnccgg

SEQ ID NO: 2812 - DNA, 499 bp, Homo sapiens
  misc_feature 451: n = A,T,C or G
gggccctaaacactacttagggcgaattggagctccccgcggtggcggccgggggcagctggaggtgcctcagaaggtgcattctgcttcctgcaggggcttgaaacaccaaggcactccagggatcctggagtcaaagcagcagtcccggttgttgcactccttgggggtgacatgggggtagccgcagtccaccctgtccttggctggcacggcacacttggttttgcaagacaggcccacgtacctcggccgctctagaactagttggatcccccgggctgcaggaattcgatatcaagcttatcgataccgtcgacctcgagggggggcccggtacccagcttttgttccctttagtgagggttaattgcgcgcttggccgtaatcatggtcatagcttgtttcctgtgtgaaattgttatccgctcacaaattccacacaacatancgaagcccggggagcattaaaaagtgtaaaagcctgggggttgcctaa

SEQ ID NO: 2813 - DNA, 484 bp, Homo sapiens
  misc_feature 2, 3, 389, 401: n = A,T,C or G
cnnatacactactatagggcgaattggagctccccgcggtggcggccgaggtacagaagatgattgacctggagacaccatccaccccgatttcttctcacaacttgatcaaaaatggcctctaagcctaagtccacggcatccccacaatggatgttaaggttctcaaagggaacagctcggatctggtgttgaagaatgtcagttaatgtttccaagtccaatttgttcctagacttcttatagccaattctttcaagatatgcttcaatgtccatgatcccctttcttagtaagttgaaagtaggttgatcttcagttttaatccagaagacagattgctgcttcttcctggcttgaattcaggttatttcagccggcaaccaggnaactaggactgnaatgcaatcctcccacatccaaggtcccccccgcgtacctgcccggggcggcccgctctaagaactagtggggatcccccggg

SEQ ID NO: 2814 - DNA, 463 bp, Homo sapiens
  misc_feature 4: n = A,T,C or G
ggcnattggagctccccgcggtggcgctttgcacacacgtcatcaacagacagcagtcaacaagctgcctagggcctctgcagagccagatcaaccccacagcctgtgagccaggccttaagctgcctatttgtgctgaagcgggctgcagaacgacccgtgttatccaccctgagcaccaccaacactaagcacaaatgacaacaccatctcacctgaaccctgtccaactcacagctgcctcactggcctttgccactgccctctctgatggagcaagggtctggccttccaagcaaatgtcagcctcagattcaaaagacacataggaaggagcaacacccaacacactgaaaactcctgcccgatccacaaagaccccagtgcaagcgatgggcagcatcagattgatgggaaaccaccacccttttcattttagaatttttatgcacaccgagttaac

SEQ ID NO: 2815 - DNA, 452 bp, Homo sapiens
  misc_feature 125, 199, 201, 204, 275, 329, 332, 364, 372, 450, 452: n = A,T,C or G
cttagggcgaattggagctccccgcggtggcggccgaggtacttttttttttttttttttttttttttttgcacgccccaaaggggcaaaaagagactttaattaggggagggaggatccaccanaatcagaaaagggacagctagcgtgggagcagaggagccagaacaggcaggaggagggcccggccaggaagctntnganggacttaacctttgcccacctttggcacaaggcacttgacactgacggacaaggcgaaacagcggcccctntcaactgggagggcacccaatggcccccccgcgtacctgcccgggcggccgctntanaactagtggatcccccgggctgcaggaattcnatatcaancttatcgataccgtccgacctcgaggggggggccccggtacccagctttttgttccctttagtgaagggttaattgcncn

SEQ ID NO: 2816 - DNA, 454 bp, Homo sapiens
  misc_feature 261, 430: n = A,T,C or G
ttactatagggcgaattggagctccccgcggtggcggccgaggtacgttggggatcgcaaaaacccagtctgtcgagaaatgtccatggcgcttttatcgaaccttgcccaaggggacgcactagcagcaagggccatagctgtgcagaaaggaagcattggaaacttgataagcttcctagaggatggggtcacgatggcccaagtaccctgcccgggcggccgctcctagaaactagtgggatcccccgggctgcaggnaattcgatatcaagcttatcgataccgtcgacctcgagggggggcccggtacccagcttttgttccctttagtgagggttaattgcgcgcttggcgtaatcatggtcatagctgtttcctgtgtgaaattgttatccgctcacaattccacacaacatacgagccgggnagcataaagtgtaaagcctggggg

SEQ ID NO: 2817 - DNA, 452 bp, Homo sapiens
  misc_feature 202, 220, 230, 264, 315, 336, 403, 419, 438, 443, 448: n = A,T,C or G
cgatcactacttagggcgaattggagctccccgcggtggccgcccgggcaggtacgcgggggcaacctgcttgggtccctttccacaccgcggaagctttgttcttttgctctttgcaataaatcttgctgctgctcactctttgggtccacactgcctttatgagctgtaacaccgcgaaggtccacagcttcactcctgngccatcgagaaccacgancccccaccanaaaggaagaatctgtgaacacatccgaacatcanaaggaacaaactctagacatgccgcctttaagaactgcaacactcactgcnagtgttcgcggcttcattctngaagtcagtggggacgaataacccaccaattccagacacattttggcggacctagatgggacaatcncctatcaccgagtggngagaccatcgcctattagnctganccggngaag

SEQ ID NO: 2818 - DNA, 547 bp, Homo sapiens
  misc_feature 2, 8, 9, 12, 18, 19, 55, 82, 110, 114, 165, 171, 182, 204,211, 232, 234, 248, 249, 256, 290, 294, 300, 380, 401, 402,457, 467, 524, 526, 530, 539: n = A,T,C or G
gnacagtnnaanattgtnnaaccccttttggaaaacccgaataggagttccccgnggtggcggccgagacgggtggatcacntgaggtcagcagctctagactagcctantttncatggcaaaatcccatctctactaaaaatacagcaattagccgagcatggngtcacngtgcctgtaancctagctactggggaggctgangcagganaatcgcttgaaccccgggaangngggaaggattgcanntgagccnaggacaattgccacttgcactccagcctgggaanacanagctangactccattctcaaagaaaaaaaagaagaaagaagaaagctaactcagctaccttcggccgctctaagaactagtggatnccccgggctgcaaggaattcnnatatcaaagcttattcgataacccgtcagaacctccgaggggggggccccggtancccaggcttnttgttcccctttaaatgaggggaataattgcggcgcctttggccgtaaattcaatgngncaantagcctgtnttatcccc

SEQ ID NO: 2819 - DNA, 813 bp, Homo sapiens
  misc_feature 2, 4, 5, 6, 8, 9, 10, 11, 13, 16, 17, 19, 21, 23, 24, 25,26, 27, 28, 29, 30, 31, 32, 33, 34, 35, 36, 38, 41, 42,43, 44, 45, 46, 47, 48, 49, 50, 51, 54, 57, 58, 59, 60,63, 64, 66, 67, 69, 70, 71, 73, 75, 77, 81, 84, 85, 86,88, 89: n = A,T,C or G
  misc_feature 90, 92, 95, 98, 99, 100, 101, 102, 103, 104, 105, 106, 107,108, 114, 117, 123, 335, 441, 469, 488, 500, 511, 513, 564,598, 600, 620, 636, 646, 684, 711, 748, 753, 759, 780, 800: n = A,T,C or G
cncnnntnnnntntgnntncntnnnnnnnnnnnnnncnctnnnnnnnnnnnttnttnnnnttnntnngnnntntntngggnaannntnnntnctntcnnnnnnnnnnntaggtnggnccctancgatcctatagggcgaattggagctccaccgcggtggcggccgcccgggcaggtacgcgggataggaaaataaccaagcacaaagttatattccatcctttttactgattttttttcttctatctgttccatctgctgtattcatttctccaatctcatgtccattttggtgtgggagtcggggtagggggtactcttgtcaaaaggccccnattgggtggccattgttgttgttttggcttaagccttcaactttggtccccattggaaaaaaattatttttttaattgaattattttaaaaaaggaaaaaaattcntttttttggaaaaaattgggggcttggntttttttttttaaaagggnaaaggaaggaanattttttaatngntggggccttttccttccattttttttttaaaaaattccccccccttccaantaaaggggttggttgggaacctttaagggttccntncctttttttaattccaaggnccaaccaacccaaccntttttaaaanaaaaaaaaattttttttttttaaaatttaatttttggntgccttaatttttaaaaaaaaaaaaanttaaggggggaacccaaaaaaaaccctttttgggggnaaagnaaaggnttaatttggggggaacccaanaaccctttttttgggaattnaatttttgggcct

SEQ ID NO: 2820 - DNA, 866 bp, Homo sapiens
  misc_feature 1, 4, 6, 9, 11, 14, 17, 18, 25, 26, 27, 28, 33, 36, 39, 46,52, 54, 55, 58, 59, 62, 64, 65, 67, 73, 74, 75, 78, 79,83, 95, 101, 106, 109, 111, 119, 121, 123, 235, 255, 298,307, 341, 361, 364, 367, 378, 381, 391, 401, 410, 423, 428: n = A,T,C or G
  misc_feature 430, 432, 436, 465, 467, 483, 486, 497, 508, 512, 515, 517,518, 522, 526, 530, 541, 546, 552, 554, 575, 590, 599, 613,614, 633, 652, 656, 665, 666, 686, 698, 700, 705, 718, 732,738, 742, 748, 757, 764, 774, 786, 794, 797: n = A,T,C or G
nccntnctncnttntcnntttcctnnnnatatnttntanctgattnactcantnntannttntnncnaaatannnttnntccntcgtactctcantatctnttctncgncncattagtntngngtccgctaaacgactcactatagggcgaattggagctccaccgcggtggcggccgaggtactttttttttttttttttttttttttttcgggcagctaaaatctaggatggngttaagtttcttcattttgncaattatatataaaaaattagaaacaacatgaatctgcatttnttggatganatagttaataacaaactatgttctcaatatttgntattaccctaaaaaaacctntgnttnaaaggggttgnttnaattggttgntttctccaancaaattccnttaatcctccttnaattntntngaanaccaattgggggggttttttctttggaananagggggaaggcccccnttncttacttaaanttacaacttanttanaananntggngctnaatngttcacggctnaaaanattggnangggggcccaacccttggtttntttttggggcccttnggggggaancctttggtccttannttaaaaaaaaaaaaaaaanattttaacccccaatttangggnaacccccanntttttgggaacctttaaaanaaccccccaccnanaaaanccaatttttttcnccctttttcctttncaaccnaagntttttnctttggggnaaaaaanggtttttggnggaaaaaaaagnccccccanaanataatttggtaagggggtaattggcccccaaagtctttaatttgggggccttaaaggccctttttcctt

SEQ ID NO: 2821 - DNA, 559 bp, Homo sapiens
  misc_feature 2, 30, 46, 69, 109, 111, 112, 213, 227, 286, 290, 355, 384,452, 474, 529, 540, 548: n = A,T,C or G
gnctgtggccctttgaaaccacttttgggngaatcggagctccccncggtggcggccgaggtaccctgnaccttctcagttcgctggcacataaggctccgccaataantnntggttctctctgtcacacacacacacacacacacacacacacacacacacacacacacaatgattggagggctatatgatccagcattagcttcctggtgngcccaagccatgcnttgatcggggaattttttttttattattattattttttagctgtagctgaaggcatttntcgnatgtggagaggagaatggaaatcgcaagaaccaaatcatttttgccctgccatattttggctgtnggtcctgtcattgggcaatttctggatgntgccttttcttggattcaagggaaagaagctgaatttgtcctcccgaggggttgaaaaaaaaaaaaanaacaggtgtttcaaggaaaacncttgaaattcccagggggcccctttaataagtttccttccctccaatataattcntaatcttttcnttttcttncccttttcccc

SEQ ID NO: 2822 - DNA, 450 bp, Homo sapiens
  misc_feature 209: n = A,T,C or G
tatacactacttagggcgaattggagctccccgcggtggcggccgaggtacaatgacggggaggaagagggttggttaaagcatccctctaagcagttttctgctgtcccttctttccaatcagagatttgtggatgtgagggatcacaccacccccagctatggtagccttgataagagaatccaactcttcatcaccacggattgcnagctgcaaagtgacgccggagtgatacgctttactttgagacccgcgtacctgcccgggcggccgctctagaactagtggatcccccgggctgcaggaattcgatatcaagcttatcgataccgtcgacctcgagggggggcccggtacccagcttttgttccctttagtgagggttaattgcgccgcttggccgtaatcatgggtcataagcctgtttcctgtgtggaaattgttatccg

SEQ ID NO: 2823 - DNA, 757 bp, Homo sapiens
  misc_feature 1, 2, 15, 16, 18, 19, 24, 28, 32, 38, 40, 43, 44, 52, 55,64, 72, 74, 76, 78, 89, 91, 94, 95, 113, 116, 119, 126,147, 149, 185, 207, 224, 226, 263, 264, 266, 276, 305, 386,473, 509, 517, 548, 563, 564, 571, 583, 590, 606, 611, 638: n = A,T,C or G
  misc_feature 652, 653, 655, 673, 689, 705, 708, 710, 711, 717, 724, 727,752, 753: n = A,T,C or G
nncatttatgtattnntnntatanatanattnatttantnatnnatttatantanaaaaactanatttgttnantntntcatttatatntntanntattaaatataaattacntangtntgaggtncctatacgatatatagggcgnanttggagctccaccgcggtggcggccgaggtactttntttttttttttttttttttttntaaatattgagacggancnttgcgctgtcaccgaggctggagtgcactggcactgnntnggctcactgnaacctttgcctcccgggctcaagcgattntcctgcctcaacctcccaagtagctgggattacaggcatgtgccaccatgcccagccaatttttgcatttttagtagaggngaggtttcagcatggttggccaaggccttggtcccggaaccccccggacctttgtcatcctcccaccctttgggccttcccaaaagntggctgggggattaacaagggcgccggagcccaacncacggggnccggggcttgtttattgccttcaattccatngggccaactttaaannaaaaatngcctttaaaacnaaaaacnctttttccccttaacnaaatngggttcccttcaaaaaaatttttttcnaaaaaagccttttnntntttccggaattccttaanccaatttttgggggtntcccttaaaaaatttnttngnnggttcnccaattnaangaaaaggccccaaaaaacctttggnnaaag

SEQ ID NO: 2824 - DNA, 484 bp, Homo sapiens
  misc_feature 467: n = A,T,C or G
gggcgaattggagctccccgcggtggcggccgaggtacgcgggtaggatgaagccttaagcagtggaaatttcagttattttccacagtattccattttggaggatttggggtgtttactttttaaattcttgaacaacttaacctccatgaggctttgtgaagtcagctgtgaccaccctcctcttactgtgttctcagtattcattcacttccagggaagaatgacagccacagggagatggtggtgggcaagaatgagagtcccaggatccagatttagcctcagatcttccccattcaggaagggttttccatttaacaagagcactagtatgaaaacattagggacaaatctcccatgtctttgaaattcggattctcctcttgagatccccttcctcacctgccaatcaactttataaggccacaagtggtcactggttttccttccacaggttttgaggntcttcagctttccttaa

SEQ ID NO: 2825 - DNA, 947 bp, Homo sapiens
  misc_feature 4, 5, 7, 9, 19, 22, 25, 27, 28, 29, 31, 33, 35, 36, 44, 46,54, 57, 60, 64, 66, 68, 69, 77, 78, 79, 80, 82, 90, 92,93, 100, 101, 104, 106, 107, 108, 109, 111, 118, 121, 137,148, 186, 199, 248, 256, 266, 267, 287, 291, 298, 304, 318: n = A,T,C or G
  misc_feature 321, 326, 348, 351, 352, 353, 354, 356, 358, 370, 373, 381,387, 391, 398, 402, 418, 422, 423, 424, 428, 433, 434, 447,466, 469, 476, 481, 486, 489, 503, 505, 510, 527, 533, 534,538, 544, 546, 547, 551, 554, 557, 558, 561, 573, 577: n = A,T,C or G
  misc_feature 584, 588, 591, 602, 605, 606, 612, 613, 614, 620, 625, 627,631, 635, 653, 654, 664, 679, 681, 714, 716, 718, 720, 727,735, 741, 750, 751, 761, 770, 772, 775, 777, 780, 782, 786,787, 789, 797, 802, 805, 810, 812, 817, 819, 822, 826: n = A,T,C or G
  misc_feature 828, 833, 849, 850, 852, 858, 862, 864, 871, 877, 887, 892,901, 906, 913, 918, 928, 934, 937, 946: n = A,T,C or G
tccnncncntttttatctnctnctnannntntntnntaacgctntnacaaacanctnttntacncntnnttgatccnnnntntctatatntnnattcctnntgntnnnntncgctcanctnctactttagttttagnggccgcgtgcncgtatacgactcactatagggcgaattggagctccacncgcggtggcggcncgcccgggcaggtacttttttttttttttttttttttttttttttttancagtcggnttcgcaagcnntggtttcctggatctcacanaacngttgggncttttnaacctgatagcacnttncaatngcgtttagttatccagtgctgngcnnnngnanaaataccattcntcnattcattnatttanctcntatcaantttntttttttccccttttnaaannngggngaaannttattttttgtgnattccttaaaaacttttanaanaatatantttcnccttnttncccccttcggcccncnacaanacagtatttttaattancaagcnnctcnttgttncnnaaanaanaanncanactcccttattncctnttgtggntatnatntttctagttancanncattgnnngccgtnttctnanattnactnttcagactcttgtttccnngttaacacgngatataatacttttntncaattttttttcctcctttacaataaaaatagngntntnaaccccntttttatnagaatntccaatttnnaaatttttcntttcaaatncnccntnccnantatnnanttttactntaccnaanaaccngngtgtnanatncccncnggccnccctaatttttttaannancaccanaaananccttttnttattngtggctaccngcccnttttcaaanaacanttatttntcaanttctgggggncccctnttnatgaaaaant

SEQ ID NO: 2826 - DNA, 443 bp, Homo sapiens
  misc_feature 3: n = A,T,C or G
ctncttagggcgaattggagctccccgcggtggcggccgaggtaccagatggaaaatgtttttggtgatctggctgctgcttaaagccagttttccctaagaactccaaaggctaaagtctactaggggcagagtgtgaggatagatttctaatcagagaaaagtggcctccaggagctttcatttatgtcttctccagaccagggtttccctggttatcttcctttaatcccctttcaaccaacaggtgaagttcttccagcccacagaggtagtaatatcatcttttctatctcctcctctcctttggccatgtaatgaagcaaaatattatttatttagcccaggcttgagagccactgtttgtgggacagtcttcatctagattccataccctggcctaggccgaggtaagggctctctggttattgccaggatgggag

SEQ ID NO: 2827 - DNA, 457 bp, Homo sapiens
  misc_feature 452: n = A,T,C or G
tatcactacttagggcgaattggagctccccgcggtggcggccgcccgggcaggtacgcggggacccgagatctaatctctgtgctctgtgtattggcgacgagcagggtgagaataagtgcgtgcccaacagcaacgagggatactacggctacactggggctttccggtgcctggctgagaatgctggagacgttgcatttgtgaaaagaatgttcacttgtctttgcagaaacactgatggaaataacaatgaggcatgggctaaggatttgaagctggcagactttgcgctgctgtgcctcgatggcaaacggaagcctgtgactgaggctagaagctgccatcttgccatggccccgaatcatgccgtggtgtctcggatgggataaggtgggaacgcctggaaacaagggtgttgctccacccggacagggctaaatttggggagnaaatg

SEQ ID NO: 2828 - DNA, 446 bp, Homo sapiens
  misc_feature 446: n = A,T,C or G
tactatagggcgaattggagctccccgcggtggcggccgcccgggcacggtacacgtaaaagcttggctaagcagacgcatcaggagcaaaccatttgtgttcaccaatctgtctcggcaagtcccagggccactatcttgctagaagccactgtgtgcttttgaaagcatgaaattagttttatactgagcacatggtttctcgtttaagcagctcttttttatggtaattggtcaatttatggttcactgccaggatttcggtgtacctcggccgctctagaactagtggatcccccgggctgcaggaattcgatatcaagcttatcgataccgtcgacctcgagggggggcccggtacccagcttttgttccctttagtgaagggttaattgccgcgcttggcgtaaatcatggtcattagctgtttcctgtgtgaaatttgn

SEQ ID NO: 2829 - DNA, 465 bp, Homo sapiens
  misc_feature 2, 3, 4, 5, 6, 120, 134, 178, 188, 232, 234, 256, 258, 268,374, 376, 400, 411, 413, 421, 424: n = A,T,C or G
gnnnnnggccctaacgactacttagggcgaattggagctccccgcggtggcggccgcggtactttttttttttttttttttttttttttcagggggagcatgggacctttattcgttaanacatcaggctccanatatgaactttcagcaaaagcgcttgccgggagcaaagggacanaaaagctganatgaacagtgcctggcagcaatcacagccgggcaaggggtgctncnaagcctcgcatcccccggccgntntaaaactagnggatcccccgggctgcaggaattcgatatcaagcttatcgataccgtcgacctcgagggggggcccggtacccagcttttgttccctttagtgagggttaattgcncncttggcgtaatcatggtcattagnctgtttcctgngngaaaattngtnattccgctcacaatttccacacaacataccgagcccggggg

SEQ ID NO: 2830 - DNA, 427 bp, Homo sapiens
  misc_feature 195: n = A,T,C or G
ggagctccccgcggtggcggccgaggtactctctttctctttttcttggttgctgtgaaggaagtcagctgccatgctgtgagcttccattgaagacagaagtcttccttctaaatgccacgtgagtgagcatggaagtcaagccatgcaatgactgtcactctggctagcaccttgattgcaatctttttgggnaggccttggtccaaagtcaccctgcaaaaccaatgcccagaattactgacatatttatttcaagctaataaattataggcgtaatttgtaatatgcagaaatagataactattacgtagatcaaatgaaaagattttccaatgtgtagaaactacataaattcttttcttacaggacaatcttattctaatcaataacatttgcttttaaggcagataatcctccaaggttt

SEQ ID NO: 2831 - DNA, 442 bp, Homo sapiens
  misc_feature 2, 3, 385: n = A,T,C or G
cnntactatagggcgaattggagctccccgcggtggcggccgcccgggcaggtacgcgggggaagaacagttaaagtgtcttctggatgaatgcatacttaaacaaaaatccatcattaaactttcttcagaaagaaaaaaggaagacattgaggacgtaacacctgtgttcccccagctttccaggtccatcatctctaaattggctaaatgaatcagaaacaaaggtccagaaaactgagatagaagatgcagatatgcttgagagtgaagaatgtgaagcttctaaaggctactatctcactaaagccttgactggacataacatgtcagaagctcttgtcactgaagcagagaatatgaaatgccttcaatttttccaagngacgttattatttagtgacacaaaagactattttatgtcgaagacttcttgccattg

SEQ ID NO: 2832 - DNA, 701 bp, Homo sapiens
  misc_feature 6, 13, 14, 17, 27, 31, 476, 477, 478, 479, 480, 481, 482,483, 484, 485, 486, 487, 488, 489, 490, 491, 492, 493, 494,495, 496, 497, 498, 499, 500, 501, 502, 503, 504, 505, 506,507, 508, 509, 510, 511, 512, 513, 514, 515, 516, 517: n = A,T,C or G
  misc_feature 518, 519, 520, 521, 522, 523, 524, 525, 526, 527, 528, 529,530, 531, 532, 533, 534, 535, 536, 537, 538, 539, 540, 541,542, 543, 544, 545, 546, 547, 548, 549, 550, 551, 552, 553,554, 555, 556, 557, 558, 559, 560, 561, 562, 563, 564: n = A,T,C or G
  misc_feature 565, 566, 567, 568, 569, 570, 571, 572, 573, 574, 575, 576,577, 578, 579, 580, 581, 582, 583, 584, 585, 586, 587, 588,589, 590, 591, 592, 593, 594, 595, 596, 597, 598, 599, 600,601, 602, 603, 604, 605, 606, 607, 608, 609, 610, 611: n = A,T,C or G
  misc_feature 612, 613, 614, 615, 616, 617, 618, 619, 620, 621, 622, 623,624, 625, 626, 627, 628, 629, 630, 631, 632, 633, 634, 635,636, 637, 638, 639, 640, 641, 642, 643, 644, 645, 646, 647,648, 649, 650, 651, 652, 653, 654, 655, 656, 657, 658: n = A,T,C or G
  misc_feature 659, 660, 661, 662, 663, 664, 665, 666, 667, 668, 669, 670,671, 672, 673, 674, 675, 676, 677, 678, 679, 680, 681, 682,683, 684, 685, 686, 687, 688, 689, 690, 691, 692, 693, 694,695, 696, 697, 698, 699, 700: n = A,T,C or G
aaggancgcgatnncgntatggactanttgntggctgattggagctccccgcggtggcggccgggcagttgaaggccttcagagcaaaactgaggtttctcggtcatgcggttatgtcttcaacacctgcgtcccccaccggaggccagctcccagggcgcgttctagtgtgtggcgttcgcttcatattcccaggcgtcgcttgccccagcacgcctgtgtgctcagtaacaatgtgttaagcacaggattttgggagaagtgtatatggacgtctgaagaagggttgtgcttgtggaagagccccgcgtacctcggccgctctagaactagtggatcccccgggctgcaggaattcgatatcaagcttatcgataccgtcgacctcgagggggggcccggtacccagcttttgttccctttagtgaggggttaattgcgcgcttggcgtaatcatggtcatagctgtttcctgnnnnnnnnnnnnnnnnnnnnnnnnnnnnnnnnnnnnnnnnnnnnnnnnnnnnnnnnnnnnnnnnnnnnnnnnnnnnnnnnnnnnnnnnnnnnnnnnnnnnnnnnnnnnnnnnnnnnnnnnnnnnnnnnnnnnnnnnnnnnnnnnnnnnnnnnnnnnnnnnnnnnnnnnnnnnnnnnnnnnnnnnnnnnnnnnnnnnnnnnnnnnnnnnnnnnnnnnnnnnnnnnng

SEQ ID NO: 2833 - DNA, 691 bp, Homo sapiens
  misc_feature 1, 3, 4, 5, 6, 7, 8, 9, 10, 77, 81, 91, 128, 129, 155, 202,624, 647: n = A,T,C or G
nannnnnnnngcgcgtaatacgactcactatagggcgaattggagctccaccgcggtggcggccgcccgggcaggtncgcngggagatcantgatagcactagatactcattggagcatgaaccctgnngtgaactgctcatctgagggatctangttgtgtgcttcatatgagaatctaatgcctgatgatatgtcactgnctcactttgcccccagatgagaccatctagttgcagaaaaataagctcagagtttccacggattctacattatgatttgatcttcaacaaagctgatactggggaaaggacacactcttcaataaatggtgctgggaaaattggatagccacatccagaaaaatgaaactggaccactatctcactatatacaagaatcaactcaaagtagattaaaaacttaaacagaagacctgaaactataaaaatacttgaagaaaacctagggaaaaatttcctggccttttgtctaggcaaagaatttatgactaacacctcaaaagccacaagcaacacaaataaaaatagacaaatgggacttaattaacttagaaagcttctgagcagcagaagaaataatcagcagaatgaagagacacctnctgaatggaaaaaaatatttgcnaactgttcatctaatagtggctaatacctagaattaccaaaacc

SEQ ID NO: 2834 - DNA, 701 bp, Homo sapiens
  misc_feature 2, 3, 4, 7, 12, 21, 32, 613, 696: n = A,T,C or G
gnnnggncgccntatcgactnactatagggcngattggagctccaccgcggtggcggcccgaggtacgcggggcttagacctgacgctgggaggagatgctgccacctaggttacttgtaggaccctatacggcaacctcctttgccaggaactatttataaacatcctgcaggaaaatgagtctatatgtcagaatacacatttcccaccttgcccaacagtagaaaaacataagaagagaaaaacattaaaaaatgacaaggaagttaatggaagtcagcaatgtgatggtgtttggaggtggagccttcagaaggtaattaatgcccttgtaagaagaggccagagagcttgcgcaccttcttcctgccatgtgaggagccaagaagccggctgtctgcaacctgcaagaggaccctcactagaagctagccatactggcatcctcatcttggctttccaacttccagaactgtgagaagtatatgtttgtggtttagtcaatggtctatggtaatttttttatagcagtcccagccaagacagtgcctcatttactatataccatttatattattatataggctcctttcagaaacccatgttcaaatnagagataagatactggaacacattacaccttcctagtttttagtatacaaatttgagaaatagttggtattaactatctcatncaaga

SEQ ID NO: 2835 - DNA, 691 bp, Homo sapiens
  misc_feature 2, 3, 5, 7, 8, 9, 13, 18, 19, 22, 125, 161, 260, 302, 306,313, 342, 349, 383, 389, 390, 417, 441, 478, 509, 588, 590,623, 636, 645, 648: n = A,T,C or G
gnngnannntttnagccnnaancgactcactatagggcgaattggagctccaccgcggtggcggccgaggtactttttaatttttttctttttttttcttgccctttccattagttgtatttttnatttatttttatttttatttttttttagagatggantctcactatgttgctcaggctggccttgaactcctgggctcaagcaatcctcctgcctcagcctccctagtagctgggactttaagtgtacaccactgngcctgctttgaatcctttacgaagagaaaaaaaaaattaaanaaancctttanatttatccaatgtttactactgggattgnttaaagngaggcccctccaacaccagggggttaattcctgngattgnnaaaggggctacttccaaggcattttcntgcaggcagccccttgggagggcncctgaaagctggtaaagtctgaaattagggatgtgancctcggggttactgagtaaggtaaaattgcntccaccattgtttgtgataccttagggaattgcttggacctggtgacaagggctcctgttcaataatggtgttggggananaaaaaacctgattatagaccgaaaaagtagganttgaggtgaggtnaaagaagtnctnggggtgaaaatgtcccctttccccctgggttttggatcactaa

SEQ ID NO: 2836 - DNA, 691 bp, Homo sapiens
  misc_feature 2, 3, 7, 13, 14, 19, 21, 22, 671, 672, 673, 675, 676, 678,679, 680, 681, 682, 683, 684, 685, 686, 687, 688, 689, 690,691: n = A,T,C or G
gnnaggnccccgnntcgcntnnacgactactatagggcgaattggagctccaccgcggtggcggccgtagtcctcacaaacacagagggctccgcactccgcatgtaggtccacattttatcaaacactgcaattttagatctcctgaaaaactctttagtggagccagagtctaatgttccataagcaatttctgtttgcttagaaagatcctcagcactttcgatgggagacaccatcctctctacagtcaggaaggcagctaagttagccgtgtaggaggagattatgatcagggtaaagaaccaccacacacctccaacaatgcgcccagagagggatctaataacaagtatgaaatggatttgtaaagtgaaatgaatgacctaataaaaaaacaagttagcagtattatgcaaatattgacttataggggaatatttaattttatatttttcaatgtatctactagttaatgaaactggaaatcattaaacattttgggcaaggagtacctcggccgctctagaactagtggatcccccgggctgcaggaattcgatatcaagcttatcgataccgtcgacctcgagggggggcccggacccagcttttgttccctttagtgagggttaattgcgcgcttggcgtaatcatggtcatagccgggnnncnngnnnnnnnnnnnnnn

SEQ ID NO: 2837 - DNA, 704 bp, Homo sapiens
  misc_feature 2, 3, 4, 6, 9, 10, 14, 16, 22, 26, 32, 58, 106, 116, 127,128, 132, 138, 146, 150, 159, 182, 205, 276, 310, 332, 380,388, 413, 420, 430, 432, 433, 435, 439, 511, 536, 540, 544,550, 566, 571, 576, 577, 583, 601, 647, 648, 686, 697: n = A,T,C or G
  misc_feature 699: n = A,T,C or G
gnnngngannccgnantcgcgntatngactanttgttggctgattggagctccaccgnggtggcggccgcccgggcaggtgcaaacagctgagacagatctgcgangatcacatcngagcacagatnnatcnattcanagaggatncatnggatagcgntctttttttaaagaagattgatncgatgctggcaaaaccattgcanacaaatgatcatgatcaggagcatttttttgttgtctggatagaacttacgttcttcagaattcaatgctnccctccattcggggacatgggactggagttattnagggctcatattataagtgatnagaaagtgcacatatatgacaattgatggcattcttctcttgattganagggaaangaatggtgaagcacttgatagaagnttacttncaagcctttnanncntgcngtctgattagcaaatctatcaagattcttttgaacaacgatttttggaagaaactaaccggctctatgcagntgaaggccaaaaattactgcagganaganaggntcctgnatatctacatcatgtncacanaccgnnttcaanaagaaccacacagacttnttacttacttagatcagaccacccagaagtcattaattgctactgnngaaaaacaactttctaagtgaacacttaacagccattnttgggaaaggntnaaatt

SEQ ID NO: 2838 - DNA, 858 bp, Homo sapiens
  misc_feature 5, 17, 30, 39, 40, 70, 76, 95, 98, 106, 113, 129, 131, 158,163, 166, 179, 192, 303, 364, 380, 382, 385, 413, 415, 421,422, 425, 435, 436, 443, 465, 477, 479, 484, 505, 506, 510,518, 523, 524, 533, 536, 537, 538, 539, 540, 541, 542: n = A,T,C or G
  misc_feature 543, 544, 545, 546, 547, 548, 550, 551, 552, 553, 554, 555,556, 557, 558, 559, 560, 561, 562, 563, 564, 565, 566, 568,569, 571, 572, 573, 574, 575, 576, 577, 578, 579, 581, 583,584, 585, 586, 587, 588, 589, 590, 591, 592, 593, 594: n = A,T,C or G
  misc_feature 595, 596, 597, 598, 599, 600, 601, 603, 604, 605, 606, 607,608, 609, 610, 614, 615, 616, 617, 618, 619, 621, 622, 623,624, 625, 626, 628, 629, 630, 631, 632, 633, 634, 635, 636,637, 638, 640, 641, 642, 644, 646, 647, 648, 649, 650: n = A,T,C or G
  misc_feature 653, 654, 655, 656, 657, 659, 660, 661, 662, 663, 664, 665,666, 667, 668, 669, 670, 671, 672, 674, 675, 677, 678, 679,681, 683, 684, 685, 686, 688, 689, 690, 691, 692, 693, 695,696, 698, 699, 701, 702, 703, 704, 705, 709, 711, 712: n = A,T,C or G
  misc_feature 713, 714, 715, 716, 717, 718, 721, 724, 727, 731, 733, 734,735, 736, 738, 741, 742, 744, 745, 746, 747, 748, 749, 751,752, 753, 754, 755, 756, 757, 758, 761, 762, 768, 769, 770,771, 773, 774, 775, 776, 777, 780, 782, 783, 784, 785: n = A,T,C or G
  misc_feature 791, 792, 794, 795, 796, 797, 798, 799, 801, 802, 803, 804,805, 806, 807, 808, 811, 812, 813, 814, 815, 816, 817, 818,819, 820, 821, 822, 823, 824, 825, 826, 828, 829, 830, 831,832, 833, 834, 838, 839, 841-843, 844, 845, 847-852,856-858: n = A,T,C or G
tagcngtatcgactacngtaatcgacttantatatggcnnattggagctccccgcggtggcggccgctgncccacnagagaacacggcgaggttngtnagtgtganatgaaanttatccatgctgtccntnaaactgagtgtgcggacactgaggaangcttngancaattgagttttnatcacacgacttntttgtaatgcttgtacctctgcgctctagaactagtggatcccccgggctgcaggaattcgatatcaagcttatcgataccgtcgacctcgagggggggcccggtacccancttttgttccctttagtgagggttaattgcgcgcttggcgtaatcatggtcatagctgttnctggaaaaataggccngncgntctaaaactattggatcccccgggctgnangaattnnatntcaacttatnnataccgncgacctcgagggggggcccggncccatcttttgntnccttnatgagggtttattgccccttnnagtnatcatggncatannttttttcgngannnnnnnnnnnnnannnnnnnnnnnnnnnnngnntnnnnnnnnnanannnnnnnnnnnnnnnnnnntnnnnnnnnaaannnnnntnnnnnntnnnnnnnnnnntnnntngnnnnnttnnnnnannnnnnnnnnnnnngnntnnntntnnnngnnnnnntnngnntnnnnntganannnnnnnnaanttnttntttntnnnnanganngnnnnnntnnnnnnnnttnnaaaaannnntnnnnnggntnnnntaaaanntnnnnnnannnnnnnntannnnnnnnnnnnnnnnannnnnnnaaannannnnnannnnnnaagnnn

SEQ ID NO: 2839 - DNA, 856 bp, Homo sapiens
  misc_feature 9, 26, 555, 569, 635, 669, 697, 734, 752, 786, 817, 822,835, 837, 838, 847, 850: n = A,T,C or G
agcgctaancgactcactatagggcnaattggagctccccgcggtggcggccgaggtacgcggggagacacatgggtgggaaattgcaataaaaagacggcccacagcaggctgcattcccatggctggccagaggaggaacgctttgtgttctcatcggagctgcatgggaagtctgcatacagcaaagtgacctgcatgcctcaccttatggaaaggatggtgggctctggcctcctgtggctggccttggtctcctgcattctgacccaggcatctgcagtgcagcgagacccatccactgtggaggacaagtgtgagaaggcctgccgccccgaggaggagtgccttgccctcaacagcacctggggctgtttctgcagacaggacctcaatagttctgatgtccacagtttgcagcctcagctagactgtgggcccagggagatcaaggtgagggtcgacaaatgtttgctgggaggcctgggtttgggggaggaggtcattgcctacctgcgagacccaaactgcagcaacatcttgcagacagaaganaggaactgggtatntttgaccagccccgtccaagctagtgcctgcaggaacattctggagaagaaatcaaaccctgccanctacaaaaacaccctcttcttggtcaatgatttnattatcagagacaccatcctcaacattnactttcaatgtgcctaccccctggacatgaaagttanccttcaagcttgccttcntcccattgtaagttccttgaccttaggggggccnggaatggaaaattcattttcaggaaggcctntttcnaacccgaacttcncnnatccttccnaangggatt

SEQ ID NO: 2840 - DNA, 877 bp, Homo sapiens
  misc_feature 3, 4, 6, 8, 9, 11, 12, 75, 79, 81, 82, 86, 91, 93, 95, 108,112, 113, 119, 120, 128, 138, 140, 161, 169, 180, 194, 199,201, 208, 221, 391, 499, 538, 588, 616, 623, 625, 626, 627,628, 629, 630, 631, 632, 633, 634, 635, 636, 637, 638: n = A,T,C or G
  misc_feature 639, 640, 641, 642, 643, 644, 645, 646, 647, 648, 649, 650,651, 652, 653, 654, 655, 656, 657, 658, 659, 660, 661, 662,663, 664, 665, 666, 667, 668, 669, 670, 671, 672, 673, 674,675, 676, 677, 678, 679, 680, 681, 682, 683, 684, 685: n = A,T,C or G
  misc_feature 686, 687, 688, 689, 690, 691, 692, 693, 694, 695, 696, 697,698, 699, 700, 701, 702, 703, 704, 705, 706, 707, 708, 709,710, 711, 712, 713, 714, 715, 716, 717, 718, 719, 720, 721,722, 723, 724, 725, 726, 727, 728, 729, 730, 731, 732: n = A,T,C or G
  misc_feature 733, 734, 735, 736, 737, 738, 739, 740, 741, 742, 743, 744,745, 746, 747, 748, 749, 750, 751, 752, 753, 754, 755, 756,757, 758, 759, 760, 761, 762, 763, 764, 765, 766, 767, 768,769, 770, 771, 772, 773, 774, 775, 776, 777, 778, 779: n = A,T,C or G
  misc_feature 780, 781, 782, 783, 784, 785, 786, 787, 788, 789, 790, 791,792, 793, 794, 795, 796, 797, 798, 799, 800, 801, 802, 803,804, 805, 806, 807, 808, 809, 810, 811, 812, 813, 814, 815,816, 817, 818, 819, 820, 821, 822, 823, 824, 825, 826: n = A,T,C or G
  misc_feature 827, 828, 829, 830, 831, 832, 833, 834, 835, 836, 837, 838,839, 840, 841, 842, 843, 844, 845, 846, 847, 848, 849, 850,851, 852, 853, 854, 855, 856, 857, 858, 859, 860, 861, 862,863, 864, 865, 866, 867, 868, 869, 870, 871, 872, 873-877: n = A,T,C or G
agnngntnntnngacgcgcgtatacgactactatagggcgaattggagctccccgcggtggcggccgatgtacanctantnnatcncatgngntnctggaatttgatntaanncttatnnatacacgnggaccttgangnggggcccggtacctacatcangtgccatnaatggagggtnaatcagtcgcttgncatantnatggtgnatactgtgggcantgcccttgacttctctgagcctcagtttccttatgtgaaagttgctggaaccaaaatggagtcacttatgccaaactctaataaaatggagtcggggggccacatagaagccctcacacacacatgcccgtaacaggatttaccacaagacacgcctgcatgtagaccanacacagggcgtatggaaagcacgtcctcaagactgtagtattccagatgagctgcagatgcttacctaccacggccgctctagaactagtggatcccccgggctgcangaattcgatatcaagcttatcgataccgtcgacctcganggggggcccggtacccaacttttgttccctttaatgaagggttaattgcncgcttgggcgtaatcatggtcatactgntttctgngnnnnnnnnnnnnnnnnnnnnnnnnnnnnnnnnnnnnnnnnnnnnnnnnnnnnnnnnnnnnnnnnnnnnnnnnnnnnnnnnnnnnnnnnnnnnnnnnnnnnnnnnnnnnnnnnnnnnnnnnnnnnnnnnnnnnnnnnnnnnnnnnnnnnnnnnnnnnnnnnnnnnnnnnnnnnnnnnnnnnnnnnnnnnnnnnnnnnnnnnnnnnnnnnnnnnnnnnnnnnnnnnnnnnnnnnnnnnnnnnnnnnnnnnnnnnn

SEQ ID NO: 2841 - DNA, 869 bp, Homo sapiens
  misc_feature 10, 17, 21, 34, 38, 39, 95, 106, 108, 109, 121, 151, 154,156, 162, 169, 175, 193, 259, 260, 356, 391, 464, 465, 466,467, 468, 469, 470, 471, 472, 473, 474, 477, 478, 479, 480,484, 485, 501, 502, 503, 504, 505, 506, 507, 508, 511: n = A,T,C or G
  misc_feature 512, 514, 516, 518, 519, 521, 523, 526, 537, 538, 540, 546,547, 548, 549, 552, 554, 564, 577, 579, 582, 583, 584, 605,606, 631, 633, 634, 636, 639, 640, 654, 656, 658, 660, 662,663, 664, 665, 666, 667, 668, 669, 670, 671, 672, 673: n = A,T,C or G
  misc_feature 674, 677, 678, 679, 680, 681, 682, 683, 684, 685, 686, 687,688, 689, 690, 691, 692, 693, 694, 695, 697, 698, 700, 702,704, 705, 706, 707, 710, 711, 712, 713, 714, 715, 716, 717,718, 722, 727, 729, 730, 731, 732, 733, 734, 736, 737: n = A,T,C or G
  misc_feature 738, 739, 741, 742, 744, 745, 746, 747, 748, 749, 751, 752,755, 756, 757, 759, 760, 761, 762, 763, 764, 765, 767, 768,769, 770, 772, 773, 774, 776, 778, 781, 782, 783, 785, 787,788, 789, 790, 791, 792, 793, 795, 796, 797, 798, 799: n = A,T,C or G
  misc_feature 800, 801, 802, 803, 804, 805, 806, 807, 808, 810, 811, 812,813, 814, 815, 817, 819, 820, 821, 822, 823, 824, 825, 826,827, 830, 831, 832, 836, 838, 839, 840, 841, 843, 845, 848,849, 851, 852, 853, 854, 855, 857, 859, 861, 864, 865: n = A,T,C or G
  misc_feature 866: n = A,T,C or G
tgagccgtanacgcgcntaancgacttactatanggcnnattggagctccaccgcggtggcggcccgcccgggcaggtactttcttttttttttntttttgatttntnnttcctgcattcngggggatccactatttttagagcggccgangtncnctgggnatttaantataantatactgcctgcctatgngacgacaatccaaaaaccttctactgggacttttacaccaacagaactgtgcaaattgcagccgtnnttgatgttattcgggaattaggcatctgccctgatgatgctgctgtaatccccatcaaaaacaaccggttttatactattgaaatcctaaaggtanaataatggaaagccctgtctgtttgccacacccangtgatttcctctaaagaaacttggctggaatttctgctgtgggctataaaataaacttcttaacatgcagttnnnnnnnnnnnaannnnattnntttttttttttttttnnnnnnnnccnngngngnnananaanaaaaaattaanncncccccnnnnggnanaaaaaaaaanaattttttttttngnctnnnggggggggggggggggggggnntttttttttttttttttttaaaaanannanccnnccccccccccaaananantntnnnnnnnnnnnnnttnnnnnnnnnnnnnnnnnnnannanantnnnnatnnnnnnnnntttnactanannnnnnannnnanntnnnnnnanntannnannnnnnnannnngnnnantnaannnanannnnnnntnnnnnnnnnnnnnnannnnnnanannnnnnnnnaannntttntnnnntnantannannnnnanantnttnnnttt

SEQ ID NO: 2842 - DNA, 872 bp, Homo sapiens
  misc_feature 3, 4, 5, 6, 7, 8, 9, 10, 11, 12, 15, 405, 434, 447, 631,647, 674, 684, 690, 692, 693, 694, 695, 696, 697, 698, 699,701, 702, 703, 704, 705, 706, 707, 708, 709, 710, 711, 712,713, 714, 715, 716, 717, 718, 719, 720, 721, 722, 723: n = A,T,C or G
  misc_feature 724, 725, 726, 727, 728, 729, 730, 731, 732, 733, 734, 735,736, 737, 738, 739, 740, 741, 742, 743, 744, 745, 746, 747,748, 749, 750, 751, 752, 753, 754, 755, 756, 757, 758, 759,760, 761, 762, 763, 764, 765, 766, 767, 768, 769, 770: n = A,T,C or G
  misc_feature 771, 772, 773, 774, 775, 776, 777, 778, 779, 780, 781, 782,783, 784, 785, 786, 787, 788, 789, 790, 791, 792, 793, 794,795, 796, 797, 798, 799, 800, 801, 802, 803, 804, 805, 806,807, 808, 809, 810, 811, 812, 813, 814, 815, 816, 817: n = A,T,C or G
  misc_feature 818, 819, 820, 821, 822, 823, 824, 825, 826, 827, 828, 829,830, 831, 832, 833, 834, 835, 836, 837, 838, 839, 840, 841,842, 843, 844, 845, 846, 847, 848, 849, 850, 851, 852, 853,854, 855, 856, 857, 858, 859, 860, 861, 862, 863, 864: n = A,T,C or G
  misc_feature 865, 866, 867, 868, 869, 870, 871: n = A,T,C or G
agnnnnnnnnnngangcgcgtaaacgactactatagggcgaattggagctccaccgcggtggcggccgaggtacacacccccatgctacacacactccttcatctccttctcagtgttttcataccccagccgcattacacacaccaggcacatcttctctttcacagagcttatcaggatggtatctccttttggcttaaaccaaccaccttgtgtttataaataacccccccaccccagtgcctgaattcatccacatcttctgccttcataggcagcctccccttggctccagttccagcaggacaggccttcctctgaaaggaagcctggggcagtgaggccacactagtcaagcgttcggcctccctacaccaatcccagctgggctcctagttgcctancacctttgcactcaagaaagttatattgnttttctctctctngctcatttcttgccagtattctgccttttcataacatttatgccaacaagatatctggtcacccgcgtacctgcccgggcggccgctctagaactaagtggatcccccgggctgcaggaattcgatatcaagcttatcgataccgtcgacctcgaaggggggccccggtacccaacttttggtncctttagtgaaggttnaatggcgcgcttgggcgtaatcatggncataagctgnttttcngnnnnnnnnannnnnnnnnnnnnnnnnnnnnnnnnnnnnnnnnnnnnnnnnnnnnnnnnnnnnnnnnnnnnnnnnnnnnnnnnnnnnnnnnnnnnnnnnnnnnnnnnnnnnnnnnnnnnnnnnnnnnnnnnnnnnnnnnnnnnnnnnnnnnnnnnnnnnnnnnnnnnnnnnnnnnnnnnnna

SEQ ID NO: 2843 - DNA, 876 bp, Homo sapiens
  misc_feature 17, 26, 453, 457, 670, 702, 733, 749, 821, 829, 840, 872,874: n = A,T,C or G
agcgcgtatcgactcantatagggcngattggagctccccgcggtggcggccgaggtacttcctgtaattgacagccttgccttgttcctcatggcatcattcaaggtcatcttaaatgagagaggagggaaagaaagaaaaagaaatcatacgttatggttttcaaatgcatccagaggaaaggcagggttgtttttgaaaagtttacttctatctgaaagcttctagcaaatgaaagcaaacagtgcaaagctgaactacaaataataaagcacaattatggcaggaatctgtccacattcacccaagctactgtgccattaaagaggaaaatagacagttgagctgcatgttagtcaccaactgggaacatggaagaacgtcccaatacatacaggatgatccattggccaccttccttatttaaaagagcttaaggacacaacaagaangctnaacgtgcactaaaaagtttgtattagagcctcgttcctaccccctaaattttaacactttcgatgccatatacgttgtaaccttccttataagttgcaaaattctgtgaattctgcgaggaagatgggttaatattctgtgcattctttgccccttcttcgtttcgcctcgcccttgacttgtacagaactcaatcaaagccccacattggcnaaccaaggccccgacaaggatgtagaatactncaacaccgttgcttcaactgaggccccggcnttttctaaagaatgtntttaaaaaaaggtattaggaaggcaaactggtgaattgaaaaaaacaaccattgtcccattgcatttttacnggaacaanctatcccacanaatgcatttgaatttgaaaaacaatggatttntntt

SEQ ID NO: 2844 - DNA, 876 bp, Homo sapiens
  misc_feature 26, 27, 660, 687, 690, 700, 733, 747, 764, 768, 798, 836,849: n = A,T,C or G
agcgcgtatacgactcctatagggcnnattggagctccccgcggtggcggccgcccgggcaggtacactgagtagcgaaggtatagagttttcattgaaataatttggaagaagagcaattggatagaatgtcaagacataacagagtcaagggaaagcattattttgattttatatctgagtatgtttttagccagaagaggagaagaaagaggttaaaaagaaaaaacagaatttatagatgcacgatattacttctgaacaagagaaagaaactggtaggaaaatttattttaaaaagtgttgaagggaaagaatcaagaccacagatccagatccggagattattttgctaaagaatagcaattgtgaggcatgaagtgggaggggggaagaagctatgaacttaattttgaggtttctgagaaggaaacttgagtgaattcacttcagatgcatttggaatgtttgcactccagaagatgagtttgtgtgtgctctggagagtattggaagaaggaggtattactagatttggcggctcccacagtgactcattactcttctctgttactttcaggattcatagagagatgttttgttgatattatttatttaagtgagataaatttgaatatgaatccattggctttttttgtnaaatttctgctttataaaatctgttanaangctgggcccngtggctcatgcctgtaatcccacactttggganggccaggcgggccnatcacttggggtcaccnttcnagaacagcctggccacatggtggaaccccntcttactaaaaatccaaaaattatttcctggcttggancaaatcctgtaanccacttctcaggagcttagcaagaaaa

SEQ ID NO: 2845 - DNA, 869 bp, Homo sapiens
  misc_feature 24, 449, 450, 451, 452, 453, 454, 455, 456, 457, 458, 459,460, 461, 462, 463, 464, 465, 466, 467, 468, 469, 470, 471,472, 473, 474, 475, 476, 477, 478, 479, 480, 481, 482, 483,484, 485, 486, 487, 488, 489, 490, 491, 492, 493, 494: n = A,T,C or G
  misc_feature 495, 496, 497, 498, 499, 500, 501, 502, 503, 504, 505, 506,507, 508, 509, 510, 511, 512, 513, 514, 515, 516, 517, 518,519, 520, 521, 522, 523, 524, 525, 526, 527, 528, 529, 530,531, 532, 533, 534, 535, 536, 537, 538, 539, 540, 541: n = A,T,C or G
  misc_feature 542, 543, 544, 545, 546, 547, 548, 549, 550, 551, 552, 553,554, 555, 556, 557, 558, 559, 560, 561, 562, 563, 564, 565,566, 567, 568, 569, 570, 571, 572, 573, 574, 575, 576, 577,578, 579, 580, 581, 582, 583, 584, 585, 586, 587, 588: n = A,T,C or G
  misc_feature 589, 590, 591, 592, 593, 594, 595, 596, 597, 598, 599, 600,601, 602, 603, 604, 605, 606, 607, 608, 609, 610, 611, 612,613, 614, 615, 616, 617, 618, 619, 620, 621, 622, 623, 624,625, 626, 627, 628, 629, 630, 631, 632, 633, 634, 635: n = A,T,C or G
  misc_feature 636, 637, 638, 639, 640, 641, 642, 643, 644, 645, 646, 647,648, 649, 650, 651, 652, 653, 654, 655, 656, 657, 658, 659,660, 661, 662, 663, 664, 665, 666, 667, 668, 669, 670, 671,672, 673, 674, 675, 676, 677, 678, 679, 680, 681, 682: n = A,T,C or G
  misc_feature 683, 684, 685, 686, 687, 688, 689, 690, 691, 692, 693, 694,695, 696, 697, 698, 699, 700, 701, 702, 703, 704, 705, 706,707, 708, 709, 710, 711, 712, 713, 714, 715, 716, 717, 718,719, 720, 721, 722, 723, 724, 725, 726, 727, 728, 729-869: n = A,T,C or G
agccgtatcgactactatagggcnaattggagctccccgcggtggcggccgaggtacgcgggaagcttttttgccacaaagaagattcttaccaagagtgggctttgtggaaacagctggtacgcgggggcagacgcgcgggcgggaagatggcggctgggttcaaaaccgtggaacctctggagtattacaggagatttctgaaagagaactgccgtcctgatggaagagaacttggtgaattcagaaccacaactgtcaacatcggttcaattagtacctgcccgggcggccgctctagaactagtggatcccccgggctgcaggaattcgatatcaagcttatcgataccgtcgacctcgagggggggcccggtacccagcttttgttccctttagtgagggttaattgcgcgcttggcgtaatcatggtcatagctgttcctggnnnnnnnnnnnnnnnnnnnnnnnnnnnnnnnnnnnnnnnnnnnnnnnnnnnnnnnnnnnnnnnnnnnnnnnnnnnnnnnnnnnnnnnnnnnnnnnnnnnnnnnnnnnnnnnnnnnnnnnnnnnnnnnnnnnnnnnnnnnnnnnnnnnnnnnnnnnnnnnnnnnnnnnnnnnnnnnnnnnnnnnnnnnnnnnnnnnnnnnnnnnnnnnnnnnnnnnnnnnnnnnnnnnnnnnnnnnnnnnnnnnnnnnnnnnnnnnnnnnnnnnnnnnnnnnnnnnnnnnnnnnnnnnnnnnnnnnnnnnnnnnnnnnnnnnnnnnnnnnnnnnnnnnnnnnnnnnnnnnnnnnnnnnnnnnnnnnnnnnnnnnnnnnnnnnnnnnnnnnnnnnnnnnnnnnnnnnnnnnnnnnnnnnnnnnnnnnnnnnnn

SEQ ID NO: 2846 - DNA, 879 bp, Homo sapiens
  misc_feature 7, 565, 584, 592, 609, 612, 620, 621, 626, 639, 640, 641,642, 655, 675, 701, 707, 712, 715, 716, 717, 718, 719, 720,721, 722, 723, 724, 725, 726, 727, 728, 729, 732, 733, 734,735, 736, 737, 738, 739, 740, 741, 742, 743, 744, 745: n = A,T,C or G
  misc_feature 746, 747, 748, 749, 750, 751, 752, 753, 754, 755, 756, 757,758, 759, 760, 761, 762, 763, 764, 765, 766, 767, 768, 769,770, 771, 772, 773, 774, 775, 776, 777, 778, 779, 780, 781,782, 783, 784, 785, 786, 787, 788, 789, 790, 791, 792: n = A,T,C or G
  misc_feature 793, 794, 795, 796, 797, 798, 799, 800, 801, 802, 803, 804,805, 806, 807, 808, 809, 810, 811, 812, 813, 814, 815, 816,817, 818, 819, 820, 821, 822, 823, 824, 825, 826, 827, 828,829, 830, 831, 832, 833, 834, 835, 836, 837, 838, 839: n = A,T,C or G
  misc_feature 840, 841, 842, 843, 844, 845, 846, 847, 848, 849, 850, 851,852, 853, 854, 855, 856, 857, 858, 859, 860, 861, 862, 863,864, 865, 866, 867, 868, 869, 870, 871, 872, 873, 874, 875,876, 877, 878: n = A,T,C or G
agccgtngacgcgcgtatacgactactatagggcgaattggagctcccccgcggtggcggcccgcccgggcaggtacgcgggcaactattgcaatgaaaaatttcaacaattttttaatgaaaggattctgaaggaggaacaagaactttatcaaaaagaaggtttaggtgttaatgaagtgcattatgtggataatcaggactgtatagatttaattgaagccaaattagtgggaatactggatattttggatgaagaaaatcgccttccccaccaagtgatcaacactttacatctgcagttcaccaaaagcacaaggatcattttcgactcactattcccagaaaatctaagctggcagttcataggaatatcagagacgacgaaggcttcattatcaggcattttgcgggggcagtgtgctatgaaacaacccagtttgtggagaaaaataatgatgctttacatatgtctcttgaatccttaatatgtgaatccagaaataagtttatacgggaattatttgaatcatccccaaattacaaaaaaaaaaaaaaaaaaaanccccggggcgttttaaaanttaggaancccccgggccggagganttnaaatttannttttnaaccccgcccccnnnngggggggccgggnccccctttttgggccctttnagggggggaaaatgggccccctgggnaaaacnggggnaannnnnnnnnnnnnnnggnnnnnnnnnnnnnnnnnnnnnnnnnnnnnnnnnnnnnnnnnnnnnnnnnnnnnnnnnnnnnnnnnnnnnnnnnnnnnnnnnnnnnnnnnnnnnnnnnnnnnnnnnnnnnnnnnnnnnnnnnnnnnnnnnnnnnnnnnnnnnnnnnnnc

SEQ ID NO: 2847 - DNA, 868 bp, Homo sapiens
  misc_feature 13, 24, 25, 347, 357, 360, 362, 363, 364, 378, 388, 389,393, 396, 402, 403, 417, 418, 419, 420, 423, 424, 426, 434,438, 446, 447, 472, 491, 516, 519, 520, 531, 536, 537, 541,544, 545, 546, 547, 548, 549, 550, 551, 552, 553, 554: n = A,T,C or G
  misc_feature 555, 556, 557, 558, 559, 560, 561, 562, 563, 564, 565, 566,567, 568, 569, 570, 571, 572, 573, 574, 575, 576, 577, 578,579, 580, 581, 582, 583, 584, 585, 586, 587, 588, 589, 590,591, 592, 593, 594, 595, 596, 597, 598, 599, 600, 601: n = A,T,C or G
  misc_feature 602, 603, 604, 605, 606, 607, 608, 609, 610, 611, 612, 613,614, 615, 616, 617, 618, 619, 620, 621, 622, 623, 624, 625,626, 627, 628, 629, 630, 631, 632, 633, 634, 635, 636, 637,638, 639, 640, 641, 642, 643, 644, 645, 646, 647, 648: n = A,T,C or G
  misc_feature 649, 650, 651, 652, 653, 654, 655, 656, 657, 658, 659, 660,661, 662, 663, 664, 665, 666, 667, 668, 669, 670, 671, 673,674, 675, 676, 677, 678, 679, 680, 681, 682, 683, 684, 685,686, 687, 688, 689, 690, 691, 692, 693, 694, 695, 696: n = A,T,C or G
  misc_feature 697, 698, 699, 700, 701, 703, 704, 705, 706, 707, 708, 709,710, 711, 712, 713, 714, 715, 716, 717, 718, 719, 720, 721,722, 723, 724, 725, 726, 727, 728, 729, 730, 731, 732, 733,734, 735, 736, 737, 738, 739, 740, 741, 742, 743, 744: n = A,T,C or G
  misc_feature 745, 746, 747, 748, 749, 750, 751, 752, 753, 754, 755, 756,757, 758, 759, 760, 761, 762, 763, 764, 765, 766, 768, 769,770, 771, 772, 773, 774, 775, 776, 777, 778, 779, 780, 781,782, 783, 784, 785, 786, 787, 788, 789, 790, 791-867: n = A,T,C or G
gccgtatcgactnactatatggcnnattggagctccccgcggtggccggcccgcccgggcaggtacgcgggatagcattgacttttacacacattcacacaagaaaaaaatcctttcaaaattcttaaatcttctgttcctcctttttccaagggaagagggcaaaaagtggcctgggctctgtggtgtgcgtgttccgtggcggagagaagaaaatgggaaagacatctcactggtgcttttctcttttgttttagtgccccccgcccccatccctataatatctgtaactactcctaaaaaggttttgattcaggcttttttttggtttcattttgtttttttangaaaaagaanaanannnaaaaaaaaaaaaangggccccccnncccnttnaaaaanngggggccccccggnnnnggnnantttttttnaaantttttttnnccccccccccccgggggggggcccngcccccccttttttttccntttaaggggggttatttggcccctnggnnaaaaaaggggnaaaanntttncgnnnnnnnnnnnnnnnnnnnnnnnnnnnnnnnnnnnnnnnnnnnnnnnnnnnnnnnnnnnnnnnnnnnnnnnnnnnnnnnnnnnnnnnnnnnnnnnnnnnnnnnnnnnnnnnnnnnnnnnnnnnnnnnntnnnnnnnnnnnnnnnnnnnnnnnnnnnnnannnnnnnnnnnnnnnnnnnnnnnnnnnnnnnnnnnnnnnnnnnnnnnnnnnnnnnnnnnnnnnntnnnnnnnnnnnnnnnnnnnnnnnnnnnnnnnnnnnnnnnnnnnnnnnnnnnnnnnnnnnnnnnnnnnnnnnnnnnnnnnnnnnnnnnnnnnnnnnnnnnnt

SEQ ID NO: 2848 - DNA, 873 bp, Homo sapiens
  misc_feature 24, 53, 55, 65, 75, 77, 79, 90, 99, 105, 106, 112, 123, 132,133, 136, 141, 145, 146, 148, 152, 154, 158, 161, 170, 174,186, 192, 197, 497, 537, 547, 564, 571, 585, 586, 595, 600,614, 620, 623, 624, 625, 626, 627, 628, 629, 630: n = A,T,C or G
  misc_feature 631, 632, 633, 634, 635, 636, 637, 638, 639, 640, 641, 642,643, 644, 645, 646, 647, 648, 649, 650, 651, 652, 653, 654,655, 656, 657, 658, 659, 660, 661, 662, 663, 664, 665, 666,667, 668, 669, 670, 671, 672, 673, 674, 675, 676, 677: n = A,T,C or G
  misc_feature 678, 679, 680, 681, 682, 683, 684, 685, 686, 687, 688, 689,690, 691, 692, 693, 694, 695, 696, 697, 698, 699, 700, 701,702, 703, 704, 705, 706, 707, 708, 709, 710, 711, 712, 713,714, 715, 716, 717, 718, 719, 720, 721, 722, 723, 724: n = A,T,C or G
  misc_feature 725, 726, 727, 728, 729, 730, 731, 732, 733, 734, 735, 736,737, 738, 739, 740, 741, 742, 743, 744, 745, 746, 747, 748,749, 750, 751, 752, 753, 754, 755, 756, 757, 758, 759, 760,761, 762, 763, 764, 765, 766, 767, 768, 769, 770, 771: n = A,T,C or G
  misc_feature 772, 773, 774, 775, 776, 777, 778, 779, 780, 781, 782, 783,784, 785, 786, 787, 788, 789, 790, 791, 792, 793, 794, 795,796, 797, 798, 799, 800, 801, 802, 803, 804, 805, 806, 807,808, 809, 810, 811, 812, 813, 814, 815, 816, 817, 818: n = A,T,C or G
  misc_feature 819, 820, 821, 822, 823, 824, 825, 826, 827, 828, 829, 830,831, 832, 833, 834, 835, 836, 837, 838, 839, 840, 841, 842,843, 844, 845, 846, 847, 848, 849, 850, 851, 852, 853, 854,855, 856, 857, 858, 859, 860, 861, 862, 863, 864, 865-873: n = A,T,C or G
gccgtatacgactactatagggcnaattggagctccaccgcggtggcggccgntntacaactagntggatccccngngntgcaggaattncatatcaancttatnnataccnaccacctatanggggggccnngtncccancttnngntccntntagnganggttaattncgcnctgggcgtaatnatgcgncatancatgctcactgtgtgactgcagctcaatctcaagaccctgaagggtgcgccgcaggtcagtaacctcggacctgctcatctggagctgctccgtgtggccagcgacctcccggttcaattcttcagtccggctggtgaaccaggcttcagcatccttccggttctgctcggccatgacctcatattggcttcgcatgtcactcaggatcttggcgagatcggtgcccggagcggaatccaccttcacccgcgtacctgcccgggcggccgctctaaaactaatggatccccgggctgcangaattcgatatcaagcttatcgatacccgtcgacctcganggggggcccnggacccaacttttggtncctttantgaaggttaattgnncccttggcntaatnatgggcataagctntttctnggnnnnnnnnnnnnnnnnnnnnnnnnnnnnnnnnnnnnnnnnnnnnnnnnnnnnnnnnnnnnnnnnnnnnnnnnnnnnnnnnnnnnnnnnnnnnnnnnnnnnnnnnnnnnnnnnnnnnnnnnnnnnnnnnnnnnnnnnnnnnnnnnnnnnnnnnnnnnnnnnnnnnnnnnnnnnnnnnnnnnnnnnnnnnnnnnnnnnnnnnnnnnnnnnnnnnnnnnnnnnnnnnnnnnnnnnnnnnnnnnnnnnnnnnnnn

SEQ ID NO: 2849 - DNA, 891 bp, Homo sapiens
  misc_feature 6, 16, 21, 25, 26, 28, 32, 42, 50, 52, 61, 62, 66, 75, 78,82, 84, 97, 101, 106, 113, 118, 123, 125, 126, 132, 133,134, 141, 149, 162, 163, 169, 170, 173, 174, 177, 179, 180,202, 208, 228, 232, 241, 246, 256, 280, 288, 289, 292: n = A,T,C or G
  misc_feature 297, 308, 320, 323, 335, 339, 351, 354, 357, 365, 378, 388,394, 405, 406, 407, 408, 412, 416, 426, 427, 436, 439, 441,447, 452, 490, 537, 560, 633, 636, 637, 640, 651, 656, 662,671, 683, 684, 693, 695, 705, 709, 720, 724, 733, 737: n = A,T,C or G
  misc_feature 740, 742, 750, 753, 807, 809, 814, 823, 826, 828, 838, 844,847, 849, 852, 853, 856, 857, 858, 859, 865, 866, 867, 868,869, 870, 871, 872, 873, 874, 875, 876, 877, 878, 879, 880,881, 882, 883, 884, 885, 886, 887, 889, 890: n = A,T,C or G
gccgtntcgactagtntaagnctanngngaantgaccctccnccgcggtngnggtcgatgnncatnctcctgatnccnattncntccctggacgatncctntatangcttccnagccnctttncnngagagnnnggagatngtgcaccntgaaatattctgnnttgttnnatnngcngnnagcctgctgaatggcttgtttnatgtancgctcaatatcctgcaacanggcnccaataacnaggtngatatcaccnaacactgacccaatctgcctttcncagacctnnggnataancattggaaacncccggcagaagnaanttcattatctanttgngagaaaggtatnatnttngattgccnggcacggcacaanttttccactnatcccncaggggtcaannnncctncccngaatcaaggnnataatcttnttncngaaaangctgnctgctggggccaagatattatttttaactagctgctgngcttttatcactttgaacctagaatttaaatccctctgcccagattnattttttaacaaccaacattggnaggcaggggaacaaagactattccccagagaagatcacttggttaaaggttaaaaaaaaaaaaaaaaaaaccnttnnttnccgggggggcnaaaanccccanctttttggnggcccccccaannaaaaacctngncggggggggncggnttaaaaaatangggnaaccccccngggngcngnaaattttnttnaagcttttttttcccgggcaccccaaggggggggcccggggccccaattttgtncnttttngaggggaanttncncccccggggnaaaaanggnanaannagnnnntcggannnnnnnnnnnnnnnnnnnnnnnannt

SEQ ID NO: 2850 - DNA, 546 bp, Homo sapiens
  misc_feature 28, 188, 195, 196, 201, 210, 212, 214, 215, 222, 223, 224,225, 228, 229, 230, 231, 232, 234, 237, 238, 239, 240, 241,242, 243, 244, 246, 252, 253, 254, 267, 276, 288, 295, 299,302, 303, 304, 312, 313, 314, 316, 323, 324, 327, 328: n = A,T,C or G
  misc_feature 332, 333, 334, 338, 339, 340, 341, 342, 344, 354, 355, 358,360, 361, 362, 364, 369, 370, 377, 378, 381, 385, 386, 393,395, 396, 398, 399, 401, 408, 411, 417, 427, 430, 432, 434,437, 438, 450, 452, 457, 459, 469, 470, 478, 479, 482: n = A,T,C or G
  misc_feature 483, 488, 489, 490, 491, 495, 497, 499, 501, 509, 511, 516,524, 526, 528, 531, 532, 537, 546: n = A,T,C or G
ggcgccgtaatacgactactatagggcnaattggagctccaccgcggtggcgtaaaacttgcagcaatgtgaattgggccagaagatcagagtgtaatatgtgtaatactccaaagtatgctaaattagaagaaagaacaggatatggtggtggttttaatgaaaaaaaaaaaaaaaaaaaaaaaaanccccccnnccccnttaaaaaantngnnccccccnnnnccnnnnnanttnnnnnnnncntttttnnnccccccccccccnggggggggncccccccccccnttttttncccnttnnnggggggtnnntnccccccnnggnnaaannngggnnnnncnttttcccggnnaanannnantccanntttcatnntcnactnnatttttntnncnntnatatttnctnattttnccactattcnctncntnatnnaaattttttccncnaatgncncaattctttnncatatttnnaannttcgnnnntatntntntncaaattcntncaatnttttacancntnttnnaaatntttttcccn

SEQ ID NO: 2851 - DNA, 496 bp, Homo sapiens
  misc_feature 28: n = A,T,C or G
gacgccgtaatacgactactatagggcnaattggagctccaccgcggtggcggccgaggtacacatcaagtcagaatgggctagcccatcagggaagcagcggtagaagaaatctgggcgtggctttttagggcaaacagcaaatgacactgcagcttcaggaggtgctcaagaggacactgaccgactgctgtggccgttggtgggaaatgctgttcaggcagaaaagcgcccaggtgtcacctggaggactgaggtatggggaagggagtaagcgttgaatgacaaaagaaaaatcagagtgaagataaaggagaaaagaatgagaacccgcgtacctgcccgggcggccgctctagaactagtggatcccccgggctgcaggaattcgatatcaagcttatcgatacccgtcgacctcgagggggggcccggtacccagcttttgttccctttagtggagggttaattgcgcgcttggcgtaatcatggtcat

SEQ ID NO: 2852 - DNA, 928 bp, Homo sapiens
  misc_feature 23, 24, 26, 27, 29, 511, 578, 704, 708, 712, 752, 754, 794,844, 853, 864, 920, 924, 926, 927: n = A,T,C or G
gccgtatcgacttacgacatagnntnngngctgattggagctccaccgcggtggcggcccgcccgggcaggtacagtggcacaatcatagcttagtgcagcctcattctcttgggcacaagcgctcctcagcctccctcctcagcctcccagttgctggaacttacaggtgcaccaccataaccagctagttttattttttgtagagacagaagtctcactttttttcctagacttgtctgaaatagaccattctatttgctagaatggtctcaaaccatccttctgcctcagcctcccaaattgctggaatttcaggcataattcatcatgcctagccatttcttttttctgctgcattgtagagttagaaccaatttcatttgtcctgcactgagaatgtgcattcccaagcagatcatggttgagctcaacacacctgcaacttaagcagcctctttgaagggtgcacagttactaactgtcaagcgttgcacaagcacctttagcangtatgttcagaactttacatttccacccttttttaaacagcttacaagtaaccagaagaacgggganttaaacttttggacatgcacactcattgaaaacccaatggattttgggaaagcccaaattggtggaaaaaaaaaaaggggggggattctgactactaagtattttttacaaaatcttgaatgggcngttngcangggttttggtttaattttggtgggggtaaatggctgaaangnggaaaaataaaattggaatattttggccccttgggggtanttttttggtttgggaacatttggaaaggggggccccatttttcctttttntaaaaattnaaagttggggncccgggggttcttgggggtgaaaaaaaaaggaactttgggttaaaaggtttttggnaaangnng

SEQ ID NO: 2853 - DNA, 528 bp, Homo sapiens
  misc_feature 2, 3, 5, 15, 70, 72, 75, 77, 85, 90, 92, 93, 94, 101, 102,103, 107, 109, 116, 117, 118, 134, 137, 140, 141, 142, 144,149, 152, 153, 154, 155, 161, 162, 171, 174, 175, 178, 181,182, 185, 197, 200, 202, 204, 205, 206, 208, 210, 213: n = A,T,C or G
  misc_feature 215, 221, 302, 332, 404, 416, 446, 497, 515: n = A,T,C or G
gnntnagggggcgangcgctaatacgactactatagggcgaattggagctccaccgcggtggcggccgcncnggnangtacgctncccangnnnagcgtgnnngcantntaagccnnntacttacatcccaccnagnggnnngnccccntgnnnncttctnngataattgnggnnagnttnnttnatatctaccagnaancntnnncntngcntnctctgnatccactgcttaaatacggacgaggacagggccctgtctcctcagcttcaggcaccaccactgacctgggacagtgaatcnacaatgccgtcttctgtctcgtggggcatnctcctgctggcaggcctgtgctgcctggtccctgtctccctggctgaggatccccagggagatgctgcccanaagacagatacntcccaccatgatcaggatcacccaaccttnaacaagatcaccccccaacctggctgagtttcgccttcagcctatacccgncagcttgggcacaacaanttcaacaaaaaca

SEQ ID NO: 2854 - DNA, 509 bp, Homo sapiens
  misc_feature 8, 16, 27, 28, 195, 307, 349, 401, 509: n = A,T,C or G
ggcgcgcnaatcgctnactatagggcnnattggagctccccgcggtggcggccgaggtacgcgggagaagtagtcctatttcaccccaactacaacattaatcgagcggccgcccgggcaggtacttggtaaagatggtaaagaaaaaccaaaggaagagcggccaaataaagatgaaaaagcaagagagaccanggaaagagcgccgaagtctgacaaagagaaagaaaaattcaagaaggaagaaaaagctaaagatgagaaatttaagaccactgtccccaacgcagaatcaaaatcaactcangaaagggaaagagagaaggagccatccagagaaagagatatngcaaaggaaatgaaatcaaaggaaaatgtttaaggaggagaaaaaacacccngtttctgggtccttgaaatcacctgttcccagatcagatattccagagcctgaaagggaaccaaaacgcccgcaaaattgatacttcaccctttctccatcacatttn

SEQ ID NO: 2855 - DNA, 494 bp, Homo sapiens
  misc_feature 1, 2, 8, 9, 13, 15, 28: n = A,T,C or G
nncgcgcnnatangnctactatagggcngattggagctccaccgcggtggcggccgtagtcctcacaaacacagagggctccgcactccgcatgtaggtccacattttatcaaacactgcaattttagatctcctgaaaaactctttagtggagccagagtctaatgttccataagcaatttctgtttgcttagaaagatcctcagcactttcgatgggagacaccatcctctctacagtcaggaaggcagctaagttagccgtgtaggaggagattatgatcagggtaaagaaccaccacacacctccaacaatgcgcccagagagggatctaataacaagtatgaaatggatttgtaaagtgaaatgaatgacctaataaaaaaacaagttagcagtattatgcaaatattgacttataggggaatatttaattttatatttttcaatgtatctactagttaatgaaactggaaatcattaaacattttggg

SEQ ID NO: 2856 - DNA, 509 bp, Homo sapiens
  misc_feature 20, 292, 322, 484, 485, 494, 504: n = A,T,C or G
atacgactcactatagggcnaattggagctccaccgcggtggcggccgcccgggcaggtacatcatttccagagcaggcactggcagcgaggtagggttggaggagaagtagcgccgggacttccggatggcaaacttctctgtgggtagagatttcccagcaatcttgagcttcaggcctggcacagctcgaaataattccacttcgtcgtccccgaacggcttgtggtcctccttcccaaacatgctgaggtaggcggccttcatgtaaatgtaggtggccttggaccancagttctccttgctgagcaggtcggcgtanaagtaggacatcttccactggcccttgtaggtgaagcagcagttccgggctggaagacagagacagctggacagagctcctgaaaacattttaaaatacccccccccgcgttcctcggccggtctaaaactaggtggattcccctgggcttgcaggaatttnnatattcaangcttatcganaaccc

SEQ ID NO: 2857 - DNA, 705 bp, Homo sapiens
  misc_feature 4, 15, 34, 508, 510, 546, 578, 595, 607, 619, 638, 642, 674,675, 676, 677, 678, 679, 680, 681, 682, 683, 684, 685, 686,687, 688, 689, 690, 691, 692, 693, 694, 695, 696, 697, 698,699, 700, 701, 702, 703, 704, 705: n = A,T,C or G
gagnccgcgtaatangacttactatgagtggctnattggagctccaccgcggtggcggccgcccgggcaggtacgcggggaagaagaagaagaaaggccaggagcagtggctcatgcctgtaatcccagcagtttgggaggctgaggcgggtggatcgcctgaggtcaggagttcgagacaagtctgaccaacatggtgaaaccctgtctctgctaaaaatacacaaaaaaattagtcaggcctgggagcaggcgcctgtagtcccaacaacttgggaggctgagacaggagaatagcttgaacctgggagacggaggttgcagtgagcttagattgtgccactgcactccagcctgggcaatagagtgaggctctgtctcaaaaaaagaaaaaagaaagaaaattaaagataattctatgttaactccttaaatgtaattcctagttcttctatcacctttagccgactcttctaccttcagagtggacactgctgttatcaagcananagtgccgatcttactcaagtacctcggccgctctanaactagtggatcccccgggctgcaggaattcnatatcaagcttatcatnccgtcacctcanggggggcccggncccacttttgttcctttantganggttaattgccccttggcgtaatctggctctnnnnnnnnnnnnnnnnnnnnnnnnnnnnnnnn

SEQ ID NO: 2858 - DNA, 706 bp, Homo sapiens
  misc_feature 33, 80, 92, 97, 102, 104, 105, 106, 110, 112, 113, 122, 130,140, 142, 146, 148, 152, 155, 162, 164, 167, 168, 169, 171,174, 176, 180, 184, 186, 191, 195, 204, 206, 207, 215, 528,531, 533, 539, 560, 563, 573, 576, 594, 597, 603: n = A,T,C or G
  misc_feature 613, 615, 633, 644, 650, 651, 656, 657, 670, 672, 675, 676,677, 679, 682, 683, 684, 695, 696, 706: n = A,T,C or G
gagccccgcgtaatacgactcactatgagggcnaattggagctccaccgcggtggcggccgatgtacacctagctcgatngtccacactttnagtcntgaancnnnaacncnnccgatcccnaccaacantggaaggagngngccnancacnccngatcatngntannnancanantgtntacntngcccncttnaagaactgntnnacttactnggagtgtgcgcggcttcattcttgaagtcagtgagacgaagaacccaccaactccagacacattttggcgacctagatgggacaatcgcctatcaccgagtggtgagaccatcgcctatagctgagcggcgaggcaatcacctatcgccaagcagctccagaagcagatgagcagatgaggagacgcctctattccgtgtcgtttagaatgagcaaacagttgtcttcaccatcccagacaagcagatgaatggtgaaacgatacagcagagaaagagagaagaggaacatttgaacgccgagaggagttcanccnanggtggncggagaggtttggccacccancangaagattatnttnccgtgccttccccgcttncanctctgnttcattcttnanaaaaccgtttagaactantggatcccccnggctgnngaatnnatttaacttatcntnccnnnanctnnnggggggcccgnncccacttttn

SEQ ID NO: 2859 - DNA, 712 bp, Homo sapiens
  misc_feature 3, 29, 30, 34, 204, 213, 262, 282, 345, 484, 500, 566, 582,583, 584, 585, 586, 587, 588, 591, 594, 595, 596, 597, 598,599, 600, 601, 602, 603, 604, 605, 606, 607, 608, 609, 610,611, 612, 613, 614, 615, 616, 617, 618, 619, 620, 621: n = A,T,C or G
  misc_feature 622, 623, 624, 625, 626, 627, 628, 629, 630, 631, 632, 633,634, 635, 636, 637, 638, 639, 640, 641, 642, 643, 644, 645,646, 647, 648, 649, 650, 651, 652, 653, 654, 655, 656, 657,658, 659, 660, 661, 662, 663, 664, 665, 666, 667, 668: n = A,T,C or G
  misc_feature 669, 670, 671, 672, 673, 674, 675, 676, 677, 678, 679, 680,681, 682, 683, 684, 685, 686, 687, 688, 689, 690, 691, 692,693, 694, 695, 696, 697, 698, 699, 700, 701, 702, 703, 704,705, 706, 707, 708, 709, 710, 711, 712: n = A,T,C or G
ganttccgccgtaatacgactcactatgnnggcnaattggagctccaccgcggtggcggccgtgtcccccctggtgggggattggggatctgtgtttagccatttatatctactttagctgttaaagaggtccaaatgaaaatcaggtgattgtggaaccatggggacttgggggtggggcagaggtgggaacatttgtatcanttgagtcancttggtggctccctgtggagccagggctgagccttgtcacgcgcactcnccaattaagagatggaccanccagcagtcaagtgcattctccagtccttgcaagaaggatcagccctttctgtgccagcctcnatcgccttgtgctttggtctctttttctcccccccgcctggatcctgcctcgcgcgggccgtcctgttgctgagactcggggtacctcggccgctctagaactagtggatcccccgggctgcaggaattcgatatcaancttatcgataccgtcnacctcgagggggggcccggtacccagcttttgttccctttaatgaaggttaattgcgcgcttggcntaatcatggcatactnnnnnnnccnggnnnnnnnnnnnnnnnnnnnnnnnnnnnnnnnnnnnnnnnnnnnnnnnnnnnnnnnnnnnnnnnnnnnnnnnnnnnnnnnnnnnnnnnnnnnnnnnnnnnnnnnnnnnnnnnnnnnnnnn

SEQ ID NO: 2860 - DNA, 874 bp, Homo sapiens
  misc_feature 9, 22, 23, 27, 40, 567, 573, 589, 601, 605, 610, 628, 631,634, 635, 647, 657, 665, 679, 680, 702, 703, 711, 718, 729,747, 749, 750, 751, 752, 753, 754, 755, 756, 764, 765, 766,767, 768, 769, 770, 771, 772, 773, 774, 775, 776, 777: n = A,T,C or G
  misc_feature 778, 779, 780, 781, 782, 783, 784, 785, 786, 787, 788, 789,790, 791, 792, 793, 794, 795, 796, 797, 798, 799, 800, 801,802, 803, 804, 805, 806, 807, 808, 809, 810, 811, 812, 813,814, 815, 816, 817, 818, 819, 820, 821, 822, 823, 824: n = A,T,C or G
  misc_feature 825, 826, 827, 828, 829, 830, 831, 832, 833, 834, 835, 836,837, 838, 839, 840, 841, 842, 843, 844, 845, 846, 847, 848,849, 850, 851, 852, 853, 854, 855, 856, 857, 858, 859, 860,861, 862, 863, 864, 865, 866, 867, 868, 869, 870, 871: n = A,T,C or G
  misc_feature 872, 873, 874: n = A,T,C or G
agccgtatngacgcgcgttatnngacntactatagggctnattggagctccaccgcggtggcccgcccgggcaggtacctctggccaccctcccgaaggacctttgtaaggccaggcaaaaatggcttgctaggggacccagtgatctcccagggctttttccaactgcttcctcttccctatattttgcttggctctctaaatcgactcagctccaggtaagatcaaaatcttctcttttaatctaagccttcagcttccccagtgggggtgtgtgttcaggggcagataatctccctttcccacttccacagtttgggcactcacagtatttggggtgtctcctgggtcctgcaggagcaatctgcttccttcaggggtctatggatcttttcaggtttgctgcagtcattttctgcaggatttattccagtcattctggagcaaaaatgcacgaagcaagcctccacacgttgctctgtccatctgaatcggagctgcaatcttgtcttacttctagttcgccataatccactgccctcgaaggtttcttttttttttcatttnaatttngggggggaccctaggnccggtttaaaantaanggatnccccgggctggggggaanttnganntcaagctttatngaaaccgggnaccttganggggggggcccggnncccaactttttgtcccttttanngaagggtnaaatggnccccttggcgnaaaaaatggggaaaaaantnnnnnnnncccgggannnnnnnnnnnnnnnnnnnnnnnnnnnnnnnnnnnnnnnnnnnnnnnnnnnnnnnnnnnnnnnnnnnnnnnnnnnnnnnnnnnnnnnnnnnnnnnnnnnnnnnnnnnnnnn

SEQ ID NO: 2861 - DNA, 885 bp, Homo sapiens
  misc_feature 24, 476, 497, 499, 545, 598, 603, 612, 637, 645, 661, 695,697, 740, 742, 774, 810, 819, 820, 825, 835, 836, 838, 843,849, 861, 868, 870, 872, 876: n = A,T,C or G
gccgttatcgactactatagggcnaattggagctccccgcggtggcggccgaggtaccttggttcagtccagtaaggtgggacaacccttaagtgggggcttcctggttgtagtagataagagacaaaaggttgcattcttttgagttcttgatcagccttccactgaacacacaatttagtctggctcagtgagtctgcatttttacagaagcgataggggaaaggaagcaatcagctatgcaggtgagcctcagggggatgactgtgaatagaatgggaggcagctttgccctaagcagttcccagcttgactttttcctttagcttggtgattgtggagtctcaagatttgttttctttccacaatctgaaattcaaagttccctgggtatcctgtattttcatttgtacactttggcgccctagtcccagagtcctggagcggcatactgggggtggctgtgcaagtcccancatccccaacccagccttgtntngagagcatccatccttacatccagctgacccatgcccatgctcctncctgtggcttggaggttcaacaataacataaagtctcttcttttgccctccanatttncttccttcnatgacttgggaaacttgggcatganaaccatanggaccccaaatgcccnacccttcaagtgaaggccaaaggcaatggcctgngnccctatcttttggggaagaaagttcagtaatttccttgaaaantnaagggaaagaatgatgattctttttgatcggnaaataaatgtaacttgcccgggccgggccggttttnaaaaataannggatnccccgggctnncnggaanttgggntttaaccttttnattcccngnancttngaggggggg

SEQ ID NO: 2862 - DNA, 900 bp, Homo sapiens
  misc_feature 3, 6, 8, 41, 373, 477, 494, 521, 577, 605, 653, 700, 729,753, 758, 774, 784, 785, 787, 790, 791, 797, 801, 809, 810,813, 817, 818, 833, 837, 860, 863, 870, 881: n = A,T,C or G
agngcntnatggacgcgcgttatacgactcactatagggcnaattggagctccaccgcggtggcggcccgaggtactggctttggtgccttgtctaccaggcagttgagttggttactgctggtgcctttgtgggcaaaactaggttgtaaaagcagccaaaaaatttccagatgggagagtttcatagcgggcatattttggcttgtgaattgactgttatgtctcaaggtagtctcttggtgggagagagttctgctctgtagcgtctaactaagagcacatagttagatgaacttgccctgttgggagtgtctggtgaaggggagataaaagattataattgcatttctaaagagctaagtaggaagcanagaaaaggagagagaagtgaagacagaataattttaaataatgaagagagaaatgaagaaggaataattttcctgcttttccattggttctttggacataacangcaaaagtgtcaatcanggtgagactgttccttcaagggcaganatcaaacaaagtgtcctgaaactcttgcctccattggggggggcaaccattttggnccttgttccccacttgtcagtgaaaatnaaaaagcttttgcttgcttgcctgccaaaaaccttttgaaaacctttnagggaaagggacatttaattaaagggccccttaatgcttagggatgnaaacccctttttcctatttgcctcttttnaattattggcctggaaatgttggnccatncttccctaccatgagnaaaaattatnngnggnnccaccntttnatggggtnnccncacnntgaataatgcccccncttnttaaaccttaaattttgaccggnttnaactttntttttttaatnaaaaactaaagggaaatgg

SEQ ID NO: 2863 - DNA, 858 bp, Homo sapiens
  misc_feature 544, 545, 546, 547, 548, 549, 550, 551, 552, 553, 554, 555,556, 557, 558, 559, 560, 561, 562, 563, 564, 565, 566, 567,568, 569, 570, 571, 572, 573, 574, 575, 576, 577, 578, 579,580, 581, 582, 583, 584, 585, 586, 587, 588, 589, 590: n = A,T,C or G
  misc_feature 591, 592, 593, 594, 595, 596, 597, 598, 599, 600, 601, 602,603, 604, 605, 606, 607, 608, 609, 610, 611, 612, 613, 614,615, 616, 617, 618, 619, 620, 621, 622, 623, 624, 625, 626,627, 628, 629, 630, 631, 632, 633, 634, 635, 636, 637: n = A,T,C or G
  misc_feature 638, 639, 640, 641, 642, 643, 644, 645, 646, 647, 648, 649,650, 651, 652, 653, 654, 655, 656, 657, 658, 659, 660, 661,662, 663, 664, 665, 666, 667, 668, 669, 670, 671, 672, 673,674, 675, 676, 677, 678, 679, 680, 681, 682, 683, 684: n = A,T,C or G
  misc_feature 685, 686, 687, 688, 689, 690, 691, 692, 693, 694, 695, 696,697, 698, 699, 700, 701, 702, 703, 704, 705, 706, 707, 708,709, 710, 711, 712, 713, 714, 715, 716, 717, 718, 719, 720,721, 722, 723, 724, 725, 726, 727, 728, 729, 730, 731: n = A,T,C or G
  misc_feature 732, 733, 734, 735, 736, 737, 738, 739, 740, 741, 742, 743,744, 745, 746, 747, 748, 749, 750, 751, 752, 753, 754, 755,756, 757, 758, 759, 760, 761, 762, 763, 764, 765, 766, 767,768, 769, 770, 771, 772, 773, 774, 775, 776, 777, 778: n = A,T,C or G
  misc_feature 779, 780, 781, 782, 783, 784, 785, 786, 787, 788, 789, 790,791, 792, 793, 794, 795, 796, 797, 798, 799, 800, 801, 802,803, 804, 805, 806, 807, 808, 809, 810, 811, 812, 813, 814,815, 816, 817, 818, 819, 820, 821, 822, 823, 824, 825-857: n = A,T,C or G
agcgcgtatcgactactatagggcgaattggagctccccgcggtggcggccgaggtacagtcggccctcattattcatggattctgtatttgcaaattcgctgacttactgacgtttatttgtaaccttcgagtcaacactcacggtgctttctcagtcctttgcagacgtgtggaatggaaaaaaatttgagttatatgacgtatatgttcccagctgaggctgagcaaggctcacttctccttgcagccctcagactataaacaagtgtccctcttgctatctacttcgtgttatgatttttgcattttcataatccctgttgatgattttgctgtttaaaatggcccctaagcacggtcctgaagtacctgcccgggcggccgctctagaactaagtggatcccccgggctgcaggaattcgatatcaaagcttatcgataccgtcgacctcgagggggggcccggtacccagcttttgttccctttagtgagggttaattgcgcgcttggcggtaatcatggtcataacttgttcctggnnnnnnnnnnnnnnnnnnnnnnnnnnnnnnnnnnnnnnnnnnnnnnnnnnnnnnnnnnnnnnnnnnnnnnnnnnnnnnnnnnnnnnnnnnnnnnnnnnnnnnnnnnnnnnnnnnnnnnnnnnnnnnnnnnnnnnnnnnnnnnnnnnnnnnnnnnnnnnnnnnnnnnnnnnnnnnnnnnnnnnnnnnnnnnnnnnnnnnnnnnnnnnnnnnnnnnnnnnnnnnnnnnnnnnnnnnnnnnnnnnnnnnnnnnnnnnnnnnnnnnnnnnnnnnnnnnnnnnnnnnnnnnnnnnnnnnnnnnnnnnnnnnnnnnnnnnc

SEQ ID NO: 2864 - DNA, 877 bp, Homo sapiens
  misc_feature 2, 78, 79, 82, 92, 95, 96, 102, 117, 140, 141, 143, 147,155, 174, 181, 191, 193, 196, 203, 208, 215, 219, 221, 225,470, 471, 472, 473, 474, 475, 476, 477, 478, 479, 480, 481,482, 483, 484, 485, 486, 487, 488, 489, 490, 491, 492: n = A,T,C or G
  misc_feature 493, 494, 495, 496, 497, 498, 499, 500, 501, 503, 504, 505,506, 507, 509, 510, 511, 512, 513, 514, 515, 516, 517, 518,519, 520, 521, 522, 523, 524, 526, 528, 529, 530, 531, 532,533, 534, 536, 537, 538, 540, 541, 542, 543, 544, 545: n = A,T,C or G
  misc_feature 546, 547, 548, 549, 550, 551, 552, 553, 554, 555, 556, 557,559, 560, 561, 562, 563, 564, 565, 566, 567, 568, 569, 570,571, 572, 574, 575, 576, 577, 578, 579, 580, 581, 582, 583,584, 585, 586, 587, 589, 590, 591, 593, 594, 595, 596: n = A,T,C or G
  misc_feature 597, 598, 599, 600, 601, 602, 603, 604, 606, 607, 608, 609,610, 611, 612, 613, 614, 615, 616, 617, 618, 619, 620, 621,622, 623, 624, 625, 626, 627, 628, 629, 630, 631, 632, 633,634, 635, 636, 637, 638, 639, 640, 641, 642, 645, 646: n = A,T,C or G
  misc_feature 647, 649, 651, 652, 653, 654, 655, 656, 657, 658, 659, 660,661, 662, 663, 664, 665, 666, 668, 669, 670, 672, 673, 674,675, 676, 677, 678, 679, 680, 681, 682, 683, 684, 685, 686,687, 688, 689, 690, 691, 692, 693, 694, 696, 697, 698: n = A,T,C or G
  misc_feature 699, 700, 701, 702, 703, 704, 705, 706, 707, 708, 709, 710,711, 712, 713, 714, 715, 716, 717, 718, 720, 722, 724, 725,726, 727, 728, 729, 730, 731, 732- 37, 738-747,749-754,756,757,759-775,777,779-814,816-820,822-868,870,873,875: n = A,T,C or G
tnccgttatttacgcgcgtaatacgactactatagggcgagattggagctccaccgcggtggcggccgatgtacacanngcncattaatctntcnngtgtgncatgtatcaatcatntataagatcccaggcatgggccnngntganctactatntcagcttacttgacttctnaacaggnacatgccccntnctngctttanttcanttaactngatncngtanatgcatgaccatttgatcgcaccactccttcaggaatccaggacttgtccacacaccgttccattccccgcgtacctgcccgggcggccgctctagaactagtggatcccccgggctgcaggaattcgatatcaagcttatcgataccgtcgacctcgagggggggcccggtacccagcttttgttccctttaatgagggttaattgcgcgcttggcgtaatcatggtcatagctgtttcctggnnnnnnnnnnnnnnnnnnnnnnnnnnnnnnnnannnnngnnnnnnnnnnnnnnnnanannnnnnnannnannnnnnnnnnnnnnnnnnannnnnnnnnnnnnngnnnnnnnnnnnnnnannntnnnnnnnnnnnnannnnnnnnnnnnnnnnnnnnnnnnnnnnnnnnnnnnnaannnanannnnnnnnnnnnnnnngnnngnnnnnnnnnnnnnnnnnnnnnnnannnnnnnnnnnnnnnnnnnnnnnananannnnnnnnnnnnnnnnnnnnnnnnannnnnngnngnnnnnnnnnnnnnnnnntnannnnnnnnnnnnnnnnnnnnnnnnnnnnnnnnnnnnannnnngnnnnnnnnnnnnnnnnnnnnnnnnnnnnnnnnnnnnnnnnnnnnnnngnggngngg

SEQ ID NO: 2865 - DNA, 867 bp, Homo sapiens
  misc_feature 7, 18, 25, 505, 577, 607, 621, 661, 665, 685, 686, 687, 688,689, 690, 693, 694, 695, 696, 697, 698, 699, 700, 701, 702,703, 704, 705, 706, 707, 711, 713, 733, 742, 765, 768, 769,771, 772, 773, 775, 776, 783, 813, 834, 835, 836: n = A,T,C or G
  misc_feature 838, 843, 844, 856, 859, 865: n = A,T,C or G
agtcgcntatggacatantatgttngctgattggagctccccgcggtggcggccgaggtacgcggggagtggcaacctgcttgggtccctttccacaccgcggaagctttgttcttttgctctttgcaataaatcttgctgctgctcactctttgggtccacactgcctttatgagctgtaacaccgcgaaggtccacagcttcactcctgagccagcgagaccacgaaccccaccagaaggaagaatctgtgaacacatccgaacatcagaaggaacaaactctagacatgccgcctttaagaactgcaacactcactgcgagtgtccgcggcttcattcttgaagtcagtgagacgaagaacccaccaattccagacacattttggcgacctagatgggacaatcgcctatcaccgagtggtgagaccatcgcctatagctgagcggcgagacaatcacctatcgccaagcaacaagcagatgaatggtgaaacgatacagcngagaaagagagaaagaggaacatttgaacgccgagaggagttcaacccaaggtggtccgagaaggttggccncccaacaggaagaatatcttccgtgccatncccgctttcagctnttgcttccttccttaagaagaaccacctccccactcaatnaaanccttgcattcaaccttccannnnnnaannnnnnnnnnnnnnnaaantncccgccggggggggcttttnaaaaaaagnggaaccccccggggggggggaanttnntnnnannttttttnccccccccccccccgggggggggggcccgncccccctttttttccttttannngnggaanncccccccggggnaanaagggnaa

SEQ ID NO: 2866 - DNA, 888 bp, Homo sapiens
  misc_feature 1, 56, 61, 63, 89, 93, 101, 105, 115, 120, 133, 134, 137,146, 152, 153, 157, 158, 164, 168, 177, 179, 183, 189, 199,202, 203, 211, 212, 213, 215, 219, 231, 236, 237, 238, 249,256, 262, 263, 271, 273, 274, 280, 281, 289, 290, 297: n = A,T,C or G
  misc_feature 306, 328, 347, 355, 357, 365, 379, 399, 400, 484, 527, 542,552, 565, 566, 571, 572, 577, 580, 599, 601, 602, 610, 615,619, 625, 627, 630, 641, 646, 652, 659, 660, 667, 670, 671,675, 676, 677, 685, 689, 692, 694, 696, 697, 699, 701: n = A,T,C or G
  misc_feature 705, 708, 709, 712, 715, 720, 728, 733, 734, 740, 743, 744,745, 747, 749, 753, 754, 758, 759, 760, 761, 762, 763, 766,767, 775, 776, 781, 782, 783, 784, 785, 786, 787, 788, 790,793, 794, 795, 796, 801, 802, 804, 805, 806, 807, 810: n = A,T,C or G
  misc_feature 814, 819, 821, 822, 823, 826, 827, 830, 831, 832, 833, 835,836, 837, 839, 841, 842, 843, 844, 845, 848, 851, 852, 853,854, 855, 856, 857, 858, 861, 862, 863, 865, 869, 870, 871,872, 873, 875, 876, 879, 882, 883, 884, 885: n = A,T,C or G
ntgccgcgtatcgactcactatagggcgaattggagctccccgcggtggcggccgnccggncnggtacaccacacaatggtgacacagnctantgtgtggncagngtgtgccacnttttntgcactatacccnngtntgatggctngatgtnnactnntgaaantgtntctcagggntnttcnttatcnacagaaacanaanngaattacnnntnctanttcctgtctcanactgnnnctttatgactntaaatanataaannatcagatngnnagcatnnatattttnncttagcncctattgcnaaatgcattatcactactgacnttttctttctatgccctgntcccaaananaaacttancacttacatgctcnccactagcagaaagggattnncagggaccagaatctcagagaaaaggagggttcattcaaacatactggtgctgaatccttgcagctgaaaattatcttgcaaanttatatgctggcccttcatttaaaatgaacttgcagtttattntaaagccgatcaaanagctttggantctttattttcannaaccnnaattntgntccacatttttaattttgncnnactttttnccggncagntacttntnaanaattttttatncaaangctgtngccagcnnttttttnttnncccnnnaacacctngggncantngnncncntttntcnnttnaantccancccctaangtctnntacccnggnnntntnccanntacnnnnnntcnnggcatttnntactnnnnnnnnanttnnnntatgnngnnnnatnctcntattnannnatnnatnnnnannntnannnnnatnatnnnnnnnngtnnncntaannnnngnnatngcnnnnccg

SEQ ID NO: 2867 - DNA, 870 bp, Homo sapiens
  misc_feature 3, 4, 5, 6, 7, 8, 9, 10, 589, 662, 688, 715, 728, 745, 752,759, 770, 788, 801, 839, 847: n = A,T,C or G
gtnnnnnnnngacgcgcgtaatacgactactatagggcgaattggagctccaccgcggtgggcggccgaggtaccatcggacccctttcgcttgctattctgtcctgtctttgcttagagttcgggggctaaatactgggcacctgtcggccagttaaaagtgactagcgcggctgccggactaaagacaagggtgtcaggctttctgggaaagggctttctaacaactcccgactcttcggtgttgaggccattggtttgcctagaaccagcttttgcttttcctgtacctgcccgggcggccgctctagaactagtggatcccccgggctgcaggaattcgatatcaagcttatcgataccgtcgacctcgagggggggcccggtacccagcttttgttccctttagtgagggttaattgcgcgcttggcgtaatcatggtcatagctgtttcctgtgtgaaattgttatccgctcacaattccacacaacatacgagccgggagcataaagtgtaaagcctggggtgcctaatgaagtgagctaactcacattaattgcgttgcgcttactgccgcttttcagtcnggaaacctgtctgccaactgcattaatgaatcgccaaccccccgggaagaggcggtttgcgtattgggcgctntttcgcttccttgctcactgactcgnttgcgctcggtcgttcggcttgcgggnagccggttttaancttacttcaaaggcggnaaatacnggtattncccagaattanggggataacccaggaaanaacatgtgaaccnaaaggccagcaaaaaggccaggaaccctaaaaaggccncgttgctngcgttttttcataagctccccct

SEQ ID NO: 2868 - DNA, 543 bp, Homo sapiens
  misc_feature 3, 4, 5, 6, 482, 515, 528: n = A,T,C or G
ggnnnngacgcgcgtaatacgactcactatagggcgaattggagctccaccgcggtggccggcccgcccgggcaggtacaagccttgaacatcgtcctgcttcccagtgggttcagacctcacctttcagggagcgacctgggcaaagacagagaagctcccagaaggagagattgatccgtgtctgtttgtaggacggagaaaccgcttgggtaacttgttcaagatatgatgcatgttgctttctaagaaagccctgtattttgtgattgccttttttttttttttaagatgctttcattttgccaaaataaaacagataatgtggatggtttaagggttatagtattatagtttaaataataacaacaaaattcttcccaggaactctgctggaaggtaaattaaaatacttgtttttccattggtaaaatattgttgcactctgtgaaccaaaagacagtctaagttggaggacatanaacggaactcatcttaaacatactcccaccccnttttggccttctnagaccactttggcct

SEQ ID NO: 2869 - DNA, 544 bp, Homo sapiens
  misc_feature 87, 234, 418, 504, 506, 517, 518, 519, 525, 531, 534, 536,540: n = A,T,C or G
tggccgatacgactactatagggcgaattggagctccccgcggtggcggccgaggtacgcggggtctgatgccaagaaagaattcangacacagacacacatgaggagtgggtttaggagtggaaagtttaatagataaagaagagagtgagaaaacttcctcatgttgagaaagacagttgctcaagagagggttttctgggtttggggcaagatttgattgatttcatacanaggcttgaggaggcggtgattgatatacatagggcccggggattggtttaaccaggtatactacttacatagccggtgaaaagactggccctcccaccctaaccttttattatgcaaatgcatcttctacctggctgtcaccatgacatttgcacacgtggcttcacttcaccagtgccatgtnacccacacacctggtgacaaggaaaagggagcaggaatcaccatattgaatgtgcctggcttccaagtacctgcccgggaatatanantctatatgagnnnttttantatggnatnantatnttac

SEQ ID NO: 2870 - DNA, 909 bp, Homo sapiens
  misc_feature 1, 8, 12, 106, 147, 192, 210, 217, 222, 223, 232, 237, 239,241, 287, 291, 297, 313, 320, 326, 335, 338, 348, 352, 358,364, 370, 381, 385, 388, 391, 401, 402, 407, 412, 414, 420,423, 425, 432, 435, 436, 439, 441, 444, 448, 451, 464: n = A,T,C or G
  misc_feature 467, 474, 480, 482, 484, 485, 488, 491, 494, 500, 501, 512,513, 514, 516, 524, 530, 533, 538, 544, 546, 549, 553, 557,561, 566, 568, 578, 582, 583, 584, 587, 589, 591, 600, 601,604, 611, 612, 616, 618, 620, 622, 625, 630, 631, 634: n = A,T,C or G
  misc_feature 636, 638, 639, 644, 673, 677, 681, 682, 688, 693, 697, 699,701, 705, 706, 709, 712, 715, 716, 717, 726, 733, 742, 750,753, 755, 756, 761, 765, 766, 768, 776, 779, 782, 785, 794,795, 803, 804, 805, 808, 813, 819, 827, 830, 831, 838: n = A,T,C or G
  misc_feature 849, 852, 860, 864, 867, 876, 882, 883, 886, 900, 904, 908: n = A,T,C or G
nttcgccntatnctactcctatagggcaaattggaatctcacccgcggtggcggcccgcccgggcaggtacttttttttttttttttttttttttttgaaaaaatnaaatttattgccttgtggggggaagggatgtggtcacctgnctactccattcacacctacctgtggcttctccagtgatggaccanatactcaaggaggcactnggctcancctgnncattaaagngacanantnagctcacacgctgtctgtgactaaagatggcacatcatggccagtntaancttcanaaacttaagcccagangcaatgnattatntgactcacnttntccctttagntttnccatantcatantatctnccaaacatatnttcnatnttncttcaatatnnaaccnattcnanatattnttntntttcatntcnncantnatnatanctnattttaattacanttnttattantcatancntnntcntcnttnataacnntaaatactcannnantaattatnaacctntanttatnccatantnttnattnattntcanttaantntcttatttantaannnatntnantaattatanncanatacatnnattntntntnaanattcnnttncnannttatntcatccaaataatatatctataaatacanaaanatanntacatntatanaacntntncatnnaanacntannnttcctctanaaattcnaaactaatnataatatntantnnatttnttannantcaattcnacnaanaantatattctnntaaatatnnnatnttatnttatanttactctncannatcaatntaccattccanatncaatattntttnttntactctatnccttcnntcnctttataaatcaantttnttang

SEQ ID NO: 2871 - DNA, 866 bp, Homo sapiens
  misc_feature 3, 4, 44, 202, 361, 393, 394, 437, 467, 499, 505, 525, 587,595, 618, 626, 630, 633, 636, 643, 658, 669, 679, 704, 708,713, 726, 735, 748, 750, 751, 755, 757, 765, 771, 783, 789,795, 800, 810, 812, 814, 822, 823, 831, 834, 845, 848: n = A,T,C or G
  misc_feature 855, 863: n = A,T,C or G
ggnnccgcgtatcgactactatagggcgaattggagctccccgnggtggcggccgaggtacgcgggggttgtgactaggaaaggcatgggacgacatgtgtcccaggtgaggtatgtgccacaggcagttacggatgtgttggaggaggaaattccaggaaggggcaagatctggaacgaaggctggagggaggttcccctnaaggatgctaaggaatacgctgaatccataggtgccatcgtggttgagacaagtgcaaaaaatgctattaatatcgaagagctttttcaaggaatcagccgccagatcccacccttggacccccatgaaaatggaaacaatggaacaatcaaagttganaagccaaccatgcaagccagccgccggtgctnntgacccaagggccgtggtccacggtacctgcccgggcggccgntctagaactagtggatcccccgggctgcangaattcaatatcaagcttatcgatacccgtcnaccttnagggggggcccggttcccancttttgttcccttttagtgaggggttaattgcgcgcttggccgtaatcatggtcatagctgnttcctgtntgaaaattgttatccgctcacantttcacanaaanttnganccgggancataattttgtaaancctgggggtgnctaattaggnagctaacttcacattaattagcggnttcnctttntgtcccccttttnaaaattggnaaacctttttttncnnggtngnataaaaanaattangtcaaacgcgcngtgaanaaaggngtttnaatattatgntnantctatccnntttactanatntatagaatttntgntgcgtcnagtcgttnggg

SEQ ID NO: 2872 - DNA, 875 bp, Homo sapiens
  misc_feature 1, 2, 326, 348, 360, 362, 364, 368, 370, 384, 389, 403, 405,412, 416, 417, 419, 426, 429, 434, 443, 444, 445, 446, 447,460, 461, 462, 471, 473, 476, 477, 479, 486, 491, 492, 498,500, 502, 505, 506, 520, 521, 536, 545, 546, 553: n = A,T,C or G
  misc_feature 562, 563, 566, 567, 570, 572, 574, 575, 576, 579, 583, 584,589, 591, 597, 600, 605, 607, 609, 611, 614, 617, 620, 623,624, 627, 629, 630, 643, 644, 656, 658, 665, 666, 668, 669,671, 672, 675, 676, 680, 681, 693, 694, 698, 700, 701: n = A,T,C or G
  misc_feature 711, 724, 726, 727, 728, 733, 738, 739, 743, 744, 747, 759,763, 766, 769, 775, 776, 783, 791, 793, 796, 803, 809, 822,823, 829, 835, 837, 838, 839, 847, 849, 850, 851, 852, 853,855, 863, 875: n = A,T,C or G
nngacgccgtaatacgactactatagggcgaattggagctccccgcggtggcggccgcccgggcaggtacaggtttgggcccagaggcctgacaggaagggcagtaggagaggtggtcgtagatgatgggccagagggcgcagggcctagcaggccatggaaaggactctaggttttacgctaggtaaaatgaggaggcactgcagggctttgagcagcagagtaacacagtctaacttactttttttttttaatggatcctaccagctgctaagttaagaataatttccagtgagggcttttgtagtaaattatagatgatgctngtttgtcaatctccccttccancatatgaatgtntngntaananagtcacaatttttntgaanaaatccatatctcntnaatggtnaaanntntgcctanatnctttnttttcttannnnnttactttttgatnnnctttaattncnttnntnctatttntttanntttatntntnttnnttttttaattaatnntattattttattatntttttatcnntattatntttttattnnatnnttntnannntantatnngattnantttaanaanttttntntnantanaanttntannaantnnaatttattatttnnttaatatatttntnaattttnntnnannatnntatnntttttatattanntttntnnattttgattnaaaattattactnannntaatnttttnntttnnttnaaataattttanaatntantanattatnnttaattntcattatnanaanaattttnattttntataaatttaaannattttntaaatnannntatttttntnnnnntntattattntttatttattan

SEQ ID NO: 2873 - DNA, 840 bp, Homo sapiens
  misc_feature 285, 518, 604, 633, 652, 733, 758, 768, 770, 771, 776, 797,812, 833, 839: n = A,T,C or G
actcctatagggcgaattggagctccccgcggtggcggccgaggtactgcatgttgccgtgtgagccctgtgaaaggggagcatataaggaggttatccacatactgtagaagttatgcccacctcaagagattgctcagttagatttttgctagagcttgtctgaataaatgtgggcaatttctaaacccctgagttaggactgaccaggatgaagttaatagataaagatttaggtagctttcccaggagaaacagggctattaaagggaaagatgaattcanagatcatgtgaatattaagcagacacccatcttggaaagtatatttttgcaccaaagaggtgtgggatatttagacattcattacccagggactgatgggagaatggtaattggtcccttaaataatataaaggagtgtgaatcttttcttttggagggaagtggtgccatttgcccccattacctggcaggattccggaggagagttgtttagaaaagattagccagagtangcagctctttaaacccaaagggaaatttataatttttacttgccacctccagaagttgcccttggctttgttctgttgatggtgangtctgattggaaacctggccagaccgtanagcttcttcacttcaaggncatcgggggtggggattctgcctaaggacccttcaacccttaaggcagcccccgtttccagtacctgcccggccggccgtntaaactagttggatcccccggctgncaggaattcnanntcaancttttcgatacccgccaactngaggggggcccggtncccacctttggtcccttaagngagggna

SEQ ID NO: 2874 - DNA, 948 bp, Homo sapiens
  misc_feature 2, 59, 60, 61, 65, 68, 71, 75, 76, 194, 229, 263, 288, 290,293, 295, 299, 324, 326, 329, 330, 331, 335, 337, 338, 340,341, 347, 353, 361, 362, 369, 374, 375, 378, 379, 387, 389,392, 395, 400, 405, 406, 412, 421, 431, 433, 435, 436: n = A,T,C or G
  misc_feature 438, 449, 464, 466, 473, 474, 478, 484, 486, 488, 489, 490,493, 494, 498, 499, 501, 515, 516, 518, 532, 534, 539, 541,547, 554, 560, 567, 582, 598, 599, 602, 611, 613, 617, 619,622, 630, 632, 636, 640, 643, 652, 653, 654, 655, 657: n = A,T,C or G
  misc_feature 658, 660, 667, 668, 669, 670, 672, 674, 676, 692, 693, 696,698, 700, 701, 711, 712, 727, 731, 737, 742, 747, 748, 751,759, 763, 766, 785, 791, 792, 794, 807, 822, 824, 826, 835,839, 841, 842, 845, 847, 856, 858, 864, 865, 868, 869: n = A,T,C or G
  misc_feature 874, 889, 891, 903, 909, 910, 912, 917, 918, 924, 929, 932,934, 942, 947: n = A,T,C or G
gnccgtatacactactatagggcgaattggagctccccgcggtggcggccgaggtactnnntttnagnttntttnnttttttttgggaaagggtagttcttttcattagatattgaggttcaatagacaaaatttatttcagaggtactcaacttctctctaaaatgatgagaatataattcaggtcaatgctnatctgaagggctttatctctcacccaactcttcanggacattgtctgtatataccctatctaaagcatntgttgacccgcgtacctgcccggtntntcnancatnacaaaaatcgacgcctaaatttaanangtnnnagancnngnntggaanataagnattccccnncgttacncaccnngannctcccttntnctnatntaccngcccnnctcttnccaattacnggaatccctntncnncntttctcccttncgggaaagcggtatnanattcctnntagntccctncntnnnatnnaatnnanagttctggggtacnntnttaataatccacgntngggtntntggtgnatcgaancccccnggtctantccctttcctattanacccttatcccggttnnctnatctgttantnacancncanccccggcncnttancacncantttatcgcnnnntnngnatgctcnnnntntnanaacaagggatttagtnngantngnnggtattatanncaagattcctgcgcntgtntctttnaattngaaannacnatactcgnctgntanctttttaataaacatatanttgggnntntttcccttatatnaaaccaattaccgtngnanttgtaattngtancnnttngnatccgggcnantaaacnnatnntaganacacggcggggttgntnatgttttcctanccaaannanttacnncgctgncagcnatntnggtttttntatang

SEQ ID NO: 2875 - DNA, 857 bp, Homo sapiens
  misc_feature 2, 64, 73, 103, 122, 139, 143, 246, 248, 268, 487, 505, 508,528, 531, 552, 564, 593, 599, 606, 618, 632, 638, 650, 661,685, 692, 695, 716, 720, 723, 750, 751, 752, 768, 772, 779,784, 794, 795, 801, 803, 808, 819, 822, 844, 848: n = A,T,C or G
  misc_feature 854, 855: n = A,T,C or G
anggcgaattggagctccccgcggtggcggcccgaggtacatgccacttatggcatgctccganaaggtccangagagctgagcagtcaagatgtgtgacttnaccgaagaccagaccgcanagttcaaggaggccttncagntgtttgaccgaacaggtgatggcaagatcctgtacctcggccgctctagaactagtggatcccccgggctgcaggaattcgatatcaagcttatcgataccgncnacctcgagggggggcccggnacccagcttttgttccctttagtgagggttaattgcgcgcttggcgtaatcatggtcatagctgtttcctgtgtgaaattgttatccgctcacaattcacacaacatacgagccgggagcataaagtgtaaagcctggggtgcctaatgaagtgagctaactcacattaattgcgttgcgctcactgcccgctttccatcgggaaacctgtcgtgccanctgcatttaattgaatcngcnaaccgcgcggggaagaggcnggnttgcgtaattgggcgctcttncgcttcctcgcntaaattgacttcgctggcgcttcggtcgntccggntggcgcnaagccggtattnagcttcactcaaangcggtnatacgggtattncacagaaatcnaggggattaccgcaggaaaagaanatgtgangcnaaaggccagcaaaaaggcccngtanccngtaaaaaagggcccggttgcttggcgnnntttccataagctccgncccntgaccgngcttncaaaaattgnncttaantnaaagnggggcaaaccnacngggaattttaaaaataccgggntttnccctgnngt

SEQ ID NO: 2876 - DNA, 1027 bp, Homo sapiens
  misc_feature 1, 8, 9, 10, 16, 17, 18, 19, 22, 28, 29, 31, 33, 37, 41,51, 53, 56, 61, 62, 64, 65, 66, 69, 70, 73, 82, 83, 84,85, 86, 89, 90, 91, 95, 96, 139, 212, 214, 216, 231, 237,247, 375, 411, 421, 461, 488, 489, 499, 544, 555, 596, 603: n = A,T,C or G
  misc_feature 606, 610, 617, 620, 633, 646, 654, 669, 671, 673, 680, 696,725, 729, 742, 743, 745, 746, 756, 761, 762, 765, 767, 773,786, 794, 796, 809, 817, 826, 832, 839, 840, 841, 847, 860,862, 866, 869, 876, 878, 881, 884, 885, 895, 897, 903: n = A,T,C or G
  misc_feature 914, 915, 916, 924, 927, 936, 938, 941, 962, 969, 970, 972,973, 974, 979, 982, 988, 989, 991, 996, 1000, 1003, 1004,1006, 1007, 1015, 1017, 1019: n = A,T,C or G
ntattgannnttgatnnnntgntaaacnnantnatcncttnttccaatttncnatntcatnntnnnatnnatnattttcttnnnnnggnnntatnnatcattaggcgaatggactccccgcggtggcggccgatgtacncggggggagagtagtggttctcgcagcacccagcacgcagctggagatctgagaacggacagactgcctcctnangngggtcccagaccctngagtancctaactggnaggcacccccaagtaggggcagactgacacctcacacgcccgggtacctgcccgggcggccgctcgactctagaactagtggatcccctcgggctgcaggaattcgatatcaagcttatcgataccgncgaacctcgagggggggcccggtacccagcttttgntccctttagngagggttaattgcccgcttggcgtaatcatggacatagcntgtttcctgtggtgaaattgttattcnnctcacaattnccacacaacaataccgaagcccgggaagccataaaagtgtaaaangcctggggtgncctaaatgagtgagctaacttcacatttaattgcgttgtcnctcactntcncgcntttccanttngggaaaaccctgntcggaccaccttnctattaantgaaatcgttcccanancncggggangaggccagtttgcgtnattggggcgcttctttccgcttccctcgnttanatgaacttcgatnngnnttgggacctntccgnntgntngcaaancgggtaaacaaantttacttnanaaggccggggcantactcggntatttcccnataaantaatggnnnataacntcacgggaaaaananatgntgncccatantnccnacnngaaaggccananaacctnaaaaaagggcnnntttttttngcngtaattacntnatnatttcactccactttgatcangcaatannannnatcancancttaanntncatanaggntcnnanntcttcacnananatttaaaa

SEQ ID NO: 2877 - DNA, 1073 bp, Homo sapiens
  misc_feature 1, 2, 3, 6, 7, 8, 9, 11, 12, 13, 14, 16, 17, 18, 19, 21,24, 25, 26, 28, 29, 33, 35, 36, 37, 38, 41, 46, 48, 49,51, 52, 54, 55, 56, 61, 63, 65, 68, 70, 71, 73, 74, 75,76, 78, 79, 80, 84, 86, 88, 97, 114, 132, 135, 213, 243,328: n = A,T,C or G
  misc_feature 371, 397, 416, 426, 438, 485, 500, 545, 550, 561, 562, 572,577, 593, 633, 638, 662, 679, 703, 707, 708, 713, 721, 753,757, 759, 775, 778, 794, 800, 802, 805, 806, 845, 855, 857,858, 868, 880, 894, 903, 906, 911, 918, 925, 931, 941: n = A,T,C or G
  misc_feature 951, 959, 972, 975, 983, 991, 992, 996, 1005, 1014, 1017,1019, 1027, 1039, 1041, 1044, 1054, 1055, 1063, 1064, 1072,1073: n = A,T,C or G
nnngtnnnnannnntnnnnancgnnnanngtcntnnnntanatttntnnannannnttttncntnatntnntnnnnannntggnangncgctatacnatcatataggcgattgnactccaccgcgtggcggnccntgtacgcgggggcccttgctcactagaaggagccccctgaccccttcttccaaaaatactttttgtctttgtcttcgngttctgcattcatcccccttcgttcactcncataacaaccaacagcgacaactggcacctaggacagggacgtgagtgaaggtctgctggagcagagaaactgacacttgacaangaagaaccgagaatgagaaaccctgcgaccgagtctgcttacnagcttaatataagtcttgcaaaaatnaagcttggaccacccaacnggccaatttnagaagcttgcancaacctggcaattacctttattcaattaatgcaaaaaccaaaaaatnggggaagaatgttancaaggcccgaaaagaatgaaagggtccgtgacccaacttcaatantcccncttggaagggnntttttgaagncaaancagaaaaatttggttnttaatggaaaagccaggatggttggaaaaaacttaaccancttgntggtcttgccccccagaaaggggnttgcttgaaggggccangtcattgcccccaaagccgcaggnggtnnccttngggattantctaattagtaaaccattttgaagccttgttngtancntggccccgggccgggncgnttttagaaactaatgnggaatncnccnngggcttggcaaggaatttcgattttcaaagctttaattngatacccggncnnaaccttcaangggggggggccncggtacccccaacnttttggttnccntttangttgaanggttaanttggcnccctttggcngtaaatcatngggcattngccttgtttcctnggntgaaaatngttattcnntttnccaattccncccaacatnacnancccggggnacttaaaagttngnaangcctgggggnncttaaaanntgaactann

SEQ ID NO: 2878 - DNA, 866 bp, Homo sapiens
  misc_feature 2, 5, 9, 15, 98, 105, 124, 149, 204, 210, 255, 338, 384,505, 516, 525, 534, 535, 542, 572, 575, 647, 652, 688, 690,691, 697, 708, 712, 718, 719, 723, 748, 771, 782, 789, 794,795, 804, 805, 806, 826, 852, 864, 865: n = A,T,C or G
tnacncgcntaatcnactcactatagggcgaattggagctccccgcggtggcggcccgaggtacctgagctcccagtctagggattaccacatggaanagtgacngatcatgagtggaaggganatgagttaatacaaatggaaaacangtttcattgtatgaaaaaggaaagtgaattaatgctttcgaaagagacattaaantagatntctgggcaatatgaaactgatagtcaatctcgtcagattctgaangcatctgtagataagcttccaatgaaaaacaaggcaagtgacaataggacaactagaagtaagctataattatagcaaagaangcaagagctaacataaacttgcctattgtcattgttgaagtcatanaactactcctttcaactactcttgtcatcaagaggcttcctgatgcgatcatctgtggtgaggatagcttttcgagccccatcccactttccagggcccttgtacctgcccgggcggccgntctagaactantggatcccncgggctgcnngaattcnatatcaagcttatcgatacccgtcgacctnaanggggggcccggtcccaacttttgttcctttaaggagggttaatttgcgcccttggcgtaatcatgggcatanctgtncctgtgtgaaattgttattccgcttaccaattcccncnncatacnaacccggaacnttanattgtnnaagnctggggtgcctaatgagtgagcttnacctacaattaattggcgttgcncccctggccantttccantttgnnaaaactgtnnnccactggatttaagaaatcngccaaccccccggaaaagctgttttnttttgggccctnnt

SEQ ID NO: 2879 - DNA, 890 bp, Homo sapiens
  misc_feature 76, 78, 102, 104, 135, 138, 139, 140, 164, 187, 215, 223,278, 339, 393, 397, 409, 443, 448, 461, 462, 463, 464, 466,467, 468, 479, 480, 482, 486, 487, 495, 500, 506, 507, 510,531, 540, 543, 559, 562, 565, 566, 577, 578, 587, 588: n = A,T,C or G
  misc_feature 591, 597, 599, 607, 610, 623, 631, 652, 662, 667, 677, 678,693, 697, 723, 724, 728, 731, 746, 752, 762, 771, 780, 786,789, 796, 798, 810, 814, 815, 818, 820, 822, 825, 831, 841,854, 857, 861, 863, 866, 874, 877, 879, 883, 885, 888: n = A,T,C or G
ctaattggagctccccgcggtggcggccgaggtactcggttgtgcagccacagtgagcttctgaacatttcttctnanactaagctcttacacacagttgcngntgaaagagggaattgcttgacatggccacangannntgcagcttcctgcagacatgacantcaacgcaaactcatgtcactgngggcagacacatgtttgcaaagagactnagagccanacaagcacactcaatgtgctttgcccaaatttacccattaggtaaatcttccctnctcccaagaagaaagtggagagagcatgagtcctcacatggaaacttgaagtcagggaaangggaggctcaccaattatttgtgcatgggtttaagttttccttgaaattaaagntcangtgtgtctttgngtttaccaattaatgaccaggaggttacaatagnagtantgctaggatggcnnnncnnnctatgagtatnntnaaanncaggttcnttgcnccgggnntgnccgtttactagaaacttagtngatcccccncgncctgtagggaaatttncanatnnaagctttaatnnaatcctcgnncgnaacttnangggggggnggnccgggtcccatgnttttgttnccctttaggaagggttaattngcccccttgncgtantcatggctannaagctgtttccttgngtgnaattgttgttcccgttcacaaatttnntcantanaatcgagcccgggangcttanaagtgtttantcctggggnggccttatngagtanggntactctnanattaattggctntgcnnttnantngcncgcttntcaatatggnaaccttttctgcnaanttgntnaantgaatccnccnanccancnggngg

SEQ ID NO: 2880 - DNA, 910 bp, Homo sapiens
  misc_feature 11, 56, 94, 203, 214, 218, 225, 232, 238, 249, 253, 259,263, 264, 267, 277, 285, 302, 308, 315, 339, 349, 360, 366,374, 386, 392, 400, 410, 417, 420, 422, 433, 435, 440, 449,453, 454, 470, 471, 477, 495, 505, 513, 521, 532, 544: n = A,T,C or G
  misc_feature 567, 593, 600, 606, 618, 634, 640, 644, 645, 660, 675, 679,685, 703, 705, 742, 747, 769, 776, 797, 798, 811, 831, 833,834, 837, 840, 841, 846, 860, 872, 881, 905, 906: n = A,T,C or G
gttatcactanttagggcgaattggagctccccgcggtggcggccgaggtactttnttttttttttttttttttttttccataacaaagctcangtgtttattaagaattaaaaatactgtaaataagccatacagttcatttcacagtaaactaaacaaaacttttttttttttttcttttcgggttttttttttttttttncaatttttttnggangggcaanacagccnttaaanaacaatccagntcanagggangggnnatncagcaaacanttcccaancccagtttgccccctcnttgccnacagggntgcccaaacggcaaaccttttcanggacatcatnttaaaataaanggactnggcctgcnttccccaggganaccccntattccantgtaaacagntttcctnacnanttttttgaaanancccanggactcccntttnnggtagtcaaaacctgnncattcnttggggacctccggaaanaaaacatggnccggcagnggggacanagggccccggnactttgctgggngtagggcttaacattaaaaaccnccggggatgctttgcataagtacctntgaatcncaagangcgtcaggaaanaaaaaccacccccccnccctgngggnngcgcccttaagccgnggattccttttaaanaaanaccccnggggcttttccccttctnanttaaaagctggacagcttttaacctttaaccgggttnaaaanggaaaaaccccgggtaccttgnccggggnggccgttttaaaaaaaggggnncccccgggttggnggaattcaattaagcttttngnnccnccnncccgnggggggggcccggncccccttttttncttttaggngggtaaatgccccttgggaaaaanngcct

SEQ ID NO: 2881 - DNA, 1016 bp, Homo sapiens
  misc_feature 5, 257, 281, 310, 406, 412, 453, 466, 510, 571, 583, 587,646, 654, 679, 690, 715, 729, 736, 780, 800, 812, 815, 821,825, 839, 847, 864, 869, 873, 898, 902, 906, 914, 915, 916,920, 924, 929, 931, 934, 938, 948, 951, 963, 965, 973: n = A,T,C or G
  misc_feature 975, 988, 991, 997, 1002, 1011: n = A,T,C or G
tacgngacgcgcgtaatacgactcactatagggcgaattggagctccaccgcggtggcggcccgcccgggcaggtactaacagtcaggaacaaatagaacacatagagaggacagtgggaggtccccctggctaaagcagagggtgtattgagagaaggaaacctttgcctcaatggatcgtagcaaactgagaaaggaccaataacaccttgcttgagaaagttttgaatgtgattcctttggtgaccacaagcanggaggtccttgaaagtcccttgtnctttcagatgcaaaacaaggaggcttgtncccattacaagactatcaagggaaaaaatgcactgtttatcaaaaagatatgaatgttctttgacaggcaaaaccctgctcaaaatgaaatggcantgccanggagatgatattcagtgtgatgcaacttgtgaagtaccttnggcccgcttctanaactaaagtgggatccccccgggcttgcaaggaaatttcgatantcaaagcttattcgataccgtccaaccttcgaagggggggccccggtacccaagctttttnttcccttttaantganggtttaatttgcgccctttggccgtaattcattgggcataagcttgttttccttgtgtngaaaattnttattccgcttcacaatttccacancaacattaccnagcccggggagccataaaaagtgtnaaagcctgggggtngccttantgaagttgagcttacttaacatttaaattgcgtttgcgcttcanctggcccctttttcaaatcngggaaaaacttntcntgccancttnattaaatgaattcnccccaccncccggggaaaaggcggnttttncgtnttgggcgcctttttcccttctttgnttanttgntttcctgnnncttnggcngttcngntgngggnaagcggtatnaantttacttaaaangnggggaatncngtttttcacaaanttnggggtnacccnaggaaaaancattt

SEQ ID NO: 2882 - DNA, 631 bp, Homo sapiens
  misc_feature 6, 9, 174, 175, 176, 177, 178, 179, 189, 199, 200, 201, 203,204, 206, 208, 222, 228, 229, 243, 248, 249, 250, 261, 262,263, 266, 267, 268, 269, 270, 271, 272, 273, 274, 275, 287,294, 295, 296, 297, 298, 299, 300, 301, 302, 303: n = A,T,C or G
  misc_feature 304, 305, 311, 312, 313, 314, 315, 321, 322, 325, 330, 332,336, 338, 341, 342, 343, 344, 348, 349, 351, 352, 354, 357,368, 371, 372, 376, 382, 388, 394, 395, 397, 398, 399, 402,406, 407, 408, 416, 422, 423, 428, 430, 435, 438, 440: n = A,T,C or G
  misc_feature 441, 442, 443, 450, 451, 452, 456, 464, 465, 470, 475, 476,477, 480, 486, 487, 491, 493, 527, 528, 531, 546, 547, 548,552, 558, 562, 570, 575, 578, 581, 597, 599, 600, 602, 607,608, 609, 616, 624, 627, 628, 630: n = A,T,C or G
tatagnaanactatgacgtcgcatgcacgcgtacgtaagacttgggatcctctaggagcggccgcccttttttttttttttttttttttttttttttttttttttttttttttttttttttttttttttttttttttttttttttttttttttttttttttttttttttttttnnnnnnaaaaaaaaantttttttttnnngnnantnaaaaaaaaaaaaanaaaaanngggggggggggggnaaaannnaaaaaaaaaannnttnnnnnnnnnnaaaaaaaaaaanaaaaaannnnnnnnnnnnaaaaannnnngggggnnaanggggncnaaangnaannnnaaanngnntnccnggggaaaaaanccnncccngggggncccccnggaaanncnnnccngggnnngggggggncccccnnttttncnaaaanggngnnnnaaaaaannngggnaaaaaaannggaanggggnnnccngggggnnaaantntttccccaaaaaaccccccccaaaaaaaaaaggnnggnacaaaaaaaaaaaannncccngggggncccnaaaaaaanaaaanaanacnaaaaaaaagggggggngnnanacaannnccccctnaaaaaaanggnnang

SEQ ID NO: 2883 - DNA, 938 bp, Homo sapiens
  misc_feature 1, 4, 5, 8, 11, 13, 17, 19, 21, 29, 30, 35, 433, 449, 454,492, 624, 645, 659, 672, 710, 717, 718, 720, 741, 743, 745,764, 774, 788, 809, 815, 818, 827, 838, 839, 869, 875, 876,879, 883, 901, 903, 912, 925, 931, 935: n = A,T,C or G
nttnncantantntacngncnatagggcnnattgnagctccaccgcggtggcggcccgaggtacccagcgtctcttgatttcatctttatgttgatgtgtattgggtgttgcgcttccacttataaatgagaacctgcagtgtttggtcttctgttcttgcctcagttgcttagcagagtggcctccagttccacccatgttcctacccgagggcatgattttgtttctgtgtttgattttccttagtggctttttagcattctgtgatgtataggaaccacatttttaaaaatccagttttctgttcgtgggcatctagatcaagttccacatctttattcctgtcagtaacactcccgtggacgtgtgaagtgtcacgtgtctttttgatagacgcatgtgtttttccctggggtaaaatgcatggggtangattgctgggtcaaancatanctctgccttccatcctttttttttccagaaatcttcanactggtttccacagtttaaggatctaatttgcatttacctccaaagaagaatagcccatgtttgcttttctcttgctgccacactgtaacatgttatgttttgacttgggacaaatggccacttcttaccancatgtgaatggtacctgcccnggcgggcgctctanaactaagtggaancccccgggctggcaggaattcgaaaattaaacctaatngataccnncnaacctccaaggggggggcccngnancccaactttttggttcccntttaattganggggaaattgcgcncctggcggaaacaaagggcanagctgnttnctggggggnaaaatgtattnnctcaaaaatcccacaaaaaaaaacccgggncataannggnaaancccggggggcctaatgangngagctactncccataattgggnggcccnctgnccc

SEQ ID NO: 2884 - DNA, 909 bp, Homo sapiens
  misc_feature 4, 332, 493, 575, 578, 579, 580, 581, 582, 583, 584, 585,586, 587, 588, 589, 590, 591, 592, 593, 594, 595, 596, 597,598, 599, 600, 601, 602, 603, 604, 605, 606, 607, 608, 609,610, 611, 612, 613, 614, 615, 616, 617, 618, 619, 620: n = A,T,C or G
  misc_feature 621, 622, 623, 624, 625, 626, 627, 628, 629, 630, 631, 632,633, 634, 635, 636, 637, 638, 639, 640, 641, 642, 643, 644,645, 646, 647, 648, 649, 650, 651, 652, 653, 654, 655, 656,657, 658, 659, 660, 661, 662, 663, 664, 665, 666, 667: n = A,T,C or G
  misc_feature 668, 669, 670, 671, 672, 673, 674, 675, 676, 677, 678, 679,680, 682, 683, 684, 685, 686, 687, 688, 689, 690, 691, 692,694, 695, 696, 697, 698, 699, 700, 701, 702, 703, 704, 705,706, 707, 710, 711, 712, 713, 714, 715, 716, 717, 718: n = A,T,C or G
  misc_feature 719, 720, 721, 722, 723, 724, 725, 726, 727, 728, 729, 730,731, 732, 733, 734, 735, 736, 737, 738, 739, 740, 741, 742,743, 744, 745, 746, 747, 748, 749, 750, 751, 752, 753, 756,757, 758, 759, 760, 761, 762, 763, 764, 765, 766, 767: n = A,T,C or G
  misc_feature 768, 769, 770, 771, 772, 773, 774, 775, 776, 777, 778, 779,780, 781, 782, 783, 784, 785, 786, 787, 788, 789, 790, 791,792, 793, 794, 795, 796, 797, 798, 799, 800, 801, 802, 803,804, 805, 806, 807, 808, 809, 810, 811, 812, 813, 814: n = A,T,C or G
  misc_feature 815, 816, 817, 818, 819, 820, 821, 822, 823, 824, 825, 826,827, 828, 829, 830, 831, 832, 833, 834, 835, 836, 837, 838,839, 840, 841, 842, 843, 844, 845, 846, 847, 848, 849, 850,851, 852, 853, 854, 856, 857, 858, 859, 860-865,867-908: n = A,T,C or G
tggncgcgcgtatacgactcactatagggcgaattggagctccccgcggtggcggccgaggtacttttttttttttttttttttttgggcacagaaaactgttttaattagggtaacagaaagcagctgcaatacagagtgatgaatgtgaactttgaaagtaaatttggtgggtttcaggatttctgaggagggaagtcaaacagttctaaagagttggcaaggccaattgagagggtggtaagctatcctaagccctttcttctacattaactctgctttccagttagtcttcaggtgctttagaatttgagatccttttttctcattgngtggccatggactagaagtattagcactacctggaaacttgttcaaaatgcagaattctgggccccaaaacagacctactaaataaaagtctccattttaaagagattgctaaatgattcataacttgttaaagtttgagaggcattaccttagattctgncttcttcttacctttcaaacccagctgaaagtggggttgtatttccctttactttccgacctttagggaaagtcccctcccnggnnnnnnnnnnnnnnnnnnnnnnnnnnnnnnnnnnnnnnnnnnnnnnnnnnnnnnnnnnnnnnnnnnnnnnnnnnnnnnnnnnnnnnnnnnnnnnnnnnnnnnntnnnnnnnnnnnannnnnnnnnnnnnnttnnnnnnnnnnnnnnnnnnnnnnnnnnnnnnnnnnnnnnnnnnnnaannnnnnnnnnnnnnnnnnnnnnnnnnnnnnnnnnnnnnnnnnnnnnnnnnnnnnnnnnnnnnnnnnnnnnnnnnnnnnnnnnnnnnnnnnnnnnnnnnnannnnnnnnnntnnnnnnnnnnnnnnnnnnnnnnnnnnnnnnnnnnnnnnnnnnc

SEQ ID NO: 2885 - DNA, 911 bp, Homo sapiens
  misc_feature 3, 4, 5, 6, 224, 235, 245, 259, 271, 313, 354, 366, 401,406, 426, 455, 527, 606, 609, 613, 641, 651, 672, 674, 683,691, 716, 719, 725, 747, 749, 754, 757, 758, 767, 769, 796,835, 864, 866, 875, 876, 882, 890, 897, 899, 902: n = A,T,C or G
agnnnncactcctatagggcgaattggagctccccgcggtggcggccgaggactttttttttttttttttttttttgctaaatttttagtatcaggatgatacaggttttatagaatgagttaaggaggagtccctctttctcatttcagggcttatttgactggtaggtttttaatactgcttcaatttcattacttgcttctgttctattcaatatttctgntccttccttgntcaactttgntcagtcttccttgntcaattccttgngtttccattaatttattcatttcctctagtttgggtaaatanatatgcttatagtagcttctgaggatcttttgtatttctgngggatctattgngatgtcacctttattaatttctaattgggcttggntggancttctttcttttttctttgntaatctagctaggggtctatcaatcttgnttatcctttcaaaaaacccactttttattttatttacccttcatatggttggttttttaaagaacaaacaanttttttaaaagatcaattttggatgaaacaatcttggagagaaaaaaactttttaaaaaactgggatcaatattcttangangggnaaaaaatgattatctgttcaggaagcantatgagaatncttttaataaaaaccccttcncnagaggaacnccaaaatnattcttgggaattaaaaaaaaagangcnttaaangagaaacccaatcaaaaatttngnaaaanganncagggatcntnccgaacctaaagccaaaagaattaganggctttttaatgggaaaaaagcctaaaaaaatttaaagnccccccggccttgggggccccacccaggnanaaggaattnnttgaanaaaaaccnttggatngnagncccattcct

SEQ ID NO: 2886 - DNA, 897 bp, Homo sapiens
  misc_feature 8, 14, 18, 32, 34, 180, 185, 196, 251, 354, 377, 389, 390,407, 426, 438, 450, 463, 491, 504, 513, 518, 534, 592, 613,614, 627, 633, 640, 647, 651, 656, 661, 668, 678, 686, 690,698, 699, 709, 710, 714, 728, 737, 738, 752, 759, 761: n = A,T,C or G
  misc_feature 770, 775, 788, 796, 806, 822, 826, 833, 844, 851, 854, 855,857, 874, 895, 896: n = A,T,C or G
acgatccnctactntacngcgaattggagctncngcagctccccgcggtggcggccgcccgggcaggtactttccatttgccttcctggttaaagattggtgcctggccagaaatgcctgtgaaacagctgtggtttaagcttcaactgtaaaagacagacggaatcctgctgcatccanagctngaagttctgangttccactgaaatcacaatggaaagtcttgacttgactggtcacagtaatgaaangcagtaatagaaataaggatcattcagcataaggagaaggggttggaaaacgaccaaaacgaaagtgtcttcagtggcatccattgctagcaaaagaaacttnttgatttttcataacaggaacangaggaagaccannaggaggatattgataanggtcaacttcttggggccnatggcctaaaancaagatgttggngaaactgaagatnattaatcaccacatcagctagccccganaccaatgaatgcntttttttanttttnaaacgcccatggtttntttgaccttggccctctaaaactaatggatccccggcttcaggaattcaaaatcagcntattggttcccgtgaaccttnnggggggcccggancccacnttttggngccttanaggngggtnaatcngcgcctnggcggaaacnttgggcanactngttccttnnggaaattgtnntccncttcaaattccccnaacatacannccggagccttaaanggaaaancnggggggccnaatgngggggcctacccnattaatgnggtggcctantggccccttttcaatngggnaaacttnttggccaattnttttatnaanngnccccccccggggaaggnggttcgttttgggcccttccnnt

SEQ ID NO: 2887 - DNA, 912 bp, Homo sapiens
  misc_feature 3, 7, 10, 12, 15, 16, 604, 623, 650, 667, 680, 727, 728,734, 735, 740, 748, 749, 786, 790, 811, 824, 827, 839, 849,853, 867, 872, 875, 878, 907, 910, 911: n = A,T,C or G
gtntcgntantnacnnctattggagctccccgcggtggcggccgaggtactacttgctaaaacgaaaacaggtaaaaacaatgaacagacggttcacgttaagaggaatacgaaaagccaataacaatactgacataacaatcttatttgtaatgaaagaaatacaaattttaaaaatgacataccattttttaattacattggcaaaaattaaaccaaaaagaatacctacaattgaccaaggagtattctggcagggggagggaagtcacatacatatagtacctgcttttgccgcttctggtttttgcagacatccactactccccagctgattacaccaacttgaatgaaacgacttctcttgtgaactatcaaggggccgccagaatcacctctgcaagtattggggtcagcatagggactcactcctccagtacctgcccgggcggccgctctagaactagtggatcccccgggctgcaggaattcgatatcaagcttatcgatacccgtcgacctcgagggggggcccggtcccagcttttggtccctttagtgagggttaattgcgcccttggcgtaatcatggcatagctggttnctgtgtgaaattgggtatncgcttacaattccacacaacataccancccggagcctaaagtgnaaaagcctggggngcctaaagagtgagctactccattaattgcgttgcgctcctggcccnntttcanncgggnaaactgtnngccaactggcattaatgaatcggccaccccccggganaagngggttgcgtatttggggcctnttccctttctcgnttnattgactcgctnggcctcggcngttngggttgggggggancgggntanctnactcaaaaggggggaatcggttttcccanaannt

SEQ ID NO: 2888 - DNA, 941 bp, Homo sapiens
  misc_feature 443, 613, 627, 639, 653, 668, 679, 683, 684, 685, 686, 699,716, 756, 761, 780, 794, 800, 805, 813, 819, 826, 831, 837,845, 854, 858, 874, 875, 876, 879, 881, 883, 887, 905, 910,916, 927, 933, 935, 939: n = A,T,C or G
agggagcgcgcgtaatacgactcactatagggcgaattggagctccaccgcggtggcggcccgaggtacacatcaaacacttcattgcctaaatgcagggacatgcttccatctgaccacttgactatccgagcattgctttctttaatttcatttccttcttcatctcggcgtatcctccatcttatagtattttctacctttaattttaacctggttctaccttcttcatccagcatttcttcatcttcaaattcatcttcataatactgaggatcaaaaggtctgggctctacactgagaaagttgggcagtttaacaaaatataagtcgtttcctaaatcagtgtttactttgggtatttctacttctattctggtctcaggaattgggctcctcttcctgttgatcctgaggcaatccattttcatcaacaggctgtnctggagtaggtggtttgtcttctccatcactccctgaagagaaatcatctggcacctccaaataaatccatggttccactattatcttttggcacctcaagggtcactatccgctttctgaatcagaatgcaatcgcattcttgcgtttcatttcgtaaaaacttcattnttcactatcactgnctcttgcagaancttgatttaatgancctggtcctcttcantaaactgaaangccnnnngttcttcaatctngaagggcctggtgggcntttcattatcagaaatttggcattttctcttcatcaaaanagctngggggtggtccttaatcancagaaatcttgttnctcaanatcanttatcagnaagccnccgggcngtttnaaaacntgtggganccccgggcnggcnggaattccatattaannntantnanaccngtcaccctaagggggggnccggnacccanatttttttccntttaangngggnaa

SEQ ID NO: 2889 - DNA, 993 bp, Homo sapiens
  misc_feature 65, 74, 79, 82, 85, 153, 206, 215, 217, 241, 255, 279, 344,345, 364, 372, 374, 380, 382, 393, 400, 404, 405, 406, 408,410, 412, 421, 423, 424, 436, 437, 444, 446, 450, 451, 457,458, 460, 464, 465, 468, 477, 478, 479, 483, 485, 487: n = A,T,C or G
  misc_feature 490, 494, 495, 500, 501, 508, 523, 524, 526, 529, 530, 531,533, 541, 542, 548, 550, 553, 555, 558, 565, 571, 574, 575,576, 583, 586, 589, 596, 600, 604, 607, 609, 611, 612, 616,622, 624, 631, 635, 636, 639, 640, 652, 656, 657, 661: n = A,T,C or G
  misc_feature 664, 666, 667, 668, 669, 675, 676, 682, 689, 691, 696, 699,702, 707, 713, 718, 725, 736, 737, 738, 740, 746, 748, 752,756, 761, 769, 772, 773, 777, 779, 788, 790, 794, 795, 799,800, 808, 816, 818, 819, 820, 829, 832, 845, 847, 848: n = A,T,C or G
  misc_feature 859, 864, 872, 880, 881, 882, 883, 884, 885, 886, 887, 893,894, 896, 898, 900, 902, 908, 910, 912, 914, 924, 930, 932,936, 939, 940, 944, 948, 954, 960, 967, 968, 969, 970, 971,979, 981, 985, 988, 989, 990, 992: n = A,T,C or G
gcccgtatacgactactatagggcgaattggagctccccgcggtggcggccgaggtactttattnttttttttnttttnttnttncgctgaaagtggttactttattggttgggaaagggagaaagctgtggtcagcccaagagggaatacanagtccctaaaaaggggagggcaggtggctggaaccagatgcagggccaggcanaaaactttntntcctcactgctcagcctgggtggnggctggagctcaanaaattgggagtgacacaggacacnttcccacagccattgcggcagcatttcatttggccaggacactggctgtcccccgcgtcctggcnngaaaaattctaatctcggnctttcgancntaattntntacattcatanccttatntcgnnngnantntttaatctncnnattaattttttnnatttccnanattnntttagnnantttnntanatttttttnnnggangntngtnattnnaatgnnttttttntcaataattgtatgnntnatnnntnatcccttnnttaatntnttngnatncatatcntttatnttnnnaatcttnctntantactcgnatantatnctnancnnttcnatatancntacttgncaannccnnaaattcagattnccgnngganttncnnnnttcctnnatttcnacatatngntaaanttngcnattanttttanccctnaatttgntaattttctannntnctgcanancctntaanctggncaaaaacntgnnaaancncgacacacntntatnntctnncaattctncaatttcngnnnatttctaantangtatgaaattcangnncctcgctaaancgggnaattccgnaatatctnnnnnnnntcatannantntncncattantntnanatccactttntataangnatanttnnatanattnacatanctgtcnaatatcnnnnntattctcntnatantcnnncnt

SEQ ID NO: 2890 - DNA, 902 bp, Homo sapiens
  misc_feature 235, 273, 277, 279, 280, 298, 300, 304, 310, 325, 328, 334,343, 347, 350, 355, 356, 360, 362, 363, 365, 366, 373, 380,385, 390, 394, 414, 420, 422, 451, 472, 481, 483, 489, 490,496, 497, 499, 504, 510, 527, 531, 546, 548, 559, 561: n = A,T,C or G
  misc_feature 563, 575, 581, 583, 588, 596, 610, 611, 617, 619, 621, 636,683, 687, 696, 710, 711, 717, 722, 727, 731, 732, 739, 745,751, 752, 760, 761, 763, 769, 782, 786, 789, 790, 796, 799,800, 807, 813, 815, 816, 818, 820, 822, 825, 843, 845: n = A,T,C or G
  misc_feature 846, 870, 871, 877, 883, 890, 892, 895, 899, 901: n = A,T,C or G
gtaacgactactatagggcgaattggagctcccccgcggtggcggccgaggtacttttttttttttttttttttttttgtttgagacagagtttcactcattgcccaggctggagtgcaatggcgcaactgtggctcactgcaacctccacctactgggttcaagcaattctcctgctagcctctggaggagctggcattacaggtgcccgccaccatgcccagctaatttttgnatttttaagtaaagacagggttccactatgtcggtcangctnannttgaacttttgaccccangngaancaaccngcttgggctccaaanggntgggantacaagggngganccncccanncccnanncnncaaacangttaaantcacngggangccntgggccccttttgaaagccngctttntnttttttttgggggggggggggacaaagtntcctttttttttggccaagcntggaagccnangggcanngatctnnantaatnggaacnttttgttttccggggcnaaangcaatttttcctctntnaacctcccaantncntggggataacangggggngngccanttgccccngggaaaatttaagnntttttnangnaaaaaaggggggttnactatgctgggccaggcttgggctttaaactcctggccttaaggaantccnccccccttngccttccaaaaggnnctgggnattantgggngtanngccaacnggcccnggccgnnttaaaaannangggaanccccgggctggangganttnnaatttnaanntttattnaatccngnnancntnaanggggggggcccggacccnanntttgttcctttaagaaggggtaanntgcccncttggnggaaatnanggnaaantng

SEQ ID NO: 2891 - DNA, 905 bp, Homo sapiens
  misc_feature 17, 22, 36, 48, 71, 273, 337, 400, 428, 482, 484, 508, 522,544, 570, 605, 629, 636, 638, 656, 659, 675, 684, 703, 706,707, 711, 713, 715, 724, 732, 747, 754, 758, 765, 775, 790,802, 832, 848, 851, 862, 863, 864, 874, 878, 887, 894: n = A,T,C or G
  misc_feature 897, 904: n = A,T,C or G
tagtcccccatttgaanctccntacgactacttttnggcgaattgganctccaccgcggtggcggccgccngggcaggtactttattttttttttttttttttttgagacggagtctcgctctgtcgcccaggctagagtgcagtggcacaatcttggctcactgcaagctctgcctcgcgggttcacgccatcctcctgcctcagcctcctgagtagctgagactacaggtgcccgccaccacgcccggctaattttttatatttttagtanagacggggtttcaccgtgttagccaggatggtctcgatctcctgaccttgtgatccgccgcctnggcctcccaaagtgctgggattacaggcgtgagccaccgcacccggctggaggagtatcttanaaaggcctggactgggtcctccccaatncctcaaggggaaaagcagagactaaatcagcatcaccccacttacgtgggtgananataggggcgggtgcaccccacctnttcacctataactnccgcgtaccttggccggtttanaactaagtgggattcccccggcttgnaggaattccaaatcaagccttatcgatacccggcnaacctcgaagggggggggcccggnaccccancnttttggttccctttaagngangggttaaattgccccncttggcggnaataatgggcaataacttnttnnctgngngnaaattgttnttccgctnaccaatttcccacancataccnaacnggggaancataaaaagngtaaaacctgggggngccttaagaagngagcctaactcacattaaatggcgttgggntcaattgcccctttcnagncgggaaacctnnngggccacttngatnaaaagaaancggccanccnccggggna

SEQ ID NO: 2892 - DNA, 876 bp, Homo sapiens
  misc_feature 377, 389, 421, 608, 640, 645, 658, 678, 737, 751, 754, 773,779, 780, 785, 788, 790, 791, 794, 812, 826, 841, 850, 853,866, 872: n = A,T,C or G
ctatagggcgaattggagctccaccgcggtggcggccgaggtactctctttctctttttcttggttgctgtgaaggaagtcagctgccatgctgtgagcttccattgaagacagaagtcttccttctaaatgccacgtgagtgagcatggaagtcaagccatgcaatgctgtcactctggctagcaccttgattgcaatcttctgagaggccctggtccaaagtcaccctgcaaaaccaatgcccagaattactgacatatttatttcaagctaataaattataggcgtaatttgtaatatgcagaaatagataactattaccgtagatcaaatgaaaaagatttcccatgtgcagaaacctacataaattcttttncttacaggacantcttattctaatcaataacatttgcttttaangcagataatcctccaagttttctaatgatatctgaaactattaactgattctgtgaattatgaaatctgaaaaggaattggaagttgctaaaaatctatcatttgcattgaccagtgtgaagcacaagtgggaatgagaatgcgtgccctgacaccaaagaaaaaataagtgactggaaagctgaanaatcaccggcttcagtgacatggaacccagtngattngattttttggacnaagtatcgggtgactttganggtggcaagaaaaccacactttaagaacaatgtccaaaaagggggaaaaaaaaagagcnaccaaagaaaaaanatncataaaatttgcccaaaanggatgnnggagngcngnntangttccttgcccggcgggncgtttaaaactagngggtccccgggctgnaggaattcnatntcaagccttatcngatccngccg

SEQ ID NO: 2893 - DNA, 877 bp, Homo sapiens
  misc_feature 685, 707, 746, 780, 787, 803, 841, 846, 860, 863: n = A,T,C or G
gccgcgtaatacgactcactatagggcgaattggagctccccgcggtggcggccgaggtactgggagtgatcactaacaccatagtaatgtctaatattcacaggcagatctgcttggggaagctagttatgtgaaaggcaaatagagtcatacagtagctcaaaaggcaaccataattctctttggtgcaggtcttgggagcgtgatctagattacactgcaccattcccaagttaatcccctgaaaacttactctcaactggagcaaatgaactttggtcccaaatatccatcttttcagtagcgttaattatgctctgtttccaactgcatttcctttccaattgaattaaagtgtggcctcgtttttagtcatttaaaattgttttctaagtaattgctgcctctattatggcacttcaattttgcactgtcttttgagattcaagaaaaatttctattcttttttttgcatccaattgtgcctgaacttttaaaatatgtaaatgctgccatgttccaaacccatcgtcagtgtgtgtgtttaagagctgtgcaccctagaaacaacatattgtcccatgagcaggtgcctgagacacagacccctttgcattccagagaggcattggttatagagacttgaattaataagtgacattatgccagttctggtctctccangtgaaaaaccaatgcttttggngcactacatactcttcagtggaagagctcttggtttatngggaaaaggctcaaatgcccaaattgggttgganggataanatgcccttttggccgngccatacctattactggaggggacctccggttttggcncaacntttggctttggttnaangaaaccacccttgg

SEQ ID NO: 2894 - DNA, 902 bp, Homo sapiens
  misc_feature 5, 7, 8, 10, 34, 45, 76, 80, 83, 94, 100, 101, 103, 128,277, 297, 413, 422, 475, 543, 561, 574, 588, 592, 615, 626,631, 632, 650, 664, 665, 684, 687, 689, 695, 703, 711, 717,731, 733, 743, 760, 761, 766, 770, 775, 776, 781, 784: n = A,T,C or G
  misc_feature 787, 788, 792, 795, 804, 805, 813, 827, 833, 838, 844, 860,864, 880, 881, 884, 886, 887, 899: n = A,T,C or G
agtcncnntntaaacactcccgggcgaattgtantccaacgcggncgcggccgcccgggcaggaactttttttttntatncanctctttttggnagaganntngtctcactatgctgcccaggctggnttcaaactcctgggctcaagtgatcctcccaccttgaccttccaaagtgctgggattacaagtgtgaaccactgctcccagcctggggaagatttcttaaagtgtggtaaatgaagttaaattgggccaagtccagagcctccactctnccctgccccagctcacaganataggcaggaagtctcacaccttcagaggggacacttcctccagggaggcctcctggttgaatctaggccacaaggaacatttctatcttccccatgcctagcaccaactgttcanagagtccanaccctgtggcctaaggaggcccaaagagttggggggattctgacacacactgnctggcaggcggcctgctgccctttccccgcgtacctcgggccgttctagaaactaggggatccccccnggctgcaaggaattccanatcaaagcttaancgatacccgccaanctcnaggggggggcccgggacccaacntttggttcccnttacnnaggggtaaattgcgcccnttgggggaaaacannggccaaagctggttcctgnggngnaaatgntattcccntcacaaantccccnacaacaataacgancncgggaagcantaaaagggggaaaagcnnggggngccnaaaannggggngcnaanntcanatnaaattgcgnngccctcanctggccgttttcanagcggnaaacntgtcgnggccagtggaataaangaancggccaacccccgggnngangnnggttgggttttnggc

SEQ ID NO: 2895 - DNA, 911 bp, Homo sapiens
  misc_feature 588, 649, 652, 669, 696, 713, 742, 743, 750, 754, 761, 768,794, 798, 802, 812, 818, 823, 830, 860, 861, 864, 869, 870,873, 877, 879, 882, 885, 886, 900: n = A,T,C or G
gccgcgtatcgactcctatagggcgaattggagctccccgcggtggcggcccgcccgggcaggtacgcgggtgttattgaaaattcagcaaaacataggtgtgattgcagcatttacagttgcagtccttgctgcgggtatctcctttcattacttcagtgattagggtgaggcacaaagagtttcttgatcatccagagaacattgacagacaattatgaataataaagatgttaacaatccatctgtatttaaaacactagcagccagatctgctgccatgatgcctatttggtgtgtttctgattaaaatgaaatcacaagctgccttgtttagcctgctttacattgtaggtggcccgcatttccagaaataaacgttatgcatctagatggaaagctgcatgtaacaaaatcattattatctatttttaaaagcttcaaaaatgatggggatatgatcatagattttagtcttactaatctgaatcacatattaatcagggacatttaaaaactttaaccagaggcttgaagggctcacaccgtataatcctaaatgcctttggagaggcttgaaggtagganccttcaccccggggcttggggaagggaagttgggagacccagcctgggatgaacataaatnganaatcttgcctctacttnggaaaaaaaaaaaaattagctgggcantggtgggcaatcagctntaggtcccaacttctttggagggctgaannaaggaanaacncgtgaancccaagnaattttgagggctgcaccagcctatnaccncatncttggacctnggccgntttanaactagnggatcccccgggctgcaggaattcaatttnnacntattnnaanccgncnccntcnngggggggcccggtncccaacttttg

SEQ ID NO: 2896 - DNA, 891 bp, Homo sapiens
  misc_feature 9, 25, 405, 504, 517, 534, 575, 601, 607, 635, 638, 647,686, 697, 699, 701, 716, 780, 782, 787, 799, 805, 831, 838,839, 840, 841, 851, 853, 854, 855, 858, 877, 884: n = A,T,C or G
tcgactcgntatacgactactatanggcgaattggagctccccgcggtggccggcccgcccgggcaggtacgcgggagtccaaaggcatcccgccttctgtgcagactcacaagtccctgtggacggaattcttgaagtgtagcgccgctcagtccttccaccggaagtgtccgatcggaatcagccctgtccgagagatggctacagaaccaaagaaagctgcagcccagaactctccagaggatgaaggacttctgatagtgaagatagaagaggaagaatttatccatgggcaggacacttgcttacagagaagtgaactccttaagcaggagctctgcaggcagctttttaggcagttctgctaccaggattctcctggacctcgcgaggcactgagccgnctccgggagctctgctgtcagtggctgaaagccagagatccataccaaggaacagattctggaactgctggtgctagagcaagtcctgaccatcctgcnaggagatttgcangcctgggtaccctcggnccgctctagaactagtggatcccccggcttgcaggaattcnatatcaagcttatcgattcccgccanctcganggggggccccgggacccaacttttggtnccnttaagtgangggtaaatggccccccttggcgtaaatcatgggcattancttgttcctgngngnaaaatggtattccgntcacaattccacacaaaaataccaaacccgggagccttaaaagggtaaagcctgggggggcctnantgagnggacctaacctnacattnaattggggttgggcttacttgcccgntttccannnngggaaacccngnnnggnccacttgattaaagaattngccaacncccgggg

SEQ ID NO: 2897 - DNA, 892 bp, Homo sapiens
  misc_feature 674, 767, 794, 811, 818, 852, 855, 880, 887: n = A,T,C or G
gccgcgtatacgactactatagggcgaattggagctccccgcggtggcggcccgaggtacgcagggaggaaaaggtcccggagagctgagcagtcaagatgtgtgacttcaccgaagaccagaccgcagagttcaaggaggccttccagctgtttgaccgaacaggtgatggcaagatcctgtacatctggaacggccacgccgtgattgggaagcagccgaaactcacggatgggatacttgagattatcactaaggctgaagagatgctggagaaaggcccagagaacgagtacctgcccgggcggccgctctagaactagtggatcccccgggctgcaggaattcgatatcaagcttatcgataccgtcgacctcgagggggggcccggtacccagcttttgttccctttagtgagggttaattgcgcgcttggcgtaatcatggtcatagctgtttcctgtgtgaaattgttatccgctcacaattccacacaacatacgagccgggagcataaagtgtaaagcctggggtgcctaatgagtgagctaactcacattaattgcgttgcgctcacttgcccgctttccagtcgggaaacctgtcgtgccagctgcattaatgaatcggccaacgccccggggagaggcggtttgcgtattgggcgctcttncgcttcctcgcttcaactgactcgcttgcgcttcgtcgttccgcttgcggcgagcggtattaacttactcaaaaggcggtaattaccggttantccccagaatcagggggataaccccanggaaaaaacattgtganccaaaanggccagccaaaagggccaaggaaccctaaaaaanggnccccgttgctggcgtttttccatangcttcgnccccc

SEQ ID NO: 2898 - DNA, 869 bp, Homo sapiens
  misc_feature 1, 3, 5, 7, 12, 14, 20, 74, 106, 139, 196, 203, 285, 289,355, 422, 505, 534, 547, 564, 577, 605, 621, 623, 630, 659,674, 682, 688, 689, 705, 737, 746, 748, 756, 763, 777, 784,792, 802, 804, 810, 817, 849, 866: n = A,T,C or G
ngncncncgacncnatatangtatagggcgaactggagctccccgcggtggcggccgcccgggcaggtactttntttttttttttttttttttttggggtacccantctggaatcattggtgggacagagttaggaganaaccaaaaaaatttatcttctgggatattgtaggatggctgagatggtggttaggtnaaagttntttccagaatcctgaactggaaccaagttttattttccctcaaaaaagggtgagagaccatattactatattagctaagttntganattcatagatgcttattttaggtcaactaaaatcctaatcaccatttacaacatctctctatgaanaaacatcctccaaatttgaaacaaataacttataaacattttgtgatctaatctgttcataaattanttattgctctgctctggcataataagttaataaaaattcaaagctgacagcaatttttggcataaggggtatctataagtttntgcccctaagtttttctattaaaaaaatntttgagttactancccaactaacctgggangcttaggctgcantgaacccaaaattgcaccccttgccctncaacctggggcaacananccaggancctgtctcaaaaaaaaaaaaaaaaaattntttaaaaacaaggtncccttggnccgctnntaaaactaagtggatncccccgggcctgcaggaattccctttttcaancttttttananccctcgancccccangggggggcccgganccccacnttttgttnccctttaaangnagggtnaattgcncccttgggggaaaaattgggccaaacttgttncttggggaaaaatgttntcc

SEQ ID NO: 2899 - DNA, 867 bp, Homo sapiens
  misc_feature 3, 5, 18, 22, 38, 377, 387, 390, 394, 398, 399, 400, 401,421, 453, 473, 477, 500, 559, 569, 588, 592, 595, 618, 619,621, 637, 651, 663, 664, 667, 679, 697, 729, 733, 734, 740,745, 746, 753, 758, 766, 784, 787, 818, 819, 820, 837: n = A,T,C or G
  misc_feature 839, 847, 848, 851, 853, 858: n = A,T,C or G
tgngngctctactactcnttcntatagggcggaattgnagctccccgcggtggcggactacagagccccgaattaataccaatagaagggcaatgcttttagattaaaatgaaggtgacttaaacagcttaaagtttagtttaaaagttgtaggcgattaaaataatttgaaggcgatcttttaaaaagagattaaaccgaaggtgattaaaagaccttgaaatccatgacgcagggagaattgcgtcatttaaagcctagttaacgcatttactaaacgcagacgaaaatggaaagattaattgggagtggtaggatgaaacaatttggagaagatagaagtttgaaagtggaaaactggaagacagaagtacggnaaaaaaaaancanagtnaaannnnaagtacctcggccgctctanaactagtgggatcccccgggctgcaggaattngatatcaagccttatcgatnccgnccgacctcgagggggggcccggnacccaacttttgttccctttagtgaggggttaattgcgcgctttggccgtaatcatggncataagctgnttcctgtgtggaaattgtnattncgntcacaattccaccaaaacatacnnanccgggagcctaaaggntaaaagcctggggngccctaatgagnngancttaacttacanttaaattgggttgggctnacttgcccgcttttcaagttcgggaaaacctnttgnngcccanctgcnnttaatgnaatcngccccacnccccggggagaggggggnttncgttttgggggtttttttttttaatggggtnnnaaaaaaaagggccccgnanaaaaacgnnagnancctcncccccccct

SEQ ID NO: 2900 - DNA, 850 bp, Homo sapiens
  misc_feature 310, 354, 390, 494, 536, 586, 642, 686, 692, 699, 785, 791,799, 800, 809, 827, 838, 839, 848: n = A,T,C or G
gagcgcgcgtaatcgactcactatagggcgaattggagctccccgcggtggcggcccgaggtacttttttttttttttttttttctctaaagaaaaaacttaatgacctttcaaaatgaataggcccgatttatgataaatgattagttaacaattgaagttttttagtttctttctttcttgggaaacaaaaaatactcacttttattattaagcccataatatttggtagtaatacaaatatttcctagtggctcccattctctagcagcaagtcaaacagccctcaagagaaaagtattaaaattgngctattatgacatagcagataatctggaataaaacaaatccctntaggatcattatatcctaaaagttctttgccccagncttagaacatggcacttttgagcatgctaaaatcatgataaggacatatttctcttctcatttcacaccaataaaggaggaaaaaaagccttgccctataggcncccatcaaaataatctacccacccccaactatgccaggctcntgtctctgggggagttcgggggctcctcacttgcaggaaaggttaagcanagagacccttagttatgacatggagactctagctgaataatgcgggcccactttanggagcttttatactattaaccagtggggctgaaagccatttatntgcttntaagganaaacagcaaaaaaccccaattttaaaaaggattgcaagaaaataaactgcggagtccaacccagggaagccttacttttgaaaagnaaaaantggggaanncaataaaancaatttgggccatccggnaggtaaaaccnnaaaattcantt

SEQ ID NO: 2901 - DNA, 477 bp, Homo sapiens
  misc_feature 305, 328, 332, 386, 399, 400, 401, 408, 409, 411, 413, 414,424, 431, 438, 439, 450, 454, 458, 469, 474, 477: n = A,T,C or G
ccgatcactacttagggcgaattggagctccccgcggtggcggccgaggtacgatctttgctcaccactacctccgcctcctgggttcaagcaattctcctgcctcagcctcccgagtagctaggattacaggtgtgcgccaccatgcccggctagtttttgcatttttagtagagacagggtttcaccaggttggccaggctggtcctgaactcctgacctcaagtgatctgccttgcctgggctttccaaagtgctgggattacaaaatatatgttcgctattgctaggcaaagctgtaaaantttgcagagcgtccaaacattantttnggctcaataaaatatttgctggaatcatatgtaagggaaccccattaaaacaanaatctgctgccannnagtaacnntngnnccggtgccgngatcggnatcttannaactttaggtngggnattnccctcccgggnccttngtn

SEQ ID NO: 2902 - DNA, 529 bp, Homo sapiens
  misc_feature 11, 234, 259, 309, 337, 365, 369, 381, 387, 418, 442, 450,452, 454, 463, 469, 476, 484, 485, 487, 515, 523: n = A,T,C or G
gaatacgactnctatagggcgaattggagctccccgcggtggcggccgcccgggcaggtacgcgggtattttgaggaattacgaaaggtgctagttaaggtggatgaatatcattcagtgcatcagaagctcagtgctgatatggctgatcattctaatttgatccgaagtttgctggtcggagctgaggatgctcgtctgatgagggacatgaaaacaatgaagagtcgtttntatggaactctatgaccttaattangagactttgctaaaatgggatataaaaattcgctgtaacaatcacacagnagcttgttgggaaaacctccaaaagcantttaaattcaagcaaattttcaaaaagnaagncacgggtccgtnttgccnggggtttgggaaaaaaaccccaaaaagtaanccccagtggttggatttcaacttngcctttgntncngggggtaantgccanattttcngaaaagcnntntttaaccattttataaccaaccccttgnttttccanaaaaat

SEQ ID NO: 2903 - DNA, 558 bp, Homo sapiens
  misc_feature 327, 337, 340, 356, 362, 363, 374, 375, 398, 406, 410, 414,454, 460, 467, 473, 476, 482, 485, 508, 538, 542, 544, 549,558: n = A,T,C or G
gtgccctatacactacttagggcgaattggagctccccgcggtggcggccgaggtacaatgaggaccatcctaccagtggggccacgtctcaacggtttatccttcactcatttttctgcacgtcatcctgaggtaaaccaattttaaatgtgtttgttttcagtaaaccagctatgacaatttatactaaacaaattgaactagaacccatttgaataggttttgaatttgttttttcattttttcatttttaatacaaaaggccctgacttggtgctcaatccgtcaaagcctgcaatgcattgaaaaaaaacttggcccaggcnccaccccgcngtnacccttgcccccgggnccgggnncgcttcttaannaaactaaggtgggggattccccncctcgggngtcntgcnaaggggaaatttccggaattattcaaaggcttttaattcnggattnaccccgntcccgnatnccttcnaanggggggggggggcccccgggtanccccaagcctttttttggtttccccttttnaaantnggaangggggttan

SEQ ID NO: 2904 - DNA, 528 bp, Homo sapiens
  misc_feature 1, 2, 3, 4, 5, 6, 342, 375, 391, 403, 404, 415, 426, 431,467, 469, 480, 498, 500, 514, 517, 521, 527, 528: n = A,T,C or G
nnnnnnaggccctaacactacttagggcgaattggagctcaccgcggtggcggccagcaaaaggccaggaaccgtaaaaaggccgcgttgctggcgtttttccataggctccgcccccctgacgagcatcacaaaaatcgacgctcaagtcagaggtggcgaaacccgacaggactataaagataccaggcgtttccccctggaagctccctcgtgcgctctcctgttccgaccctgccgcttaccggatacctgtccgcctttctcccttccgggaagcgtggcgctttcttcatagcttcaccgctgtaggtatctcagttcgggtgtagggtcgtttcngctccaagctggggcttgtggtggcactaaaanccccccccgtttcaantcccggacccgnntgcgccctttnattaccgggtnaaccntattccgttcttttggaagttccccaaaccccgggntntaaggaacaancggaaccttttaatttcngntccaccttggggcnagngctnatcccnn

SEQ ID NO: 2905 - DNA, 576 bp, Homo sapiens
  misc_feature 6, 120, 124, 155, 218, 227, 253, 308, 314, 354, 359, 388,393, 402, 405, 406, 408, 426, 434, 437, 441, 443, 453, 454,472, 487, 493, 495, 501, 509, 515, 516, 523, 525, 538, 539,543, 548, 553, 555, 561, 567, 575, 576: n = A,T,C or G
ggcccnatcactacttagggcgaattggagctccccgcggtggcggccgcccgggcaggtactttttttttttttttttttttttttttggtttgttttgtttttgtttttgttttgcancccnaggagttttagccaattcaaatgccttgctncccacaatttggaacattcctttggatttgaccaagtcaggaagagatgggagaaaagtgaancaacaaatnaaacccccaaacataaaacaaaaaangagtttaagcaaaaaccaaaccaaattgcacaaatttcattattgattaaacctngaagtngtttctaaattgggtaaaggggagggaaattttaaaaaangccangccttgggttgggggttaaaattcctttnaaaantttttttangtnncntttaaaaacaaaaaaaanttttttanaangaancnaaaaaacctnntaaaatttttcaagcctnaccttttaccccttnggaaanantaaaanggggcttnaaaaannttggggntngaaattcaatttnnttcnttggncccantncttttngaaaanccttgggnn

SEQ ID NO: 2906 - DNA, 900 bp, Homo sapiens
  misc_feature 3, 419, 426, 474, 531, 543, 551, 554, 587, 597, 608, 635,674, 707, 725, 737, 738, 750, 762, 817, 832, 857, 858, 860,862, 873, 887, 888, 889, 895: n = A,T,C or G
ggncgccgtatcgactcactatagggcgaattggagctccccgcggtggcggccgaggtacactttcactgagtccaaaattaggagcaaaaatacaaaggttcacattggtcttaggtaggatacaggcgaaaaaggattgagctgtttagctcagaaacaacaaaaacaaagtttctaaagcaccctaaattatataaaaatcaagaccatggacggattgaaactggtattctggtgaaatactttactattttgtaaaaagttttacaaaaaattacaaattaaaagtatcaaccctctgagttcaaagcagcattttgaaaatgaactggtagttaatcctgtaccacccttagagttgtaagtgggaccttgggaataggggatggatgggttccccctggctgaaattcttngaaaccnttctaacttcctggcctgtccccttccccgtaagcacttgtctttggnaataactggtcctttgtaagagtggtgaccggtaaaaatgaatttaaacccgcgttncctgcccgggcnggccgttntanaactagtggatcccccggcttgcaggaattcgnttttcaagcntatcgattccngccgaacctcgaggggggggcccggancccagcttttggttcccttaagggagggtaattgccccncttggcgtaatcatggccatagctgtttcctgngggaaaattggttttccnttaccaatttcnncccaacattacnagccgggagccntaaagttgtaaagcctgggggggcctaatgagggaacttaacctacattaattgnggtgcccttacttgncccttttccagcgggaaacctgtcnngncnacttgctttantgaatcggccaccnnncggggngggcg

SEQ ID NO: 2907 - DNA, 880 bp, Homo sapiens
  misc_feature 2, 4, 57, 280, 334, 384, 396, 400, 443, 481, 486, 518, 526,531, 538, 567, 584, 613, 624, 629, 636, 667, 669, 672, 673,676, 691, 701, 729, 730, 734, 744, 751, 762, 773, 774, 779,786, 809, 814, 817, 833, 837, 840, 842, 850, 856, 857: n = A,T,C or G
  misc_feature 859: n = A,T,C or G
tntncgactcactatagggcgaattgggagctcccccgcggtgggcggccgcccggncaggtacttcctgtaattgacagccttgccttgttcctcatggcatcattcaaggtcatcttaaatgagagaggagggaaagaaagaaaaagaaatcatacgttatggttttcaaatgcatccagaggaaaggcagggttgtttttgaaaagtttacttctatctgaaagcttctagcaaatgaaagcaaacagtgcaaagctgaactacaaataataaagcncaattattggcaggaatcttgtcccattcacccaactactgtgccatttaagangaaaatagaccgtgggctggaggttagtcaccaacttgggaacatggaanacgtcaccatcntacnggatgatccattggcccccttccttttttaaagagcttaaggncgcaccaagaaagcttaaccggcccttaaaaagtttgnattanaagcctcggtcctaccccctaaattttaaccnttcgatgncatanccgttgnaaccttccttataagtgcaaaatctttgnaattttgcgaggaaaangggtaatattttggggcattcttttgccncctttatttgnttcgncctcggncccttgccttgtacccgaactcattcaaagncnccnngcnttgccaacccaaggnccccgacaangggttttaaaatcttccaccaccgttgnnttanactgggggcnctgggcnttttccttaanaatttttttgnnaaaanggttttntggaaggccaacttggggaatanaaaanaancgcatgggccctttcntttnttncngggaccancctatnncnccaaaatgcttttgattttgg

SEQ ID NO: 2908 - DNA, 904 bp, Homo sapiens
  misc_feature 3, 4, 9, 10, 11, 15, 16, 609, 612, 620, 633, 721, 758, 767,780, 791, 850, 852, 855, 874, 881, 897, 900, 903: n = A,T,C or G
ggnnccgtnnncganncgtatacgactactatagggcgaattggagctccaccgcggtggcggcccgaggtacctacgagggtgagaacacagtgctctacctgcaggtggccaggttcctggtgaagagctacctgcagactcagatgtcccctggctccacgccacagagatctctctctccatctgtcgcatatctcaccgcacctgacctggccaggtgtccagcccagagggcagccgacttcctctgcccggagctctacaccacggcctgggcacatgtggcagtaaggctcataaaggactcagtgcagcatttacagaccctgacgcaatccggagctgaccagcacgaggcttggaaccaggccactgtcatacacctccaggctgctaaggtgcactgctactatgtcactgtgaagggttttacagaagctctggagaaactagaaaatgaaccagcgattcaacaggtgctcaagcgcctctgtgacctccatgccatacatggaatcttgactaactcgggtgactttcttcatgacgcctttctgtctggtgcccaagtggacattggcaagaacagcctacctggacctgctncgnctgatccngaaggatgccatnctggtaactgatgcttttgacttcaccgatcaatggttaaattcagcacttggcttgttatgatggaaacctctaccaacgcctgttncagtgggcttaagaagtcaccaaccaatcttaagganaacccctgncttttgaggaatntttaagacccnttttacaaaagttggagaatccaaccttttgaaataaccaacagttttcaagaaacaancngcnccatcattgtgaatatggnaccttgncccgggcgggccgttntanaant

SEQ ID NO: 2909 - DNA, 865 bp, Homo sapiens
  misc_feature 567, 617, 622, 679, 760, 772, 810, 815, 837, 840: n = A,T,C or G
cgccgtatacgactactatagggcgaattggagctccaccgcggtggcggcccgaggtacgcggggatccagaatacatttccaacaagagcactggccaagtcagcttcttctgagagagtctctagaagacatgatgctacactcagctttgggtctctgcctcttactcgtcacagtttcttcaaccttgccattgcaataaaaaaggaaaagaggcctcctcagacactctcaagaggatggggagatgacatcacttgggtacctgcccgggcggccgctctagaactagtggatcccccgggctgcaggaattcgatatcaagcttatcgataccgtcgacctcgagggggggcccggtacccagcttttgttccctttagtgagggttaattgcgcgcttggcgtaatcatggtcatagctgtttcctgtgtgaaattgttatccgctcacaattccacacaacatacgagccgggagcataaagtgtaaagcctggggtgcctaatgagtgagctaactcacattaattgcgttgcgctcactgcccgctttccagtcnggaaacctgtcgtgccactgcattaatgaatcggccaaccgccgggagangcggnttgcgtattggggcgctctttcgctttcttgcttaattgacttgcttgcgcttcggnccttccggttgcggcgaaccggattcaacttacttcaaaggcgggaattacgggtattccccagaaatcaggggataaccncaggaaaaaaanttgtgaaccaaaaggccaccaaaaggcccggaacccgnaaaanggcccgttggttggggtttttncanaggctccgccccctgacaagattat

SEQ ID NO: 2910 - DNA, 873 bp, Homo sapiens
  misc_feature 2, 65, 88, 93, 96, 143, 180, 189, 190, 191, 193, 195, 196,197, 204, 206, 208, 214, 217, 218, 219, 220, 222, 229, 230,240, 246, 250, 251, 252, 253, 258, 260, 261, 263, 265, 268,274, 278, 279, 281, 288, 289, 295, 296, 304, 306, 307: n = A,T,C or G
  misc_feature 308, 312, 320, 321, 324, 326, 328, 329, 333, 343, 348, 354,360, 368, 371, 372, 374, 376, 379, 380, 383, 384, 386, 408,413, 414, 438, 439, 440, 441, 442, 446, 456, 457, 475, 485,490, 496, 498, 499, 506, 507, 511, 524, 528, 530, 534: n = A,T,C or G
  misc_feature 535, 539, 540, 542, 543, 544, 555, 557, 559, 564, 568, 570,571, 575, 576, 580, 587, 589, 596, 597, 599, 603, 614, 619,622, 624, 628, 638, 652, 657, 672, 674, 679, 689, 705, 706,714, 727, 734, 735, 741, 754, 755, 759, 767, 768, 770: n = A,T,C or G
  misc_feature 771, 772, 776, 792, 795, 797, 798, 799, 813, 830, 835, 837,838, 848, 849, 852, 858, 863, 868, 872: n = A,T,C or G
angacccgtaatcgactactatagggcgaattggagctccccgcggtggcggccgaggtactttnttttttttttttttttttttttnttaantanttttttttttttttttttttttttttttttttttttttttttttttnttttttttttttttttttttttttttttttttttttnggggggggnnnangnnnctttttntngnaaaacnccnnnncnaaaaaannaaatttaaanaaaaancctnnnnggggnannangnacnaaaaanttgnnanaaaaacnnccgggnnaaaaaacncnnngggnaagggggnnccnancnntttnctccccgggnttttnaaaaantaagancccccccnggnngngnaannccnntnacaactttttaaacccccccanccctnnggggggccccccccccattttttnnnnntttntgggggggtnntttcccccctggaaaaantaaagggccnaatgntttccngnngaaaaannattnacggtaaaaaatngcananaaannaagnncnnngacaaaaaatnananaaccngggngnncccnnaggnggccccncnccaaatnnangggncgccccctctnccccnttncnaaangaaaacactnaggccccttttttnttaanaaacccccccccccngnggganggcgtttttntttttgggcctttttnncctttttnctaaaaaaaatcntaaagcnngggggnttggggggggggnngggntttttttnntnnnaagnggggtaattttttttnccncnnntttgggggcccccncgaaaaaaattttgggntaaangnncccaaaaagnnccnaccccnaaaangccgntttnt

SEQ ID NO: 2911 - DNA, 881 bp, Homo sapiens
  misc_feature 507, 569, 655, 713, 716, 724, 729, 734, 755, 776, 795, 797,804, 811, 814, 821, 825, 850, 861, 863, 868: n = A,T,C or G
agcgcgtatacgactcactatagggcgaattggagctccccgcggtggcggcccgaggtacttttttttttttttttttttttttgggcagctaaaatctaggatggtgttaagtttcttcattttgtcaattatatataaaaaattagaaacaacatgaatctgcatttcttggatgagatagtaataacaaactatttctcaatatttgtatactaaaaactagtgaaggtgttatgtgtttcagtatcttatctcttatttgaacatgggtttctgaaaggagcctatataataatataaatggtatgtaagtaaatgaggcactgtcttggctgggactgctataaaaaaattaccatagaccattgactaaaccacaaacatatacttctcacagttctggaagttggaaagccaagatgaggatgccagtatggctagcttctagtgaggggtcctcttgcaggttgcagacagccggcttcttggctcctcacatggcangaaagaaaggtgcccaaagctctctggcctcttcttacaagggcattaattaccttctgaangctccacccccaaacaccatcaccattgctgaccttccattaaacttccttggcaatttttaaagcccgcgtacctgccccgggcnggccggtcgaaattggggcgctttttcgctttctcgcttcacttgactcctgggctcnggncgttcggnttggngggangcgggattaactcactcaaanggggggaaaaccggtattccncaaaaaccaggggataacncnaggaaanaacatgntgnccaaaangccnccaaagggcccggaaccctaaaaanggcccggttgntnggggnttttccaataggc

SEQ ID NO: 2912 - DNA, 857 bp, Homo sapiens
  misc_feature 1, 5, 8, 517, 527, 557, 624, 629, 641, 696, 711, 714, 737,739, 764, 808, 816, 817, 838: n = A,T,C or G
ntccnatntactactatagggcgaattggagctccccgcggtggcggccgaggtacgcgggcaagtgaacatgcctgcagattcatttgaatctccattgacgctagctgcctgtggaggacatgttgaattggcagctctacttattgaaaggggagcaaatcttgaagaagttaatgatgaaggatacactcccttgatggaagctgcccgggaaggacatgaagaaatggtggcactactcttagcacaaggagcaaatataaatgcccagacagaagaaactcaagaaactgctcttactttggcttgctgtggaggattttctgaagttgcagactttcttattaaggcaggggctgatatagaacttggctgctccacacctctgatggaggcatctcaggagggacacctggaattggttaaatatttgctggcttctggcgctaatgtgcatgctacaacagcaacaggagacacagccttaacctatgcttgtgaaaatggacatacngatgttgcanatgttttacttcaagcaggggctgatttanaacatgaatctgaaggtggaagaacacctttgatgaaagctgcaagagctggtcatttgtgcactgngcagnttcttattagcnaaggtgccaatgttaacagggctacagcccaataatgaatcatacagtagtggcncttgccttggtgcangangcccctggcaattgttgagcttntnttggttaatggggctgaccctactnatcgactcaaggatggtcaacaatgctcaattgaagctgcaaanggggggcnnactaaaggaggttcttaattngtgggattatccaaaaatg

SEQ ID NO: 2913 - DNA, 921 bp, Homo sapiens
  misc_feature 5, 9, 10, 528, 558, 592, 595, 600, 673, 682, 704, 707, 718,734, 746, 749, 755, 768, 775, 780, 781, 782, 787, 793, 804,826, 838, 853, 855, 863, 881, 883, 888, 904, 908, 914, 918: n = A,T,C or G
atacncctnngcgcgtaatacgactcactatagggcgaattggagctccccgcggtggcggcccgaggtacattgtaggatgcttaccagatcctgcccactagaggccaatagcacctcatcatcatagcaccccttccctcagtgataataaaaaatgtctccagacattgtttaagttaataaatgtgcccagagcccaggcacagtggctcaggcctgtgattttagctctttgggagaccgaggtgggtggatcacttgaggccaggagttcctagaacgttcctctgtcaaaagacaaaattacaacaatttaaaatctaatttggctgttattggccattctagaattggttgacatctcattctatgaaatacaatgagtgctcttcaataagctgagcagaggggggttagctttattggcagaaaagggctaaagaaaacagaaaaaagaacaaaaagtgatttggttgtttcagaagttacttttccttaaagaggtaaagccaagaggaccccccnttatcatcctggctcaaggtaaccgggggngttacttccacatcaagccctcatttttacaacnggnaaggnaggttgctaatttaaaccaagaaattcaatgggcccaataaaaaataattttatgattgccttttaaggggtnaaatggcanttttctttaataggtggaattnatnaataaaaaaangggaattttaattttnttttttttgganggntggttntggggcattggtnaatcaanggaannntcaangggttngaccttgcccnggccgggccgttttagaacttnggggatcccccnggctggaagggaatntnaattcaanctttattgaataccggcnanctttnagggggggccccgganccancttttngttnctt

SEQ ID NO: 2914 - DNA, 869 bp, Homo sapiens
  misc_feature 3, 4, 6, 634, 661, 670, 724, 736, 737, 740, 749, 773, 783,796, 798, 804, 826, 832, 846, 847: n = A,T,C or G
agnncngacgcgcgtaatacgactcactatagggcgaattggagctccacccgcggtggcggcccgcccgggcaggtaccaactaacctcccgctctttatctccccaaccttcccactccccagcctctagtaaccattattctcctctacctgtgagttgattttgacctcccacataagagaatgtggcaagtatttgtttttctgtgcctgggttatttcatttaacatactgtcctctggttccatccttgttgttgcaaacgacaggattttgttcttttttatgactgaataatattccatagccatatacataccatgttttctgtatccattcattcgttgattggcagtaaggttgattccatatcttggctgttgtgaatattactgcagtaaacataggaatacagatatcttttccatatactgatttcctttgttttggatatatacccagcaagtgggcttgctggatcatatggcagctctgattttaggtttttaaggatgggtttttttttgcaatgagaataaaaattttccatgtataagatcaagtgtctttgaactttggttatatcctttgcccatttttctattgaggtcttttttcttttttgagacangggttattgcccagctaaaaggcaagnggcatgaanacaagcttactgcgggtttgaacttcccgggctcaaggggccctccatggcaancctctttaatannctnggactaaangccccatgacatcaagcccgggtnaattcttggntaatttggggggnanggagtnttcctattttgcccggccgggntccagncctggcaaaaaggnnttttgcctgacttcccaaaggg

SEQ ID NO: 2915 - DNA, 1061 bp, Homo sapiens
  misc_feature 8, 11, 12, 15, 17, 21, 22, 23, 24, 25, 28, 30, 31, 35, 36,39, 40, 41, 47, 48, 49, 50, 51, 59, 60, 64, 65, 68, 69,70, 71, 72, 73, 74, 75, 76, 77, 78, 84, 90, 373, 380, 495,502, 581, 606, 616, 639, 704, 727, 767, 770, 776, 785, 787: n = A,T,C or G
  misc_feature 828, 837, 844, 861, 862, 873, 874, 878, 879, 880, 882, 884,887, 891, 893, 894, 900, 905, 906, 907, 930, 934, 942, 944,948, 951, 956, 961, 972, 974, 987, 995, 996, 999, 1002,1008, 1014, 1022, 1023, 1042, 1049, 1052, 1056, 1057: n = A,T,C or G
ttcaatanttnnatntntatnnnnnctnanntatnnttnnncaaatnnnnnttatttanntttnnttnnnnnnnnnnnggggancgctcntatagggcgattggactccccgcggtggcggccgccgggcaggtacgcgggtctatataaatccaagacaagcaacaaacccttgatgattattcatcacttggatgagtgcccacacagtcaagctttaaagaaagtgtttgctgaaaataaagaaatccagaaattggcagagcagtttgtcctcctcaatctggtttatgaaacaactgacaaacacctttctcctgatggccagtatgtccccaggattatgtttgttgacccatctctgacagtttanagccgantatcactggaagatattcaaaatcgtctctatgcttacgaacctgcagatacaagctttggtgctttgacaaccatgaagaaagctcttcaagtttgcttgaaagactggaattngtaaagnaaaaaaaaaatcttccaaagcccctttttgtctggccaggccctttgaggacctttggaaaacccaagaaagaaagtgntgaagaaagactggcttaggtggtnggaaaccatnagtggaaccaccacctggatttngggttattgggtttaaatggttccaacaaacttttttttttaaggaaaaaacaaaggttttaagnaaaaattttggggtttaaaggtngtacattggtggtgaaaaaccaaatatttgttgttccttnccntttggngaggccccngnaatttttcttaaaaaaaaaaaaaaaaataaaattggttttnggggggggnttttggnttttttccaaaaaatanntcaaatacccnnaaannntntnatnttangnngatctnttggnnntatttataaaagtgtccctgggncccntatataananaggnggnatccncccgngtttaaggaancnccgatctcaccgngggggggnnccngcncccccnaagtgnggggcccnntacccgcgcactttttccnctctttnggnggcnncccc

SEQ ID NO: 2916 - DNA, 875 bp, Homo sapiens
  misc_feature 1, 6, 11, 12, 18, 608, 675, 730, 794, 817, 833, 836, 846,855, 869: n = A,T,C or G
ntcgcnatatnntatacnactcactatagggcgaattggagctccccgcggtggcggcccgaggtactggaaagatgaactgatcatatggagatgtcagccttgtaaatcgaaaataaaattctaagccccccagtcaactgaacagactttccttttggccaaagagatcccccaaaacctgaaaataaactagttcaggaaggcagggggcaggggcggttggacatgtctcattacaccctcttccctctggaggttagacaaaattgactagtgttaacattaaaatagagatcttaaggactgacaaaacagactctgtagcaataagacaccaaattccaacctgattctagtgtaacatcacatgacagatagtgggtcctaaaggaaatcaaagtattttgctccaaaatatacttccctgacatattttgaaatgggcctgaaaagctatctcttgcgggggaagttatattctatagagactctccttcccctacgaggtcttttcaggagattttgacatcttttaactctaataagaaacatgcacatctattctctctgaactctgctacttggaggcttcatctacatgacangaaccttggttttcacaactcgacctctcttaccttaccttaactcaagctgactcaactttttcanggaagagcttaattctttcaacccattgcccaatcaaggaaaatcttttggactncacctattgaccttggaagccccacacttttacccggctttggagaatgtcccaaccttttcanggccaacccaccataataccctnacatatattggattantgnctttgcctgnaacttctgncttcctaaaaggantccaaa

SEQ ID NO: 2917 - DNA, 891 bp, Homo sapiens
  misc_feature 455, 497, 499, 510, 521, 532, 536, 557, 595, 605, 612, 641,646, 658, 684, 689, 738, 757, 772, 774, 825, 834, 836, 839,849, 850, 855, 865, 869: n = A,T,C or G
gcgcgtatcactactatagggcgaattggagctccaccgcggtggcggcccgaggtacttaactagggttaagcccgaggtcaggaggggtggatgccttattatgggattaagtgcccttctaagagggacagtagagggcttgttcatgctctctctctccatgcacaagaaagagcacacagtgagaaggaaagaggccctcaccagaacctgaccatgctggcacccgtgattgcagacttccagccttcaggattgtgagaaagataaatatctgtgggttaaagtcaccaagtctgtggtgtggtttatggcacacaagggaacccagaatatgcttttcaccactgggtgggccagcctttcatggaaactgtcagcttcttagcccttgcaaaaaaatgcttgctggtcactctctttggtccttttaaaagccctttcttagtggngcctctaccaagccccttgacttcatccttttcttgtcccangnaagggtgagtnaaggaccttgncccggccggcngctntagaactagtgggatcccccnggcttgcaggaattccatatcaagcttatcgataccgnccaccttaanggggggncccggaccccaacttttggtcccttttantggangggtaaattgcnccccttggcgtaaacatgggccatancttgnttcctggggggaaaatggtattcccttaaaaattccccacaacataccnaacccgggagcattaaagngtaaaacctgggggngncctatgaggggagcttaacctcacattaaattgcggtgccctccttggccncttttcaancnggnaaacctttcnnggccncttgaataangaancggccaacccccggggaaaggg

SEQ ID NO: 2918 - DNA, 902 bp, Homo sapiens
  misc_feature 481, 547, 660, 694, 695, 712, 731, 732, 780, 835, 844, 854,866, 869, 885, 887, 889: n = A,T,C or G
gacgcgcgtatacgactactatagggcgaattggagctccaccgcggtggcggccgaggtactgccagaaaaacactgagagaaaaacactgaaattgaaaaacactttcaatttatttgaaagataactttcaaagaaattttcataactcaaatgtgtttcttttttccagagaagtatatcagagaattccctggtagcaatggacttctcaggccagaaaagcagagttatagaaaatcccactgaagccctttcagttgcggttgaagaaggactcgcttggaggaaaaaaggatgtttacgcctgggcactcacggtagccccactgcctcttcacagagctctgccacaaacatggctatccaccggtcccagccatggtttcaccacaaaattttctagagatgaggctcagcgattgattattcagcaaggacttgtggatggagttttcttggtacctgcccgggcggccngctcgacctgccataacccaaataccaaacgcccctcttcgtctgatccgtcctaatcaccacagncctacttctcctatctctcccagtcctagctgctggcttcactatacctactaaacagaccgtaaccttcaaccccaccttttttcgaccccgccgggaggaagagaccccanttctatacccaacacctattctgatttttcggcnnccctgaaagtttatatnctttatcctacccggcttnnggaaaaatcctcccatatttgtaaccttactacttcccggaaaaaaanacccatttggatccataggaattggcctgggctttgatatcaattggcttcctanggttatcgngtgagccccnccttatttttcnggnggaattgacttagacncncnagcctattttact

SEQ ID NO: 2919 - DNA, 875 bp, Homo sapiens
  misc_feature 522, 529, 566, 599, 612, 621, 633, 652, 672, 708, 762, 774,779, 782, 790, 834, 836, 838, 848, 849, 859, 871: n = A,T,C or G
gtaatacgactcactataggggcgaattggagctccccgcggtggccggccgcccgggcaggtacgcgggtggatttgaaggagttcgacttggatgccctgttgggtatagatgacctggaaaccatgccagatgaccttctgaccacgttggatgacacttgtgatctctttgccccctagtccaggagactaataagcagccccccagacggtgaacccaattggccatctcccagaaagtttaacaaaacccgaccaggttgcccccttcaccttcttacaacctcttcccctttccccaggggtcctgtcctccactccagatcattcctttagtttagagctgggcagtgaaagtggatatcactgaaggagataggaagccagactacactgcttacgttgccatgatccctcagtgcataaaggaggaagacaccccttcagataatgatagtggcatctgtatgagcccagagtcctatcttggggtcttctcagcacagccccttttaccanggggctnttcaaataggagccttccattttcaggtgttctctgngggtctgccccgtcccaaacctttacgatcctnctggaaagaagantggtagcanccaaaagtaaangggtgagaaactggataangaagctgaaaaaaatgggancaaaaacaagacagcagccactagggaccctcggcngttctaaaactagtgggatcccccgggctgcaggaattcgatattaagctttantcgaataccgcnaactncangggggggnccgggaccccaacttttggtccctttaagggagggttaattgcncncnttggcgtaannatgggcatangctgttcttggnggaa

SEQ ID NO: 2920 - DNA, 405 bp, Homo sapiens
  misc_feature 12, 37, 93: n = A,T,C or G
gagcttttcgtnataccactcactataggtttgaatnggagctccaccgcggtggcggccgcccgggcaggtacttttttttttttttttttntgctgtctctctctctctctttttgacagggaaaacagctatcaggtttctggaacattcttgaatagctaattcctggagtccttgtcctcacttcttctcctctgtacctcactggcatttgctccaagatctccttttcaaacaacgtcctggcactgagctgagatttccaaatgttaactccctggcatccatcctgtaggtgcagaaaggattcttccctgatttgcacacaaaccttttcatttcgatgcatatcagggtcatctcggctttgtgccttgcctacaaggtggtttggaggccatg

SEQ ID NO: 2921 - DNA, 393 bp, Homo sapiens
gcgtaataccgactcactatagggcgaattggagctccaccgcggtggcggccgaggtactttttttttttttttttttttttcttggctggaggcggctgttgctgcgtaggcactatgataggtgctgactgatacaccggctgacttgggtaaaaaggcgttccttgcttctggtcgctagctgcagtgacaggggtgctggcagcaagatgagcgctctccacagtcccataaaccacagggctgtgctcggggacctggctgggcagctgaggaggagtaggtgtggacgtgggtcttcctatgggtggagtaggatttctgctgccacctccagacataatctcctctgttatgtctttacctccctggtttggatcccgaattctt

SEQ ID NO: 2922 - DNA, 411 bp, Homo sapiens
  misc_feature 44, 147, 168, 186, 200, 241, 248, 271, 306, 315, 331, 339,362, 366, 376: n = A,T,C or G
actactatagggcgaattggagctccaccgcggtggcggccgangtacgcgggggaggtgagtccggtcccttttgcatccctaccccgacactgcgggttgtcacaacggcaccctcccgctttctctctgcctcggatttagtcngtgactgtgtgtctccgccgnggtgcagcttcaggcctntcccgcatctactntctcacgcttccgctgcggcctgagggagggcggcgggcangaccacngaccggggttggcataccgtatnaaggacagtaactaccatggctcccgaagttttgncaaaacctnggatgcgtgggccttntggcccangcagtctgcgaaatcatattggnctgnagcatttcangctatccctggggggttgcaagctttgtataaagt

SEQ ID NO: 2923 - DNA, 418 bp, Homo sapiens
  misc_feature 3, 68, 71, 130, 133, 174, 184, 203, 220, 227, 274, 295, 386: n = A,T,C or G
gcnccccgtaatacgactcactatagggcgaattggagctccaccgcggtggcggccgaggtactttnttnttttttttttttttttttggtaacagatctaatcttccacgtaagcctctttactgganaanagtagatgggagggcaggtgggatctatttagacaaatccnatatattcanaatgattcagtaggcaaanaattcctcctggtaacnaatctgngtgtcaaggtccttaccttggctctcactgtcctcaggattatggangggaagatgatgcagaattcngcacatgtcttctggatcatgggggactttgctgagtgtgcctgccatggtcccgatctctgattgataggagtgactgctgatatcctgnatctgaccactgagatatcccgcgtacctgcc

SEQ ID NO: 2924 - DNA, 421 bp, Homo sapiens
gagcgcgcgtaataccgactcactatagggcgaattggagctccaccgcggtggccggccgcccgggcaggtacgcggggggtggagggaacgtctgacaaaattcaatgtttggagaaagcgacatctggaaagttcgaacagtcagcagaagaaacacctagggaaattacgagtcctgcaaaagaaacatctgagaaatttacgtggccagcaaaaggaagacctaggaagatcgcatgggagaaaaaagaagacacacctagggaaattatgagtcccgcaaaagaaacatctgagaaatttacgtgggcagcaaaaggaagacctaggaagatcgcattgggagaaaaaagaacccctgtaaagactggatgcgtggcaagagtaacatctaataaaactaaagttttggaaaaag

SEQ ID NO: 2925 - DNA, 414 bp, Homo sapiens
  misc_feature 5: n = A,T,C or G
gagcnccccgtaataccgactcactatagggcgaattggagctccaccgcggtggcggccgcccgggcaggtacctgttggctttctgcagagatgcttacttttcctctcctatcagagtttaatgtcctgggactctgacattttggtaagtgttttcttaacccgcagggctgtcagccttgatgcaggattgtgagcccagcattctgtcatgagttttcccatctgccttagacactcatcactgctccaccggtttgggaatgaggggcgtaacttcttgatgcacacaatctccctcatgtcctcataagaggggtcactgggcactaggtcatgataaggaagctggtattcttccactatacctcctgatacacatctcctagcaacctcccaaaggatgaggcc

SEQ ID NO: 2926 - DNA, 421 bp, Homo sapiens
  misc_feature 5: n = A,T,C or G
gagcnccccgtaataccgactcactatagggccgaattggagctccaccgcggtggcggccgcccgggcaggtacgcggggtggtggctgtgctggtggcgttcaagatgtcgaccaagaatttccgagtcagtgacggggactggatttgccctgacaaaaaatgtggaaatgtaaactttgctagaagaaccagcttgtaatcgatgtggtcgggagaaaacaactgaggccaagatgatgaaagctgggggcactgaaataggaaagacacttgcagaaaagagccgaggcctatttagtgctaatgactggcaatgtaaaacttgcagcaatgtgaattgggccagaagatcagagtgtaatatgtgtaatactccaaagtatgctaaattagaagaaagaacaggatatggtggtg

SEQ ID NO: 2927 - DNA, 469 bp, Homo sapiens
  misc_feature 4, 6, 9, 10, 11, 16, 17, 21, 25, 26, 32, 33, 35, 37, 41,43, 47, 48, 55, 63, 149, 181, 273, 278, 307, 350, 381, 407,414, 421, 424, 429, 434, 448: n = A,T,C or G
ttancnctnnntatanntttnccanncattcnnantnctcncnttcnncttactntaggcganttggagctccaccgcggtggcgggccgcccgggcaggtacttaactagggttagcccgaggtcaggagggtggatgccttattatngggattagtgcccttctaagagggacagtaanagggcttgttcatgctctttctctccatgcacaagaaagagcacacagtgagaaggaaagaggccctcaccaaaaccttgaccatgctggcnccgtnattgcagacttccagcctccagggattgngagaagataaatatctgtggtttaagtcaccaagtctgtggtntgtttttatggcaagcacaaggtaaccccanatgatgctttttcacccacttgggtnggtccanccctttnatnggaanctgtnaacttcctcaatcncttggcaaaaaaatgcttgct

SEQ ID NO: 2928 - DNA, 421 bp, Homo sapiens
  misc_feature 161, 164, 165, 174, 180, 181, 182, 186, 188, 190, 191, 192,193, 194, 195, 196, 197, 198, 199, 200, 201, 202, 203, 204,205, 235, 236, 238, 239, 243, 247, 253, 254, 265, 266, 276,296, 297, 298, 301, 302, 311, 312, 322, 324, 325, 335: n = A,T,C or G
  misc_feature 336, 337, 341, 367, 370, 374, 377, 382, 390, 391, 394, 405,408, 415, 418: n = A,T,C or G
gagcgcgccgtaataccgactcactatagggcgatttggagctccaccgcggtggcggccgaggtactttttttttttttttttttttttctttttttttctttttttttttttttttttttttttttttttttttttttttttttttttttttttttttnttnntttaaaaantttttnnntttntntnnnnnnnnnnnnnnnnaaaaaaaaaaaaaaaaacaccccggggggnnanngggncccntttttnnaaaaaaaaccnnccccaaaaanaaaattttaaaaaaaacccnnnccnnaaaaaaaannaaaaaaaaancnnaaaaaaaacnnncctnaaaaaaaaaaaaagggggaagggggnccnaaanccnttaancccccggnnttnaaaaaaaaaanaanccccccnggngaa

SEQ ID NO: 2929 - DNA, 424 bp, Homo sapiens
  misc_feature 149, 160, 166, 167, 169, 171, 175, 181, 182, 189, 190, 192,197, 199, 205, 206, 208, 236, 240, 242, 252, 255, 267, 277,278, 289, 293, 294, 295, 296, 298, 299, 307, 308, 309, 310,312, 322, 329, 345, 352, 357, 374, 380, 381, 388, 390: n = A,T,C or G
  misc_feature 392, 393, 412, 421, 423, 424: n = A,T,C or G
gagcgcgcgtaataccgacctcactatagggcgatttggagctccaccgcggtggcggccgcccgggcaggtactttttttttttttttttttttaatttttttttttttttttttttttttttttttttttttttttttttttttttnttttttttttnttttanntntntatnttttannttttaannanaaaangnaaaaanntnaaaaaaaaaaaaaaaaattttttaaacncaanantttttttttnaanaaaaaaaaaaanaaaaaaaaanncaaaaaattcntttnnnntnnaaaaaaannnnanaaaaaaaatnttttttnttttttaaaaaaaaanttttctnaaaancttaaaaaaaaaaaaancccccnntcttttntntnnaaaaaaaaaaattttttanaaaaaaaancnn

SEQ ID NO: 2930 - DNA, 409 bp, Homo sapiens
  misc_feature 5: n = A,T,C or G
gagcnccgcgtaatacgactcactatagggcgaattggagctccaccgcggtggcggccgcccgggcaggtacaaccagcaacaaaaaaactcacaaattctaatgtctggccctcagaacatccttcagactaattttagagattcttaaaaattcaaaaaagtaatgcaatgcccaaaacaaaacaaatatatatggaaggaaaaggaggggggaagcaacactgtatcatgtaccagcatccccagcgtctggcattccatgtttctgctcctgtggtctccacggtgcaacaagctagcggtttacttggacctctgcctcatctttcttcttttgcgcttcagcctgcgcatttcgctttcttcctccactttggctctcatgggcgcagaggtttccaaaaaa

SEQ ID NO: 2931 - DNA, 420 bp, Homo sapiens
  misc_feature 5: n = A,T,C or G
gagcnccccgtaataccgactcactatagggcgaattggagctccaccgcggtggcggccgcccgggcaggtacaattcaggacacaggcatgggcaaatacttcatgactaaaataccaaaaagcaatggcaacaaaagtcaaaattgacaaatgggatctaattaaactaaagagcttttgcacagcaaaagaaaccatcatcagggtgaacaggcaacctacagaatgggagaaaatttttgcaatctatccgtctgacaaatggctaatatccagaatgatctctattttattttttatgacatattaatcatgtttgttctcttgtgtcctctctttctttctctcgattttccagtgggtccacggtggtctatttgtagggttcatatttacaaatgggagtcaaggtgactc

SEQ ID NO: 2932 - DNA, 406 bp, Homo sapiens
  misc_feature 5: n = A,T,C or G
gagcnccgccgtaataccgactcactatagggcgaattggagctccaccgcggtggcggccgaggtactttttttttttttttttttttttttatgaaggttgaatgcagggttttattgagtggtggaggtggttctctgaaggatggatgcagagctggaagcggggatggcacgggaagataatcttcctgctgggtggccaaacctctccgaccaccctcggctgaactcctctcggcgttcaaatgttcctcttctctctttctctgctgtatcgtttcaccattcatctgcttgttgcttggcgataggtgattgtctcgccgctcagctataggcgatggtctcaccactcggtgataggcgattgtcccatctaggtcgccaaaatgtgtctggaatt

SEQ ID NO: 2933 - DNA, 404 bp, Homo sapiens
  misc_feature 5: n = A,T,C or G
gagcnccgcgtaatacgactcactatagggcgaattggagctccaccgcggtggcggccgcccgggcaggtactcaaggcaaaccagcaattgcccatcgagatctgaaaagtaaaaacattctggtgaagaaaaatggaacttgctgtattgctgacctgggcctggctgttaaatttattagtgatacaaatgaagttgacataccacctaacactcgagttggcaccaaacgctatatgcctccagaagtgttggacgagagcttgaacagaaatcacttccagtcttacatcatggctgacatgtatagttttggcctcatcctttgggaggttgctaggagatgtgtatcaggaggtatagtggaagaataccagcttccttatcatgacctagtgccc

SEQ ID NO: 2934 - DNA, 423 bp, Homo sapiens
  misc_feature 168, 262, 264, 285, 368, 372, 387: n = A,T,C or G
gagcgcgcgtaataccgactcactatagggcgaattggagctccaccgcggtggcggccgaggtactttttttttttttttttttttttgcgattaaactactgttgtatcattgggctgcgacgggttacaggtccacaaactgtttaactggacatatgtggaggnggtaaatccccccattttacaggtctttgggaagttctgggggccaggaaatccaaatttgataataggattttctcaactgaactcagggcanancacagatggtctgagtaaacnccctgcgtgacaggtgccttcctgcaggtaggaacacttcctctgcagtcagagggagaagaaaacatcaggagctggatgtnattncagatctgcaccganaaacatgctgatttcactggggatgtgggcagtccc

SEQ ID NO: 2935 - DNA, 444 bp, Homo sapiens
  misc_feature 57, 162, 323, 327, 354, 378, 379, 394, 395, 417, 421, 429,444: n = A,T,C or G
gagcgcgccgtaataccgactcactatagggcgaattggagctccaccgcggtggcnggccgcccgggcaggtacttttttttttttttttttttttttttggaaggttgaatgcagggttttattgagtggtggaggtggttctctgaaggatggatgcanagctggaagcggggatggcacgggaagataatcttcctgctgggtggccaaacctttccgaccaccctcggctgaactcctctcggcgttcaaatgttcctcttctctcttttctctgctggatccgttcaccattcatcttgctttgtctggggatgggngaanacaacctgtttgctcattttgctttgncgatagggtgaattgtctcccccnntcacctattaggccnntggtcttctcccacttcggttnatanggcaattngccccaatctagggn

SEQ ID NO: 2936 - DNA, 864 bp, Homo sapiens
  misc_feature 2, 630, 647, 663, 679, 690, 720, 726, 733, 755, 806, 816,819, 822, 851: n = A,T,C or G
angcgtatcgactactatagggcgaattggagctccaccgcggtggcggcccgaggtactttttcttttttttttttttgagacagagtctcgctctgttgcccaggctggagtgcagtggcacaatctcagctcactgcaacttccacctcccgggttcaagtgattctcctgcctcagcctcctgaatagctgggactgcaggcacccactgccacaccccgctaatttttgtatttttaatggagacagggtttcaccatgttggccaggctggtctcgaacttctgacctgaggcaatccatccacctcggcctcccaaagtgctaggattacagaggtaagccaccatgcctggccccagtctctactaattttctgttgatgctgtaacaaattactacaaacgttgtggcttaaaacaatatacatttattatcttaacagttctgtagggtaggaatctgacacaggtcttgttggctaaaatcaagggactggcaaggctgcattctttctggaggctctaggagggaatccaggtacctgcccgggcggccgctctagaactagtggatcccccgggctgcaggaattcgatatcaagcttatcgatacccgtcgacctngagggggggggcccggnacccaagcttttggtnccttttagtgaggggntaaattgcgcnccttggcggtaatcatgggcaaaactggtntctggngtgaaantggtaattcccttcaccaattncccacaaacataccaagccggggagcattaaagggtaaaagccctgggggngcctaaatgnggngancttacctcacatttaaattggcgttgcgnctcactgccccct

SEQ ID NO: 2937 - DNA, 913 bp, Homo sapiens
  misc_feature 5, 30, 48, 54, 77, 108, 174, 180, 211, 213, 236, 238, 257,322, 333, 335, 337, 340, 344, 345, 351, 361, 363, 373, 381,384, 396, 399, 407, 419, 425, 438, 446, 448, 450, 460, 470,471, 473, 474, 475, 481, 488, 499, 509, 514, 515, 518: n = A,T,C or G
  misc_feature 519, 520, 524, 535, 543, 544, 548, 555, 562, 566, 568, 573,574, 578, 585, 598, 599, 604, 608, 609, 625, 633, 635, 640,645, 646, 658, 663, 667, 670, 671, 688, 689, 691, 694, 699,706, 713, 715, 716, 719, 722, 723, 730, 731, 733, 735: n = A,T,C or G
  misc_feature 736, 740, 741, 744, 750, 751, 755, 757, 760, 767, 768, 770,772, 777, 783, 784, 787, 794, 795, 796, 798, 807, 808, 812,815, 816, 818, 824, 833, 835, 836, 846, 854, 858, 862, 864,866, 869, 870, 872, 874, 886, 903, 905, 907, 909, 912: n = A,T,C or G
gaatnggagctccccgcggtggcggccgangtactttttttttttttntttttntaacgcctttcctacatcaggtntattcaaaacacaaacaagtatttctctttntgtaagggcaaatggttcaaataatgcggtacacgaaacattgactaatcaagtgctttaaatatnaaacanaattattcttttaaaaaagcaaaataataangnatatatacaaaagggacctggantntgtaagctgattccaaaancgaaataagtagaaaatccatggtgaaacctgaacattctacctttgctttggagaagggctatnatacaacatgnantnatntgannatggantggttgaggngnttctatacantaaacttnagncattatgtgctngcncaataatnatcccaatcttncccaanactgaatgggcangtcctgangntnaattcctttntccataccanncnnncgggcngcggtgngttcgttttanaaccttgttngtttnnccnnnggcntgccaggagtnggggatannaaancctcatngtatttntttncnctctnntganggggggntgcggggtacccnngcttntgtnncgtttaatagatgggntttaattngngtcgnttggnncaataatccatngggtnagangtnngatttacctgatgtggnnantgnggtgntaatccntattaanannatncgnngcgcaannantnntatnnctntgggtnncttnanagntgtaaanntncnagggntgcccnnatngatttannnanatcttaaanntagntgnncnttgttntcatacatncnnttttgtcttngctggatnaaancatncntngcnnangntgttttaaaaanaaataatccaatgtgcncngncnaang

SEQ ID NO: 2938 - DNA, 862 bp, Homo sapiens
  misc_feature 67, 115, 327, 384, 388, 403, 455, 472, 482, 497, 509, 513,538, 544, 546, 547, 558, 577, 581, 593, 598, 605, 613, 629,630, 636, 642, 645, 648, 649, 659, 663, 673, 675, 689, 692,695, 696, 704, 716, 723, 730, 734, 762, 770, 777, 779: n = A,T,C or G
  misc_feature 796, 797, 808, 813, 814, 818, 834, 842, 858, 861, 862: n = A,T,C or G
aggggcgccgtatcgactactatagggcgaattggagctccaccgcggtggcggcccgaggtacatnatttccagagcaggcactggcagcgagatagggttggaggagaagtancgccgggacttccggatggcaaacttctctgtgggtagagatttcccagcaatcttgagcttcaggcctggcacagctcgaaataattccacttcgtcgaccccgaacggcttgtggtcctccttcccaaacatgctgaggtaggcggccttcatgtaaatgtaggtggcctttttaagtcagatcatgtcagttccttctggaaatctggntatattcatcacactcaggagacatctcctacaatttccttgacacctgcagcactncagncacacgacggccccncgcgtacctgcccgggcggtcgctcgatgcgtattgggcgctcttccgcttnctagctcactgactcgntgcgctcggncgttcggctgccgcnagcgggatcagntcantcaaaggccggaataccggtatcanaaaaancnnggggataaacngcaaggaaagaacatgttnagcnaaaaggccagcnaaaanggccaangaaacccntaaaaaaggccccctnncttgcntttttncanagnnctcccgcccncttnaccagccttncnaaaaattgacgctnaanttnnaaggtggngaaaccccgccnggacttntaaatanaccncgcgtttccccctgggaaggtccctcgngccctctncctgttncnaacccttgcccggttannccgaaaacttncccanntttnttccttttgggaaggngtggtccnttaataaaaaattaangtnn

SEQ ID NO: 2939 - DNA, 844 bp, Homo sapiens
  misc_feature 3, 4, 6, 543, 552, 556, 570, 636, 693, 727, 789, 798, 801,804, 812, 818, 820, 834, 836, 838, 841, 843: n = A,T,C or G
gtnncnctactatagggcgaattggagctccccgcggtggcggccgcccgggcaggtactttttttctttttccttttttttattgtttgtttttttgtttttttgggggttttttttggcagccacaggagttttagccaattcagatgccttgctccccacaatttggaacattcctttggatttgaccaagtcaggaagagatgggagagaagtgaaacagcaacaataaaccccaaacataaacaaaaagagttaagcaaaacaaacaaatgcacaattcatatgattaactgagtgttctaatggtaaggaggaattaaaagcagctggtgggtaatcttaaattttagtcattaaggaaaaattttaagacaaaactctaacccgcgtacctcggccgctctagaactagtggatcccccgggctgcaggaattcgatatcaagcttatcgataccgtcgacctcgagggggggcccggtacccagcttttgttccctttagtgagggttaattgcgcgcttggcgtaaatcatggncatagctgntttnctgtgtgaaattgntatcccgctcacaattccacacaacatacgagccggggagcataaagtggtaaagcctgggggtgnctaaatgagtgagctaactcacattaattgcgttgcgctcactggcccgctttccanacgggaaaacctgtcgtgccagctgcattaaagnaaccggccaaccccccggggagaggcgtttgcgtattgggcgctttttccgctttcttgttnattgatttnctngancttggccnttcggntncggggaagcggtantnanctnant

SEQ ID NO: 2940 - DNA, 868 bp, Homo sapiens
  misc_feature 2, 720, 749, 766, 784, 799, 817, 825, 830, 832, 835, 840,854, 858: n = A,T,C or G
gnccgcgtatcgactcactatagggcgaattggagctcccccgcggtggcggcccgcccgggcaggtaccttcaatttttcccacggtaatggaatataactatttatcaatttatcactgcaactgacatagccagggaaatgtttaagaaatgaataaatagaagtttattccctgcaggtagcgattgagtccaccaaaatcttaagctaaattttatgttgtttcatggtagctgttatgaaaatggaccatctaagagaaaatccattgtttctcaaattcaaatgcattctgtgtgactaggttgttcccgtgataatgctatgcgacattgctgttctcttctattcaccagtttgccttcctaataacctcttctcatatacattctttaggaaaagaccagtgccctcagtctgagcaacgttgctggagtattctacatccttgtcgggggcctttggtttggcaatgctggtgggctttgattgagttctgttacaagtcaagggcccgaggcgaaaacgaatgaaggtggcaaagaatgcccagaatatttaacccatcttccttcgcagaaattcacagaatttttgccaacttataagggaaggttacaaccgtatatggcatcgaaagtggttaaatttaagggggtaggaaccaggctctaatccaaacttttaagtgcaccgtttagcttttcttgttgcgtnccttaagctctttttaaataaaggaaggngggccaatggatccatnccgtatgtattgggtggncgttcttccatgttnccaggtgggggcttaccntgcagctnaactngntanttttncctttttaatggcncagnagcttggggg

SEQ ID NO: 2941 - DNA, 866 bp, Homo sapiens
  misc_feature 3, 401, 439, 494, 517, 530, 542, 569, 590, 612, 621, 626,631, 637, 641, 642, 649, 653, 655, 683, 693, 695, 712, 720,723, 727, 729, 732, 739, 743, 745, 750, 754, 756, 767, 770,786, 806, 810, 833, 834, 845, 846, 847, 848, 853, 857: n = A,T,C or G
  misc_feature 864, 865: n = A,T,C or G
agnatcgactactatagggcgaattggagctccccgcggtggcggccgcccgggcaggtacgcgggcagtgggaacataccagcctgaatttggaaaaaataattgtgtttcttgcccaggaaatactacgactgactttgatggctccacaaacataacccagtgtaaaaacagaagatgtggaggggagctgggagatttcactgggtacctcggccgctctagaactagtggatcccccgggctgcaggaattcgatatcaagcttatcgataccgtcgacctcgagggggggcccggtacccagcttttgttccctttagtgagggttaattgcgcgcttggcgtaatcatggtcatagctgtttcctgtgtgaaattgttatcccgctcacaattncacacaacatacgagccgggagcataaagtgtaaagcntggggtgcctaatgagtgagctaactcacattaattgcgttgcgctcactgcccngctttccagttggggaaacctgntcgtgccagctgnattaaatgaatnggcccaacgcgcggggagaggccgggntgcgtattgggcgctcttccngcttcctcggtcacttgactcngttggcttnggatngttcngcttgnggcnnagcggtnttancntctatttaaaaggcgggttatttcaggntattccacangnattcagggggattaccncaatgaanaancctngnganccaaaanggcnantaaanaggncnaggaaaccttnaanaaggcccgtttgatgnctttttatcattaagcttcngccnccttgccgagcccttaaaaaaanntacgcttatannnnaagtnggcnaaacccnnt

SEQ ID NO: 2942 - DNA, 846 bp, Homo sapiens
  misc_feature 5, 599, 625, 647, 678, 690, 711, 718, 723, 760, 769, 778,788, 791, 811, 812, 813, 818, 834, 838, 844: n = A,T,C or G
tacgnatcgctcactatagggcgaattggagctccccgcggtggcggccgaggtaccacaccagcctcagaacccgctccactggccccccatgaggaccaccagcaaagggagaccaaagagaatgaccccatggacagccatcagtcccaggaatccccaaacctggaaaacatagcaaaccccctagaagaaaatgtaacgaaagaatcaatcagtagtaaaaaaaaggaaaaaaggaaacatgtggaccacgtagaaagttcactatttgtagcaccaggaagtgttcaatcctcagatgacctagaagaagacagtagcgactacagcattccttccaggactagtcacagtgactccagcatttaccttcgacgacatactcataggtcttcggaatcgcccagagctttgaaattactggcatgcaacagctatacttttggatagaagacaagcagattggaaccttatcattaagcacagtccgatcggatatccggtttgggcaataagagatgtaaataaagtgaggattttaaagcccaaaggcctccttgctataaaaacgcacccaaaacgccttacctggaccncgcgcgcacccagaaggatcacgttnagagacagaggtgcaacatgantcaaggatcattttagctatgttcagttgangacccagcagantcttggttgacagaagaaacncgaattnttaancaggaagggcaacagcttagggagaagccatgtcacntgggggagncacagcccngcaaagtganttncttgacaccagtttggtccnnnagccnggatatgaaggatttnattntcttcngg

SEQ ID NO: 2943 - DNA, 898 bp, Homo sapiens
  misc_feature 231, 267, 270, 301, 349, 395, 445, 471, 486, 489, 490, 516,522, 532, 578, 585, 587, 588, 591, 596, 597, 602, 608, 609,610, 611, 613, 644, 646, 652, 659, 665, 671, 678, 684, 690,706, 709, 717, 723, 724, 729, 731, 748, 756, 777, 780: n = A,T,C or G
  misc_feature 791, 814, 821, 822, 824, 828, 841, 847, 850, 851, 852, 858,861, 865, 866, 887, 895, 898: n = A,T,C or G
gtctacgactcactatagggcgaattggagctccccgcggtggcggcccgaggtactttctttttttttttttttttttttgcatttgagctaagattttaacaatcctgtgaaaataggtaatatagtcacgtatttgttgaatacattatttcaaagaaccacaaacacacagaaaaaatatttaaaaagtccatggtgggggaaatgatccagaaacaacagctcttntacttccagccctaaccgtctgggatgctagatggntgngggcaaaccgtggaaaaagataagcttctgnttttcaagattttattttgttagagagtgcagaaaatctaagtgatgnctctgtttttgctttctagcaattaatatatgacagcagtctttgngatttattttaactttctgcaagacctttggctcacagaactgcagggtntggtgagaaaccaactccggattggntgcaaacccacaccntcnntttttttatggggctttttactaccnaacctnccaagacaanttggtgaaaccctgggataccatggtttattttaataaatttgatngcccggnannttnaaatnnaaaanataaannnngnccctggcccgggcgggccggttttaaaactngngggaancccccgnggctgnaagganttttatntcaagnctattngttcccggggacctcnggngggggggnccggtnncccancnttttggtcccctttagnggggggtnaatttgggccgcttgggggtnatnatgggtaatanctggttcccgggggggaaatgtnttccgcnncncaantcccccaaaaaancaaccnggnnntaaaangtnaacnngggggggcctatggggggggntacccacnttn

SEQ ID NO: 2944 - DNA, 860 bp, Homo sapiens
  misc_feature 27, 50, 186, 263, 387, 409, 464, 493, 498, 499, 534, 556,558, 615, 619, 629, 638, 650, 659, 667, 668, 670, 674, 676,682, 684, 694, 719, 721, 732, 746, 749, 758, 767, 770, 772,785, 786, 795, 805, 812, 818, 828, 844, 845, 855, 859: n = A,T,C or G
cgaattggagctccacccgcggtggcncggcccgcccgggcaggtacgcngggggagcatgaaccctgttgtgaactgctcatctgagggatctaggttgtgtgcttcatatgagaatctaatgcctgatgatatgtcactgtctcactttgcccccagatgagaccatctagttgcagaaaaatnagctcagagtttccacggattctacattatgatttgatcttcaacaaagctgacactggggaaaggacacactcttnaataaatggtgctgggaaaattggatagccacatccagaaaaatgaaactggaccactatctcactatatacaagaatcaactcaaagtagattaaaaacttaaacagaagacctgaaactatnaaaatacttgaagaaaacctanggaaaaatttcctggccttttgtctaggcgaagaatttaatgactaacacctcanaagccacaagcaacacaagataaaaaatngacannatgggacttaattaacttagaaagcttcttgagcngcagaaggaaataatcagcagnantgaagagaccaccttcttgaatggaagaaaatatttgcaaactggtcatctaatagngggnctaatacctnggaattttnccaaaaaccccnaaccaactnacccgatnnanaatncngagctntnaaaagtcccnttgggcggttttagaactagtggantnccccgggctgnggaatttcattttnagntttttcganccggcgccnttnangggggggcccggnnccaactttngtccctttanagagggntaattnccccttgggntaatatgggcattagnntttcctgggnaaant

SEQ ID NO: 2945 - DNA, 886 bp, Homo sapiens
  misc_feature 3, 6, 7, 8, 9, 10, 11, 12, 14, 627, 678, 687, 690, 738, 758,766, 781, 784, 801, 804, 839, 847, 850, 860, 862, 872, 880,883: n = A,T,C or G
atngtnnnnnnncncgcgtatacgactactatagggcgaattggagctccccgcggtggcggcccgcccgggcaggtacttgtttttcaaacaataaaacaggccgggcaccgtggctggctcacgcccataatcccaacactttgggaggccgaggcgggcggattacctgaggccaatatggtgaattctcctctcgactcaaaatacaaaatgattagctggccgtggtggtgtgtgcctgtaatcccagttacttgagagactgagaggagagaatcgcttgaacccggggggcagaggttgcagtgagccaagattgcaccactgcactccagcctgggcaacaagagcgaaaactccatcttaaaaataaaataaataataaaacaatgatgaaaacacaactaactacagcacttcagagttagttgacaaatccaccttttcaatctacatttcaaaatgttcagaaagacaccatcctaggggaagtcaaccagcagcaacctctctgctaatttttgtacctcggcccgtctagaactagtggatcccccggggctgcaggaattcgatattaagcttatcgataccgtcgacctcgagggggggcccgggacccancttttgttccctttagtgagggttaattgcgcgcttggcgttaatcatggncatagctgnttnctgtgtgaaaattggtattccgcttacaatttcccaccaacatacganccggggagcattaaagtgtnaaagcctnggggggcctaatgantgnctaactcacattaattncgntgcgcctcactgcccgtttccatcgggaaccttgncgtgcccnctnctttaatgantngccaaccccngggggganggnggg

SEQ ID NO: 2946 - DNA, 899 bp, Homo sapiens
  misc_feature 3, 4, 5, 462, 473, 517, 522, 570, 572, 578, 579, 587, 589,634, 637, 640, 653, 661, 675, 693, 704, 710, 724, 726, 760,766, 773, 774, 782, 791, 796, 809, 830, 840, 844, 847, 849,850, 863, 887, 892, 895: n = A,T,C or G
agnnncgcgcgtatacgactcactatagggcgaattggagctccaccgcggtggcggccgcccgggcaggtacgcggggccatttagcctgccattgaaatgcaaaagtctgttccaaataaagccttggaattgaagaatgaacaaacattgagagcagatgagatactcccatcagaatccaaacaaaaggactatgaagaaagttcttgggattctgagagtctctgtgagactgtttcacagaaggatgtgtgtttacccaaggctacacatcaaaaagaaatagataaaataaatggaaaattagaaggtagatatgctgctgaatttagaacattctctgcaatgataaggtctcctgttaaagatggtcttctgaaggctaactgcggaatgaaagtttctattccaactaaagccttagaaattgatggaccatgcaaactttcaaagcagagnctccgagaagncatctgccttcgagccttcccattggaaatgcaaaaagttttgnttccnaataaagcctttggaatttgaaggaaatgaaccaaacatttgagagcnanattgannattctttncnatcagaattcccaaccaaaaagggactttttaagaaagttctttnggnatntttgagaggtctnttgtggangacttttttccacnagaaaggatgtggggttncccccaagggnttcccncttcaaaaggaaantnggttaaaatttaatggggaaaatttgaaggggtnttcttngttaaannatggtttntttgaaagnttaantgcggaatgaaangtttttttttccaacttaaancctttaaaantggnggncnnggcaaactttttnaaagcctttatctttccgaaaaanccttnttncttt

SEQ ID NO: 2947 - DNA, 888 bp, Homo sapiens
  misc_feature 509, 604, 628, 682, 684, 702, 711, 732, 792, 803, 811, 824,828, 849, 853, 857, 861, 865, 872, 874, 886, 887: n = A,T,C or G
gtggccgcgtatacgactcactatagggcgaattggagctccccgcggtggcggcccgaggtacacactggcagagcacccgacggacggtggcagaggcaaagaagaagattgaacaacagggaggcttcacctttgaaaacaaaggagtcctctccgcatttaattttgggactgtgcccagcaacaactgaaggaaagaacatcagctgaccaaatgtcatcgctgcattttatttcacaagaggagtgtgagggtcaaggggatgaaatgaggggctgcttttagggccctcctgctgtgccagttaccatctggcattaggcagcacttttatctactctttcccctttgacctttgtcaccctgaaatatatattttaaacagctactgtaagtatgaaatgaaagaaaaacaatcattggacggaaaaggacaacccatatgttccaaaggctgaatgcccaaggttgttttagaggattggatagacttgcaccgtctcangtttttgcccatgcagaatcaatggatttatgccggataacaagtgccttctgttgtccttgcccgggcgggccgctctaagaactagtgggatncccccgggcttgcaaggaattccnatatcaagcttatcgataccgtctgacccttcgaagggggggcccggtacccancntttggtccctttagtgangggtaattngccgccttggccgtaatcatngtcataggtggttcctgtgtaaattgttttccgctccaaattcccccaacataccaaccnggagcataaanggaaagcngggggtgcttaangagngaactaactccatttaattcnttgncctnattncccntttcaantngggaacctgccnnc

SEQ ID NO: 2948 - DNA, 873 bp, Homo sapiens
  misc_feature 3, 17, 19, 28, 33, 63, 65, 321, 466, 491, 546, 550, 566,577, 582, 587, 594, 597, 606, 610, 617, 625, 629, 645, 646,653, 666, 667, 674, 679, 688, 695, 699, 700, 701, 733, 742,747, 761, 788, 789, 794, 798, 804, 808, 810, 817, 823: n = A,T,C or G
  misc_feature 827, 828, 830, 843, 851, 855, 861, 865, 866, 873: n = A,T,C or G
cgnatacgactactatngnctcactatngggcnaattggagctccaccgcggtgggcggccgnanctctgaggagcggccaagcagcaggacaggcagcttgccctggtggtcaattttgatgagtgcgatgtctgctttctcatcccccgcgtacctgcccgggcggccgctctagaactagtggatcccccgggctgcaggaattcgatatcaagcttatcgataccgtcgacctcgagggggggcccggtacccagcttttgttccctttagtgagggttaattgcgcgcttggcgtaatcatggtcatagctgtttnctgtgtgaaattgttatccgctcacaattccacacaacatacgagccgggagcataaagtgtaaagcctggggtgcctaatgagtgagctaactcacattaattgcgttgcgctcactgcccgctttccagtcgggaaacctgtngtgccagctgcattaatgaatcggncaaccccccgggagaggcggttttgcgtattggggcgcctttttccgctttcctngctnaacttgacttcgcttncgcttgggtcngtttngcctncggcgangcngtattaacntcancttaaanggcggganatancgggttattccacaannaattaangggattaacctcnnggaaaanaacantgttgatcnaaaaagnccannnaaaaaggcccaggaatcttaaaaaaagcccgnttgctgggntattnttcaataggttccncccccctgcgaggcttaaaaaaaaatnnccctnaaanttagangggngnaaacccnccgggntttnnanataccctgctttntccccctngaanttcctnatgnnctcttcn

SEQ ID NO: 2949 - DNA, 870 bp, Homo sapiens
  misc_feature 141, 322, 454, 467, 477, 481, 508, 515, 534, 548, 551, 558,561, 564, 566, 568, 602, 612, 630, 634, 637, 657, 658, 663,664, 668, 675, 686, 693, 698, 702, 712, 715, 719, 722, 727,729, 730, 748, 751, 752, 764, 766, 768, 769, 771, 780: n = A,T,C or G
  misc_feature 793, 795, 802, 805, 808, 810, 811, 813, 816, 818, 822, 823,829, 833, 834, 838, 841, 842, 849, 851, 852, 853, 859, 865,866, 867, 869: n = A,T,C or G
gggcgaattggagctccccgcggtggcggctcgaggtacagggtcccaaaatgcgctgactcagcttcaccagcccatctcggatctcattgccaaaaatgtctcttcggtcatgaatgaggatccagcccaaccttcagncaggaaccagccagcgcttggccagcccttccacaggacaggatggggacatcggtgctgagggtggccagtggttcatatttgcaatccgaaaacaccatgtctccatagatctcatcagctaagatggggacacactgcccgtgcaggcactgccagaatcttctgaagatgaccgttngctgaacactgacccacaggggttttgatggattattgacaatggagacaagctgtcttttcatcaattagatattccagttgtttcaggtcaatttcccaagatttctctggcaacaaattgtagagtttnaccttcaattccnataaaacttnaggnccgagtcttgttgagagagaaaccctngttttgnaaccaggatggttttgccntgggttggccaacncanctaaacnaangtnantngtttggcttgcacccaacttggtcagaatggacngtccttagcntttttgggggtgcttaangacnggngttaattatgaagcaatttnnttccnntggnattggancccgtgggacngggcatnacccnttanttttgcccgnttncaanggnttttntnnttgcctgggtaacttccnggnncttgtaggccgntntnnanacacatatnggtccccaatggncngggaaanatntgntnntnctngnattnngtcttnccannattntgnntacaatngnnnttatantcgggnnnanc

SEQ ID NO: 2950 - DNA, 886 bp, Homo sapiens
  misc_feature 3, 5, 402, 414, 433, 449, 453, 541, 545, 550, 568, 569, 579,584, 585, 586, 592, 593, 611, 615, 622, 636, 637, 639, 643,644, 660, 662, 663, 669, 671, 676, 689, 693, 709, 712, 725,726, 730, 731, 733, 736, 737, 742, 744, 745, 748: n = A,T,C or G
  misc_feature 749, 765, 769, 771, 772, 791, 799, 801, 802, 803, 809, 813,815, 823, 827, 830, 846, 848, 853, 856, 858, 865, 866, 868,869, 877, 880, 881, 883: n = A,T,C or G
tangnaggcgcgcgtaatacgactactatagggcgaattggagctccaccgcggtggcggccgaactcctctcggcgttcaaatgttcctcttctctctttctctgctgtatcgtttcaccattcatctgcttgtctgggatggtgaagacaactgtttgctcattctaaacgacacggaatagaggcgtctcctcatctgctcatctgcttctggagcccgaggtttggggtttatatgggtacctcggccgctctagaactagtggatcccccgggctgcaggaattcgatatcaagcttatcgataccgtcgacctcgagggggggcccggtacccagcttttgttccctttagtgagggttaattgcgcgcttggcgtaatcatggtcatagctgttncctgtgtgaaantgttatccgctcacaattncacacaacatacgagnccgngagcataaaagtgtaaagcctgggggtgcctaaatgagtgagctaactcacattaattgcgttgccgctcacttgcccgcttttcaanacgngaaanctgcccccgccaaacttnnattaatgaancgggnnnacgcannggggaagagggtcatttnggantattggngcgctttttccgcnntnctannttactggaattcgctngnnctccgncntttangtttgctgccaancggntatcaaatttacttcnaanggggggttaatcnnggtnnanccnncaaantnnggnntataccctaggaaaanaccntnntatgcctaaaagggtcaanattatggntnnnggaacnctgnanaaggcccnattnctngactcttatatataangnatctnccncntggccanngnntaaaaaanatnnantct

SEQ ID NO: 2951 - DNA, 868 bp, Homo sapiens
  misc_feature 4, 477, 551, 555, 561, 563, 588, 612, 614, 619, 637, 666,672, 675, 678, 688, 693, 695, 697, 698, 701, 707, 711, 716,722, 723, 729, 730, 733, 738, 739, 740, 741, 744, 747, 753,758, 760, 763, 764, 767, 769, 770, 784, 790, 792, 794: n = A,T,C or G
  misc_feature 797, 801, 808, 810, 812, 821, 822, 823, 824, 828, 830, 831,839, 841, 842, 843, 846, 847, 848, 850, 851, 854, 856, 857,859, 860, 863, 864, 865, 867, 868: n = A,T,C or G
gccncgtatacgactcactatacgactaactatagggcgaattggagctccaccgcggtggcggcccgaggtacgaccgcaaagcctgactcttaaccattgtgttctgttgccttctccaagggaaaggagtgcttccagaaaggccattggaagtgaggagcgtcacctgataatagctggctcctcatcccactaggttaacaggcaacagatgggggccacagagttggctggagttagtcctggttgccaagggtaaatggggctgttaccatgcaatggatagaaactaggatgctcctgtgtgtctccttatatcctaccaggtgtagcatgaaggttaaggacaattccgtcctcttatttggagaggagaccaaggccctgtaggactaaaggtttgggtgagctgaaagccaagggcaattggcccagcttggggaggagagttacaaatacatttgtgactatcanaccagaaacagactgcggtgttcacctgcggtttgggtacctgccccggcgggccgtctagaactagtggatcncccnggctgnangaattcgatatcaagcttatcgatnccgctacctcgaggggggtccccntncccantttggtccctttaatgangggttaattgccgcttgcgtaatcatggncatagntgnttnctgtgtaaantgttntncnntcncaattncacncaacntaatannccgggnncantaaannnntanccnggggtngcctnanagnnagntnnctccattaattgcntttccntnanttncccntttccanangnaaaactttnnnncccntnnttaattanannnccnnncnnggnanncnnttnnntnn

SEQ ID NO: 2952 - DNA, 859 bp, Homo sapiens
  misc_feature 14, 482, 522, 539, 542, 543, 556, 568, 587, 591, 597, 617,641, 662, 677, 693, 705, 706, 711, 714, 716, 723, 730, 733,736, 739, 756, 760, 766, 767, 768, 773, 774, 777, 778, 789,790, 791, 795, 798, 803, 807, 808, 811, 819, 820, 824: n = A,T,C or G
  misc_feature 826, 830, 835, 841, 843, 855: n = A,T,C or G
gcgccgtataccantactactactatagggcgaattggagctccacccgcggtggcggcccgaggtacgcggggactgcacacatgctagggtccaggacagcaggaccaagccagcagaaacagcctgagcccaccgcagactggcctggctatactggacaatgccactcctcctgtacctgccgggcggccgctctagaactagtggatcccccgggctgcaggaattcgatatcaagcttatcgataccgtcgacctcgagggggggcccggtacccagcttttgttccctttagtgagggttaattgcgcgcttggcgtaatcatggtcatagctgtttcctgtgtgaaattgttatccgctcacaattccacacaacatacgagccgggagcataaagtgtaaagcctggggtgcctaatgagtgagctaactcacattaattgcgttgcgctcactgcccgctttccaagtcggnaaaacctgtcgtgccagctgcattaatgaatcggccaacncgccggggagaggcggnttnngtattgggcgctnttccgctttctngctcacttgactcgctggngctncggtcngttcggttgcggtgagcggnttcagctaacttcaaggcggtaanaacgggtatccacaaaattanggggattacgcatgnaaagaacatgttgaancaaaatgccaannaaaangcnantgaaccnttaaaanggnctngtngttggcgttttttcaanaaanttctgnnnccctnngannataaaaaaaannnctcnttntttanatannggnaaactgtnnggantntcanaaacncaggtntntttccttttagnaggt

SEQ ID NO: 2953 - DNA, 866 bp, Homo sapiens
  misc_feature 31, 603, 614, 676, 679, 694, 705, 706, 739, 744, 749, 766,779, 795, 803, 841, 844, 862: n = A,T,C or G
gtgccgcgtatcgactactatagggcgaatnggagctccccgcggtggcggccgcccgggcaggtacacttgaaaccaaatttctaaaacttgtttttcttaaaaaatagttgttgtaacattaaaccataacctaatcagtgtgttcactatgcttccacactagccagtcttctcacactttttggtttcaagtctcaaggcctgacagacagaagggcttggagattttttttctttacaattcagtcttcagcaacttgagagctttcttcatgttgtcaagcaacagagctgtatctgcaggttcgtaagcatagagacgatttgaatatcttccagtgatatcggctctaactgtcagagatgggtcaacaaacataatcctggggaccccgcgtacacctgggcaccagtgacattccagatgtccttggggggcgtcactatggaaggaccttgctcgcaggtgcccttgctgacctgggtgcccgccgtacctcggccgctctagaactagtggatcccccgggctgcaggaattcgatatcaagcttatcgataccgtcgaccttgaggggggggcccggtacccagcttttngttccctttangtgaggggttaattgcgccccttggcgtaatcatgggcatagctgtttcctggtgaaattgntantccgttacaattccnacaacatacgnncccgggagcataaaggtggtaaagcctgggggngcctnatggngtggacctaacttacanttaattggggttngcgctcacttgcccgntttccagncgggaaaaccttttcgtgccagcttgaattaaatgaanttnggccaacgcgccgggggngaag

SEQ ID NO: 2954 - DNA, 867 bp, Homo sapiens
  misc_feature 445, 577, 584, 626, 652, 672, 684, 697, 716, 720, 740, 746,750, 756, 763, 789, 803, 819, 822, 837: n = A,T,C or G
gcgcgcgtatcgactactatagggcgaattggagctccccgcggtggcggccgaggtacttcatttaatttttgcctcttacagtctgatatcctgttgggcattctggacaacttggacccagtcatgttcttcaaatgcccttccccagagcctgccagcctggaggagctcccagaggctacccagaaggacccagttccttaccagcctccctttctctgtcagtggggaccgtcatcagccaagctggaagccattaatgaactaattcgttttgaccacatatataccaagcccctagtcttagagataccctctgagacagagagccaagctaatgtggtagtgaaaatcgaggaagcacctctcagcccctcagagaatgatcaccctgaattcattgtctcagtgaaggaagaacctgtagaagatgacctcgttncggagctgggtatctcaaatctgctttcatccagccactgcccaaagccatcttcctgcctactgggatgcttacagtgactgtgggatacgggggttccctttccccattcaagtgacatgtcctctctgnttggtgnaaaccatttttggggagggacactttttgccaaatgaacctntttccccagctgaattagtggctaanggaatgatccaatactggtncccttttccttngactattacactngctggagggatagcaaaanaaanccttttttgtacctgccccngcgggnccgnttttanaactagnggatcccccggcttgcagggaatttnaatttaagcttatngatcccgtcgaccctnganggggggggcccgggncccagcttttggttccctttagggaggggt

SEQ ID NO: 2955 - DNA, 875 bp, Homo sapiens
  misc_feature 677, 708, 786, 794, 799, 814, 819, 851, 868, 874: n = A,T,C or G
cgcgtatcgactcactatagggcgaattggagctccccgcggtggcggccgaggtacaggaacttgataatcattgttgttgtctttatcattaccatcatctccattagcatcatcagcatcacagttgcagtatggggatcacattaagtgatgcggcaagatcaggaaaaccattatcaagacaatgtccagtttggatgtgtaaatattatcctgtgcttcttgcccatttagcaaacactttcttttcagtgataaacctatgacccccatatggggcatgttcatgaagaaaatattcatcacactcatctcttccttgttcataataatggtaggggacttttctatacccttctgtcttgcagtaggtgtcatttatcatcccgtagacgtgaatgccataacaggcgtccatggccagaatgaaggtaaaccaccctgtgctgagatatgagccagactggactctgccttcccagtttccttcttaaaaactccatcacagtaactcatgcgcttctctgtggtcaccgtatatttgggcattcggatagatccaactgtctttttcaacatgttgtaaacgatgccattgccatctttcctcatattgcggaaaggtccccaaataacataaatagtagtattcgcttccttgaaaaaataatcanggttttttagcaaaagaggaacgctggtatnggacacaactcgaatcatggtcatgccggccgtctagaactagtggatcccccgggctggaggaattcatatcaagcntatcgatnccgcnacctcgagggggggnccggncccactttgttcctttaatgagggtaattgcnccctggcgtaacatggncaaacng

SEQ ID NO: 2956 - DNA, 868 bp, Homo sapiens
  misc_feature 563, 569, 576, 588, 609, 611, 612, 636, 645, 653, 667, 675,677, 687, 688, 698, 719, 720, 736, 744, 746, 762, 763, 767,774, 785, 786, 790, 798, 799, 806, 809, 820, 837, 839, 847,849: n = A,T,C or G
agcgtatcgactactatagggcgaattggagctccccgcggtggcggccgggagccgcggaaagagtagggccccccagacaacggggtccgacgagcagttgggcacgggctgagtccgcctgccggcagaatgtccctggctgcttattgcgtcatctgttgcagaagaataggaacctctacttccccaccaaaaagtggcacacactggagagatatcagaaatataataaagtttactggatcacttattttaggaggttctttatttcttacatatgaagttctggccctgaagaaggctgtgacattagatactcaagtggtagaacgagaaaaaatgaagtcatatatatatgtgcacacagtttctttagataaaggagaaaatcatggtattgcctggcaggcaagaaaagaacttcacaaagcagtaagaaaagtattggcaacatcagccaagatactgcggaatccatttgctgatccttttagtacctcggccgctctagaactagtggatccccgggctgcaggaattcgatttcaagcttatcgatnccgtcnacctcanggggggcccggncccaactttggtccctttaangnngggtaattggccccttggcgaaanaatgggaanacttgttncctgggggaaattnttttcccntnaaaattcccnnaaaatacaanccgggggcataaaggggaaanncccggggggccctaangggggccnancccccattaatggggnnggcntaattgncccttttcaanngggnaacctttnnggccccnttntttaaaaaaangccccccccccgggggngngggggttngntttttgggcccctttccct

SEQ ID NO: 2957 - DNA, 966 bp, Homo sapiens
  misc_feature 4, 5, 6, 9, 10, 15, 19, 157, 236, 349, 371, 404, 406, 466,470, 497, 519, 575, 577, 593, 616, 625, 627, 644, 659, 660,663, 672, 674, 682, 686, 687, 711, 712, 730, 739, 743, 766,784, 805, 806, 810, 826, 837, 849, 889, 896, 910, 913: n = A,T,C or G
  misc_feature 915, 916, 918, 920, 939, 943, 953: n = A,T,C or G
atgnnnttnncgcanatantactactatagggcgaattggagctccaccgcggtggcggcccgcccgggcaggtacccggctggccaaggagaaggagcagagcctcacggcagaaaaggatgaggacgaagagaacgatgcctctctggccaactnctccaccaccactttggaggacaaaggccctggccatgccacttttggccgcgaggccaccaaatttgaagaggagganaaacctgacaaggcctgggaagccagacccccacgagagtccagcgatgttccccccacgaagagaaataactggatctttattgatgaggagcaagcctttggggtcaaaangacaggccccgggcccggggcncgtggtttcagaaaagttcacttttcgtggtcngncttcttggcggaaatgggaaccggccttttgtggtggggggggtcctggggggcccccancatntactgcaacaagtcaagcgcaacgggncgcttttaaaactagtgggatncccccgggcctggaaggaaattcgatattaaagcttattcgataccgtcacccttnanggggggggccccggtnccccactttttgttcccttttantgagggttnanttgccccccttggcctnaatcatgggtcatannctntttcctgtntnaaattttnttcnnttacaattccacaaaaaaatccannccggggagcattaaagtntaaaacctngggngccctaatgagtgaacctaactncaaattaattgggttggncttcattgccctttttcaagnngggnaaacctgtcttgcccntttctttaatnaattcggccaancccccggggaaaggcggttcctttttgggcccttttcccnttcttgntaattattcattgnctngnncntnggttgcggaagggtttaantttntaaagggggnttcggttatccct

SEQ ID NO: 2958 - DNA, 929 bp, Homo sapiens
  misc_feature 1, 3, 10, 12, 13, 15, 19, 23, 29, 35, 37, 46, 47, 48, 51,54, 55, 69, 93, 97, 98, 99, 103, 104, 111, 121, 132, 148,149, 159, 160, 166, 170, 177, 180, 188, 223, 224, 235, 244,245, 246, 309, 319, 321, 342, 348, 353, 354, 355, 364: n = A,T,C or G
  misc_feature 377, 378, 398, 416, 417, 433, 441, 463, 468, 479, 495, 496,497, 498, 505, 537, 551, 567, 576, 582, 613, 622, 631, 638,646, 649, 667, 668, 672, 679, 685, 692, 699, 727, 731, 744,750, 757, 769, 770, 774, 778, 783, 787, 795, 797, 820: n = A,T,C or G
  misc_feature 822, 828, 847, 854, 870, 878, 890, 898, 899, 914, 924, 927,928: n = A,T,C or G
nanctccccncnntntcancccnctctanaactantntatcccccnnnctncannaattctatatcaancttatttataccttccaagggaangttnnncccnntacccanctttttttcnaaggaattaancttaatttccctcttnncttaatcatnntcatancttntttcctnttntcaaattnttatccctcacaattccacacaacatactaacctnnaacataaaatntaaaacctnnntttcctaattaattaactaactcacattaatttcctttccctcacttcccctttccaatcctnaaacctttcntnccaacttcattaattaatccnccaacnccccnnnaaaaaaccnttttcctattttnncccctcttccctttctcctnacttactcctttccctcnntcatttccacttcctnccaacctntattcaacttcactcaaaaaanccatnataccctttantccacaaaaaatcaannnnattaacnccaccaaaaaaacatttttaacccaaaatccnaccaaaaatcccanaaaaccctaaaaaaanccccctttncttacncttttttccattaactccccccccccttacnaaccattancaaaaattnacccttnaaattcanaantttcccaaaccccaccannactnttaaaantcccanccttttnccccttnaaaacttccttttcccctttctttttcnaacnttccccttacccnaaaacnttccccntttttcctttcnnaaancttnccccntttnttttaatnancccttttaattttttaaattccntntaaatnccttccttccaaattttcnttttttnccaaaacccccctttnaatcccancccttttccttntcctaaanntttttttattccaancccttaaaancannt

SEQ ID NO: 2959 - DNA, 881 bp, Homo sapiens
  misc_feature 105, 143, 167, 222, 232, 237, 253, 338, 491, 510, 531, 532,538, 556, 572, 577, 588, 598, 600, 601, 613, 663, 665, 674,690, 713, 731, 732, 736, 743, 745, 751, 756, 766, 776, 809,813, 821, 822, 827, 837, 841, 864, 866: n = A,T,C or G
tacgacgactactatagggcgaattggagctccacccgcggtggcggccgaacatctccagcaagctccggtcgatggcctgcacctctggctctagctccgacnccatcttctctcctcctccttcccagcgctaccgccgnccggagagctgcagcctcacctcngcgctctagaactagtggatcccccgggctgcaggaattcgatatcaagcttatngataccgtcnacctncagggggggcccggtncccagcttttgttccctttagtgagggttaattgcgcgcttggcgtaatcatggtcatagctgtttcctgtgtgaaattgttatncgctcacaattccacacaacatacgagccgggagcataaagtgtaaagcctggggtgcctaatgagtgagctaactcacattaattgcgttgcgctcactgcccgctttccagtcgggaaacctgtcgtgccagcctgcaattaatgaatcgnccaacgcgcggggagaggnggtttgcgtatttgggccgcnnttacgnttttctcgctcactgacntgaatgccgctcggtngttcngctgcggcgancggtataagntnnctcaaaggcggnaataccgttattccacaaaatcaggggaaaaccccagggaaagaacaatntnaagccaaanggccagcaaaaaggcnaggaaaccgttaaaaagggcccngtttgcttggccgttttnncaanaagggtncngccccnttgcnaagcctttanaaaaattgangcctcaagtcaaaagggggctaaaacccgacangganttataaannatacnaggcgttttncccnttggaaagctcccttggtggccntnttctttttccgacct

SEQ ID NO: 2960 - DNA, 896 bp, Homo sapiens
  misc_feature 1, 2, 5, 31, 36, 43, 356, 409, 458, 523, 540, 570, 614, 620,625, 638, 648, 651, 663, 678, 680, 688, 691, 694, 702, 703,707, 724, 729, 735, 738, 744, 747, 748, 758, 772, 775, 783,788, 800, 810, 813, 824, 828, 829, 835, 837, 845: n = A,T,C or G
  misc_feature 850, 856, 859, 860, 861, 864, 880, 886, 892: n = A,T,C or G
nngcncgcgtaatcgactactatagggcganttggngctaatnggagctccaccgcggtggcggccgcccgggcaggtacccttttcttccagcccagagctagacttctggatgctgagcctgggaaaatactgaatttctctcatttttcacttttaggagggaacggttatggcatatacttgcagtgccattagaagcattggcaatccctgatctttttgatagtttaaggcttagaatcatcaaaagttccaggttcatatccttctaaaatggaagaaatggaggaagttccaagtgtggtacctcggcccgctctagaactagtggatcccccgggctgcaggaattntatatcaagcttatcgataccgtcgacctcgagggggggcccggtacccagcnttttgttccctttagtgagggttaattgcccgcttggcgtaatcatggncataagctgtttcctggtgtgaaattggtattccgctcacaatttccacacaacaatacgaaccngggaagccataaaagtngtaaagccttgggggtgcctaaatggaggngagcttaacctcaccatttaattgcgtttgcgcttcacttgccngctttnccaantccgggaaaaccntggtcgggcnaanctgcatttaaangaattcgggccaacncncccgggangangcnggtttgcnntttngggccctttttccgttntcttngtccanttnactccnttnngcttcggccnttctggtttgcggnganccggtttnatttntatttaaagggnggggaataanggntatatcccccnaaanncggggnanaacccctnggaanaaactnttnnnccnaaaaaggcccttaaanggtctnggaacntaat

SEQ ID NO: 2961 - DNA, 419 bp, Homo sapiens
  misc_feature 209, 419: n = A,T,C or G
gcgtaatacgactcactatagggcgaattggagctccaccgcggtggcggccgggagccgcggaaagagtagggctccccagacaacggggtccgacgagcagttgggcacgggctgagtccgcctgccggcagaatgtccctggctgcttattgcgtcatctgttgcagaagaataggaacctctacttccccaccaaaaagtggcanacactggagagatatcagaaatataataaagtttactggatcacttattttaggaggttctttatttcttacatatgaagttctggccctgaagaaggctgtgacattagatactcaagtggtagaacgagaaaaaatgaagtcatatatatatgtgcacacagtttctttagataaaggagaaaatcatggtattgcctggcaggcagn

SEQ ID NO: 2962 - DNA, 430 bp, Homo sapiens
gcgtaatacgactcactatagggcgaattggagctccaccgcggtggcggccgaggtactaaaaggatcagcaaatggattccgcagtatcttggctgatgttgccaatacttttcttactgctttgtgaagttcttttcttgcctgccaggcaataccatgattttctcctttatctaaagaaactgtgtgcacatatatatatgacttcattttttctcgttctaccacttgagtatctaatgtcacagccttcttcagggccagaacttcatatgtaagaaataaagaacctcctaaaataagtgatccagtaaactttattatatttctgatatctctccagtgtgtgccactttttggtggggaagtagaggttcctattcttctgcaacagatgacgcaataagcagccagggacattctgccg

SEQ ID NO: 2963 - DNA, 842 bp, Homo sapiens
  misc_feature 2, 3, 10, 624, 693, 709, 711, 719, 759, 762, 763, 768, 774,798, 809, 837: n = A,T,C or G
tnnccgtatntactcactatagggcgaattggagctccccgcggtggcggccgaggtacaggctgacagagaagattcccgagagtaaatcatctttccaatccagaggaacaagcatgtctctctgccaagatccatctaaactggagtgatgttagcagacccagcttagagttcttctttctttcttaagccctttgctctggaggaagttctccagcttcagctcaactcacagcttctccaagcatcaccctgggagtttcctgagggttttctcataaatgagggctgcacattgcctgttctgcttcgaagtattcaataccgctcagtattttaaatgaagtgattctaagatttggtttgggatcaataggaaagcatatgcagccaaccaagatgcaaatgttttgaaatgatatgaccaaaattttaagtaggaaagtcacccaaacacttctgctttcacttaagtgtctggcccgcaatactgtaggaacaagcatgatcttgttactgtgatattttaaatatccacagtacctcggccgctctagaactagtggatcccccgggctgcaggaattcgatatcaagcttatcgataccgtcgacctcganggggggccccggtcccagcttttggtccctttagtgagggttaaattgccgcttgggcgtaatcatggncatagctgtttcctgngntgaaattnttaatccgctcacaattccccacaacatccaacccggganccnnaaagngtaaanccccggggggcctaatggagtggncctacctcacnttaattgcgttgcccttaacttgcccgntttcc

SEQ ID NO: 2964 - DNA, 850 bp, Homo sapiens
  misc_feature 202, 288, 326, 339, 382, 393, 399, 412, 424, 428, 454, 455,472, 491, 509, 510, 513, 515, 518, 519, 537, 545, 577, 584,593, 604, 620, 621, 634, 636, 637, 639, 647, 664, 672, 695,699, 707, 708, 720, 721, 738, 739, 742, 748, 750, 751: n = A,T,C or G
  misc_feature 752, 773, 777, 778, 779, 780, 799, 806, 815, 826, 827, 838,841, 847, 850: n = A,T,C or G
ctcactatagggcgaattggagctccaccgcggtggcggccgaggtacaggctgacagagaagattcccgagagtaaatcatctttccaatccagaggaacaagcatgtctctctgccaagatccatctaaactggagtgatgttagcagacccagcttagagttcttctttctttcttaagccctttgctctggaggaagntctccagcttcagctcaactcacagcttctccaagcatcaccctgggagtttcctgagggttttctcataaatgagggctgcacantgcctgttctgcttcgaagtattcaataccgctcagtnttttaaatgaagngattctaagatttggtttgggatcaatagggaaagcatatgcngccaaccaagnatgccnatgtttttgaaangatatgaccaanattntaagtaggaaagtcacccaaacactnntgctttcacttaagtgnctggcccgcaatactgtangaacaagcgtgatcttgnnacngngannttttaaatatgcacaggnacctaggncgctctagaactagtgggatcccccgggctgnaaggaantccgatgtnaagccttattngataccgtccacctcnnggggggggccccngnngnccccaggnttttgctccccttaaanagaggggnttaaattggggcgctttgggccngaantcattggnncataagcctcgnnttccctgtgtgaaaaannggntattcngnnnacaaatttccacaccaaaaanaacnnnncccggggagccaataaagnggtaaangcctggggnggcctaaaagnngggggagcttnacnctccantan

SEQ ID NO: 2965 - DNA, 855 bp, Homo sapiens
  misc_feature 403, 462, 520, 593, 596, 615, 620, 621, 633, 634, 637, 638,654, 668, 669, 683, 693, 695, 698, 708, 718, 719, 722, 725,737, 741, 744, 746, 751, 754, 776, 778, 800, 801, 808, 809,826, 827, 828, 832, 833, 841, 844, 846, 847, 852, 853: n = A,T,C or G
gtaatacgactcactatagggcgaattggagctccaccgcggtggcggccgaggtacgatatacgaagactctgagctgtttgcctccgatggtttccagtatttgcccgttgtaaagctcattaaggccaacttttactttcaatatgtgattctgcagaattaatttaaggaggcgctgatccatgctgagagtatcatcagaaaatgcattattcacaggtgccagcaaagtgtattctccatctggcctcagagcagatgccaagcctaattgggccacaagatccgtgaaggtggtttgctgttttccagccagctcaataacttgtttggcagaatcaggaattaggacctgatcaatcaaatggatcacaccattatttgtcacaatatccttttngttcaccattttgattccatttactgttatactgtcaccgtcacatcctatctcaattngtatttccttccagcgtctcaaagactgctcctcccataatagactcagaacctggangagtattttaagatgtggtacctcggccgttctagaactagggggatcccccgggctgcaggaattcgatttnaangcttatttgatacccgtcnacctnnaggggggggccnnggnnaccccaacctttggtnccccctttaaaagnnaggttaaattgcgnccccttgggngnaanccaatgggtnaaaaaaattnntcnccntggggggaaaanatgngantnccccntcncaaatttccccccaaaaaaaananaccccggggagcaaacaaaatnnttaaccnnggggggggacctaaaannnccgnntcgggaanttncnnctggnngg

SEQ ID NO: 2966 - DNA, 811 bp, Homo sapiens
  misc_feature 598, 656, 702, 761, 768, 771, 780, 791, 800, 806: n = A,T,C or G
taatacgactcactatagggcgaattggagctccccgcggtggcggccgaggtactgtggatatttaaaatatcacagtaacaagatcatgcttgttcctacagtattgcgggccagacacttaagtgaaagcagaagtgtttgggtgactttcctacttaaaattttggtcatatcatttcaaaacatttgcatcttggttggctgcatatgctttcctattgatcccaaaccaaatcttagaatcacttcatttaaaatactgagcggtattgaatacttcgaagcagaacaggcaatgtgcagccctcatttatgagaaaaccctcaggaaactcccagggtgatgcttggagaagctgtgagttgagctgaagctggagaacttcctccagagcaaagggcttaagaaagaaagaagaactctaagctgggtctgctaacatcactccagtttagatggatcttggcagagagacatgcttgttcctctggattggaaagatgatttactctcgggaatcttctctgtcagcctgtacctgcccgggcggccgccccgggcaggtacaccttgaatgacaatgcttcggagctnccctgtgggccatcgacccttcctgccattgatgcaccatccaacctgcgtttctggncaccacacccaaattccttgctgggatcatggcagccggccacgtnccaggattacccgctaccatcattaaagtattgagaaagccctgggtcttcctccccanagaaagnggncccttcggnccccccctggnggtcacaanaggctncctat

SEQ ID NO: 2967 - DNA, 874 bp, Homo sapiens
  misc_feature 5, 618, 632, 658, 669, 709, 745, 751, 770, 795, 819, 821,837, 841: n = A,T,C or G
tgccnatccgctactatagggcgaattggagctccccgcggtggcggccgaggtaccacatcttaaatactctccagtgttctgagtctattatgggaggagcagtctttgagacgctggaaggaaatacaattgagataggatgtgacggtgacagtataacagtaaatggaatcaaaatggtgaacaaaaaggatattgtgacaaataatggtgtgatccatttgattgatcaggtcctaattcctgattctgccaaacaagttattgagctggctggaaaacagcaaaccaccttcacggatcttgtggcccaattaggcttggcatctgctctgaggccagatggagaatacactttgctggcacctgtgaataatgcattttctgatgatactctcagcatggatcagcgcctccttaaattaattctgcagaatcacatattgaaagtaaaagttggccttaatgagctttacaacgggcaaatactggaaaccatcggaggcaaacagctcagagtcttcgtatatcgtacctcggcccgctctagaactaagtggatcccccgggctgcaggaattcgatatcaagcttatcgataccgtcgacctcgangggggggcccggtncccagcttttgttccctttaatgganggttaattgcncccttggcgtaatcatggtcattagctggttcctgtgtgnaaattggtaatcccgcttccaaattccccacaacantccaancccgggagcataaagtgtnaagcctgggggtgccctaatgaggngagcctacctcacattaattggcntncccctcactggcccgntttncagtcgggaaacctgtcgtgcccacttgcttaa

SEQ ID NO: 2968 - DNA, 842 bp, Homo sapiens
  misc_feature 560, 600, 607, 616, 636, 647, 664, 668, 684, 686, 703, 748,752, 777, 778, 793, 796, 798, 799, 800, 818, 824, 828, 829,830, 834, 841: n = A,T,C or G
cgactcactatagggcgaattggagctccaccgcggtggcggccgcccgggcaggtacctttccaatttggagctagaaatggacgaggagagtcttcagacattatctctgcagtgtgagccagcaaccaacacattgcctaagaatcctggtgacaaaaagcctgtcaaatccgagacctctccagtagctccaagggcagggtcacaacagaaagctcagtccctgccacagccccagcagcagccaccaccagcacataaaatcaaccagggactacaggttcccgccgtgtccctttatccttcacggaagaaagtgcccgtaaaggatctcccaccttttggcataaactctccacaagctttaaaaaaaattctttctttgtctgaagaaggaagtttggaacgtcacaagaaacaggctgaagatacaatatcaaatgcatcttcgcagctttcttctcctcctacttctccacagagttctccaaggaaaggctatactttggctcccagtgggtaccttgggccggttctagaactagtgggatcccccnggctgcaggaattcgatatcaagcttatcgatacccgtcnacctcgnagggggggncccgggacccaaacttttgntccctttaagnggggggtaattgcgccncttnggcgtaaatcaatggncntaagcttgtttccttgnggggggaaattggttaatccccttcacaatttccacacaaacaanaccnaaccccggggagcctttaaaggggnnaaaagccttgggggnggncnnnaaggggggggagcctaanctccanattnnnttgngggtggng

SEQ ID NO: 2969 - DNA, 850 bp, Homo sapiens
  misc_feature 198, 382, 401, 406, 418, 422, 424, 425, 433, 500, 532, 549,592, 599, 601, 606, 608, 622, 627, 635, 640, 653, 656, 659,662, 666, 667, 677, 678, 680, 691, 697, 698, 708, 714, 719,721, 724, 725, 732, 749, 763, 767, 771, 773, 791, 792: n = A,T,C or G
  misc_feature 794, 800, 810, 816, 819, 828, 829, 835, 836, 838, 839, 847,850: n = A,T,C or G
ctatagggcgaattggagctccaccgcggtggcggccgcccgggcaggtactgaggaatgaatagaaaggcttccagatgtctaaaagattctttaaactactgaactgttacctaggttaacaaccctgttgagtatttgctgtttgtccagttcaggaatttttgttttgttttgtctatatgtgcggcttttcanaagaaatttaatcagtgtgacagaaaaaaaatgttttatggtagcttttactttttatgaaaaaaaaattatttgccttttaaattcttttcccccatccccctccaaagtcttgatagcaagcgttattttgggggtagaaacggtgaaatctctagcctctttgtgtttttgttgttgttgntgttgttgttttatataangtatngtatgcactccnaatnanntttaaaanactcctgtcttgctagacaaaggttgcctgttgtgcaagtgggcctgtcactactggtctgtacctnggccgctctaggactagtgggatccccccggnctgcagggaattccatntcaagcttatcgataccctccgacctcgaggggggggccccgntacccancntgttngntccctttcactggnggggnaaattcgncgccncttgggcgtaatnatnggncanaggnnggggtccttnngnggaaaattggnaatccnnttcaccaatngcaccncaaanantanngaaaccnggggaggcattaaattngttaaaaccctggngggngccntnaatgaggggagcctaacnncncctttnattggggggngcggcncanctggcccgnntttccnngnngggaaaanccn

SEQ ID NO: 2970 - DNA, 804 bp, Homo sapiens
  misc_feature 598, 646, 658, 690, 767, 784, 785, 786, 796, 797: n = A,T,C or G
ggcgaatgtggagctccaccgtggtggcggccgaggtacatggatgaaaactaaaggctcgagttaatcacattgtagtttttaaatttctacagcctagagctcactagtcacaggtcttttaggtccttctggatgtcccacagggtatctgcacttttcttgagctgagcaacctcatcatcctttagcttctggttgataacgctggttaatccccgggcattgaggatacatggaaggctcaggaagacttcattctcaatgccatacatcccctttaccattgttgacacgggatgaatcctggatagatttttcaacatggattcaataagatcagccacacttaatccaatagcccagttggtatatccttttagcttggtgacttcataggcactttcaaccaccatcttatgcacttccttccaattttcactatcattgtcagttcccatttctggattcaattcctggagagaaacacctgccacattcacaccactccacacagccacacttgagcgccatgttcccccaaaatccatccatggcagctgctgggatgaatgccaagtttttcagccataagggnagcgaaatctagcagaatccagattacatccacttccaatcacgcggngtttgggtaatncacttagtttccagggtagcataccgtaaagnaatgtccactggggtgggaaacccacaattattgaaggcaatcagggactggaccctcgggccgctctagaactagnggatccccccgggctgnnnggaattcgannttcaagc

SEQ ID NO: 2971 - DNA, 832 bp, Homo sapiens
  misc_feature 14, 578, 592, 607, 610, 611, 618, 619, 636, 639, 641, 642,651, 652, 653, 655, 661, 665, 668, 669, 675, 681, 686, 687,688, 704, 705, 706, 729, 738, 743, 747, 751, 766, 771, 776,777, 784, 785, 786, 788, 792, 793, 794, 804, 808, 817: n = A,T,C or G
  misc_feature 820, 822, 823, 828, 831: n = A,T,C or G
tggagctccaccgnggtggcggccgaggtacacagccagtgtggttgccttgcacgatgatatggagagccagcccctgattggaacccagtccacagctattcctgcaccaactgacctgaagttcactcaggtcacacccacaagcctgagcgcccagtggacaccacccaatgttcagctcactggatatcgagtgcgggtgacccccaaggagaagaccggaccaatgaaagaaatcaaccttgctcctgacagctcatccgtggttgtatcaggacttatggtggccaccaaatatgaagtgagtgtctatgctcttaaggacactttgacaagcagaccagctcagggagttgtcaccactctggagaatgtcagcccaccaagaagggctcgtgtgacagatgctactgagaccaccatcaccattagctggagaaccaagactgagacgatcactggctttcaagttgatgccgttccagccaatggccagactccaatccagagaaccatcaagccagatgttcagaaagctacacccattacaggttttacaacccaggcactgactncaagatctacctgnaccttggggccggtnttnnaactaanngggatccccccgggggntgnannaatttggannntnaaggcntttnttnntacccnccgggncctcnnngggggggggcccgggnnnccaagggttttgtttcccttttnttggagggnttaantggngccnccttggggcgttaantcaanggtcnntagcttnnntncctnnngggaaaaatngttntcccctcangantnnccccnaant

SEQ ID NO: 2972 - DNA, 839 bp, Homo sapiens
  misc_feature 588, 614, 641, 677, 681, 687, 692, 710, 713, 756, 765, 767,771, 772, 777, 794, 799, 800, 817, 821, 822, 832, 834, 837: n = A,T,C or G
gtaatacgactcctatagggcgaattggagctccaccgcggtggcggccgaggtacagtcctgattgcatcataattgtggtttccaacccagtggacattcttacgtatgttacctggaaactaagtggattacccaaacaccgcgtgattggaagtggatgtaatctggattctgctagatttcgctaccttatggctgaaaaacttggcattcatcccagcagctgccatggatggattttgggggaacatggcgactcaagtgtggctgtgtggagtggtgtgaatgtggcaggtgtttctctccaggaattgaatccagaaatgggaactgacaatgatagtgaaaattggaaggaagtgcataagatggtggttgaaagtgcctatgaagtcatcaagctaaaaggatataccaactgggctattggattaagtgtggctgatcttattgaatccatgttgaaaaatctatccaggattcatcccgtgtcaacaatggtaaaggggatgtatggcattgagaatgaagtcttcctgagccttccatgtatcctcaatgcccggggattaaccagccgttatnaaccagaaactaaaggatgatgaggntgctcagctcaagaaaaggtgcagaanacccttgtggggaccatccagaaaggccctaaaaanaccntgtganctagngaactcttaaggcttggnagnaaatttaaaaactacaatgtggaattaacttccgagccctttnaagtttttnantccnntgtancttcggccggctctaanaactnngtggattccccccgggntggnngggaaatttnantanct

SEQ ID NO: 2973 - DNA, 825 bp, Homo sapiens
  misc_feature 493, 559, 628, 653, 703, 780, 801, 809: n = A,T,C or G
gtaatacgactcactatagggcgaattggagctccaccgcggtggcggccgaggtactgaggaatgaatagaaaggcttccagatgtctaaaagattctttaaactactgaactgttacctaggttaacaaccctgttgagtatttgctgtttgtccagttcaggaatttttgttttgttttgtctatatgtgcggcttttcagaagaaatttaatcagtgtgacagaaaaaaaaatgttttatggtagcttttactttttatgaaaaaaaaattatttgccttttaaattcttttcccccatccccctccaaagtcttgatagcaagcgttattttgggggtagaaacggtgaaatctctagcctctttgtgtttttgttgttgttgttgttgctgttttatataatgcatgtattcactaaaataaaatttaaaaaactcctgtcttgctagacaaggttgctgttgtgcagtgtgcctgtcactactggnctgtacctcggccgctctagaactagtggatcccccgggctgcaggaattcgatatcaagcttatngataccgtcccctcgagggggggcccgggacccagcttttgttccctttagtgagggttaattgcgccncttggcgtaaacatggcatagctgnttcctggggtgaaaattggtattcgctcaccaaattcccaccaacatacnaaccggggagcataaaagtggtaaaagcctgggggtgcctaatggagttgagcctaacctcaacaatttaatttgcntttgcgcctcacttgcccccntttccagnccggggaaaacccttt

SEQ ID NO: 2974 - DNA, 843 bp, Homo sapiens
  misc_feature 632, 669, 686, 701, 702, 730, 733, 735, 741, 742, 745, 746,747, 748, 752, 756, 757, 767, 768, 770, 773, 784, 786, 797,802, 806, 811, 814, 826, 827, 828, 831: n = A,T,C or G
ctactatagggcgaattggagctccaccgcggtggcggccgcccggacaggtacatgaagcacaaaaagactgtcgctcaggctgctgacagagattccggtcaggttggcgtaatcaatcctctgcttgactttggcgtcctccacgatgacgacggcgttgggcgtgagcagcagctgccgggagcgaggcttgtagcccttgcggtcgtatttcacaacaggcaccgcatactgaatgggctcagagcccaaggcctgcagcactcgggggctgatctcatctgtacctcggccgctctagaactagtggatcccccgggctgcaggaattcgatatcaagcttatcgataccgtcgacctcgagggggggcccggtacccagcttttgttccctttagtgagggttaattgcgcgcttggcgtaatcatggtcatagctgtttcctgtgtgaaattgttatccgctcacaattccacacaacatacgagccgggagcataaagtgtaaagcctggggtgcctaatgagtgagctaactcacattaaattgcgttgcgctcactgcccgcttttccagtcgggaaaccttgtcgtgccagctgcattaaatgaaatcggcccaaacccncgggggaagagggccgggtttgccgtattgggggcgnctctttccgctttcttngcttaactggacttnncttgggccttcgggccgttcgggttggnggncnagcggnnttnnnncttncctnnaaaggccggnnantanccggttatttncncaaaaattcanggggntaanccccnggnaaaaaaacattnnnaanccaaaaagggct

SEQ ID NO: 2975 - DNA, 870 bp, Homo sapiens
  misc_feature 6, 464, 489, 492, 577, 597, 598, 601, 622, 689, 714, 738,748, 750, 757, 763, 764, 770, 792, 795, 800, 808, 810, 820,832, 839, 842, 850, 852, 857, 860, 861, 862, 868, 869: n = A,T,C or G
cgactnctatagggcgaattggagctccaccgcggtggcggccgaggtacttgtcccggccttgcctcatgttctcgttgtggatgatgtcattgtgggtcctcttattctcatctcgggcctgggacagctcgctgctcagcgtcagcagctgccgctgcacacgctcgttcttctctgcctcagtgatgcgcttctcctcattgcggtcatcccggatgccctcactagacagctccgcgctgtagcccgtgggctctgcgccctcatcctgcaagctctcctggacatggtagctcaccggctcgtacctgcccgggcggccgctctagaactagtggatcccccgggctgcaggaattcgatatcaagcttatcgataccgtcgacctcgagggggggcccggtacccagcttttgttccctttagtgagggttaattgcgcgcttggcgtaatcatggncatagctggttttcctgtgtgaaantgntatccgctcacaattccacacaacatcgaagcccgggagcaataaaagtggtaaaaacctggggtgcctaaatgagtggaagctnaacttcacaattaaaattgnngtnggcccctcaacttggcccgcnttttcaagtccggggaaaaacccttgtccgtggcccagcttgcattaaaatggaatcggcccaaacnccgccgggggagaaggcgggttttnccgtattggggccggcttttttcngcttttcttngnttcactngaactnngcttgncgcttcgggtcgtttccgggcntgngggcnaagcgggnantcaagcttancttcaaaagggngggaaanacnggttattncnacagnaannnaggggnna

SEQ ID NO: 2976 - DNA, 846 bp, Homo sapiens
  misc_feature 425, 433, 503, 549, 562, 575, 671, 678, 696, 717, 719, 729,738, 781, 787, 807, 812, 815, 822, 825, 826, 838: n = A,T,C or G
cgactcactatagggccgaattggagctccaccgcggtggcggccgaggtacgatatacgaagactctgagctgtttgcctccgatggtttccagtatttgcccgttgtaaagctcattaaggccaacttttactttcaatatgtgattctgcagaattaatttaaggaggcgctgatccatgctgagagtatcatcagaaaatgcattattcacaggtgccagcaaagtgtattctccatctggcctcagagcagatgccaagcctaattgggccacaagatccgtgaaggtggtttgctgttttccagccagctcaataacttgtttggcagaatcaggaattaggacctgatcaatcaaatggatcacaccattatttgtcacaatatcctttttgttcaccattttgattccatttactgntatactgncaccgtcacatcctatctcaattgtatttccttccagcgtctcaaagactgctcctcccataatagactnaggaacactggagagtatttaagatgtggtacctcggccgctctangaactagtggatnccccgggctgcangaatttcgatatcaagcttatcgataccggtcgacctcgaggggggggcccggggacccagcttttggttccctttagtgaggggttaaattggcnccgcttnggcggtaaatcattgggncaataagcttggtttcctggngnggaaaattgntaatccggntcacaaatttcccccaccaaacaatacgaagcccggggagccntaaaangtgttaaaggcctggggggnggccntantggaggnggnngcttaacccccnaattaaag

SEQ ID NO: 2977 - DNA, 894 bp, Homo sapiens
  misc_feature 406, 442, 457, 462, 466, 467, 472, 477, 495, 497, 512, 518,534, 537, 538, 559, 565, 566, 575, 576, 585, 603, 604, 609,611, 613, 623, 634, 637, 641, 645, 652, 660, 671, 673, 674,676, 682, 686, 687, 689, 692, 699, 700, 702, 703, 705: n = A,T,C or G
  misc_feature 712, 713, 717, 728, 729, 733, 736, 742, 746, 747, 752, 757,758, 764, 769, 771, 782, 783, 786, 787, 792, 806, 808, 809,810, 821, 822, 824, 826, 832, 851, 852, 853, 855, 856, 859,861, 866, 873, 875, 879, 882, 885, 889, 891, 893: n = A,T,C or G
ctcctatagggcgaattggagctccccgcggtggcggccgaggactttttaaatcatgttccccctaaacatggctgttaacccactgcatgcagaaacttggatgtcactgcctgacattcacttccagagaggacctatcccaaatgtggaattgactgcctatgccaagtccctggaaaaggagcttcagtattgtggggctcataaaacatgaatcaagcaatccagcctcatgggaagtcctggcacagtttttgtaaagcccttgcacagctggagaaatggcatcattataagctatgagttgaaatgttctgtcaaatgtgtctcacatctacaccgtggcttggaggcttttatggggccctgtccaggtagaaaagaaatggtatgtagagcttanatttccctattgtgacagagccatggtgtgtttgtnataataaaaccccgngaaanaacnnatttnagggngcttgtacccttggccgntnttaagaaacctaagngggatncccccggggctgccanggnnattccgaatatcaaagccttnatctgnnaacccgccnnaccccctanggggggggggccccgggnnccccnancntttttgtttncctttttaganggngggnttanatttgcnccgccttnggggggaaaancnntngggggnaaanncntgnttttccnngnngngaaaaanngttnttttcccttcnncaanttncccccncaannaatanacaanncccggngggcnantataaaaggtnnaanncccgnggggggggcccccntnnngggggggcctnncncnccccantttttttgggggggggggnnncnnaantnccccnttttttncnaagnggnganaccntngnc

SEQ ID NO: 2978 - DNA, 838 bp, Homo sapiens
  misc_feature 526, 530, 552, 565, 578, 610, 620, 633, 641, 642, 651, 654,682, 683, 688, 689, 710, 712, 715, 716, 718, 731, 732, 735,737, 739, 742, 758, 778, 784, 785, 792, 793, 801, 803, 808,809, 810, 811, 814, 821, 822, 824, 825, 826, 838: n = A,T,C or G
ctcactatagggcgaattggagctccccgcggtggcggccgaggtaccggagacaggtgcagtccctcacctgtgaagtggatgcccttaaaggaaccaatgagtccctggaacgccagatgcgtgaaatggaagagaactttgccgttgaagctgctaactaccaagacactattggccgcctgcaggatgagattcagaatatgaaggaggaaatggctcgtcaccttcgtgaataccaagacctgctcaatgttaagatggcccttgacattgagattgccacctacaggaagctgctggaaggcgaggagagcaggatttctctgcctcttccaaacttttcctccctgaacctgagggaaactaatctggattcactccctctggttgatacccactcaaaaaggacacttctgattaagacggttgaaactagagatggacaggttatcaacgaaacttctcagcatcacgatgaccttgaataaaaattgccacactcagtgcagcaatattattaccngccngaataaaaaaagaaatcccatncttaaaagaaacnagtttttcaaggncccttttctgcaagttttttttaagggaagcnccaagaaaanattttgggaatanggaaatanncctcttagntcnttaaacaacccccccccttcttccaggnnttttnnaaaaaaaaggtttccaccatnanccnnangtttcccgaaggnnggntntnggntacccaactttttttnaaccggttttttgggggccnttttannccctttnntttttttntnggccnnnnttncaacccnngnnnggaaaatggttn

SEQ ID NO: 2979 - DNA, 823 bp, Homo sapiens
  misc_feature 515, 529, 563, 668, 673, 701, 718, 735, 738, 760, 765, 767,770, 779, 780, 784, 793, 796, 798, 804, 805, 809, 811, 817,822: n = A,T,C or G
gcgtaatacgactcactatagggcgaattggagctccaccgcggtggcggccgaggtactacttcttggttaaaaggccactggtagagtcatctgagtgtagagaatgtcccttcactgctggaaaaatccactggctcccaagaaaagaaaatggtctgaagcctctgttgtggctctcacaactcatctttccctaagtcatcaagctccacatcgctgaggtcaatgtcatcctccacgggaagctcgccatccctgccgtcccaaggctctctctcaacgatggtagggaaagccccgcctcctacaggtgccgtggagccacgcccaaaagagagctccctgagaaactcgttgatgccttgctcactgaaggagccttttagcagagcaaatttcatcttgcgtgcattgatggcggccatggcggggtacctcggcccgctctagaactagtggatcccccgggctgcaggaattcgatatcaagcttatcgataccgtcgacctcnagggggggcccggnacccagcttttgttccctttagtgagggttaatntgcgcccttggcgtaaatcatgggcatagctggtttcctgtgtgaaattgttatccccttcacaatttcacacaacatacgaagcccgggaagcataaaaaggtnaaagncctggggggggcctaatgaggtggactnacttaccttaattgcgntgggcttactgccccgnttncaatccgggaaaaccctgtccnggccncngcnttaatgaanngccnacccccggngananggcggnntttncntttttngggcnc

SEQ ID NO: 2980 - DNA, 1072 bp, Homo sapiens
  misc_feature 2, 5, 7, 8, 10, 11, 12, 13, 14, 15, 16, 17, 19, 20, 21, 23,24, 25, 26, 28, 29, 30, 31, 32, 33, 34, 35, 36, 37, 38,39, 40, 41, 42, 43, 44, 45, 46, 47, 48, 51, 53, 55, 56,57, 58, 59, 60, 61, 62, 63, 64, 66, 67, 68, 70, 71, 73,74: n = A,T,C or G
  misc_feature 75, 76, 77, 78, 79, 80, 81, 82, 83, 84, 85, 86, 87, 88, 89,90, 91, 93, 98, 99, 102, 107, 134, 135, 140, 330, 472, 502,613, 664, 678, 679, 680, 688, 704, 706, 708, 721, 730, 733,735, 737, 747, 755, 766, 767, 768, 789, 790, 792, 794: n = A,T,C or G
  misc_feature 796, 804, 810, 820, 832, 835, 839, 849, 854, 859, 861, 862,884, 887, 892, 902, 910, 911, 912, 915, 927, 929, 937, 954,962, 963, 964, 965, 969, 971, 978, 979, 985, 996, 1003,1004, 1009, 1038, 1043, 1045, 1049, 1055, 1057, 1062, 1066: n = A,T,C or G
  misc_feature 1067: n = A,T,C or G
gnttngnngnnnnnnnntnnngnnnntnnnnnnnnnnnnnnnnnnnnnttntngnnnnnnnnnntnnncnngnnnnnnnnnnnnnnnnnnngnagggnnggngcgtntacgactcctattcactatagggcganntgcangcgtggtggcggcccgaggtactgtggatatttaaaatatcacagtaacaagatcatgcttgttcctacagtattgcgggccagacacttaagtgaaagcagaagtgtttgggtgactttcctacttaaaattttggtcatatcatttcaaaacatttgcatcttggttggctgcatatgctttcctatngatcccaaaccaaatcttagaatcacttcatttaaaatactgagcggtattgaatacttcgaagcagaacaggcaatgtgcagccctcatttatgagaaaaccctcaggaaactcccagggtgatgcttgggaggaagctgngagttgagctggaagctggagaacttcctncaggaggcagaagggcttaagaaaaggaaaggaaggaactctaagcttggggtctgctaacatcactccagtttagatgggatcttgggcagagaggaccatggccttgtntccctctgggattgggaaaaggatggatttacctctcggggaatctttctntggccaggcctggnnncctacggnccggttctaggaaacngngnagggacctccccncggtcttgnaanananatttggctantaaaaggnattattctggnnncgcccaattttgcttccaggnngngngngccttttngggaangccccaagcntgggggcttggnccntctngttggacaangcttngaatntnnggaacccctttggggggggtgnaanccccnggggtccccnaaaggggnnnctnccttggggcccnanaacctttncccaaccccggtttttntttttatnnnnattncnatctttnncggganaccccgggcanctttttnntttanttttgccccccttggggggggcctttaantgggntnttgngaaagntncccantggnncgggc

SEQ ID NO: 2981 - DNA, 844 bp, Homo sapiens
  misc_feature 705, 725, 734, 770, 823, 836, 843: n = A,T,C or G
gcgtaatacgactcactatagggcgaattggagctccaccgcggtggcggcccgaggtacaggaactgtcaccgtgtcaacctgatggggagatatggggacaataaccacagtcagggcgttaactggttccactggaagggccacgaacactcaatccagtttgctgagatgaagctgagaccaagcaacttcagaaatcttgaaggcaggcgcaaacgggcataaattccagggaccactgggtgagagaggaataaggcccagagcgaggaaaggattttaccaaagcatcaatacaaccagcccaaccatcggtccacacctgggcatttggtgagagtcaaagctgaccatggatccctggggccaacggcaacagcatgggcctcacctcctctgtgatttctttctttgcaccaaagacatcagtctccaacatgtttctgttttgttgtttgattcagcaaaaatctcccagtgacaacatcgcaatagttttttacttctcttaggtggctctgggaatgggagaggggtaggatgtacctcggccgctctagaactagtggatcccccgggctgcaggaattcgatatcaagcttatcgatacccgtcgaccttcgaggggggggcccggtacccaacttttgttcccttttagtggagggtttaattgcgcgcttgggcgtaaatcatggtcnatagctggtttcctggtggngaaaattgntattccgctcaccaattccacaccaaacataccgancccggggaagcaataaagtggtaaaagccctggggggtggccttaatggagtnggagcctaactcncaatttnt

SEQ ID NO: 2982 - DNA, 855 bp, Homo sapiens
  misc_feature 688, 699, 762, 775, 790, 809, 813, 814, 855: n = A,T,C or G
gtaatacgactcactatagggcgaattggagctccaccgcggtggcggccgaggtactcaggggaggccaggaaggccttgagcttgggccgggcactgaggcgccccacatatgctgagagcagggggaacgcatccaggcagccaggggctaggacctcatggatcagcagcaagtccagcaggttgtagtcagcgaaggagatctggtctcccacaatgaaggtcttgcctccctggttctgggacagcagggtctcaaaaggcttcagttgcccgggcagtgccttcacatagtcatccttgcccgcctcatagttggtgtagatgagggagatgtatttgcagcggaggtcctccacgccgtcattcaccatgtccaccagggctgcctcctgctggtccttcccatagagcccaagggtgcggcccaggtgacgcaggatggtattggactggtacctcggccgctctagaactagtggatcccccgggctgcaggaattcgatatcaagcttatcgataccgtcgacctcgaggggggggcccggtacccagcttttgttccctttagtgagggttaattgcgcgcttggcgtaaacatggtcatagcttgttttcccttgtgtgaaattgttatcccgcttcacaaatttccacacaacaatacgaagcccgggaagcantaaaagtggtnaaaagccctggggggtgcccttaatggaggtgaagcctaaacttcacatttaattggcgtttncgcttcacttggncccgcttttccaagnccggggaaaaccctgtcgngccnngcttgcatttaatggaatcgggccaaacgccgccgggggan

SEQ ID NO: 2983 - DNA, 617 bp, Homo sapiens
  misc_feature 1, 2, 22, 48, 600, 602: n = A,T,C or G
nnccccgcgtccggtcatcggnaatcccgacacctgtcctcatctggnaacaaggtaaaaaggggtcactatgggagttcaaaggacagaactcctgcctggtgaccgggacaacctggccattcagacccggggtggcccagaaaagcatgaagtaactggctgggtgctggtatctcctctaagtaaggaagatgctggagaatatgagtgccatgcatccaattcccaaggacaggcttcagcatcagcaaaaattacagtggttgatgccttacatgaaataccagtgaaaaaaggtgaaggtgccgagctataaacctccagaatattattagtctgcatggttaaaagtagtcatggataactacattacctgttcttgcctaataagtttcttttaatccaatccactaacactttagttatattcactggttttacacagagaaatacaaaataaagatcacacatcaagactatctacaaaaatttattatatatttacagaagaaaagcatgcatatcattaaacaaataaaatactttttatcacaaaaaaaaaaaaaaaaaaaaagtgcggccgctagactagtctananaaaaaacctcccaca

SEQ ID NO: 2984 - DNA, 826 bp, Homo sapiens
  misc_feature 668, 737, 744, 745, 764, 771, 780, 783, 819, 826: n = A,T,C or G
taatacgactcactatagggcgaattggagctccaccgcggtggcggccgaggtacatggatgaaaactaaaggctcgagttaatcacattgtagtttttaaatttctacagcctagagctcactagtcacaggtcttttaggtccttctggatgtcccacagggtatctgcacttttcttgagctgagcaacctcatcatcctttagcttctggttgataacgctggttaatccccgggcattgaggatacatggaaggctcaggaagacttcattctcaatgccatacatcccctttaccattgttgacacgggatgaatcctggatagatttttcaacatggattcaataagatcagccacacttaatccaatagcccagttggtatatccttttagcttgatgacttcataggcactttcaaccaccatcttatgcacttccttccaattttcactaccattgtcagttcccatttctggattcaattcctggagagaaacacctgccacattcacaccactccacacagccaccacttgagtcgccatgttcccccaaaatccatccatggcagctgctgggatgaatgccaagtttttcaagccataagggagcgaaatctagcagaatccagattacatccacttccaatcaccccggggnttgggtaaatccacttaagtttccaggtaacataccgtaagaaatgtccactgggggttgggaaacccncaaattnntgatgcaatcagggactgnacccttnggccggttntanaactaagtgggatcccccccgggctgcaaggaattncgatatn

SEQ ID NO: 2985 - DNA, 877 bp, Homo sapiens
  misc_feature 203, 361, 474, 503, 505, 523, 529, 533, 534, 549, 569, 579,581, 598, 599, 610, 623, 657, 659, 663, 665, 667, 681, 691,696, 697, 706, 707, 710, 729, 736, 741, 751, 754, 764, 766,769, 787, 794, 795, 798, 800, 801, 807, 808, 809, 815: n = A,T,C or G
  misc_feature 817, 819, 821, 828, 829, 833, 837, 841, 843, 844, 847, 848,852, 853, 876: n = A,T,C or G
gactactatagggcgaattggagctccaccgcggtggcggccgaggtactgcagggcccctcaaggaggatactacaaaacagccctgggaaccaggtgcgacattcactgccagaagggctacgagctgcatggctcttccctactgatctgccagtcaaacaaacgatggtctgacaaggtcatctgcaaacaaaagcgangtcctacccttgccatgccagcaaatggagggtttaagtgtgtagatggtgcctactttaactcccggtgtgagtattattgttcaccaggatacaccgttgaaaggggagcggaccgtcacatgtatggacaacaaggcctggagcggtcgctctanaactagtggatcccccgggctgcaggaattcgatatcaagcttatcgataccgtcgaccttgagggggggcccggtacccagcttttgttccctttagtgagggttaattgcncgcttggcgtaatcatggtcatagctgtntnctgtgtgaaattgttatnccgttnacanntccacacaacatacngaggccgggaagcataaaanagggaaagcntngggggggccctaaatgnnatggagcttanacctcacattttnattggggtttggcgcctcacttggcccgcttttntncaantncngggaaaaacccttngtcccggccnagctnnattttaaannaantccgggcccacccccccgngggaagnggggngggttttggnggnatctggggcntnttntttccccttttccttggngccactnnacntnnctcccnnntcgggnancntntgggggnnaagncggnggcncnnttnnaggnnaaaattaaaaggcgggtaaaaanc

SEQ ID NO: 2986 - DNA, 841 bp, Homo sapiens
  misc_feature 83, 138, 352, 384, 393, 395, 434, 480, 511, 520, 632, 665,667, 674, 697, 708, 725, 728, 745, 758, 759, 772, 779, 787,807, 809, 820, 821, 826, 834: n = A,T,C or G
gtaatacgactcactatagggcgaattggagctccaccgcggtggcggccgaggtacaccttgaatgacaatgctcggagctnccctgtggtcatcgacgcctccactgccattgatgcaccatccaacctgcgtttnctggccaccacacccaattccttgctggtatcatggcagccgccacgtgccaggattaccggctacatcatcaagtatgagaagcctgggtctcctcccagagaagtggtccctcggccccgccctggtgtcacagaggctactattactggcctggaaccgggaaccgaatatacaatttatgtcattgccctgaagaataatcagaagagcnagcccctgattggaaggaaaaagacaggacangaagctctntntcagacaaccatctcatgggccccattccaggacacttntgagtacctcggccgctctagaactagtggatcccccgggctgcangaattcgatatcaagcttatcgataccgtcngacctctanggggggcccggtacccagcttttgttccctttagtgagggttaattgcgcgcttggcgtaatcatggcatagctgcttccttgtgtgaaattgttatccgcttcacaaattncccacaacataccaagcccggggagccataaangngtaaagnctggggggtgccccaaatgaggngagctaacttnacaatttaattggcggnggnggctcactgggcccccntttttcaagttcnnggaaaaaactgtncgggccnagctttcntttaattgaaatcaggccancnccccggggaannagggngttttgcnttttggg

SEQ ID NO: 2987 - DNA, 893 bp, Homo sapiens
  misc_feature 466, 483, 517, 533, 536, 539, 542, 550, 551, 554, 561, 562,566, 573, 590, 598, 599, 611, 619, 631, 635, 673, 675, 708,717, 720, 722, 723, 732, 742, 747, 749, 757, 758, 759, 761,764, 769, 772, 777, 782, 785, 791, 794, 798, 804, 822: n = A,T,C or G
  misc_feature 825, 826, 830, 833, 840, 847, 848, 849, 851, 853, 865, 870,872, 873, 875, 876, 880, 884, 885, 889, 892: n = A,T,C or G
tagggcgaattggagctccaccgcggtggcggccgaggtacaggctgacagagaagattcccgagagtaaatcatctttccaatccagaggaacaagcatgtctctctgccaagatccatctaaactggagtgatgttagcagacccagcttagagttcttctttctttcttaagccctttgctctggaggaagttctccagcttcagctcaactcacagcttctccaagcatcaccctgggagtttcctgagggttttctcataaatgagggctgcacattgcctgttctgcttcgaagtattcaataccgctcagtattttaaatgaagtgattctaagatttggtttgggatcaataggaaagcatatgcagccaaccaagatgcaaatgttttgaaatgatatgaccaaaattttaagtagggaaagtcacccaaacacttctgcttttcacttaaagtggnctggccccgccaatacnggtaggaacaaagccatggatccttgttacttgngaatatttttaaaatnatnccncangttccctnnggnccggctnntagnaacctangtggggaattccccccngggcctgnnggggaaatttcngattattnaaaggctttatncgantacccggccggcccttcggagggggggggcccccgggntnccccaaccctttttggctccccttttaagttgncaggggatnaantnngcccccccntggggcggtnagtcnanggggggcnnnanctnggttnccngcgcntgtgnaanattggntantccntgttcnaaaatttccccgccaccnttnnaacnccnggggggntttttannngnanaacccccggggnggccntnnanngagngggnnctcnccnc

SEQ ID NO: 2988 - DNA, 891 bp, Homo sapiens
  misc_feature 266, 389, 393, 409, 434, 437, 458, 489, 512, 526, 541, 548,584, 585, 601, 615, 632, 633, 636, 637, 640, 645, 647, 648,652, 662, 678, 721, 732, 739, 741, 742, 743, 749, 750, 751,755, 759, 760, 763, 776, 781, 782, 783, 789, 793, 794: n = A,T,C or G
  misc_feature 797, 801, 805, 809, 811, 814, 819, 823, 824, 833, 844, 847,848, 853, 854, 858, 879, 881, 882, 883, 884: n = A,T,C or G
ctcactatagggcgaattggagctccccgcggtggcggccgaggtacacgtcctgattgcatcataattgtggtttccaacccagtggacattcttacgtatgttacctggaaactaagtggattacccaaacaccgcgtgattggaagtggatgtaatctggattctgctagatttcgctaccttatggctgaaaaacttggcattcatcccagcagctgccatggatggattttgggggaacatggcgactcaagtgtggctgngtggagtggtgtgaatgtggcaggtgtttctctccaggaattgaatccagaaatgggaactgacaatgatagtgaaaattggaaggaagtgcataagatggtggttgaaagtgcctatgaagncatnaagctaaaaggatatnccaactgggctattggattaagcgnggntgatcttattgaattcatgtngaaaaatctatccaggcattcatcccgtgtnaaacaatgggtaaaggggatgtntggggcatttgaanaaatggaaggctttnccttgangccctttcccatgttattactccaaatgccccgggnngttttacccaagcggntttttcaaccccgnaaagcctaaaaggggannganngangggtngnnttcnggttcaaggnaaaaggcggccacaanacccccttggtgggggcccatcccctgaaggggccctttaaangaccctgtggncctaggngnnngctttnnncctntgtnnaanaattaaaaaaaanctccnnntggtgncttnnccncccncccngttnantgntttancccnnggaaccctntggcccgtttnttnnaaccnngggngggttccccccgggcctgggnannnnatttttt

SEQ ID NO: 2989 - DNA, 908 bp, Homo sapiens
  misc_feature 253, 256, 280, 288, 316, 344, 517, 533, 541, 547, 548, 549,551, 552, 553, 565, 569, 576, 588, 590, 592, 602, 603, 604,614, 623, 625, 635, 638, 643, 647, 652, 654, 660, 669, 672,680, 681, 686, 687, 689, 690, 695, 696, 714, 717, 718: n = A,T,C or G
  misc_feature 722, 728, 729, 731, 733, 734, 746, 748, 757, 761, 766, 767,768, 771, 773, 779, 783, 791, 793, 796, 798, 800, 805, 806,811, 821, 828, 833, 834, 835, 842, 844, 846, 851, 855, 864,865, 868, 869, 871, 877, 878, 879, 883, 886, 892, 893: n = A,T,C or G
  misc_feature 894, 899, 900, 901, 902, 903: n = A,T,C or G
gactcactatagggcgaattggagctccaccgcggtggcggccgcccgggcaggtacatgaccccttcattggttgtgcagatttcctcgtgggcagccatggggcagaacccaaacttctggtcggcatcatagttctgtgtggtcccacaccacttcatgttgtctcttctgccctcagaagtgcaatcagtgtaattgtggttgttgtataggaaggggaagtggcacaaggcaccattggaatttcctnctngagtctgaaccaaaacagtgtggnctgtgcanaaagagtatttctggtcctgctcataantcgaagttgtgctgcaccaaaagatgtncgtcctgtcgcccttctgtggtgcaggagtagaacgtcctgccattgtaggttgaatggtaaagacacatggctctccatttgaagttgccaccggaagctctgggttacagcttggcttttggcaagcctgactcccgatgccccagggcaccgtgccaaaagcaatttgcntaatttcctttggggncaatcaanccccannngnnntcccccacaggngttngtacccncacccacttgtntngnggaacaccannnggcccaatangggaaaggnanggccttgtgnggntgaangccntgctngntttggnaaaaaacanggnttgccacnnaaacnntnngggtnnaaggggggccccctaaanccnncttngaatanntngnncccgaccccaanangtttgcccntttnaaaannnatntntttttncttngggggccnanttntnanaactnnggagngaaatccccncgccttnacagnnnaactcgntntncctancttnttttaaaannctnncncccccnnngggnggngccccnnnacccnnnnnttttc

SEQ ID NO: 2990 - DNA, 814 bp, Homo sapiens
  misc_feature 524, 655, 666, 686, 720, 768, 769, 774, 784, 799, 811, 813: n = A,T,C or G
acgactactatagggcgaattggagctccaccgcggtggcggccgaggtctaacatccctagcagccttcctcaggcacactgtgacagtggagtgggcacacgtatcgtttcaggcaccttggctgacagcccaacgcggccacctgggtgcatggacatttgcagctgccaccatgccagcaccctggccacagattagctcaactggccacagtctgtgatgacaatcttcttggatgtcctcccactcttagagccgaaagattctattttcttcacgacgtccatgccctctttgacgtgaccgaacacaacatgcttgccatccaaccagtctgtctttatggtgcagatgaagaactgggagccgttggtgttaggaccagcattagccatggacaggacacctggccccacgtgcttcagtgcaaagttctcgtcaggaaaagcggcttccgtagatggacttcccgcctgtgccattgtggttggtgaagtcgcccgcctggcacatgaaggaangggatcaccctgtggaagggtggagcctttgtagccgaagccctttcttaccagtgcacagggctctgaagtttttagctgtcttttgggacgacatctgccttcagcttcagcaccacgccgggccgttntagaacttagnggatccccccgggcttgcanggaattcgatatcaagctttatcgataccgtccnacctcgagggggggcccgggaccccaacttttgggtccctttaagggnngggtnaatttggccnccttggggggaaaanaaagggcaaaancnt

SEQ ID NO: 2991 - DNA, 831 bp, Homo sapiens
  misc_feature 453, 484, 562, 565, 629, 630, 655, 670, 683, 702, 715, 716,744, 745, 749, 758, 759, 763, 767, 783, 799, 802, 809, 811,816, 817, 828: n = A,T,C or G
actcactatagggcgaattggagctccccgcggtggcggccgaggtacaagcttttttttttttttttttttttgctggtaatatattgctgcactgagtgtgtgcaatttttattcaaggtcatcgtgatgctgagaagtttcgttgataacctgtccatctctagtttcaaccgtcttaatcagaagtgtcctttttgagtgggtatcaaccagagggagtgaatccagattagtttccctcaggttcagggaggaaaagtttggaagaggcagagaaatcctgctctcctcgccttccagcagcttcctgtaggtggcaatctcaatgtcaagggccatcttaacattgagcaagtcttggtattcacgaaggtgacgagccatttcctccttcatattctgaatctcatcctgcaggcggccaatagtgtcttggtagttagcagcttnaacggcaaagttctcttccatttcacgcatntggcgttccagggactcattgggttcctttaagggcatccacttccaggtgagggactgcacctgtctccggtacctnggncgctctagaactagtggatccccccgggctgcagggaattcgatatcaagctttatcgatccgnncgaccctcgaggggggggccccggnacccagctttttggntcccctttaagtngaggggttaaattgccccnctttgggcgtaanncatggggccaatagcctggtttccttgnngggnaaaatgggnntccnctcnccaattcccccccaanatacgaagcccgggangcntaaaagngnaaaanncttgggggggncct

SEQ ID NO: 2992 - DNA, 832 bp, Homo sapiens
  misc_feature 314, 495, 548, 641, 678, 692, 697, 736, 761, 777, 782, 784,787, 788, 789, 791, 792, 793, 794, 799, 806, 809, 814, 816,818, 820, 821, 824, 827: n = A,T,C or G
gactcactatagggcgaattggagctccaccgcggtggcggccgaggtaccttacaaaagttaatgcattagacacttcagatgttaactgctctaaacaaaactcctaagtctgtcctatgcaatatatattttatatacatatatatttttacatagaatacccacaaagtgcaagccaataataacattgcagaaaagtaatacatatctgctaggtgacaatatcaaacaattcagggaataattttactttaattaacattaacagaatttctttttccacttcaaatcaatcatatttctgtcatctncaacctaagatattttttagattgtctccctattctttgattcaaaagccaattacagaaactatgaacttgacctaattctggtttttgacaattatgagacagaaataaagaaatgcaagcagttcttttctttgcacactgaccattttttaattacatcatcctctatgatgatggngctttcacaactgcagctctcctgtatgtcaaaatcattctggtttccaggtnaatggacaaaggagatttgccttcagtgtctagaaggcaatttacttttcaggctgccttaattacctataggttaaaggaaagggaatgccncatataggggccctttaaacatctaaaaaatgggganggtggccttccaangggcncccattgccccaaccattttggattttccagggcccaanaaggcctttcatatattggttacangttattgttcccttgnggaanantgnnncnnnnggccnaaggggntcnaaggntngngnncantanttaac

SEQ ID NO: 2993 - DNA, 875 bp, Homo sapiens
  misc_feature 386, 497, 565, 596, 607, 626, 643, 645, 651, 664, 669, 685,705, 732, 735, 737, 746, 750, 755, 763, 767, 772, 784, 792,794, 796, 797, 799, 806, 822, 824, 829, 836, 850, 863, 867,871: n = A,T,C or G
ctcactatagggcgaattggagctccccgcggtggcggccgaggtactccaggccgggactcaggttatcaaaagtgcaggagctctgatcagcatggaccacttcttccaaagaatttccctgctggccgtttgtaggggttgtggtaattctataaccagtaatgtctggggtggtgctcctctcccaggagactgtgagcactccagtgtcagggtttgcctccagatgcaagtttgttggtggagacaatggtgtcaccactttgtttacaattggcgcatctctttcctgtccatctctcaggacttggatggtgtagaccgtattctactcctggagtcaagccggacacaacgatgcttcctgagtctgaagtcacttntcgtggtgcctctcctccctggcttggtcgtacctcggccgctctagaactagtgggatcccccgggctgcaaggaattcgatatcaagcttatcgataccgtcgacctcnagggggggcccggtacccaagcttttgttccctttagatgaggggttaattgccccgcttggcgtaancatgggtcataagctgttttccttgtgtggnaatttgtttantcccgcttcaacaaatttncaccacaaacaataccnangccggngagccattaaaangtggnaaaagccctggggggnggccttaattgaagttgaancctaaactccaccattaaattttgcgnttngnggcttcaanttgncccgntttttccnaatnggggnaaaccctgggcngtggccangntnncntttaaantgaaattgggcccaancnccccnggggagnagggcgggtttggncgtatttggggcncctntttncccg

SEQ ID NO: 2994 - DNA, 853 bp, Homo sapiens
  misc_feature 706, 720, 721, 733, 739, 767, 797, 798, 813, 818, 820, 837,839, 840, 844, 848, 852: n = A,T,C or G
acttactactcactatagggcgaattggagctccccgcggtggcggccgaggtaccggagacaggtgcagtccctcacctgtgaagtggatgcccttaaaggaaccaatgagtccctggaacgccagatgcgtgaaatggaagagaactttgccgttgaagctgctaactaccaagacactattggccgcctgcaggatgagattcagaatatgaaggaggaaatggctcgtcaccttcgtgaataccaagacctgctcaatgttaagatggcccttgacattgagattgccacctacaggaagctgctggaaggcgaggagagcaggatttctctgcctcttccaaacttttcctccctgaacctgagggaaactaatctggattcactccctctggttgatacccactcaaaaaggacacttctgattaagacggttgaaactagagatggacaggttatcaaccgaaacttctcagcatcacgatgaccttgaataaaaattgcacacactcagtgcagcaatatattaccagccagaataaaaaagaaatccatatcttaaagaaacagctttcaaagtgccctttcttgcagtttttcaaggagcgcaaggaatagattttggaatagggaataaagctctagtttcttaacaaacccgaccactttcttacaaggatttagaaaaaaaagtttaccaacnataatctaagtatnnccggaaaaaaanctttgnggcttagaatactttttttaaaaaaggnatttttggaatactttttaaaaaaactggnnttttttttttcccgncaggngntccaacccacctttggntnnttgntttnaaana

SEQ ID NO: 2995 - DNA, 827 bp, Homo sapiens
  misc_feature 570, 620, 639, 657, 674, 697, 716, 723, 769, 781, 794, 803,805, 813, 820, 823, 826: n = A,T,C or G
gtaatacgactcactatagggcgaattggagctccccgcggtggcggccgaggtacgatatacgaagactctgagctgtttgcctccgatggtttccagtatttgcccgttgtaaagctcattaaggccaacttttactttcaatatgtgattctgcagaattaattttaggaggcgctgatccatactgagagtatcatcagaaaatgcattattcacaggtgccagcaaagtgtattctccatctggcctcagagcagatgccaagcctaattgggccacaagatccgtgaaggtggtttgctgttttccagccagctcaataacttgtttggcagaatcaggaattaggacctgatcaatcaaatggatcacaccattatttgtcacaatatcctttttgttcaccattttgattccatttactgttatactgtcaccgtcacatcctatctcaattgtatttccttccagccgtctcaaagactgctcctcccataatagactcagaacactggagagtatttaagatgtggtacctcggccgctctagaactagtggatcccccngggctgcaggaattcgatatcaagcttatcgatacccgtcgaccctcgangggggggcccgggacccancttttgttccctttaatngagggggttaatttggncgcttggcgtaaccatgggccanagctgttttcctggggggnaaattgngtattcccttccccaatttccccacaaaaataccaaccccgggaanccataaaagtgnaaaagcctggggnggcctaatnangggaggcntacctcncanttna

SEQ ID NO: 2996 - DNA, 874 bp, Homo sapiens
  misc_feature 395, 466, 482, 504, 549, 562, 574, 586, 603, 619, 620, 622,626, 633, 641, 645, 658, 666, 669, 682, 697, 698, 699, 701,702, 708, 710, 713, 735, 746, 748, 756, 760, 767, 768, 775,779, 788, 790, 794, 802, 803, 810, 811, 824, 825, 827: n = A,T,C or G
  misc_feature 828, 840, 849, 850, 855, 859, 860, 867: n = A,T,C or G
acgactactatagggcgaattggagctccaccgcggtggcggccgaggtacttctgtttaagccggtccatgagcaggccattccagggggcacacagcactccgaactgagtgaaggcaaaggcatttgtgtaggtgctgactcgtgccatgtccccaccggccatgttggtcagcaaggagttgagagtgccaatgaagaggtagtgccacaactgtatcacagacagccacaccaggtgccaggcaaagcgccgagagaaagcgtagctccagaaggagcggagttcctgcttctgccctgcccctggggtctcttccttcgctgaaaggaactcctttgactgtagctccctgttttcatgctcagctgcttccttctcttcctttgtggngccattcccagggcacaggccatagctgtagttggggggcagtgggtatgggatgtgcccccgggggcatnaagaggaaaagtgccntgcttcatgccaggttaccttngccgctctagaaactagttggatcccccgggctgcagggaattcnatatcaaagcttnatcgatacccgnccgaaccttcgnagggggggggccccggnacccccagcctttttnntncccntttaatngaaggggntaanttggcgccccttngggccgtnaanttcatggttaatnggctgggttaacttnnngnnaaaatngntantccccttcaccaattttcccancaacattaccnancccggggngcantaaaagnngtaaaangccncgggggggncntaangccggggnngcttaanntccccgttaaaanncnngggggggggccntaattgggnnggatnttannatccccnttaaaac

SEQ ID NO: 2997 - DNA, 800 bp, Homo sapiens
  misc_feature 590, 594, 653, 664, 671, 673, 684, 695, 703, 720, 740, 760,778, 783, 798: n = A,T,C or G
acgactcctatagggcgaattggagctccaccgcggtggcggccgaggtacagctgtctgcattgaaaattcatgcatggagaaagggagtaagcaagggagaaacggtgcgattcacatattccgcgagatcatcaagccagcagagaaatccctccatgaaaagttaaaacaagataagcgctttagcaccttcctcagcctacttgaagctgcagacttgaaagagctcctgacacaacctggagactggacattatttgtgccaaccaatgatgcttttaagggaatgactagtgaagaaaaagaaattctgatacgggacaaaaatgctcttcaaaacatcattctttatcacctgacaccaggagttttcattggaaaaggatttgaaccttggtgttactaacattttaaagaccacacaaggaagcaaaatctttctgaaaggaagtaaatgatacacttctggtgaatgaattgaaatcaaaagaatctgacatcattgacaacaaatggtgtaattcatgttgtaagataaactcctctatccagcagacacacctgttggaaaatgatcaactgctggnaatncttaataaattaatcaaatccatccaaatttaagtttgttcggggtagcaccttcaaangaaatccccgngactgtntntaagccaattnttaaaaaatcnccaaatcnttggttggagggcctgnggaaatactgaaaaggagancccgagaagaacgattcttncaggtcctgaaataaaanccctnggatttttcctgggngg

SEQ ID NO: 2998 - DNA, 831 bp, Homo sapiens
  misc_feature 467, 479, 488, 528, 530, 531, 542, 543, 545, 546, 552, 557,569, 581, 588, 633, 660, 661, 688, 705, 718, 723, 729, 749,763, 770, 794, 795, 796, 813, 822: n = A,T,C or G
ctatagggcgaattggagctccaccgcggtggcggccgaggtacttgagctgtgaggtcatcggaatcccgacacctgtcctcatctggaacaaggtaaaaaggggtcactatggagttcaaaggacagaactcctgcctggtgaccgggacaacctggccattcagacccggggtggcccagaaaagcatgaagtaactggctgggtgctggtatctcctctaagtaaggaagatgctggagaatatgagtgccatgcatccaattcccaaggacaggcttcagcatcagcaaaaattacagtggttgatgccttacatgaaataccagtgaaaaaaggtgaaggtgccgagctataaacctccagaatattattagtctgcatggttaaaagtagtcatggataactacattacctgttcttgcctaataagtttcttttaatccaatccactaacactttagtnatattcactggntttacaccngagaaatacaaaataaaggatcacacatcaagactatctncnngaaaaaaaatnncnntaaatnaaaanggcttgtccctnggccgttcttanaactagngggatcccccgggctgcaggaattcgatatcaagccttatcgatnccgtcgacctcgaggggggggcccggnncccagcttttgggttccctttagtgangggttaaattggcccgncttggccggaaantcatngggcanaggctggtttccttgggggnaaattgttatcccngtttccnaaattccccacaaacaattaccgnnnccggggagccattaaangggtaaaanccctggggg

SEQ ID NO: 2999 - DNA, 818 bp, Homo sapiens
  misc_feature 652, 656, 703, 704, 724, 727, 735, 736, 756, 773, 778, 791,793, 795, 798, 808, 817: n = A,T,C or G
actcactatagggcgaattggagctccaccgcggtggcggccgaggtacgatatacgaagactctgagctgtttgcctccgatggtttccagtatttgcccgttgtaaagctcattaaggccaacttttactttcgatatgtgattctgcagaattaatttaaggaggcgctgatccatgctgagagtatcatcagaaaatgcattattcacaggtgccagcaaagtgtattctccatctggcctcagagcagatgccaagcctaattgggccacaagatccgtgaaggtggtttgctgttttccagccagctcaataacttgtttggcagaatcaggaattaggacctgatcaatcaaatggatcacaccattatttgtcacaatatcctttttgttcaccattttgattccatttactgttatactgtcaccgtcacatcctatctcaattgtatttccttccagcgtctcaaagactgctcctcccataatagactcagaacactggagagtatttaagatgtggtaccttcggccgctctagaactagtggatcccccgggctgcaggaattcgaatatcaagcttatcgataccggtcgacctcgaggggggggcccgggacccaactttttggtcccttttagggngggntaaattgcgccccttgggcgtaatcatgggcatagctgtttccctgnngtgaaaaatggttatcccgnttncaattccnnccaacaatacaagcccgggngcataaaagtggttaangcctnggggggcctaatngngnggngctaccttcncattaaatng

SEQ ID NO: 3000 - DNA, 901 bp, Homo sapiens
  misc_feature 2, 3, 8, 16, 281, 394, 415, 419, 434, 477, 505, 508, 517,520, 521, 532, 535, 540, 547, 560, 561, 594, 606, 608, 628,646, 648, 672, 695, 704, 705, 708, 723, 724, 727, 736, 745,747, 750, 752, 760, 772, 793, 805, 808, 837, 839, 853: n = A,T,C or G
  misc_feature 856, 868, 876, 879, 885, 887, 888, 889, 892, 893, 894, 900: n = A,T,C or G
tnngctanatggcganttggagctccccgcggtggcggccgaggtactcagaagtgtcctggaatggggcccatgagatggttgtctgagagagagcttcttgtcctacattcggcgggtatggtcttggcctatgccttatgggggtggccgttgtgggcggtgtggtccgcctaaaaccatgttcctcaaagatcatttgttgcccaacactgggttgctgaccagaagtgccaggaagctgaataccatttccagtgtcatacccagggtgggtgacnaaaggggtcttttgaactgtggaaggaacatccaagatctctggtccatgaagattggggtgtggaagggttaccagttggggaagctcgactgtctttttccttccaatcangggctcgctcttctgattatncttnagggccaatgacatnaattgcaatattcggttccccggtttccagggccaaccaatantgggccctcttgggaccgcccaaagganggngttccttgnggnncaaattttttnttnggagngagcatncaacccttttggnncgtttcttatgaaactaagtgggatcccccccngggcttggcagngnaattccggaattttccaagncttattccataccccggncnacccttcgaggggggggggccccnggaaaccccagccttttttgttncccttttannggnggggtttaaattggnnccnctttgggcngtaaatcantnggncnatagcctntttttccttgtngtggaaaatttggttattccncttcacaaattnccnacccaaacaattccgagcccgggggaggnantaaaagggtaaaanccntgggggggcccncaatgggntgngctcancnnnccnnntaattnc

SEQ ID NO: 3001 - DNA, 819 bp, Homo sapiens
  misc_feature 570, 703, 769, 786, 795, 799, 800, 802, 805: n = A,T,C or G
cgactcactatagggcgaattggagctccaccgcggtggcggccgaggtacgatatacgaagactctgagctgtttgcctccgatggtttccagtatttgcccgttgtaaagctcattaaggccaacttttactttcaatatgtgattctgcagaattaatttaaggaggcgctgatccatgctgagagtatcatcagaaaatgcattattcacaggtgccagcaaagtgtattctccatctggcctcagagcagatgccaagcctaattgggccacaagatccgtgaaggtggtttgctgttttccagccagctcaataacttgtttggcagaatcaggaattaggacctgatcaatcaaatggatcacaccattatttgtcacaatatcctttttgttcaccattttgattccatttactgttatactgtcaccgtcacatcctatctcaattgtatttccttccagcgtctcaaagactgctcctcccataatagactcagaacactggagagtatttaagatgtggtacctcggccgctctagaactagtggatcccccgggctgnaggaattcgatatcaagcttatcgataccgtccgcctcgagggggggcccgggtacccagcttttgttcccttttagtgaggggttaattgcgcgctttgggcgtaatcatgggtcataggctgttttcctgnggtggaaaatggtatcccggtcacaatttccacaccaacattacgaagcccgggagccataaaagngtaaaagccctgggggnggcccttantggnngnggngcttacttcaaatt

SEQ ID NO: 3002 - DNA, 917 bp, Homo sapiens
  misc_feature 332, 420, 443, 510, 537, 548, 549, 570, 591, 595, 599, 622,631, 642, 645, 648, 652, 662, 664, 674, 684, 704, 705, 707,709, 715, 736, 738, 740, 769, 775, 795, 804, 805, 809, 815,819, 833, 835, 837, 845, 853, 856, 869, 870, 883, 884: n = A,T,C or G
  misc_feature 889, 894, 900, 901, 907, 917: n = A,T,C or G
gtaatacgactcactatagggcgaattggagctccaccgcggtggcggccgcccgggcaggtacaaagcaggagaatgatgctcccagctgagctgcaggatgggcgctgggctgactggaggggtagacggggtggggtctgaccccattagcctttccccatccaacctgggcccccataagccattctctggccctctgcacaagacagactcagcaaatctgcgaggtatggggattctgccaactccccacctcgcctcaccttccctaggtctgccgggtgacccaatccactgggtgcagccccacccccgctcaaccccacatntggacagacacatggcaaatatggaactgaagcccggctgggctgggagcacatcttggttgttgttgggttggagtccgtcttgcangtgtcccaaggtggtcaggcctnacccacagtggccaggtttgagaccgtgtttttttagaatgatttaaggttactccagggccaaaancaatgaatccctgattgaccacccccngccggaaaaanncaaggcttgggaacctttggnaaaaaaaaccctcgggcccgnttcntaanaaacttagttggaattccccccnggccttgcnaaggaaatttngantantcanaccttttatntnattacccgtnccaacccttncaaggggggggggcccccgnntntnccaagnttttttggttcccctttttantnanggggtttaaattttccccccctttgggcngtaaantcattgggtccataaacctnttttccctnntttngaaaantttntaattcccatttancnanttcccacnacaaacantanctaaacccagggnngcctttaaacttnnaaaanccctngggggnnccctanaataaataan

SEQ ID NO: 3003 - DNA, 852 bp, Homo sapiens
  misc_feature 404, 470, 500, 502, 506, 508, 510, 511, 515, 517, 528, 531,538, 547, 553, 566, 574, 580, 591, 603, 609, 612, 620, 631,643, 645, 653, 663, 672, 694, 698, 701, 702, 712, 725, 727,731, 738, 739, 750, 755, 757, 764, 769, 784, 785, 786: n = A,T,C or G
  misc_feature 802, 812, 820, 826, 847, 849: n = A,T,C or G
ctcctatagggcgaattggagctccccgcggtggcggccgaggtactgaggaatgaatagaaaggcttccagatgtctaaaagattctttaaactactgaactgttacctaggttaacaaccctgttgagtatttgctgtttgtccagttcaggaatttttgttttgttttgtctatatgtgcggcttttcagaagaaatttaatcagtgtgacagaaaaaaaaatgttttatggtagcttttactttttatgaaaaaaaaattatttgccttttaaattcttttcccccatccccctccaaagtcttgatagcaagcgttattttgggggtagaaacggtgaaatctctagcctctttgtgtttttgttgctgttgttgttgttgctttatataatgcatgtnttcctaaaataaaatttaaaaaactcctgtcttgctagacaaggttgctgttggtgcagcgtgccngtcactactgggctgttcctcgggacggtntnactntngnngacncngggggcctggngcngatttanaactaaagnttatcnatccctccacctntagggggngccccntaccccaaccnttgggacccttnaggggnggncccaattnccccccctttngggccccttttngngaaggggntaaattgccncgccttggnaagtaaattcatgggccataancttngtnnccctgggggnggaaaaaattggntntccnccttccnnaatttccccancaacnantaccccnccccngggagccataaaagnnntaaaaccctggggggngcccttaatngaggtggncctaancttcccattaaattgccggtngnccg

SEQ ID NO: 3004 - DNA, 873 bp, Homo sapiens
  misc_feature 187, 367, 428, 443, 500, 501, 513, 514, 518, 526, 568, 584,587, 590, 606, 617, 626, 628, 637, 640, 657, 661, 668, 675,679, 690, 691, 693, 702, 704, 705, 706, 708, 713, 714, 726,729, 732, 744, 747, 754, 755, 756, 759, 760, 761, 762: n = A,T,C or G
  misc_feature 764, 772, 774, 777, 784, 792, 794, 800, 807, 814, 815, 820,831, 832, 836, 850, 860, 861, 865, 867, 869, 871: n = A,T,C or G
ctactatagggcgaattggagctccaccgcggtggcggccgccacgctggttttgcatcttcaggagacgctcgtagccctcgcgcttctcctcggccaattcgcggaagaagtggctcacgccttccagagccacatcatcgcggtcgaaatagaagcccagagagaggtaggtgtaggaggccgnaaaaacggtgctggcaggtcccagaagcaggagatggccgagaagatggtcccggaggttgcaagcggagaggaaatcggagggcggtcggaggctggaagagagtccccggatctgttccgtccaaacactgttgaagcaagagacagacccgcggacctgcccgggcggccgctctanaactagtggatcccccgggctgcaggaattccatatcaagcttatcgataccgtcgacctngagggggggcccggntacccagcttttgttccctttagtgagggataattgcgcgcttggcgtaatcatggnncatagctggttnnctgngtggaaantgtatccggtcacaatttcacacaacaattactagcccgggnagcattaaaaattgtnaangcnctggggtgcccttaantggagtgagcntaaacttcncntttaaattnggngggggccgctcacttgncccngcttttncaggtcntggnaaaaaaccttnntnggggcccancnnncnttttnntggaaatctggnccnacnccccccgggggngangggcggnnntgnnnnanttggggtncnctntttcccnatttctcngnttcaanttacatngcctggnnctctnaatagtttccnnagtnccggggggcgggtnaattatttcnncttnanangncc

SEQ ID NO: 3005 - DNA, 828 bp, Homo sapiens
  misc_feature 2, 6, 671, 682, 715, 756, 758, 761, 795, 810, 818, 823: n = A,T,C or G
tngggntagggcgaattggagctccccgcggtggcggccgaggtacaacttcattgaactgccctaccacggggaaagcatcagcatgctgattgcactgccgactgagagctccactccgctgtctgccatcatcccacacatcagcaccaagaccatagacagctggatgagcatcatggtgcccaagagggtgcaggtgatcctgcccaagttcacagctgtagcacaaacagatttgaaggagccgctgaaagttcttggcattactgacatgtttgattcatcaaaggcaaattttgcaaaaataacaaggtcagaaaacctccatgtttctcatatcttgcaaaaagcaaaaattgaagtcagtgaagatggaaccaaagcttcagcagcaacaactgcaattctcattgcaagatcatcgcctccctggtttatagtagacagaccttttctgtttttcatccgacataatcctacagggtgctgtgttattcatggggcagataaaacaaaccctgaagagtatacaaaagaaaccatgcaaagcaaccgactacttttgcttacgaagaaagactcctttcctgcatcttttcataggtctggtaaatatttttgtacctcggccggcttctagaaactagtggatccccccgggcttgcanggaaattcganatcaaggcttatcgatacccggccgacctcgangggggggggcccgggtccccaagcttttggttcccttttangnggnggggttaattggggcgccttggcgtaatcatggnccataagctggtttncttggggngaaantggtt

SEQ ID NO: 3006 - DNA, 836 bp, Homo sapiens
  misc_feature 21, 189, 496, 627, 694, 695, 744, 749, 755, 759, 764, 780,800, 802, 819, 824, 835: n = A,T,C or G
ctctcctatagggcgaattgnagctccccgcggtggcggccgaggtacatcatttcatgtcatcctgttggcactgatgaagaacccttacagttcagggttcctggaacttctaccagtgccactctgacaggcctcaccagaggtgccacctacaacatcatagtggaggcactgaaagaccagcanaggcataaggttcgggaagaggttgttaccgtgggcaactctgtcaacgaaggcttgaaccaacctacggatgactcgtgctttgacccctacacagtttcccattatgccgttggagatgagtgggaacgaatgtctgaatcaggctttaaactgttgtgccagtgcttaggctttggaagtggtcatttcagatgtgattcatctagatggtgccatgacaatggtgtgaactacaagattggagagaagtgggaccgtcagggagaaaatggccagatgatgagctgcacatgtcttgggaacngaaaaagggagaattcaagtgtgacccttatgaggcaaccgtgttaccgatgatgggaaagacatattcacgtaggagaacagtggcagaaggaatatctcggtgccatttgcttctgccatgctttggangcccaggcgggggcttggcgcttgtgacaactgccgcagaaccttggggggtggaaccccagtcccnnaagggcccctactgggcccagtcccctaccaaacaggtatttttttaanaagantacccnttcnaaagnaccaaaccccttaatngttaaattggcccaatttgngngctttcatgcctttagnagggncctggggccgnt

SEQ ID NO: 3007 - DNA, 817 bp, Homo sapiens
  misc_feature 689, 707, 710, 764, 801, 804: n = A,T,C or G
cgactcactatagggcgaattggagctccccgcggtggcggccgaggtacaggctgacagagaagattcccgagagtaaatcatctttccaatccagaggaacaagcatgtctctctgccaagatccatctaaactggagtgatgttagcagacccagcttagagttcttctttctttcttaagccctttgctctggaggaagttctccagcttcagctcaactcacagcttctccaagcatcaccctgggagtttcctgagggttttctcataaatgagggctgcacattgcctgttctgcttcgaagtattcaataccgctcagtattttaaatgaagtgattctaagatttggtttgggatcaataggaaagcatatgcagccaaccaagatgcaaatgttttgaaatgatatgaccaaaattttaagtaggaaagtcacccaaacacttctgctttcacttaagtgtctggcccgcaatactgtaggaacaagcatgatcttgttactgtgatattttaaatatccacagtcctcggccgctctagaactagtggatcccccgggctgcagggaattcgatatcaagcttatcgataccgtcgacctcgaggggggggccccggtaccccagcttttggtcccctttagtgaggggttaattgcgcccctggcgtaatccatggncataggctggtttcctgnggngaaaattggttatccgcttcacaatttcaacaccaacaataccaagccggggangccataaagtggtaaaagcccggggggggcctaatgnggngagcctacctcct

SEQ ID NO: 3008 - DNA, 843 bp, Homo sapiens
  misc_feature 553, 560, 588, 641, 660, 662, 677, 694, 708, 730, 741, 749,750, 752, 753, 754, 755, 760, 773, 780, 783, 789, 795, 805,829, 831, 832, 837, 842: n = A,T,C or G
gtaatacgactcactatagggcgaattggagctccaccgcggtggcggccgcccgggcaggtacgagtggcagttgaggggatccccgttggtcagcgcgaactgcccgtgggtcggctgggtcggcggcatcctgcccctctgcaccgcaaaaccatatttgccttgttcaaggtcccaaaccgcttgcatcttcctcctaaactggaataactctcctttagtttggcgggtgaaataaatgctttgttggccccctgaaaagatgtgtctttgataattaaagagaatctcctacctcggccgctctagaactagtggatcccccgggctgcaggaattcgatatcaagcttatcgataccgtcgacctcgagggggggcccggtacccagcttttgttccctttagtgagggttaattgcgcgcttggcgtaatcatggtcatagctgtttcctgtgtgaaattgttatccgctcacaattccacacaacatacgagccgggagcataaagtgtaaagcctggggtgcctaattgagtgagctaactcncattaanttgccgttgcgctcactggcccgctttncagtccggaaaaccttgtcgtgccaacttgcattaaatgaatccggcccaacnccccggggagaaggcggcntncgtattggggcgctntttccgctttccttagnttcacttgactacnattccgcttggaatggtttccntttggttgggnaaccggcnntnnnnttaantccaaaagggggncttgtanccntttatnccctcntaaaaactangggggaacccccccgggcctgcanannatttncaaant

SEQ ID NO: 3009 - DNA, 823 bp, Homo sapiens
  misc_feature 208, 493, 588, 601, 626, 633, 659, 668, 674, 683, 686, 695,705, 707, 734, 739, 741, 762, 774, 776, 782, 789, 797, 799,805, 808, 810, 812, 813, 816: n = A,T,C or G
ctcactatagggcgaattggagctccccgcggtggcggccgaggtacaggctgacagagaagattcccgagagtaaatcatctttccaatccagaggaacaagcatgtctctctgccaagatccatctaaactggagtgatgttagcagacccagcttagagttcttctttctttcttaagccctttgctctggaggaagttctccancttcagctcaactcacagcttctccaagcatcaccctgggagtttcctgagggttttctcataaatgagggctgcacattgcctgttctgcttcgaagtattcaataccgctcagtattttaaatgaagtgattctaagatttggtttgggatcaataggaaagcatatgcagccaaccaagatgcaaatgttttgaaatgatatgaccaaaattttaagtaggaaagtcacccaaacacttctgctttcacttaagtgtctggcccgcaatactgtaggaacangcattgatcttgttactgggatattttaaatatccacagtacctcggccgctctagaactagtggacccccgggctgcacgaattcgatatcaancttatcgatccgnccgaccctcaggggggggccccggnaccccanctttttgttccctttagtgaggggtnattgcgccnttgggngtaatcatnggnccataggtngttttcctgngngaaaattggttattccgctcaccaaanttccncncaaccatacggagcccggggngcattaaggtgnanaacccnggggggngcctaatngngggggngcntnannttncatttaa

SEQ ID NO: 3010 - DNA, 829 bp, Homo sapiens
  misc_feature 690, 699, 710, 719, 753, 756, 762, 770, 771, 790, 797, 801,812, 825, 826, 828: n = A,T,C or G
gtaatacgactcactatagggcgaattggagctccaccgcggtggcggccgaggtacaccttgaatgacaatgctcggagctcccctgtggtcatcgacgcctccactgccattgatgcaccatccaacctgcgtttcctggccaccacacccaattccttgctggtatcatggcagccgccacgtgccaggattaccggctacatcatcaagtatgagaagcctgggtctcctcccagagaagtggtccctcggccccgccctggtgtcacagaggctactattactggcctggaaccgggaaccgaatatacaatttatgtcattgccctgaagaataatcagaagagcgagcccctgattggaaggaaaaagacagttcaaaagacccctttcgtcacccaccctgggtatgacactggaaatggtattcagcttcctggcacttctggtcagcaacccagtgttgggcaacaaatgatctttgaggaacatggttttaggcggaccacaccgcccacaacgggcacccccataaggcataggccaagaccatacccgccgaatgtaggtgaggaaatccaaattggtcacatccccagggaagatgtagactatcacctgtacctcggccggttctagaactagtggatcccccgggcttgcagggaattcgatatcaagcttatngatacccgncgaacctcganggggggggncccgggacccaagctttttggttcccttttaggnganggggtnaatttggnncccttgggcggaaatcatngggccanaagngtgttttcctnggggggaaaattnntnt

SEQ ID NO: 3011 - DNA, 901 bp, Homo sapiens
  misc_feature 234, 381, 398, 448, 455, 495, 519, 547, 554, 557, 562, 572,589, 602, 607, 608, 623, 630, 649, 652, 653, 664, 672, 674,679, 689, 698, 702, 704, 707, 708, 713, 714, 720, 721, 723,740, 742, 749, 750, 757, 762, 769, 777, 778, 779, 781: n = A,T,C or G
  misc_feature 786, 789, 790, 793, 794, 797, 798, 805, 807, 808, 810, 812,813, 814, 827, 831, 832, 834, 837, 842, 844, 850, 852, 863,864, 883, 884, 885, 892, 895, 899: n = A,T,C or G
cgactcactatagggcgaattggagctccccgcggtggcggccgaggtactcagaagtgtcctggaatggggcccatgagatggttgtctgagagagagcttcttgtcctacattcggcgggtatggtcttggcctatgccttatgggggtggccgttgtgggcggtgtggtccgcctaaaaccatgttcctcaaagatcatttgttgcccaacactgggttgctgaccagaantgccaggaagctgaataccatttccagtgtcatacccagggtgggtgacgaaaggggtcttttgaactgtggaaggaacatccaagatctctggtccatgaagattggggtgtggaagggttaccaagttggggaagctccgctgtntttttccttccaatcangggctttgttcttcctgattattcttcagggcaatgacataaaatttgtntattccngttcccccgggttccaggccaagtaataactatcctttgngacaccagggggcgggggcccaanggaccactttcttcttgggaggaggacncagggcnttntcatnctttgaatgnatgtaaccccgggtaantcccttggcacantgggnnggctggccataatancccaacnaagggaatttgggggtggnggnngggccccaggnaaaccgcncnggttnggaatggggngcattctantggncnagnngggtnnggcacnnanattcaccccccaagggntngccttcnntagccanttggncaatttnaaaggggnnnanccctnggnnccnnttnnaataaantnngntnnntccccccccgggncttnngnggngtttncnatttcnanggtttatttcnntaccccattataccttgtnnnggggggngancccncc

SEQ ID NO: 3012 - DNA, 831 bp, Homo sapiens
  misc_feature 619, 626, 647, 649, 652, 675, 677, 685, 687, 691, 711, 722,743, 756, 757, 758, 769, 770, 775, 781, 787, 788, 791, 792,793, 795, 799, 811, 814, 821, 825, 828, 830: n = A,T,C or G
taatacgactcactatagggcgaattggagctccaccgcggtggcggccgaggtacacagtcagtgtggttgccttgcacgatgatatggagagccagcccctgattggaacccagtccacagctattcctgcaccaactgacctgaagttcactcaggtcacacccacaagcctgagcgcccagtggacaccacccaatgttcagctcactggatatcgagtgcgggtgacccccaaggagaagaccggaccaatgaaagaaatcaaccttgctcctgacagctcatccgtggttgtatcaggacttatggtggccaccaaatatgaagtgagtgtctatgctcttaaggacactttgacaagcagaccagctcagggtgttgtcaccactctggagaatgtcagcccaccaagaagggctcgtgtgacagacgctactgagaccaccatcaccattagctggagaaccaagactgagacgatcactggcttccaagttgatgccgttccagccaatggccagactccaatccagagaaccatcaagccagatgtcagaagctacaccatcacaggttttacaaccagggcactgactacaagatctacctgtacctncggccgntcttagaactagtggatcccncnggnttgcagggaattccatttaagcntnatgggttncngccnactccaagggggggccccgnttccccaatcnttttgctcccttttattggangggttaatttgcnnncctttggcgcnnattcnaagganaattannttnnntncccntggggggaaaanggngttgccncttnttnant

SEQ ID NO: 3013 - DNA, 1072 bp, Homo sapiens
  misc_feature 3, 4, 5, 9, 12, 14, 15, 17, 18, 19, 20, 21, 23, 24, 25, 26,27, 28, 32, 34, 36, 37, 40, 45, 47, 48, 49, 50, 52, 54,56, 57, 58, 59, 62, 65, 67, 68, 71, 72, 73, 74, 75, 78,82, 86, 87, 91, 578, 643, 677, 699, 702, 704, 719, 728,730: n = A,T,C or G
  misc_feature 743, 746, 757, 758, 772, 774, 775, 808, 815, 817, 824, 832,855, 874, 891, 892, 908, 915, 916, 920, 932, 937, 947, 982,986, 991, 995, 996, 1000, 1011, 1017, 1031, 1032, 1033,1051, 1054, 1062, 1064, 1071: n = A,T,C or G
ccnnngtgntgntnntnnnnncnnnnnntctngntnntgnacggnannnncngngnnnngangancnngtnnnnnagnaagngggnngggnccacgactcactatagggcgaattggagctccaccgcggtggcggccgaggtcaaagatttattgaagcagaaccaagttggttggatacttgctggaaaaaaaaaaagcagttttaatagtattcaaaataccttttaaaaagtattctagcacaagatttttctgtaaactagattatgttgtaaacttttttctaaatcttgtaggagtgtcggttgttaagaactagagcttattcctattccaaatctatcttgcgctcctgaaaaactgcagaaaggcacttgaaagctgtttctttaaggatatgggattctcttttttattcttgctggtaatatattgctgcactgagtgtgtgcaatttttattcaaggtcatccgttgatgctgagcaagttttccgtttgataacctgtcccatcctctaagtttcaaccgggcttaaatcaagaagtgtcctttttgagtggggtatcaacccngaggggaggtgaaatccagattagttttccctcagggttcagggggagggaaaaaggttttgggnaaagaagggccagaagaaaaattccctggcctcnttccttcgcccctttcccaggnagncnttcccttggtagggnggggccaantncttcaattggtcnaangggggcccatnntttaaccaatttgnannccaggggtctttgggtaatttcaccgaaagggngggaccnangccccantttccttnccttccataatttccttggaaantcttcattctcttggccangggccgggccaaaatanntggtcctttggggtangtataannccangcttttcaaacngggcnaaaaggttcntcctttccccatttttcaacggccaataatggggnggtntccangggnnactncaaattggggnttcccntttaaagggggccnnncccctttcaccaggggtnganggggaacncnccccccnc

SEQ ID NO: 3014 - DNA, 820 bp, Homo sapiens
  misc_feature 597, 628, 638, 688, 735, 764, 771, 772, 781, 782, 795, 803,807, 817, 818: n = A,T,C or G
ctactatagggcgaattggagctccccgcggtggcggccgaggtacaagagtgtttcatgaaatccgtttttaaaatgaacatctctgtgtgccacagttcctaggactggggcaaggacacagtgtcaagtcttgttttgaggatgagtctctgaagagacagaattcctgccagaatgcgcacagaacataagtcagccaagtgtgtcgtgccagggatactttgactttggtttgctgctgctgctagggatattgggagggttatcctttccaggttgtaggagagggttgtgggtaaaggtctgtcgtaaaggacccctggctgctagctccaactgattccgcatgcgttgttcacgctctcgcagctgacgcgtcatttcagcatttttccagccttttttgaagctctctaggaagccttcccgtggaggtaatttgtccaggtcatgtacctgcccgggcggccgctcgagtaatacggttatccacaagaatcaggggataacgcaggaaagaacatgtgagcaaaaggccagcaaaaggccaaggaaccgtaaaaaggcccgttgctggcgtttttccataggctncgcccccctgacgaagcatcacaaaaatcgncgctcaagtnagaggtggcgaaaacccgaccaggactataaaagatccagggccgttttnccctgggaacttcctcgtgcgctcttcctgtttccgaacccttgcgntttacccggataccctggtcccccttttnttccttnngggaagcgnnggcgcttttttcntagccttnaccnctttaagggnntt

SEQ ID NO: 3015 - DNA, 861 bp, Homo sapiens
  misc_feature 438, 440, 510, 603, 608, 613, 626, 627, 645, 650, 654, 676,709, 733, 735, 737, 760, 771, 772, 773, 777, 788, 803, 805,812, 814, 816, 820, 822, 833, 836, 842: n = A,T,C or G
ctatagggcgaattggagctccaccgcggtggcggccgaggtactcagaagtgtcctggaatggggcccatgagatggttgtctgagagagagcttcttgtcctacattcggcgggtatggtcttggcctatgccttatgggggtggccgttgtgggcggtgtggtccgcctaaaaccatgttcctcaaagatcatttgttgcccaacactgggttgctgaccagaagtgccaggaagctgaataccatttccagtgtcatacccagggtgggtgacgaaaggggtcttttgaactgtggaaggaacatccaagatctctggtccatgaagattggggtgtggaagggttaccagttggggaagctccgtctgtctttttccttccaatcaggggctcgctcttctgattattcttcagggcaatgacataaattgtntnttcggttcccggttccaggccagtaatagtagcctctgtgacaccagggcggggccgaggggaccacttntcttgggaaggagacccaagcttctcatacttgatgatgtagcccgtaattcctggcaccgtgggcggctgcccaatgaatacccagcaaggnaattngggtnttggtggccccannaaaacccagggttgggantggtngccnttcaaaatgggcaggtgggganggcggtccattaaccaccagggggaagcttccnaagcatttggtcatttcaaggggngnancttgcccccgggcggggccgttntagaaactaannngganaccccccgggnctggaagggaaattntnatattcnangncttntncataacccgtncgnaccttnaggggggggggccgggact

SEQ ID NO: 3016 - DNA, 832 bp, Homo sapiens
  misc_feature 212, 382, 447, 524, 561, 584, 598, 643, 648, 664, 670, 678,707, 715, 739, 745, 762, 767, 774, 777, 789, 794, 812, 815,817, 820, 821, 824, 825, 830: n = A,T,C or G
gactcactatagggcgaattggagctccaccgcggtggcggccgaggtactgaggaatgaatagaaaggcttccagatgtctaaaagattctttaaactactgaactgttacctaggttaacaaccctgttgagtatttgctgtttgtccagttcaggaatttttgttttgttttgtctatatgtgcggcttttcagaagaaatttaatcantgtgacagaaaaaaaaatgttttatggtagcttttactttttatgaaaaaaaaattatttgccttttaaattcttttcccccatccccctccaaagtcttgatagcaagcgttattttgggggtagaaacggtgaaatctctagcctctttgtgtttttgttgttgttgntgttgttgttttatataatgcatgtattcactaaaataaaatttaaaaaactcctgtcttgctanacaaggttgctgttgtgcagtgtgcctgtcactactggtctgtacctcggcccgctctagaactagtggatcccccnggctgcaggaattccatatcaagcttatcgataccgncgacctcgagggggggccccggncccagcttttgttncctttagggaggggttaattgcgcgcctggccgtaaaccattggncatanctggtttcctggtgtnaaaatngttatccncttcaccaatttccccacaacataccaancccggggngccataaaagtggtaaaagccctngggggngccctaaatggaggggngctancctcccnttnaattggcgttgnccctnactggcccccctttttcnagncnggnnaannctgtncc

SEQ ID NO: 3017 - DNA, 828 bp, Homo sapiens
  misc_feature 496, 561, 634, 718, 723, 766, 804, 817: n = A,T,C or G
gcgcgtaatacgactcactatagggcgaattggagctccaccgcggtggcggccgaggtacatttgccatctctggttagttgatttctgtcatgttcccttcactgataatcttggcatttcattcttgaagaacaagtggggctctttctctgccatggccatgctgccttgggctgtggtgactcatgtatgtgtctgtcctctgcacttgaatgtgagctctgtgtgggtttttctgttcctctcattagcaggttctgctccctgggcacagaggaggtcatgagttgagagtgggctgtgcgtgcatcctagaatctcagccttcttggagcagcgactattatatgctctggtgggctctcatctccatccgattaagtgtttctctttggctgccacgccagctggatgactgggggttctcttcttaccatcatgaagctgtcaacacccacggtgggccctctcagacgggggcggcccgctctanaactagtggatcccccgggctgcaaggaattcgatatcaagcttatcgataccgtcgacctcganggggggcccggtacccaactttgttccttaagtgaaggttaatgcgcgcttgcgtaatcatgggcataagctngttcctggtgtgaaaatggttattccgttacaatttccacacaacatacgaacccgggagcataaagtgtaaaaccctgggggngcctnatgaagtgaacctaacctcacattaaattgcgttggcgctcanctggcccccttttccaagtccgggaaaaccttgtccgngcccaacttgcanttaattgaaat

SEQ ID NO: 3018 - DNA, 637 bp, Homo sapiens
  misc_feature 3, 4, 5, 6, 7, 8, 9, 10, 11, 12, 13, 14, 15, 16, 26, 28,29, 30, 34, 449, 554, 562: n = A,T,C or G
agnnnnnnnnnnnnnncgacttactntnnngacnactatagggcgaattggagctccccgcggtggcggccgaggtactgtgatatccacatatttttgagaaaaattcccaagccaggcgaatgtggattggaataaagacataggcagtgtataccaccatagcaataatggttagtaagatggtgttaaacatagatcgctcccagggctctaaaacagcacagcagctaatgatttggtattgatagtagagccaggagaaatattccttcacacgcctcaaatccatggttggctccttcaagctgcagtaagtttgtcctaagaaagtccaggtctggttcttcagccttgctccttcgcgaaatgatcctgtgtgggttagttctcctctctgggttgctgtttcctcatctcccagttgggtgtatctccctgcggcttangtgagcgccgaggctttggctcctccccagctgacctcggccgctctagaactagtggatcccccgggctgcaggaattcgatatcaagcttatcgataccgtcnacctcganggggggcccggtacccaacttttgtccctttaatgagggttaattgcgcgcttggcgtaatcatggtcatagctg

SEQ ID NO: 3019 - DNA, 395 bp, Homo sapiens
  misc_feature 4: n = A,T,C or G
actnctatagggcgaattggagctccccgcggtggcggccgaggtacagaatcatattctaagattatgtgcaaatatatgtgtagaaagaggcatttaaaaaaagaggcaggagattgagaagagacatattgaatgaggcactaatctttagaaaaatgatcttttactgaatcaagccatgctcattccttgctgaatccaacagccccaaatctcttttcttatatttggctgttaatttttttccttgcaccatcctagattgttaacaaccattgcacagttggctcatgtatccttacactctgagttataataagttgtatttttataaacaaatacctaaatattcaagttttaaggcgcatggaaactgaatctaggcaacgggt

SEQ ID NO: 3020 - DNA, 473 bp, Homo sapiens
  misc_feature 1, 2, 9, 435: n = A,T,C or G
nnatcactnctatagggcgaattggagctccccgcggtggcggccgaggtacaaaaagaaaaccatttcttttctctttttcccccagcatcatgcaaggcaaggcaacaccacaaatacaataactgaatttactttgattatactttagtttcttacacttaaaattattttgtattataatacttacttggttatctaaaatcaacattgtcgattttaaacggttataaagccagactttaagaagcatttaaaacaattcatgaactctgtatgaaaggaaataattgcctccagcttattcttttgcatttgaagtaaaagaatttccagtatcatcagtttactagaaaataagacttagggggtccatataatttattcacatctttttatacatcgtaaacaaggataggatacttctgacagtancctataaaagattttttaaaaatttatccttcagtatt

SEQ ID NO: 3021 - DNA, 431 bp, Homo sapiens
  misc_feature 367, 401, 406, 411: n = A,T,C or G
ggcgaattggagctccaccgcggtggcggccgaggtacaaactgttttgaagccagttcatcataaggaaggacaagaactaactgctttgctgaatactccacatattcaggcacttttactggcccacgataaggttgctgagcaggaaatgcagctagagcccattacagatgagagagtttatgaaagtattggccagtatggaggagaaactgtaaaaatagttcgtatagaaaaggctcgtgatattccgttgggtgctacagttcgtaatgaaatggactctgtcatcattagccggatagtaaaagggggtgctgcatagaaaagtggtctgttgcatgaaggatatgaagtttctagnagtattaatggcatttgaaaattcggggggaaanatgtncaatngaggttttttggcttgtttg

SEQ ID NO: 3022 - DNA, 690 bp, Homo sapiens
  misc_feature 602, 616, 633, 636, 643, 662, 677, 689, 690: n = A,T,C or G
cgtaatacgactcactatagggcgaattggagctccaccgcggtggcggccggtcctctgtttttaaactgtaaaggactccagcggattgttcgaagtctccgatatcccgcgatctggtggccgcagaagaaagaggccgagtcggcggggactgggaaccaccagttagcggcctacgggcaacctcccggacgcgcgcgccgggccgacgttaaacgtacctcggccgctctagaactagtggatcccccgggctgcaggaattcgatatcaagcttatcgataccgtcgacctcgagggggggcccggtacccagcttttgttccctttagtgagggttaattgcgcgcttggcgtaatcatggtcatagctgtttcctgtgtgaaattgttatccgctcacaattccacacaacatacgagccgggagcataaagtgtaaagcctggggtgcctaatgagtgagctaactcacattaattgcgttgcgctcactgcccgctttccagtcgggaaacctgtcgtgccagctgcattaatgaatcggccaacgcgcggggagaggcggttgcgtattgggcgcttttccgtttcttgntaatgactcgttgnctcggtcgttcggttgnggnagcggtntaagcttattaaaggcggnatacggttttcacanaatcagggatann

SEQ ID NO: 3023 - DNA, 406 bp, Homo sapiens
gagcgcgcgtaatacgactcactatagggcgaattggagctccaccgcggtggcggccgaggtacccggcaacagaccctttttgctgatattagcaccagagaaagcttacagcaatctaaggtcccaggctctgggttctcagatgccagtcattagattctcgtgggttaacagagatgggaaaagtcaatggggaaaatgtgcgaatgatcgatttcttcgattgtcggattgagggtggcacaatgtcttaggcggcggcgggtaagtgactcaagcgaacctgttcgttccctaggcgcccctgtctccaagaggcggccccgaaggtgatccgccccccagagcaggaaaccagcccaccagtcccagcaaactctcctccgagcctgggatgaggaaa

SEQ ID NO: 3024 - DNA, 404 bp, Homo sapiens
gtatacgactcactatagggcgaattggagctccaccgcggtggcggccgaggtacagaatcatattctaagattatgtgcaaatatatgtgtagaaagaggcatttaaaaaaagaggcaggagattgagaagagacatattgaatgaggcactaatctttagaaaaatgatcttttactgaatcaagccatgctcattccttgctgaatccaacagccccaaatctcttttcttatatttggctgttaatttttttccttgcaccatcctagattgttaacaaccattgcacagttggctcatgtatccttacactctgagttataataagttgtatttttataaacaaatacctaaatattcaagttttaaggcgcatggaaactgaatctaggcaacgggt

SEQ ID NO: 3025 - DNA, 829 bp, Homo sapiens
  misc_feature 11, 16, 20, 25, 52, 145, 203, 276, 291, 294, 300, 331, 361,374, 377, 405, 428, 467, 475, 502, 524, 531, 533, 555, 565,566, 569, 570, 571, 572, 573, 574, 575, 576, 577, 578, 579,580, 581, 582, 583, 584, 585, 586, 587, 588, 589, 590: n = A,T,C or G
  misc_feature 591, 592, 593, 594, 595, 596, 597, 598, 599, 600, 601, 602,603, 604, 605, 606, 607, 608, 609, 610, 611, 612, 613, 614,615, 616, 617, 618, 619, 620, 621, 622, 623, 624, 625, 626,627, 628, 629, 630, 631, 632, 633, 634, 635, 636, 637: n = A,T,C or G
  misc_feature 638, 639, 640, 641, 642, 643, 644, 645, 646, 647, 648, 649,650, 651, 652, 653, 654, 655, 656, 657, 658, 659, 660, 661,662, 663, 664, 665, 666, 667, 668, 669, 670, 671, 672, 673,674, 675, 676, 677, 678, 679, 680, 681, 682, 683, 684: n = A,T,C or G
  misc_feature 685, 686, 687, 688, 689, 690, 691, 692, 693, 694, 695, 696,697, 698, 699, 700, 701, 702, 703, 704, 705, 706, 707, 708,709, 710, 711, 712, 713, 714, 715, 716, 717, 718, 719, 720,721, 722, 723, 724, 725, 726, 727, 728, 729, 730, 731: n = A,T,C or G
  misc_feature 732, 733, 734, 735, 736, 737, 738, 739, 740, 741, 742, 743,744, 745, 746, 747, 748, 749, 750, 751, 752, 753, 754, 755,756, 757, 758, 759, 760, 761, 762, 763, 764, 765, 766, 767,768, 769, 770, 771, 772, 773, 774, 775, 776, 777, 778: n = A,T,C or G
  misc_feature 779, 780, 781, 782, 783, 784, 785, 786, 787, 788, 789, 790,791, 792, 793, 794, 795, 796, 797, 798, 799, 800, 801, 802,803, 804, 805, 806, 807, 808, 809, 810, 811, 812, 813, 814,815, 816, 817, 818, 819, 820, 821, 822, 823, 824-829: n = A,T,C or G
gtatacggctnatagnagcngaatnggagctccccgcggtggccgccgcccnggcaggtactttccttagcatatgttttcctcatatgttctggggttttagactgtagactaatctggagttggagtctgtgcctctccactntccaccaaccaggcgggcccatcacatactgataggaaatacctgaaacccaggccancaggcagctcggccatggctgagaggctgtgttttagaaacgaggctcttgggaatggggcagaacttttttnaggccttttcaaaancanatgganctccattgcaattaataccccagtctgcttntagacgccgctatttctttcttcaatgctncttatggctttgngtngccgtttcatttctagtacctcggcccnctctaaaactagtggatcccccngggctgcaggaaattcatattaaagcttattgataccgncgaacctngaagggggggcccggtacccaactttnggttcccttttagtgaagggtnaattgcncncttggcgtaataatgggcatancttttttccnnggnnnnnnnnnnnnnnnnnnnnnnnnnnnnnnnnnnnnnnnnnnnnnnnnnnnnnnnnnnnnnnnnnnnnnnnnnnnnnnnnnnnnnnnnnnnnnnnnnnnnnnnnnnnnnnnnnnnnnnnnnnnnnnnnnnnnnnnnnnnnnnnnnnnnnnnnnnnnnnnnnnnnnnnnnnnnnnnnnnnnnnnnnnnnnnnnnnnnnnnnnnnnnnnnnnnnnnnnnnnnnnnnnnnnnnnnnnnnnnnnnnnnnnnnnnnnnnnnnnnnn

SEQ ID NO: 3026 - DNA, 839 bp, Homo sapiens
  misc_feature 6, 21, 26, 32, 157, 179, 186, 297, 333, 340, 342, 346, 349,350, 391, 417, 450, 458, 483, 493, 494, 528, 534, 543, 545,558, 569, 576, 618, 619, 620, 656, 667, 672, 683, 690, 703,704, 705, 706, 707, 708, 709, 710, 711, 712, 713, 714: n = A,T,C or G
  misc_feature 720, 721, 722, 723, 724, 725, 726, 727, 728, 729, 730, 731,732, 733, 734, 735, 736, 737, 738, 739, 740, 741, 742, 743,744, 745, 746, 747, 748, 749, 750, 751, 752, 753, 754, 755,756, 757, 758, 759, 760, 761, 762, 763, 764, 765, 766: n = A,T,C or G
  misc_feature 767, 768, 769, 770, 771, 772, 773, 774, 775, 776, 777, 778,779, 780, 781, 782, 783, 784, 785, 786, 787, 788, 789, 790,791, 792, 793, 794, 795, 796, 797, 798, 799, 800, 801, 802,803, 804, 805, 806, 807, 808, 809, 810, 811, 812, 813: n = A,T,C or G
  misc_feature 814, 815, 816, 817, 818, 819, 820, 821, 822, 823, 824, 825,826, 827, 828, 829, 830, 831, 832, 833, 834, 835, 836, 837,838, 839: n = A,T,C or G
agctancgctactatagggcnaatangaggcnaattggagctccccgcggtggcggccggttccttgtgtcttaaagcaaacacaggcacagtattctgggcaaaccagatgttaatagcttgacctctctgtcaaaggaggacttggttgcttaanacccttaaagctgtcaaagatntagcttntccaggatactatcatcctcacccatttcttattctctttgcagggagagatcatctctcaaaaagctcccatcagagcaaccattctgggactttgagcagaatgcttanggcagtggttctaaaattgcacaccacctgttcttncagttgngncctntcnnaactgcctctgacggtcacattccatggccatgtgccacancaaacttgtgatactgaatttaatgnttggccttggccattgggggaaaggaggaaggngaaaaaanaaaacgggagagaaaaaaaaaaatnggagtggggnncattcattccatctctcttggcattaagggcccncgggtngccactatngnaccctcggcccgntctaaaactantgggatncccccggctggaggaattccaaattaagcctattgattcccnnnaaccccaagggggggcccgggcccccacttttgttnccttttttgangggtnattgggccccntgggggnaaaaatggggatnnnnnnnnnnnntcccgnnnnnnnnnnnnnnnnnnnnnnnnnnnnnnnnnnnnnnnnnnnnnnnnnnnnnnnnnnnnnnnnnnnnnnnnnnnnnnnnnnnnnnnnnnnnnnnnnnnnnnnnnnnnnnnnnnnnnnnn

SEQ ID NO: 3027 - DNA, 841 bp, Homo sapiens
  misc_feature 12, 13, 22, 96, 153, 161, 256, 269, 273, 275, 277, 340, 341,360, 362, 546, 549, 631, 647, 659, 685, 688, 696, 723, 728,748, 771, 773, 784, 789, 815, 817, 828, 831, 832, 833: n = A,T,C or G
aggtatcgactnntatacggcnaattggagctccccgcggtggcggccgaggtactttagtgtttagcaaaaaagggactatggaatgtcaaacangaacatatatgttaaacataaacatgaagcagtgccagctgctgtctgccatatagncatgcttngttaatgtggcacatcttgccatgatggtgccctcatgaaacgaaggatgctgaagcagatgccattctgtttgctttgatcagaagccactctntggtcaaggaagnattngntncatgcttaattataacaagttctcatcacaaagattattttctttctccagatctggattgtnngcactcactttatattatnanacaatcactcagattgtttatgtttttatgtttagaaataagacagtgattcagagagtccctgtatttagatgaaagaacattttttaaacatattgactgtaaacactgaaaatcattaattctcaacagttgaaggtttctgacaggaacggcccttggaaattggaaatgggcccattgncangtatgcccattggtgtcacatttggagaaaaatggattctggtctctctggaatcctttgtaatgccaagcttcctcttcanggagctggcttattgncattattttganataaatggcacttcatagtattaagnggntcattggntcttctctggctgaccggattctgtangcaancactcactttggaacctttntttgctaccaaattttgtgtttncntaaccaacccnaaggntcccgggggttcctgccaaaaggttncntgggctttttnttnnnaaaggccg

SEQ ID NO: 3028 - DNA, 861 bp, Homo sapiens
  misc_feature 18, 19, 44, 71, 168, 224, 381, 481, 505, 511, 513, 590, 591,592, 594, 596, 597, 598, 599, 600, 601, 602, 603, 604, 605,606, 607, 608, 609, 610, 611, 612, 613, 614, 615, 616, 617,618, 619, 620, 621, 622, 623, 624, 625, 626, 627: n = A,T,C or G
  misc_feature 628, 629, 630, 631, 632, 633, 634, 635, 636, 637, 638, 639,640, 641, 642, 643, 644, 645, 646, 647, 648, 649, 650, 651,652, 653, 654, 655, 656, 657, 658, 659, 660, 661, 662, 663,664, 665, 666, 667, 668, 669, 670, 671, 672, 673, 674: n = A,T,C or G
  misc_feature 675, 676, 677, 678, 679, 680, 681, 682, 683, 684, 685, 686,687, 688, 689, 690, 691, 692, 693, 694, 695, 696, 697, 698,699, 700, 701, 702, 703, 704, 705, 706, 707, 708, 709, 710,711, 712, 713, 714, 715, 716, 717, 718, 719, 720, 721: n = A,T,C or G
  misc_feature 722, 723, 724, 725, 726, 727, 728, 729, 730, 731, 732, 733,734, 735, 736, 737, 738, 739, 740, 741, 742, 743, 744, 745,746, 747, 748, 749, 750, 751, 752, 753, 754, 755, 756, 757,758, 759, 760, 761, 762, 763, 764, 765, 766, 767, 768: n = A,T,C or G
  misc_feature 769, 770, 771, 772, 773, 774, 775, 776, 777, 778, 779, 780,781, 782, 783, 784, 785, 786, 787, 788, 789, 790, 791, 792,793, 794, 795, 796, 797, 798, 799, 800, 801, 802, 803, 804,805, 806, 807, 808, 809, 810, 811, 812, 813, 814, 815: n = A,T,C or G
  misc_feature 816, 817, 818, 819, 820, 821, 822, 823, 824, 825, 826, 827,828, 829, 830, 831, 832, 833, 834, 835, 836, 837, 838, 839,840, 841, 842, 843, 844, 845, 846, 847, 848, 849, 850, 851,852, 853, 854, 855, 856, 857, 858, 859, 860, 861: n = A,T,C or G
agcgtatcgacatagttnngcgcgtatacgactactatagggcnaattggagctccaccgcggtggcggcncgcccgggcaggtacgcggggacacattcagaggtgagcccagagcgggtaaagtggactggggagaacttcggaggatgttcatgtccaggagcanccccacgccctgtatggtcggtgtctagagcctcacagcaactaagaccaacccanctctcagaagaaggaatgtcaaaatgtcatgttcaattttacattcagtgcctggaatcttttcttcacaattgaaatgaaatgtgctgaaggaggtgaatccatgcattaatcttcagctcacaaaggaaatactacataagaagcaagaccacanactcaagacggacataattggattttttttgccatggcctggaaagaaaggtacctcggccgctctagaactagtggatcccccgggctgcaggaattcnatatcaagcttatcgataccgtcnacctcnanggggggcccggtacccaacttttgttccctttaatgagggttaattgcgcccttggcgtaatcatggtcatagctgnnntngnnnnnnnnnnnnnnnnnnnnnnnnnnnnnnnnnnnnnnnnnnnnnnnnnnnnnnnnnnnnnnnnnnnnnnnnnnnnnnnnnnnnnnnnnnnnnnnnnnnnnnnnnnnnnnnnnnnnnnnnnnnnnnnnnnnnnnnnnnnnnnnnnnnnnnnnnnnnnnnnnnnnnnnnnnnnnnnnnnnnnnnnnnnnnnnnnnnnnnnnnnnnnnnnnnnnnnnnnnnnnnnnnnnnnnnnnnnnnnnnnnnnnnnnnnnnnnnnnnnnnnnnnn

SEQ ID NO: 3029 - DNA, 878 bp, Homo sapiens
  misc_feature 2, 13, 24, 309, 381, 401, 467, 468, 469, 470, 471, 472, 473,474, 475, 476, 477, 478, 479, 480, 481, 482, 483, 484, 485,486, 487, 488, 489, 490, 491, 492, 493, 494, 495, 496, 497,498, 499, 500, 501, 502, 503, 504, 505, 506, 507: n = A,T,C or G
  misc_feature 508, 509, 510, 511, 512, 513, 514, 515, 516, 517, 518, 519,520, 521, 522, 523, 524, 525, 526, 527, 528, 529, 530, 531,532, 533, 534, 535, 536, 537, 538, 539, 540, 541, 542, 543,544, 545, 546, 547, 548, 549, 550, 551, 552, 553, 554: n = A,T,C or G
  misc_feature 555, 556, 557, 558, 559, 560, 561, 562, 563, 564, 565, 566,567, 568, 569, 570, 571, 572, 573, 574, 575, 576, 577, 578,579, 580, 581, 582, 583, 584, 585, 586, 587, 588, 589, 590,591, 592, 594, 595, 596, 597, 598, 599, 600, 601, 602: n = A,T,C or G
  misc_feature 603, 604, 605, 606, 607, 608, 609, 610, 611, 612, 613, 614,615, 616, 617, 618, 619, 620, 621, 622, 623, 624, 625, 626,627, 628, 629, 630, 631, 632, 633, 634, 635, 636, 637, 638,639, 640, 641, 642, 643, 644, 645, 646, 647, 648, 649: n = A,T,C or G
  misc_feature 650, 651, 652, 653, 654, 655, 656, 657, 658, 659, 660, 661,662, 663, 664, 665, 666, 667, 668, 669, 670, 671, 672, 673,674, 675, 676, 677, 678, 679, 680, 681, 682, 683, 684, 685,686, 687, 688, 689, 690, 691, 692, 693, 694, 695, 696: n = A,T,C or G
  misc_feature 697, 698, 699, 700, 701, 702, 703, 704, 705, 706, 707, 708,709, 710, 711, 712, 713, 714, 715, 716, 717, 718, 719, 720,721, 722, 723, 724, 725, 726, 727, 728, 729, 730, 731, 732,733, 734, 735, 736, 737, 738, 739, 740, 741, 742, 743-878: n = A,T,C or G
ancgtatcgactnactatagggcnaattggagctccaccgcggtggcggccgcccgggcaggtacttaccggggagcacagtggactaggggatgcccttgataatgacggtttcctaggtgcaagatcagagcatgtgcctacaccttgtgccctgatgccgaggtggagaccattgggaaataattaatagatatttttctggggggaaatcacaagtcactgaggtgtttgtttgtttgttaggcggtgctagagcttgaagccactcaagccagttggggaggaaagggatgcggaggtacctcngccgctctagaactagtggatcccccgggctgcaggaattcgatatcaagcttatcgataccgtcgacctcnagggggggcccggtacccancttttgttccctttagtgagggttaattgcgcgcttggcgtaatcatggtcatagctgttcctggnnnnnnnnnnnnnnnnnnnnnnnnnnnnnnnnnnnnnnnnnnnnnnnnnnnnnnnnnnnnnnnnnnnnnnnnnnnnnnnnnnnnnnnnnnnnnnnnnnnnnnnnnnnnnnnnnnnnnnnnnnnnnntnnnnnnnnnnnnnnnnnnnnnnnnnnnnnnnnnnnnnnnnnnnnnnnnnnnnnnnnnnnnnnnnnnnnnnnnnnnnnnnnnnnnnnnnnnnnnnnnnnnnnnnnnnnnnnnnnnnnnnnnnnnnnnnnnnnnnnnnnnnnnnnnnnnnnnnnnnnnnnnnnnnnnnnnnnnnnnnnnnnnnnnnnnnnnnnnnnnnnnnnnnnnnnnnnnnnnnnnnnnnnnnnnnnnnnnnnnnnnnnnnnnnnnnnnnnnnnnnnnnnnnnnnnnnnnnnnnnnnnnnnnnnn

SEQ ID NO: 3030 - DNA, 867 bp, Homo sapiens
  misc_feature 4, 5, 30, 34, 164, 182, 349, 405, 416, 433, 478, 514, 557,558, 561, 562, 564, 565, 566, 567, 568, 569, 570, 571, 572,573, 574, 575, 576, 577, 578, 579, 580, 581, 582, 583, 584,585, 586, 587, 588, 589, 590, 591, 592, 593, 594, 595: n = A,T,C or G
  misc_feature 596, 597, 598, 599, 600, 601, 602, 603, 604, 605, 606, 607,608, 609, 610, 611, 612, 613, 614, 615, 616, 617, 618, 619,620, 621, 622, 623, 624, 625, 626, 627, 628, 629, 630, 631,632, 633, 634, 635, 636, 637, 638, 639, 640, 641, 642: n = A,T,C or G
  misc_feature 643, 644, 645, 646, 647, 648, 649, 650, 651, 652, 653, 654,655, 656, 657, 658, 659, 660, 661, 662, 663, 664, 665, 666,667, 668, 669, 670, 671, 672, 673, 674, 675, 676, 677, 678,679, 680, 681, 682, 683, 684, 685, 686, 687, 688, 689: n = A,T,C or G
  misc_feature 690, 691, 692, 693, 694, 695, 696, 697, 698, 699, 700, 701,702, 703, 704, 705, 706, 707, 708, 709, 710, 711, 712, 713,714, 715, 716, 717, 718, 719, 720, 721, 722, 723, 724, 725,726, 727, 728, 729, 730, 731, 732, 733, 734, 735, 736: n = A,T,C or G
  misc_feature 737, 738, 739, 740, 741, 742, 743, 744, 745, 746, 747, 748,749, 750, 751, 752, 753, 754, 755, 756, 757, 758, 759, 760,761, 762, 763, 764, 765, 766, 767, 768, 769, 770, 771, 772,773, 774, 775, 776, 777, 778, 779, 780, 781, 782, 783: n = A,T,C or G
  misc_feature 784, 785, 786, 787, 788, 789, 790, 791, 792, 793, 794, 795,796, 797, 798, 799, 800, 801, 802, 803, 804, 805, 806, 807,808, 809, 810, 811, 812, 813, 814, 815, 816, 817, 818, 819,820, 821, 822, 823, 824, 825, 826, 827, 828, 829, 830-867: n = A,T,C or G
agcnnagacgcgcgttatcgactactatanggcnaattggagctccccgcggtggcggccgcccgggcaggtacgcggggagagcgggtaaagtggactggggagaacttcggaggatgttcatgtccaggagcagccccacgccctgtatggtcggtgtctanagcctcacagcaactaanaccaacccagctctcagaagaaggaatgtcaaaatgtcatgttcaattttacattcagtgcctggaatcttttcttcacaattgaaatgaaatgtgctgaaggaggtgaatccatgtattaatcttcagctcacaaaggaaatactacataagaagcaagaccacanactcaaggcggacataattggattttttcgccatggcctggaaagaaaggtacctnggccgctctanaactagtggatcccccnggctgcaggaattcgatatcaagcttatcgataccgtcgacctcnagggggggcccggtacccaacttttgttccctttantgagggttaattgcgcccttggcgtaatcatggtcatagctgnnttnngnnnnnnnnnnnnnnnnnnnnnnnnnnnnnnnnnnnnnnnnnnnnnnnnnnnnnnnnnnnnnnnnnnnnnnnnnnnnnnnnnnnnnnnnnnnnnnnnnnnnnnnnnnnnnnnnnnnnnnnnnnnnnnnnnnnnnnnnnnnnnnnnnnnnnnnnnnnnnnnnnnnnnnnnnnnnnnnnnnnnnnnnnnnnnnnnnnnnnnnnnnnnnnnnnnnnnnnnnnnnnnnnnnnnnnnnnnnnnnnnnnnnnnnnnnnnnnnnnnnnnnnnnnnnnnnnnnnnnnnnnnnnnnnnnnnnnnnnnnnnnnnn

SEQ ID NO: 3031 - DNA, 854 bp, Homo sapiens
  misc_feature 12, 13, 18, 25, 384, 477, 478, 479, 480, 481, 482, 483, 484,485, 486, 487, 488, 489, 490, 491, 492, 493, 494, 495, 496,497, 498, 499, 500, 501, 502, 503, 504, 505, 506, 507, 508,509, 510, 511, 512, 513, 514, 515, 516, 517, 518: n = A,T,C or G
  misc_feature 519, 520, 521, 522, 523, 524, 525, 526, 527, 528, 529, 530,531, 532, 533, 534, 535, 536, 537, 538, 539, 540, 541, 542,543, 544, 545, 546, 547, 548, 549, 550, 551, 552, 553, 554,555, 556, 557, 558, 559, 560, 561, 562, 563, 564, 565: n = A,T,C or G
  misc_feature 566, 567, 568, 569, 570, 571, 572, 573, 574, 575, 576, 577,578, 579, 580, 581, 582, 583, 584, 585, 586, 587, 588, 589,590, 591, 592, 593, 594, 595, 596, 597, 598, 599, 600, 601,602, 603, 604, 605, 606, 607, 608, 609, 610, 611, 612: n = A,T,C or G
  misc_feature 613, 614, 615, 616, 617, 618, 619, 620, 621, 622, 623, 624,625, 626, 627, 628, 629, 630, 631, 632, 633, 634, 635, 636,637, 638, 639, 640, 641, 642, 643, 644, 645, 646, 647, 648,649, 650, 651, 652, 653, 654, 655, 656, 657, 658, 659: n = A,T,C or G
  misc_feature 660, 661, 662, 663, 664, 665, 666, 667, 668, 669, 670, 671,672, 673, 674, 675, 676, 677, 678, 679, 680, 681, 682, 683,684, 685, 686, 687, 688, 689, 690, 691, 692, 693, 694, 695,696, 697, 698, 699, 700, 701, 702, 703, 704, 705, 706: n = A,T,C or G
  misc_feature 707, 708, 709, 710, 711, 712, 713, 714, 715, 716, 717, 718,719, 720, 721, 722, 723, 724, 725, 726, 727, 728, 729, 730,731, 732, 733, 734, 735, 736, 737, 738, 739, 740, 741, 742,743, 744, 745, 746, 747, 748, 749, 750-782, 787-854: n = A,T,C or G
agccgtatggcnnatatngacatanttgttggctgattggagctccccgcggtggcggccgcccgggcaggtacttaccggggagcacagtggactaggggatgcccttgataatgacggtttcctaggtgcaagatcagagcatgtgcctacaccttgtgccctgatgccgaggtggagaccattgggaaataattaatagatatttttctggggggaaatcacaagtcactgaggtgtttgtttgtttgttaggcagtgctagagcttgaagccactcaagccagttggggaggaaagggatgcggaggtacctcggccgctctagaactagtggatcccccgggctgcaggaattcgatatcaagcttatcgataccgtcnacctcgagggggggcccggtacccagcttttgttccctttagtgagggttaattgcgcgcttggcgtaatcatggtcatagctgttccctggnnnnnnnnnnnnnnnnnnnnnnnnnnnnnnnnnnnnnnnnnnnnnnnnnnnnnnnnnnnnnnnnnnnnnnnnnnnnnnnnnnnnnnnnnnnnnnnnnnnnnnnnnnnnnnnnnnnnnnnnnnnnnnnnnnnnnnnnnnnnnnnnnnnnnnnnnnnnnnnnnnnnnnnnnnnnnnnnnnnnnnnnnnnnnnnnnnnnnnnnnnnnnnnnnnnnnnnnnnnnnnnnnnnnnnnnnnnnnnnnnnnnnnnnnnnnnnnnnnnnnnnnnnnnnnnnnnnnnnnnnnnnnnnnnnnnnnnnnnnnnnnnnnaaaannnnnnnnnnnnnnnnnnnnnnnnnnnnnnnnnnnnnnnnnnnnnnnnnnnnnnnnnnnnnnnnnnnn

SEQ ID NO: 3032 - DNA, 829 bp, Homo sapiens
  misc_feature 13, 18, 24, 187, 463, 469, 470, 471, 472, 473, 474, 475,476, 477, 478, 479, 480, 481, 482, 483, 484, 485, 486, 487,488, 489, 490, 491, 492, 493, 494, 495, 496, 497, 498, 499,500, 501, 502, 503, 504, 505, 506, 507, 508, 509, 510: n = A,T,C or G
  misc_feature 511, 512, 513, 514, 515, 516, 517, 518, 519, 520, 521, 522,523, 524, 525, 526, 527, 528, 529, 530, 531, 532, 533, 534,535, 536, 537, 538, 539, 540, 541, 542, 543, 544, 545, 546,547, 548, 549, 550, 551, 552, 553, 554, 555, 556, 557: n = A,T,C or G
  misc_feature 558, 559, 560, 561, 562, 563, 564, 565, 566, 567, 568, 569,570, 571, 572, 573, 574, 575, 576, 577, 578, 579, 580, 581,582, 583, 586, 587, 588, 589, 590, 591, 592, 593, 594, 595,597, 598, 599, 600, 601, 602, 603, 604, 605, 606, 607: n = A,T,C or G
  misc_feature 608, 609, 610, 611, 612, 613, 614, 615, 616, 617, 618, 619,620, 621, 622, 623, 624, 625, 626, 627, 628, 629, 630, 631,632, 633, 634, 635, 636, 637, 638, 639, 640, 641, 642, 643,644, 645, 646, 647, 648, 649, 650, 651, 652, 653, 654: n = A,T,C or G
  misc_feature 655, 656, 657, 658, 659, 660, 661, 662, 663, 664, 665, 666,667, 668, 669, 670, 671, 672, 673, 674, 675, 676, 677, 678,679, 680, 681, 682, 683, 684, 685, 686, 687, 688, 689, 690,691, 692, 693, 694, 695, 696, 697, 698, 699, 700, 701: n = A,T,C or G
  misc_feature 702, 703, 704, 705, 706, 707, 708, 709, 710, 711, 712, 713,714, 715, 716, 717, 718, 719, 720, 721, 722, 723, 724, 725,726, 727, 728, 729, 730, 731, 732, 733, 734, 735, 736, 737,738, 739, 740, 741, 742, 743, 744, 745, 746, 747, 748-829: n = A,T,C or G
agccgtaacgcgnatatngactanttgtggctgattggagctccaccgcggtggcggccgaggtaccaattcccagcctgggccttaagaggtcttgcttgcttctgttccctttggaactctgttactgctgtgagcacgtgaacaggctcacttggtggaaggggagcagctaaatggagcatanccaagtcattttacttgagtctggccctctcagaccagccgtcagccagctgaccaaaaatgtgttaagacagaacagccaacatcagcagagccacctacctaacctgtacctgcccgggcggccgctctagaactagtggatcccccgggctgcaggaattcgatatcaagcttatcgataccgtcgacctcgagggggggcccggtacccagcttttgttccctttagtgagggttaattgcgcgcttggcgtaatcatggtcatagctgttncctgannnnnnnnnnnnnnnnnnnnnnnnnnnnnnnnnnnnnnnnnnnnnnnnnnnnnnnnnnnnnnnnnnnnnnnnnnnnnnnnnnnnnnnnnnnnnnnnnnnnnnnnnnnnnnnnnnnagnnnnnnnnnntnnnnnnnnnnnnnnnnnnnnnnnnnnnnnnnnnnnnnnnnnnnnnnnnnnnnnnnnnnnnnnnnnnnnnnnnnnnnnnnnnnnnnnnnnnnnnnnnnnnnnnnnnnnnnnnnnnnnnnnnnnnnnnnnnnnnnnnnnnnnnnnnnnnnnnnnnnnnnnnnnnnnnnnnnnnnnnnnnnnnnnnnnnnnnnnnnnnnnnnnnnnnnnnnnnnnnnnnnnnnnnnnnnnnnnnnn

SEQ ID NO: 3033 - DNA, 869 bp, Homo sapiens
  misc_feature 10, 15, 21, 25, 28, 30, 165, 215, 220, 495, 571, 579, 580,581, 584, 586, 587, 590, 591, 592, 593, 594, 595, 596, 597,598, 599, 600, 601, 602, 603, 604, 605, 606, 607, 608, 609,610, 611, 612, 613, 614, 615, 616, 617, 618, 619, 620: n = A,T,C or G
  misc_feature 621, 622, 623, 624, 625, 626, 627, 628, 629, 630, 631, 632,633, 634, 635, 636, 637, 638, 639, 640, 641, 642, 643, 644,645, 646, 647, 648, 649, 650, 651, 652, 653, 654, 655, 656,657, 658, 659, 660, 661, 662, 663, 664, 665, 666, 667: n = A,T,C or G
  misc_feature 668, 669, 670, 671, 672, 673, 674, 675, 676, 677, 678, 679,680, 681, 682, 683, 684, 685, 686, 687, 688, 689, 690, 691,692, 693, 694, 695, 696, 697, 698, 699, 700, 701, 702, 703,704, 705, 706, 707, 708, 709, 710, 711, 712, 713, 714: n = A,T,C or G
  misc_feature 715, 716, 717, 718, 719, 720, 721, 722, 723, 724, 725, 726,727, 728, 729, 730, 731, 732, 733, 734, 735, 736, 737, 738,739, 740, 741, 742, 743, 744, 745, 746, 747, 748, 749, 750,751, 752, 753, 754, 755, 756, 757, 758, 759, 760, 761: n = A,T,C or G
  misc_feature 762, 763, 764, 765, 766, 767, 768, 769, 770, 771, 772, 773,774, 775, 776, 777, 778, 779, 780, 781, 782, 783, 784, 785,786, 787, 788, 789, 790, 791, 792, 793, 794, 795, 796, 797,798, 799, 800, 801, 802, 803, 804, 805, 806, 807, 808: n = A,T,C or G
  misc_feature 809, 810, 811, 812, 813, 814, 815, 816, 817, 818, 819, 820,821, 822, 823, 824, 825, 826, 827, 828, 829, 830, 831, 832,833, 834, 835, 836, 837, 838, 839, 840, 841, 842, 843, 844,845, 846, 847, 848, 849, 850, 851, 852, 853, 854, 855-869: n = A,T,C or G
agccgtatangacgnattatngacntantntgtggctgattggagctccccgcggtggcggccgaggtacctttctttccaggccatggcaaaaaaaaatccaattatgtccgtcttgagtctgtggtcttgcttcttatgtagtatttcctttgtgagctgaanattaatgcatggattcacctccttcagcacatttcatttcaattgtgaanaaaanattccaggcactgaatgtaaaattgaacatgacattttgacatttcttcttctgagagctgggttggtcttagttgctgtgaggctctagacaccgaccatacagggcgtggggctgctcctggacatgaacatcctccgaagttctccccagtccactttacccgctctgggctcacctctgaatgtccccgcgtacctgcccgggcggccgctctagaactagtggatcccccgggctgcaggaattcgatatcaagcttatcgataccgtcnacctcgagggggggcccggtacccagcttttgttccctttaatgagggttaattgcgcgcttggcgtaatcatggncatagctnnnttncnngannnnnnnnnnnnnnnnnnnnnnnnnnnnnnnnnnnnnnnnnnnnnnnnnnnnnnnnnnnnnnnnnnnnnnnnnnnnnnnnnnnnnnnnnnnnnnnnnnnnnnnnnnnnnnnnnnnnnnnnnnnnnnnnnnnnnnnnnnnnnnnnnnnnnnnnnnnnnnnnnnnnnnnnnnnnnnnnnnnnnnnnnnnnnnnnnnnnnnnnnnnnnnnnnnnnnnnnnnnnnnnnnnnnnnnnnnnnnnnnnnnnnnnnnnnnnnnnnnnnnnnnnnnnnnnnnnnnnnnn

SEQ ID NO: 3034 - DNA, 813 bp, Homo sapiens
  misc_feature 11, 21, 27, 231, 318, 365, 566, 585, 601, 603, 604, 605,606, 607, 608, 609, 610, 611, 612, 613, 615, 616, 617, 618,619, 620, 621, 622, 623, 624, 625, 626, 627, 628, 629, 630,631, 632, 633, 634, 635, 636, 637, 638, 639, 640, 641: n = A,T,C or G
  misc_feature 642, 643, 644, 645, 646, 647, 648, 649, 650, 651, 652, 653,654, 655, 656, 657, 658, 659, 660, 661, 662, 663, 664, 665,666, 667, 668, 669, 670, 671, 672, 673, 674, 675, 676, 677,678, 679, 680, 681, 682, 683, 684, 685, 686, 687, 688: n = A,T,C or G
  misc_feature 689, 690, 691, 692, 693, 694, 695, 696, 697, 698, 699, 700,701, 702, 703, 704, 705, 706, 707, 708, 709, 710, 711, 712,713, 714, 715, 716, 717, 718, 719, 720, 721, 722, 723, 724,725, 726, 727, 728, 729, 730, 731, 732, 733, 734, 735: n = A,T,C or G
  misc_feature 736, 737, 738, 739, 740, 741, 742, 743, 744, 745, 746, 747,748, 749, 750, 751, 752, 753, 754, 755, 756, 757, 758, 759,760, 761, 762, 763, 764, 765, 766, 767, 768, 769, 770, 771,772, 773, 774, 775, 776, 777, 778, 779, 780, 781, 782: n = A,T,C or G
  misc_feature 783, 784, 785, 786, 787, 788, 789, 790, 791, 792, 793, 794,795, 796, 797, 798, 799, 800, 801, 802, 803, 804, 805, 806,807, 808, 809, 810, 811, 812: n = A,T,C or G
agccgttaacnctattatggncatagntgtttcctgattggagctccccgcggtggcggccgaggtacggggactggtaggtggtttggattctgataggagaaaacactgcacacagcaggccagagtgggaatacctgtattctctatggtaacagtcaggtgaatggagaaactggagagatattttgacggttgtctttaaactcaatggagggcttgtgtagcaanagattgtaaactggcagctgctggtggtgtaatggattaaatcagcagtgcttatagaaaagaatttgagtgtttttagataggcanatagtctcctgtcttccctgttatcttggcttcccttgtttacgtancttatctacctctcatggagatatgagtttgagatacttgtaaggtctgcccaggagcagatgtgtacctgcccgggcggccgctctagaactattggatcccccgggctgcaggaattcgatatcaagcttatcgatccgtcgacctcgagggggggcccggtacccagcttttgttccctttaatgagggttaattgcncgcttggcgtaatcatggncatagctttttcctgngnnnnnnnnnnncnnnnnnnnnnnnnnnnnnnnnnnnnnnnnnnnnnnnnnnnnnnnnnnnnnnnnnnnnnnnnnnnnnnnnnnnnnnnnnnnnnnnnnnnnnnnnnnnnnnnnnnnnnnnnnnnnnnnnnnnnnnnnnnnnnnnnnnnnnnnnnnnnnnnnnnnnnnnnnnnnnnnnnnnnnnnnnnnnnnnnnnnnnnnnnnnnnnnnnc

SEQ ID NO: 3035 - DNA, 847 bp, Homo sapiens
  misc_feature 5, 7, 8, 10, 11, 12, 14, 15, 17, 18, 45, 46, 116, 184, 262,268, 280, 282, 340, 385, 442, 450, 468, 472, 481, 488, 561,571, 582, 605, 620, 668, 679, 690, 697, 724, 746, 759, 760,762, 763, 764, 765, 766, 767, 771, 782, 783, 788, 793: n = A,T,C or G
  misc_feature 803, 804, 815, 831, 832, 833, 834, 835, 836, 837, 838, 839,840, 841, 842, 843, 845, 847: n = A,T,C or G
agcgnanngnnnanngnngcgcgttatacgacttactatagggcnnattggagctccaccgcggtggcggccgggggccattgagactgccatggaagacttgaaaggtcacgtanctgagacttctggagagaccattcaaggcttctggctcttgacaaagatagaccactggaacaatganaaggagagaattctactggtcacagacaagactctcttgatctgtaaatacgacttcatcatgctgagttgtgtgcanctgcancggattcctctnancgctgtctatcgcatctgcctgggcaagttcaccttccctgggatgtccctggacaanagacaaggagaaggccttacgatctactgggggagtccggaggancactctcttctgtcccgctggaacccatggtccactgaagttccttatgctactttnactgagcntcctatgaaatacaccantganaaattcctngaaattngcaagttgtctgggatcatgtctaaacttgttccagctatccacaatgcccacaagaattcaactggatctgnaaaaagaaanaaactgatggnggtaactgaacccattttgattnagacctcccagggcngatgtcattcattggaaaccgcacaaacttggctattcccttcccctnggaattttggnttttgagagcntttttgnaccttggccgctctaaactaggggatnccccggcttgcaggaatcgatntaaaccttttttnncnnnnnnaccnggggggcccgnncccanttttnttccctttannagggtaattgncccctgctaatatggnnnnnnnnnnnnncncn

SEQ ID NO: 3036 - DNA, 869 bp, Homo sapiens
  misc_feature 19, 23, 24, 136, 347, 355, 364, 378, 413, 420, 495, 500,518, 570, 591, 603, 613, 626, 638, 656, 680, 734, 743, 767,779, 786, 815, 821, 822, 849, 852: n = A,T,C or G
agcgtatcgactactatanggcnnattggagctccaccgcggtggcggccgcccgggcaggtacccagtgattactatatcggatggtgcaggtctcagttctttccaccattttttccccaccatattttatatntttacataggtgagacaaatggacttaggccaaaaggtttacaactggagaaccaagttggaagcaaagaggtttttttgcaaagaggaatctcttgcaaacaaacctggaacttggcttattgagtcagtttttctgacatgtaagtatggctctttcagagcactagcactggggctgtgctcccctggagaggaagagccttaagganggaagganggacctctngagtctgttaagtnaactgagtgtgttgacagtttgaacacactccttntggcagnaaaacaaactgcttggcttatttcgtatgttaaatcaaaggaattcctttaaactggcttttaattttcaaaggnggaanccttctccatcttctctnctggcgctgtgcacctttttatttttaaaaaagcatgctgggcaccgatctntttggaaagccttacctgganattttacccaangcgtataccnccctgtttggttngagcccggaagnggtgaaccttctttccanatttttaaaaacaaaagctgaatncatagaacccacctgcacgaagttctttgctttccccagaaacttttttttttnttctgcagncccttgtaaaccggaggctgttgncaacatttttancctcagntccccttttggggcttggggcacccgccnaccccnnaaccggttccctgggcggttttaaaanaanggggtcccccgctgccg

SEQ ID NO: 3037 - DNA, 828 bp, Homo sapiens
  misc_feature 114, 139, 163, 178, 208, 297, 348, 356, 513, 550, 559, 607,625, 634, 656, 661, 700, 706, 707, 708, 709, 710, 711, 712,715, 716, 718, 719, 720, 721, 722, 723, 724, 725, 726, 727,728, 729, 730, 731, 732, 733, 734, 735, 736, 737, 738: n = A,T,C or G
  misc_feature 739, 740, 741, 742, 743, 744, 745, 746, 747, 748, 749, 750,751, 752, 753, 754, 755, 756, 757, 758, 759, 760, 761, 762,763, 764, 765, 766, 767, 768, 769, 770, 771, 772, 773, 774,775, 776, 777, 778, 779, 780, 781, 782, 783, 784, 785: n = A,T,C or G
  misc_feature 786, 787, 788, 789, 790, 791, 792, 793, 794, 795, 796, 797,798, 799, 800, 801, 802, 803, 804, 805, 806, 807, 808, 809,810, 811, 812, 813, 814, 815, 816, 817, 818, 819, 820, 821,822, 823, 824, 825, 826, 827, 828: n = A,T,C or G
gccgttatcgactcactatagggcgaattggagctccacccgcggtggcggccgcccgggcaggtaccagacccggtgagagcccccattccaatgcacccccatctcagcttntggccagaagacctgagcaagtccntccttcttcctggccttggccttnccatgggtggaaccnggagggctggctttaatctccaccagactnttgccccgggactgtgatgggcgattggccacttctcaataatcttcctgttttccttccgccttctgtttggctttagacaggaccantgcatctataacaccacctacctgaatgtccagcgggaaaatggaaccatntccagatncgtgggaggccaatagcatttcgctcacttgctgatcctcagggacaccaagacctacatgcttgcttttgacgtgaacgatgagaagaactgggggctgtctgtctatgctgacaagccagagacgaccaaggagcaactgggaaaagttctaccnaacttttgactgcttgggcattcccaagtcagatgtnatgtcctcnggccgctctagaactagtggatcccccgggctgggggaattcgatatnaagcttatcgataccgtngacctcganggggggcccggtacccaacttntggtnccttttatgaaggttaaatgcgcgcttggcgtaatcatnggatannnnnnnttnncnnnnnnnnnnnnnnnnnnnnnnnnnnnnnnnnnnnnnnnnnnnnnnnnnnnnnnnnnnnnnnnnnnnnnnnnnnnnnnnnnnnnnnnnnnnnnnnnnnnnnnnnnnnnnnn

SEQ ID NO: 3038 - DNA, 875 bp, Homo sapiens
  misc_feature 8, 36, 156, 384, 416, 446, 516, 525, 529, 530, 531, 534,535, 536, 537, 538, 539, 540, 541, 542, 543, 544, 545, 546,547, 548, 549, 550, 551, 552, 553, 554, 555, 556, 557, 558,559, 560, 561, 562, 563, 564, 565, 566, 567, 568, 569: n = A,T,C or G
  misc_feature 570, 571, 572, 573, 574, 575, 576, 577, 578, 579, 580, 581,582, 583, 584, 585, 586, 587, 588, 589, 590, 591, 592, 593,594, 595, 596, 597, 598, 599, 600, 601, 602, 603, 604, 605,606, 607, 608, 609, 610, 611, 612, 613, 614, 615, 616: n = A,T,C or G
  misc_feature 617, 618, 619, 620, 621, 623, 624, 625, 626, 627, 628, 629,630, 631, 632, 633, 634, 635, 636, 637, 638, 639, 640, 641,642, 643, 644, 645, 646, 647, 648, 649, 650, 651, 652, 653,654, 655, 656, 657, 658, 659, 660, 661, 662, 663, 664: n = A,T,C or G
  misc_feature 665, 666, 667, 668, 669, 670, 671, 672, 673, 674, 675, 676,677, 678, 679, 680, 681, 682, 683, 684, 685, 686, 687, 688,689, 690, 691, 692, 693, 694, 695, 696, 697, 698, 699, 700,701, 702, 703, 704, 705, 706, 707, 708, 709, 710, 711: n = A,T,C or G
  misc_feature 712, 713, 714, 715, 716, 717, 718, 719, 720, 721, 722, 723,724, 725, 726, 727, 728, 729, 730, 731, 732, 733, 734, 735,736, 737, 738, 739, 740, 741, 742, 743, 744, 745, 746, 747,748, 749, 750, 751, 752, 753, 754, 755, 756, 757, 758: n = A,T,C or G
  misc_feature 759, 760, 761, 762, 763, 764, 765, 766, 767, 768, 769, 770,771, 772, 773, 774, 775, 776, 777, 778, 779, 780, 781, 782,783, 784, 785, 786, 787, 788, 789, 790, 791, 792, 793, 794,795, 796, 797, 798, 799, 800, 801, 802, 803, 804, 805-875: n = A,T,C or G
agccgtanacgcgcattatcgacttactatagggcnaattggagctccccgcggtggcggcccgcccgggcaggtacattcccgggctggttgattggtaagctttcatctgctgagaagattcagaaatcttttccgatttcaggctgaaattanaaccaatttcttgtcttccagctcttattgtgggcctttattctgcaaagaaggctgcagtgccagcggagctgactgccagtgccaagtgtgtgactgacataacgtatggaggtaatccacacgtgtagctcaggaaggctattaataagaggtgctatttatgctggtttcctggggactatacctaaactgaaaaggccagttcaagtacctcggccgctctanaactagtggatcccccgggctgcaggaattcnatatcaagcttatcgataccgtcgacctcnagggggggcccggtacccagcttttgttccctttagtgagggttaattgcgcgcttggcgtaatcatggncatagctgnttcnnnggnnnnnnnnnnnnnnnnnnnnnnnnnnnnnnnnnnnnnnnnnnnnnnnnnnnnnnnnnnnnnnnnnnnnnnnnnnnnnnnnnnnnnnnncnnnnnnnnnnnnnnnnnnnnnnnnnnnnnnnnnnnnnnnnnnnnnnnnnnnnnnnnnnnnnnnnnnnnnnnnnnnnnnnnnnnnnnnnnnnnnnnnnnnnnnnnnnnnnnnnnnnnnnnnnnnnnnnnnnnnnnnnnnnnnnnnnnnnnnnnnnnnnnnnnnnnnnnnnnnnnnnnnnnnnnnnnnnnnnnnnnnnnnnnnnnnnnnnnnnnnnnnnnnnnnnnnnnnnnnnnnnnnnnnnnnnnnnnnnnnn

SEQ ID NO: 3039 - DNA, 865 bp, Homo sapiens
  misc_feature 15, 20, 27, 31, 37, 563, 568, 569, 570, 571, 572, 573, 574,575, 576, 577, 578, 579, 580, 581, 582, 583, 584, 585, 586,587, 588, 589, 590, 591, 592, 593, 594, 595, 596, 597, 598,599, 600, 601, 602, 603, 604, 605, 606, 607, 608, 609: n = A,T,C or G
  misc_feature 610, 611, 612, 613, 614, 615, 616, 618, 619, 621, 623, 624,625, 626, 627, 628, 629, 630, 631, 632, 633, 634, 635, 636,637, 638, 639, 640, 641, 642, 643, 644, 645, 646, 647, 648,649, 650, 651, 652, 653, 654, 655, 656, 657, 658, 659: n = A,T,C or G
  misc_feature 660, 661, 662, 663, 664, 665, 666, 667, 668, 669, 670, 671,672, 673, 674, 675, 676, 677, 678, 679, 680, 681, 682, 683,684, 685, 686, 687, 688, 689, 690, 691, 692, 693, 694, 695,696, 697, 698, 699, 700, 701, 702, 703, 704, 705, 706: n = A,T,C or G
  misc_feature 707, 708, 709, 710, 711, 712, 713, 714, 715, 716, 717, 718,719, 720, 721, 722, 723, 724, 725, 726, 727, 728, 729, 730,731, 732, 733, 734, 735, 736, 737, 738, 739, 740, 741, 742,743, 744, 745, 746, 747, 748, 749, 750, 751, 752, 753: n = A,T,C or G
  misc_feature 754, 755, 756, 757, 758, 759, 760, 761, 762, 763, 764, 765,766, 767, 768, 769, 770, 771, 772, 773, 774, 775, 776, 777,778, 779, 780, 781, 782, 783, 784, 785, 786, 787, 788, 789,790, 791, 792, 793, 794, 795, 796, 797, 798, 799, 800: n = A,T,C or G
  misc_feature 801, 802, 803, 804, 805, 806, 807, 808, 809, 810, 811, 812,813, 814, 815, 816, 817, 818, 819, 820, 821, 822, 823, 824,825, 826, 827, 828, 829, 830, 831, 832, 833, 834, 835, 836,837, 838, 839, 840, 841, 842, 843, 844, 845, 846, 847-865: n = A,T,C or G
agccgtagacgcgcnttatngacttantatngggctnattggagctccaccgcggtggcggcccgcccgggcaggtacgcggggcagagcgggtaaagtggactggggagaacttcggaggatgttcatgtccaggagcagtcccacgccctgtatggtcggtgtctagagcctcacagcaactaagaccaacccagctctcagaagaaggaatgtcaaaatgtcatgttcaattttacattcagtgcctggaatcttttcttcacaattgaaatgaaatgtgctgaaggaggtgaatccatgcattaatcttcagctcacaaaggaaatactacataagaagcaagaccacagactcaagacggacataattggatttttttgccatggcctggaaagaaaggtacctcggccgctctagaactagtggatcccccgggctgcaggaattcgatatcaagcttatcgataccgtcgacctcgagggggggcccggtacccagcttttgttccctttaatgaggggttaattgcgcgcttggcgtaatcatggtcatagctgnttccnnnnnnnnnnnnnnnnnnnnnnnnnnnnnnnnnnnnnnnnnnnnnnnnntnncngnnnnnnnnnnnnnnnnnnnnnnnnnnnnnnnnnnnnnnnnnnnnnnnnnnnnnnnnnnnnnnnnnnnnnnnnnnnnnnnnnnnnnnnnnnnnnnnnnnnnnnnnnnnnnnnnnnnnnnnnnnnnnnnnnnnnnnnnnnnnnnnnnnnnnnnnnnnnnnnnnnnnnnnnnnnnnnnnnnnnnnnnnnnnnnnnnnnnnnnnnnnnnnnnnnnnnnnnnnnnnnnnnnnnnnnnnnnnnnnnnnn

SEQ ID NO: 3040 - DNA, 810 bp, Homo sapiens
  misc_feature 14, 21, 25, 74, 131, 155, 177, 246, 253, 257, 266, 267, 272,281, 285, 287, 298, 303, 306, 310, 315, 316, 317, 318, 319,321, 324, 331, 336, 337, 341, 352, 364, 366, 367, 368, 374,378, 379, 380, 386, 387, 388, 389, 391, 395, 397: n = A,T,C or G
  misc_feature 407, 408, 411, 415, 420, 424, 431, 438, 440, 443, 448, 449,452, 460, 465, 472, 489, 513, 521, 524, 538, 562, 571, 572,580, 589, 595, 596, 597, 601, 603, 604, 605, 606, 608, 610,611, 612, 613, 614, 615, 617, 618, 620, 621, 624, 625: n = A,T,C or G
  misc_feature 626, 630, 631, 632, 634, 636, 637, 638, 639, 641, 644, 645,646, 647, 648, 649, 650, 651, 652, 653, 654, 658, 661, 662,663, 665, 666, 667, 668, 670, 671, 672, 674, 675, 676, 677,678, 679, 680, 681, 682, 683, 686, 687, 688, 689, 690: n = A,T,C or G
  misc_feature 691, 692, 693, 694, 695, 696, 698, 699, 700, 704, 705, 706,707, 708, 709, 710, 711, 712, 713, 717, 719, 720, 723, 724,726, 728, 729, 730, 731, 732, 733, 736, 737, 738, 739, 740,743, 744, 745, 746, 747, 748, 749, 750, 751, 752, 753: n = A,T,C or G
  misc_feature 754, 755, 757, 758, 759, 760, 761, 762, 763, 764, 765, 766,767, 768, 769, 770, 772, 774, 775, 776, 777, 779, 780, 781,782, 783, 786, 787, 789, 793, 794, 795, 796, 798, 799, 804,806, 807, 809: n = A,T,C or G
agccgtatcgactnactatanggcnaattggagctccccgcggtggcggccgaggtacctgttgggaatctgantctcagggtttctggccatttcctgttttaaaaaatcctccagtaagaaatattgtngctgtttcctttctctttctaagngttgattcaacttgagtgtatnacttattggctgataaatattgtcctttgaggggaatcggatcaaacccaaacaacaaaggtaggtatnacttgtntttnttttaactnnaaaancaaccccancccntnggaaacccccnccttnggnaatngtttnnnnncntanttttacnaaaannaaancccctcccagnttttccttgaancnnngtgggnttcnnnttaaannnngncccntntttttgaaannggncccnaaacngggnttttctngggcggntnttnccctnnccnggggggcnttttnaaaccgngggaccccccgggccgnggaaattccatacacccttttttnaccccccnccntgaggggggggccnccccccatttttccccctttaggnggggtaaannccccccgnccctaaatngggccnnnactntnnnncngnnnnnnanngnnatnnncctnnncntnnnncnctnnnnnnnnnnncccnaannngnnnntnnntnnnnnnnnnnccnnnnnnnnnnnannnccannnnnnnnnntttntnnggnncnannnnnntannnnnaannnnnnnnnnnnnannnnnnnnnnnnnntntnnnngnnnnnaannancctnnnnanncctgncnngnc

SEQ ID NO: 3041 - DNA, 825 bp, Homo sapiens
  misc_feature 4, 5, 6, 7, 8, 10, 199, 259, 532, 535, 563, 578, 581, 614,635, 638, 641, 647, 666, 674, 698, 731, 741, 754, 757, 762,763, 769, 774, 814, 823: n = A,T,C or G
agcnnnnngncgcgcgttatacgactactatagggcgaattggagctccccgcggtggcggccgaggtactcatccttcccaccattgccaacatttaatattaccatttttaaactttaatcaatctgacaggtgaaaaaaaagacttcactttctatgttgcatttcttttttagtgaagatgaacatttttttcgnaagttcattaacttttaaattttctaaacagcagtggatccaatcaatactcctcaagtngcatttaaaattttaaaaaaacacagctataatcctaccactttgggaggccaaaatgggaggactgcttgaggccaggagttcaagaccagcctgggcaacatagcaaggtcctgtctcttaaaaataaaaaaatgtgtcagatatggcggcgtgtgcctgtagtcccagatactcaaaaggctgaggcaggagcatcaacttgagcccaggaacttgaagctgcaggtgagccagggtcactccactacattccagcctgggtgacagaanaanacccatttgcagattgtatcatgtttcnagatttctggacttnatnaaattttgtaaaaattacattcaaccggactgnggcaatccttttttactgganatntgncctcanacttctcctactgtctgtnaatttccnctaaactggttattgctgcatttngaacctggctgtttggatctccaattaggggcnttttttggcncaacgtggttaanggnaaagnngggccncaaanccttgaatgttggtttaaggcaaaaaaaaagccttttcantacctgccngg

SEQ ID NO: 3042 - DNA, 839 bp, Homo sapiens
  misc_feature 25, 83, 117, 154, 310, 346, 369, 370, 371, 377, 392, 413,447, 452, 459, 460, 463, 464, 465, 466, 467, 468, 469, 470,473, 475, 477, 478, 479, 481, 483, 485, 486, 488, 489, 491,495, 521, 522, 527, 529, 533, 536, 538, 540, 543, 544: n = A,T,C or G
  misc_feature 547, 553, 555, 558, 561, 567, 569, 575, 578, 580, 584, 586,593, 594, 597, 602, 604, 605, 609, 610, 615, 616, 617, 626,631, 632, 633, 634, 638, 640, 641, 643, 644, 646, 647, 648,649, 653, 655, 656, 657, 659, 662, 663, 664, 665, 667: n = A,T,C or G
  misc_feature 670, 671, 672, 679, 682, 683, 684, 685, 689, 690, 691, 694,695, 696, 697, 698, 704, 705, 706, 707, 708, 711, 713, 715,716, 717, 718, 719, 721, 722, 724, 726, 727, 728, 729, 730,731, 732, 733, 734, 736, 737, 738, 739, 740, 741, 742: n = A,T,C or G
  misc_feature 743, 744, 745, 746, 747, 748, 749, 751, 752, 753, 754, 755,756, 757, 758, 759, 760, 761, 762, 763, 764, 765, 766, 767,768, 769, 770, 771, 772, 773, 774, 775, 776, 777, 778, 779,780, 781, 782, 783, 784, 785, 786, 787, 788, 789, 790: n = A,T,C or G
  misc_feature 791, 792, 793, 794, 795, 796, 797, 798, 799, 800, 801, 802,803, 804, 805, 806, 807, 808, 809, 810, 811, 812, 813, 814,815, 816, 817, 818, 819, 820, 821, 822, 823, 824, 825, 826,827, 828, 829, 830, 831, 832, 833, 834, 835, 836, 837: n = A,T,C or G
  misc_feature 838, 839: n = A,T,C or G
agccgtatcgacttactatagggcnaattggagctccccgcggtggcggccgcccgggcaggtacaatcctgccctcaagaanggttaaggtccagttggaggagacttaggagttnaactgacccagttctgcaaccttaggtggctgtcctnatcctgacaggagacaggggacacacaaaaaacagtgatttaggcgttaacaaagtggctttacaaaggtgtagacagaatataggaaatccaacaaggcctggtggagcaccatgaagctggtgacagcagggaacacccgcgtacctcggccgntctagaactagtggatcccccgggctgcaggaattngatatcaagcttatcgataccgnnnacctcnagggggggcccggtncccagcttttgttccctttantgagggttaattgcgcgcttggcgtaatcatggncatanctgttcnntgnnnnnnnnggntncnnncntncnngnnangggnagggattccttggaggcttggccttnnccctnangganctngnanccnnganggactnanatngangggcananaaaaanctnangctntngtacctnnccngcggncnntttnnaactnnnggatccccnggctnnnngaantnnanntnnnncttntnnntnccnnnnanctnnnggggggnccnnnncccnnnttnnnnncctttnnnnnggntnannnnncnntngnnnnnnnnngnnnnnnnnnnnnnncnnnnnnnnnnnnnnnnnnnnnnnnnnnnnnnnnnnnnnnnnnnnnnnnnnnnnnnnnnnnnnnnnnnnnnnnnnnnnnnnnnnnnnnnn

SEQ ID NO: 3043 - DNA, 865 bp, Homo sapiens
  misc_feature 20, 24, 25, 98, 323, 380, 381, 395, 436, 517, 558, 604, 664,670, 681, 682, 683, 684, 685, 686, 687, 688, 689, 691, 692,693, 694, 695, 696, 697, 698, 699, 700, 701, 702, 703, 704,705, 706, 707, 708, 709, 710, 711, 712, 713, 714: n = A,T,C or G
  misc_feature 715, 716, 717, 718, 719, 720, 721, 722, 723, 724, 725, 726,727, 728, 729, 730, 731, 732, 733, 734, 735, 736, 737, 738,739, 740, 741, 742, 743, 744, 745, 746, 747, 748, 749, 750,751, 752, 753, 754, 755, 756, 757, 758, 759, 760, 761: n = A,T,C or G
  misc_feature 762, 763, 764, 765, 766, 767, 768, 769, 770, 771, 772, 773,774, 775, 776, 777, 778, 779, 780, 781, 782, 783, 784, 785,786, 787, 788, 789, 790, 791, 792, 793, 794, 795, 796, 797,798, 799, 800, 801, 802, 803, 804, 805, 806, 807, 808: n = A,T,C or G
  misc_feature 809, 810, 811, 812, 813, 814, 815, 816, 817, 818, 819, 820,821, 822, 823, 824, 825, 826, 827, 828, 829, 830, 831, 832,833, 834, 835, 836, 837, 838, 839, 840, 841, 842, 843, 844,845, 846, 847, 848, 849, 850, 851, 852, 853, 854, 855: n = A,T,C or G
  misc_feature 856, 857, 858, 859, 860, 861, 862, 863, 864, 865: n = A,T,C or G
agccgtatcgactactatanggcnnattggagctccccgcggtggcggccgaggtaccttcctgctcttgctgaagtgccctgcagtctgtctgccangacaaaagtttggggctacacaggctggcctaacaatgccacaggtgctgatttggagggccgagaggagtgatgcgggcacttataaagaggagagaaaggaggagaggctcaccctcacgaggcttctgagaagggggtgaactgcaaaagtgcagagggcaggagagacctcagcatctacccagtatgaggagtgtatcacagctgggaaggtgattccanagcaggggaaaatgcaagctccactaatacaaatgaggtgaggcaaccagtgcacanngaggggttccacangacccaacaacctcacaaatccaacagacgaccaacaatanctggggacatgctcaagacccacagagcaagtgcatgaagccagggcaaggggcagcagtgaggacaaatctctccatgantacctgcccgggcggccgctctagaactagtggatcccccnggcttgcaggaattcgatatcaaacttatcgataccgtcgacctcnaaggggggccccgtcccaccttttgttcctttaatgagggttaattgcgcgcctggcgtnatcatnggcataactgnnnnnnnnngnnnnnnnnnnnnnnnnnnnnnnnnnnnnnnnnnnnnnnnnnnnnnnnnnnnnnnnnnnnnnnnnnnnnnnnnnnnnnnnnnnnnnnnnnnnnnnnnnnnnnnnnnnnnnnnnnnnnnnnnnnnnnnnnnnnnnnnnnnnnnnnnnnnnnnnnnnnnnnnnnnnnnnnnnnnnnnn

SEQ ID NO: 3044 - DNA, 828 bp, Homo sapiens
  misc_feature 16, 20, 28, 277, 284, 304, 305, 373, 374, 380, 383, 385,387, 410, 421, 443, 450, 453, 464, 483, 489, 497, 503, 504,512, 513, 532, 537, 538, 540, 541, 542, 544, 545, 552, 553,560, 564, 566, 571, 572, 578, 579, 583, 587, 592, 594: n = A,T,C or G
  misc_feature 595, 596, 599, 602, 603, 604, 605, 606, 607, 608, 609, 610,612, 613, 614, 615, 616, 617, 618, 619, 620, 621, 622, 623,626, 627, 628, 629, 630, 631, 632, 633, 634, 635, 636, 637,638, 639, 640, 641, 642, 643, 644, 645, 646, 647, 648: n = A,T,C or G
  misc_feature 649, 650, 651, 652, 653, 654, 655, 656, 657, 658, 659, 660,661, 662, 663, 666, 667, 673, 674, 675, 676, 678, 679, 680,681, 682, 683, 684, 685, 686, 687, 688, 689, 691, 692, 693,694, 695, 696, 699, 700, 701, 702, 703, 704, 707, 708: n = A,T,C or G
  misc_feature 709, 710, 711, 712, 714, 715, 716, 717, 718, 719, 720, 721,722, 723, 724, 725, 726, 727, 728, 729, 730, 731, 732, 733,734, 735, 736, 737, 738, 739, 740, 741, 742, 743, 744, 745,746, 748, 749, 750, 751, 752, 754, 755, 756, 757, 758: n = A,T,C or G
  misc_feature 759, 760, 761, 762, 763, 764, 766, 767, 768, 769, 770, 771,772, 773, 774, 775, 776, 777, 778, 779, 780, 781, 782, 783,784, 785, 786, 787, 788, 789, 790, 791, 792, 793, 794, 795,796, 797, 798, 799, 800, 801, 802, 803, 804, 805, 806: n = A,T,C or G
  misc_feature 807, 808, 809, 810, 811, 812, 813, 814, 815, 816, 817, 818,819, 820, 821, 822, 823, 824, 825, 826, 827, 828: n = A,T,C or G
agccgtatcgacatanttgnggctgatnggagctccaccgcggtggcggccgcccgggcaggtaccatatcagtggagagctgcagcaaggtggcccctacagcccgcaaaccagcctgcacattacctctccatactgcagccctttatatggaaacttcttacatcactttgctgtgtgtgtttacacaggtgggttttgctgtacctcggccgctctagaactagtggatcccccgggctgcaggaattcgatatcaagcttatcgataccgtngacctcnagggggggcccggtacccanncttttgttccctttagtgagggttaattgcgcgcttggcgtaatcatggtcatagctgtttcctggannatgctnacngntnttttaaaatgtattaaaacttgnttaaggcctancttatgatccatttttggtgtncctcggncgntctaaaactantggatcccccgggctgcangaattngattcaancttatnnataccggnnacctcagggggggccccgncccanntnnngnncctttanngagggtnaatngnccccnnggcggnnacangggnattgntnnnttncgnnnnnnnnngnnnnnnnnnnnnggnnnnnnnnnnnnnnnnnnnnnnnnnnnnnnnnnnnnnnggnngggggnnnncnnnnnnnnnnnntnnnnnnttnnnnnngannnnnnannnnnnnnnnnnnnnnnnnnnnnnnnnnnnnnntnnnnnannnnnnnnnnnannnnnnnnnnnnnnnnnnnnnnnnnnnnnnnnnnnnnnnnnnnnnnnnnnnnnnnnnnnnnnn

SEQ ID NO: 3045 - DNA, 829 bp, Homo sapiens
  misc_feature 10, 17, 23, 578, 579, 583, 586, 587, 588, 589, 590, 592,593, 594, 595, 596, 597, 598, 599, 600, 601, 602, 603, 604,605, 606, 607, 608, 609, 610, 611, 612, 613, 614, 615, 616,617, 618, 619, 620, 621, 622, 623, 624, 625, 626, 627: n = A,T,C or G
  misc_feature 628, 629, 630, 631, 632, 633, 634, 635, 636, 637, 638, 639,640, 641, 642, 643, 644, 645, 646, 647, 648, 649, 650, 651,652, 653, 654, 655, 656, 657, 658, 659, 660, 661, 662, 663,664, 665, 666, 667, 668, 669, 670, 671, 672, 673, 674: n = A,T,C or G
  misc_feature 675, 676, 677, 678, 679, 680, 681, 682, 683, 684, 685, 686,687, 688, 689, 690, 691, 692, 693, 694, 695, 696, 697, 698,699, 700, 701, 702, 703, 704, 705, 706, 707, 708, 709, 710,711, 712, 713, 714, 715, 716, 717, 718, 719, 720, 721: n = A,T,C or G
  misc_feature 722, 723, 724, 725, 726, 727, 728, 729, 730, 731, 732, 733,734, 735, 736, 737, 738, 739, 740, 741, 742, 743, 744, 745,746, 747, 748, 749, 750, 751, 752, 753, 754, 755, 756, 757,758, 759, 760, 761, 762, 763, 764, 765, 766, 767, 768: n = A,T,C or G
  misc_feature 769, 770, 771, 772, 773, 774, 775, 776, 777, 778, 779, 780,781, 782, 783, 784, 785, 786, 787, 788, 789, 790, 791, 792,793, 794, 795, 796, 797, 798, 799, 800, 801, 802, 803, 804,805, 806, 807, 808, 809, 810, 811, 812, 813, 814, 815: n = A,T,C or G
  misc_feature 816, 817, 818, 819, 820, 821, 822, 823, 824, 825, 826, 827,828, 829: n = A,T,C or G
agcgcgtatngacatanttgttngctgattggagctccaccgcggtggcggccgaggtactcaagccacctgcctgtcatggccccccaaaatgctgggattgcaggccaccataaccggtcatcggggcaactatccttcagggcttcctccagtagggctccccaggttggccttgaggccacaataaaaaatctgacttagctatactccttccctgtccccaaccacagttattcttgtggatgaggcaaatggcagcaggacagctggagtataccagagttgactcatttattttatgcatgcttagtgtggcatccctggggacatgaaattccagtgaaatccagtctttgtgctggagaagctcatagatctgtggaggaggcagatgcccacccactcactgtacctgcccgggcggccgctctagaactagtggatcccccgggctgcaggaattcgatatcaagcttatcgataccgtcgacctcgagggggggcccggtacccaacttttgttccctttaatgaggggttaattgcgcgcttggcgtaatcatggtcatagctgnntttncgnnnnnannnnnnnnnnnnnnnnnnnnnnnnnnnnnnnnnnnnnnnnnnnnnnnnnnnnnnnnnnnnnnnnnnnnnnnnnnnnnnnnnnnnnnnnnnnnnnnnnnnnnnnnnnnnnnnnnnnnnnnnnnnnnnnnnnnnnnnnnnnnnnnnnnnnnnnnnnnnnnnnnnnnnnnnnnnnnnnnnnnnnnnnnnnnnnnnnnnnnnnnnnnnnnnnnnnnnnnnnnnnnnnnnnnnnnnnnnnnnn

SEQ ID NO: 3046 - DNA, 835 bp, Homo sapiens
  misc_feature 8, 18, 35, 36, 126, 145, 216, 259, 267, 314, 354, 373, 382,393, 432, 444, 449, 459, 464, 468, 472, 478, 500, 502, 510,516, 518, 521, 523, 552, 569, 636, 650, 654, 656, 666, 678,688, 693, 697, 705, 746, 755, 763, 770, 779, 780, 783: n = A,T,C or G
  misc_feature 787, 789, 830, 834: n = A,T,C or G
agccgtancgcgcgtttncgacttactatagggcnnattggagctccaccgcggtggcggcccgaggtacagacaacggattgagctacttcctaacacagtgactgggattcaggacatatccantaaacgtctgttaaggaantaaacaaaataaataaataaaacaggatagtggctggctgctctctctgtgtagactggattaaagtagancaggaaaacatgtgggaggttactgaagtggtggtattgggantgaggacnggggagtgatgtcacttggaccattggaaggaaggaggttcatgcantcaggagcttagcgataactcacatggaaagaaggcaagngtctcgagatgcacagtgngaagagtanctgaggtccanaggaggttctaccgacctatacgtaagcgagctaatacntgttgtgctatngcccnatgattaaangtaanctgncaantccctngaatagattcaggttttgcttncngagatttngctcanangcncnagggaaatacccatacctgccagcctatnaacccatttcttaactnaaaaggttaattttcttcatccaaacaaaaagccattcatcactttggaaatgaatgggatactgtnttctccaatttttncccncnggaaaaaatnacaccttattanaaacttgttnccccntttncttgcccngggcggccccttttaaaactaatggaatcccccgggctgcnggaaattcnatattaanctttttnaattccccnnaancctnangggggggccccgggcccccacctttggttccctttaattanggcna

SEQ ID NO: 3047 - DNA, 831 bp, Homo sapiens
  misc_feature 3, 4, 9, 92, 110, 115, 117, 123, 128, 136, 144, 201, 313,453, 473, 488, 504, 556, 580, 612, 618, 623, 629, 639, 643,657, 664, 678, 698, 714, 715, 721, 729, 730, 742, 752, 781,784, 792, 793, 795, 796, 797, 799, 802, 811, 821, 824: n = A,T,C or G
  misc_feature 826, 829: n = A,T,C or G
agnntaggngcgcgtatacgactactatagggcgaattggagctccccgcggtggcggcccgaggtacaaaatgcatattattattcttttnatatacatataatgaatncaaantnaaatantaacntataatanatgctctncacagaacatgctgcagaataaataataaatggacaataaattatcctggtcctgtnttgatagaaaaggaaaataaagactagaggttaaggcttgccaaatgtcatgtatttagtttgagaacttgttggtagagcaaagggaatttcttccataaacttgaaagtncattacacaaatatttttctacttagttcctatagcatttctttgagaaaagtagatattaccccttaatagtgagggaacaaaggaaggacagagagggaagtgggttgtataagcatatgagacaaatttcaacaganagtggaaacaaacaaaattngattaatccactctnccctaccttaactttncacactagtctaaatttttggtccctggatgtatattacaaatacatgtgtntaatgtgtttgggggaggatcccnaaaagttggtgaaactgtgaatggtgaaaacnaaaccnttttnactggnccactttttntgantgggggaaaaaaanaaacccntggccaagaacccnggtttgaatcaaatctcaanaaggaggttattccannaatggnccggcttnnttttttgatggnttcgatgccnggaccgaaaaatttgaaggttagggggtnaangaccttgnncnnncnaanataaaaaangcccttttcnaananttnat

SEQ ID NO: 3048 - DNA, 857 bp, Homo sapiens
  misc_feature 5, 9, 16, 23, 454, 455, 456, 457, 458, 459, 460, 461, 462,463, 464, 465, 466, 467, 468, 469, 470, 471, 472, 473, 474,475, 476, 477, 478, 479, 480, 481, 482, 483, 484, 485, 486,487, 488, 489, 490, 491, 492, 493, 494, 495, 496, 497: n = A,T,C or G
  misc_feature 498, 499, 500, 501, 502, 503, 504, 505, 506, 507, 508, 509,510, 511, 512, 513, 514, 515, 516, 517, 518, 519, 520, 521,522, 523, 524, 525, 526, 527, 528, 529, 530, 531, 532, 533,534, 535, 536, 537, 538, 539, 540, 541, 542, 543, 544: n = A,T,C or G
  misc_feature 545, 546, 547, 548, 549, 550, 551, 552, 553, 554, 555, 556,557, 558, 559, 560, 561, 562, 563, 564, 565, 566, 567, 568,569, 570, 571, 572, 573, 574, 575, 576, 577, 578, 579, 580,581, 582, 583, 584, 585, 586, 587, 588, 589, 590, 591: n = A,T,C or G
  misc_feature 592, 593, 594, 595, 596, 597, 598, 599, 600, 601, 602, 603,604, 605, 606, 607, 608, 609, 610, 611, 612, 613, 614, 615,616, 617, 618, 619, 620, 621, 622, 623, 624, 625, 626, 627,628, 629, 630, 631, 632, 633, 634, 635, 636, 637, 638: n = A,T,C or G
  misc_feature 639, 640, 641, 642, 643, 644, 645, 646, 647, 648, 649, 650,651, 652, 653, 654, 655, 656, 657, 658, 659, 660, 661, 662,663, 664, 665, 666, 667, 668, 669, 670, 671, 672, 673, 674,675, 676, 677, 678, 679, 680, 681, 682, 683, 684, 685: n = A,T,C or G
  misc_feature 686, 687, 688, 689, 690, 691, 692, 693, 694, 695, 696, 697,698, 699, 700, 701, 702, 703, 704, 705, 706, 707, 708, 709,710, 711, 712, 713, 714, 715, 716, 717, 718, 719, 720, 721,722, 723, 724, 725, 726, 727, 728, 729, 730, 731, 732-857: n = A,T,C or G
agccntatngacatantatgttngctgattggagctccccgcggtggcggccgcccgggcaggtacctgttatcatcattcctcaagagctgcatgtggcacagcaggaagccaggcaagctcctgccattagcacacaacggcaaaagtggatgtctgtgtcaacatttctgaagacccagaatgggccgtagataggcatgattttcctaatgactttcgcacacaggcaaaaaaatagtaatgataactactaatattataggtgcttcctgtggccaggggatgtacctcggccgctctagaactagtggatcccccgggctgcaggaattcgatatcaagcttatcgataccgtcgacctcgagggggggcccggtacccagcttttgttccctttagtgagggttaattgcgcgcttggcgtaatcatggtcatagctgtttcctgannnnnnnnnnnnnnnnnnnnnnnnnnnnnnnnnnnnnnnnnnnnnnnnnnnnnnnnnnnnnnnnnnnnnnnnnnnnnnnnnnnnnnnnnnnnnnnnnnnnnnnnnnnnnnnnnnnnnnnnnnnnnnnnnnnnnnnnnnnnnnnnnnnnnnnnnnnnnnnnnnnnnnnnnnnnnnnnnnnnnnnnnnnnnnnnnnnnnnnnnnnnnnnnnnnnnnnnnnnnnnnnnnnnnnnnnnnnnnnnnnnnnnnnnnnnnnnnnnnnnnnnnnnnnnnnnnnnnnnnnnnnnnnnnnnnnnnnnnnnnnnnnnnnnnnnnnnnnnnnnnnnnnnnnnnnnnnnnnnnnnnnnnnnnnnnnnnnnnnnnnnnnnnnnnnnnnnnnnnnnnnnnnnnnnnnnnnnnnnnnnnn

SEQ ID NO: 3049 - DNA, 830 bp, Homo sapiens
  misc_feature 34, 67, 69, 72, 73, 75, 78, 83, 90, 92, 96, 101, 102, 112,119, 122, 125, 127, 129, 131, 134, 137, 144, 156, 174, 196,236, 249, 252, 256, 259, 261, 264, 284, 298, 327, 334, 358,472, 498, 565, 566, 567, 568, 569, 570, 571, 572, 573: n = A,T,C or G
  misc_feature 574, 575, 576, 577, 578, 579, 580, 581, 582, 583, 584, 585,586, 587, 588, 589, 590, 591, 592, 593, 594, 595, 596, 597,598, 599, 600, 601, 602, 603, 604, 605, 606, 607, 608, 609,610, 611, 612, 613, 614, 615, 616, 617, 618, 619, 620: n = A,T,C or G
  misc_feature 621, 622, 623, 624, 625, 626, 627, 628, 629, 630, 631, 632,633, 634, 635, 636, 637, 638, 639, 640, 641, 642, 643, 644,645, 646, 647, 648, 649, 650, 651, 652, 653, 654, 655, 656,658, 659, 660, 661, 663, 666, 667, 668, 669, 670, 671: n = A,T,C or G
  misc_feature 672, 673, 674, 675, 676, 677, 678, 679, 680, 681, 682, 683,684, 685, 686, 687, 688, 689, 690, 691, 692, 693, 694, 695,696, 697, 698, 699, 700, 701, 702, 703, 704, 705, 706, 707,708, 709, 710, 711, 712, 713, 714, 715, 716, 717, 718: n = A,T,C or G
  misc_feature 719, 720, 721, 722, 723, 724, 725, 726, 727, 728, 729, 730,731, 732, 733, 734, 735, 736, 737, 738, 739, 740, 741, 742,743, 744, 745, 746, 747, 748, 749, 750, 751, 752, 753, 754,755, 756, 757, 758, 759, 760, 761, 762, 763, 764, 765: n = A,T,C or G
  misc_feature 766, 767, 768, 769, 770, 771, 772, 773, 774, 775, 776, 777,778, 779, 780, 781, 782, 783, 784, 785, 786, 787, 788, 789,790, 791, 792, 793, 794, 795, 796, 797, 798, 799, 800, 801,802, 803, 804, 805, 806, 807, 811, 812, 813, 814, 815-830: n = A,T,C or G
agcgtagacgcgcgtatacgactactatagggcnaattggagctccccgcggtggcggcccgacgtncncanntnctnatctntggtctntncttnagagnnaatatggttnacctacntgnaancntncncanaanatttttnagaaacccactnacatgtgtcaggcagtangtttgccaaggtgccagacaancaagaatttcaaagttggatgatacaaagtataaaacctntaattttggccangcncaanggntnacncctgtaatcccagcactttnggaggccgaggcgngcagatcacctgaggtcaagaggtcgatntcagtcngccaacatggcaaaaccccgtctntactaaaaatataaaaattagccaggcatggtggtacctgcccgggcggccgctctagaactagtggatcccccgggctgcaagaattcgatatcaagcttatcgataccgtcnacctcgagggggggcccggtacccancttttgttccctttaattgagggttaattgcgcgcttggcgtaatcatgggcatagctgtttctggnnnnnnnnnnnnnnnnnnnnnnnnnnnnnnnnnnnnnnnnnnnnnnnnnnnnnnnnnnnnnnnnnnnnnnnnnnnnnnnnnnnnnnnnnnnnannnnanaannnnnnnnnnnnnnnnnnnnnnnnnnnnnnnnnnnnnnnnnnnnnnnnnnnnnnnnnnnnnnnnnnnnnnnnnnnnnnnnnnnnnnnnnnnnnnnnnnnnnnnnnnnnnnnnnnnnnnnnnnnnnnnnnnnnnnnnnnnnnnaaannnnnnnnnnnnnnnnnnnn

SEQ ID NO: 3050 - DNA, 836 bp, Homo sapiens
  misc_feature 27, 277, 280, 282, 283, 297, 300, 305, 306, 307, 312, 318,321, 323, 326, 328, 330, 335, 337, 343, 346, 350, 351, 358,364, 372, 375, 385, 389, 390, 395, 398, 400, 406, 408, 410,414, 425, 428, 429, 430, 434, 435, 437, 439, 440, 441: n = A,T,C or G
  misc_feature 446, 447, 450, 451, 452, 453, 454, 455, 456, 457, 458, 459,460, 461, 462, 463, 464, 465, 466, 467, 468, 469, 470, 471,472, 473, 474, 475, 476, 477, 478, 479, 480, 481, 482, 483,484, 485, 487, 488, 489, 491, 492, 493, 494, 495, 496: n = A,T,C or G
  misc_feature 497, 498, 499, 500, 501, 502, 503, 504, 505, 506, 507, 508,509, 510, 511, 512, 513, 514, 515, 516, 517, 518, 519, 520,521, 522, 523, 524, 525, 526, 527, 528, 529, 530, 531, 532,533, 534, 535, 536, 537, 538, 539, 540, 541, 542, 543: n = A,T,C or G
  misc_feature 544, 545, 546, 547, 548, 549, 550, 551, 552, 553, 554, 555,556, 557, 558, 559, 560, 561, 562, 563, 564, 565, 566, 567,568, 569, 570, 571, 572, 573, 574, 575, 576, 577, 578, 579,580, 581, 582, 583, 584, 585, 586, 587, 588, 589, 590: n = A,T,C or G
  misc_feature 591, 592, 593, 594, 595, 596, 597, 598, 599, 600, 601, 602,603, 604, 605, 606, 607, 608, 609, 610, 611, 612, 613, 614,615, 616, 617, 618, 619, 620, 621, 622, 623, 624, 625, 626,627, 628, 629, 630, 631, 632, 633, 634, 635, 636, 637: n = A,T,C or G
  misc_feature 638, 639, 640, 641, 642, 643, 644, 645, 646, 647, 648, 649,650, 651, 652, 653, 654, 655, 656, 657, 658, 659, 660, 661,662, 663, 664, 665, 666, 667, 668, 669, 670, 671, 672, 673,674, 675, 676, 677, 678, 679, 680, 681, 682, 683, 684-836: n = A,T,C or G
agcttatcgactactatagggcgaatnggagctccccgcggtggcggccgaggtacatcattaccagtgaccagtcattgtgtcatttctttcgaagtctgtcagtgattggtcaatgaagatctgttactcagtttacccttaaataccaaggcatgtagttgtgtccctccttatttcccagtgatggaagttggtgacagcttacaacaaaagtatgagcaaaaaaaaatgagttggtcagcaaaggtaaatgtgcaagaaaaaaaaaaaaaanttncnngccgggggggcccnttnaaaannngggancccccnggncngcngnanttcantntaaacnttntgannccccccnccctangggggggnccnggcccccacntttnntcccnttnangggggntnantggncccctgggggnacnnngggnnanannngttcnnggnnnnnnnnnnnnnnnnnnnnnnnnnnnnnnnnnnnncnnngnnnnnnnnnnnnnnnnnnnnnnnnnnnnnnnnnnnnnnnnnnnnnnnnnnnnnnnnnnnnnnnnnnnnnnnnnnnnnnnnnnnnnnnnnnnnnnnnnnnnnnnnnnnnnnnnnnnnnnnnnnnnnnnnnnnnnnnnnnnnnnnnnnnnnnnnnnnnnnnnnnnnnnnnnnnnnnnnnnnnnnnnnnnnnnnnnnnnnnnnnnnnnnnnnnnnnnnnnnnnnnnnnnnnnnnnnnnnnnnnnnnnnnnnnnnnnnnnnnnnnnnnnnnnnnnnnnnnnnnnnnnnnnnnnnnnnnnnnnnnnnnnnnnnnnnnnnnnnnnnnnnnnnnnnnnnnnnnnnnnnnnnnn

SEQ ID NO: 3051 - DNA, 864 bp, Homo sapiens
  misc_feature 1, 2, 3, 4, 5, 6, 7, 8, 17, 30, 34, 299, 400, 414, 427, 443,451, 520, 550, 574, 581, 613, 645, 646, 675, 680, 683, 684,686, 687, 688, 689, 690, 694, 698, 699, 700, 701, 702, 703,704, 705, 706, 707, 708, 709, 710, 711, 712, 713: n = A,T,C or G
  misc_feature 714, 715, 716, 717, 718, 719, 720, 721, 722, 723, 724, 725,726, 727, 728, 729, 730, 731, 732, 733, 734, 735, 736, 737,738, 739, 740, 741, 742, 743, 744, 745, 746, 747, 748, 749,750, 751, 752, 753, 754, 755, 756, 757, 758, 759, 760: n = A,T,C or G
  misc_feature 761, 762, 763, 764, 765, 766, 767, 768, 769, 770, 771, 772,773, 774, 775, 776, 777, 778, 779, 780, 781, 782, 783, 784,785, 786, 787, 788, 789, 790, 791, 792, 793, 794, 795, 796,797, 798, 799, 800, 801, 802, 803, 804, 805, 806, 807: n = A,T,C or G
  misc_feature 808, 809, 810, 811, 812, 813, 814, 815, 816, 817, 818, 819,820, 821, 822, 823, 824, 825, 826, 827, 828, 829, 830, 831,832, 833, 834, 835, 836, 837, 838, 839, 840, 841, 842, 843,844, 845, 846, 847, 848, 849, 850, 851, 852, 853, 854: n = A,T,C or G
  misc_feature 855, 856, 857, 858, 859, 860, 861, 862, 863, 864: n = A,T,C or G
nnnnnnnnaagccgtancgactcactatanggcnaattggagctccccgcggtggcggccgaggtacaagttgtctttatgctgcgagataagtcctctcttggtttgagctcccaccttttcagtgaactcttacattttgggggatctgctcttgtaaaggacatcctttctggtgagtattcttttggttaatttttggtttggttatttgtgcatgaatttaatctcattaggaaacaagttaagttgaatagaccaactagtgaattaatcccgtcaccaaaatatatgttttnggcatttacctgttaattttgaaactctttgtaagaaatgtaaacctgtaatggataatctctggttttgaaaggatatctccctttttgccccctaaacncttagatccttccnaagccaaaggganaaacctaaatttattnatttgggnaaacccacccttgaccatttcattttgaaagctttctatatatgccttttttcatcttaaccaaaaatngtggttaaattctttccccggccggtctanaactaatggatcccccggcttcangaattcnatatcaagcttatcgatcccgccaaccttaanggggggcccggccccacttttgtccctttaannaagggtaaatggccccctgccctaacatnggcanaanntnnnnncccnggannnnnnnnnnnnnnnnnnnnnnnnnnnnnnnnnnnnnnnnnnnnnnnnnnnnnnnnnnnnnnnnnnnnnnnnnnnnnnnnnnnnnnnnnnnnnnnnnnnnnnnnnnnnnnnnnnnnnnnnnnnnnnnnnnnnnnnnnnnnnnnnnnnnnnnnnnnnnnnnnnnnnnn

SEQ ID NO: 3052 - DNA, 875 bp, Homo sapiens
  misc_feature 1, 11, 19, 23, 24, 41, 254, 271, 296, 415, 416, 417, 418,419, 420, 421, 422, 423, 424, 425, 426, 427, 428, 429, 430,431, 432, 433, 434, 435, 436, 437, 438, 439, 440, 441, 442,444, 445, 446, 447, 448, 449, 450, 451, 452, 453, 454: n = A,T,C or G
  misc_feature 455, 456, 457, 458, 459, 460, 461, 462, 463, 464, 465, 466,467, 468, 469, 470, 471, 472, 473, 474, 475, 476, 477, 478,479, 480, 481, 482, 483, 484, 485, 486, 488, 489, 490, 491,492, 493, 494, 495, 496, 497, 498, 499, 500, 501, 502: n = A,T,C or G
  misc_feature 503, 504, 505, 506, 507, 508, 509, 510, 511, 512, 513, 514,515, 516, 517, 518, 519, 520, 521, 522, 523, 524, 525, 526,527, 528, 529, 530, 531, 532, 533, 534, 535, 536, 537, 538,539, 540, 541, 542, 543, 544, 545, 546, 547, 548, 549: n = A,T,C or G
  misc_feature 550, 551, 552, 553, 554, 555, 556, 557, 558, 559, 560, 561,562, 563, 564, 565, 566, 567, 568, 569, 570, 571, 572, 573,574, 575, 576, 577, 578, 579, 580, 581, 582, 583, 584, 585,586, 587, 588, 589, 590, 591, 592, 593, 594, 595, 596: n = A,T,C or G
  misc_feature 597, 598, 599, 600, 601, 602, 603, 604, 605, 606, 607, 608,609, 610, 611, 612, 613, 614, 615, 616, 617, 618, 619, 620,621, 622, 623, 624, 625, 626, 627, 628, 629, 630, 631, 632,633, 634, 635, 636, 637, 638, 639, 640, 641, 642, 643: n = A,T,C or G
  misc_feature 644, 645, 646, 647, 648, 649, 650, 651, 652, 653, 654, 655,656, 657, 658, 659, 660, 661, 662, 663, 664, 665, 666, 667,668, 669, 670, 671, 672, 673, 674, 675, 676, 677, 678, 679,680, 681, 682, 683, 684, 685, 686, 687, 688, 689, 690-875: n = A,T,C or G
natcgcgtatngacatagntggnnctgattggggccgaatnggagctccaccgcggtggcggccgcccgggcaggtacgcggggagtcatctcagagggcacagcctggagtgcagctcaacaaacatatgtgtaacagccgagtgccaccacgttaagaactggacttacaagatggataggacctggtggcagctgtccttgaggaagccagagcctggagagacagatctcatgttatagcagagtacctnggccgctctagaactantggatcccccgggctgcaggaattngatatcaagcttatcgatacccgtcgacctcgagggggggcccggtacccagcttttgttccctttagtgagggttaattgcgcgcttggcgtaatcatggtcatagctgttttctggnnnnnnnnnnnnnnnnnnnnnnnnnnnngnnnnnnnnnnnnnnnnnnnnnnnnnnnnnnnnnnnnnnnnnnncnnnnnnnnnnnnnnnnnnnnnnnnnnnnnnnnnnnnnnnnnnnnnnnnnnnnnnnnnnnnnnnnnnnnnnnnnnnnnnnnnnnnnnnnnnnnnnnnnnnnnnnnnnnnnnnnnnnnnnnnnnnnnnnnnnnnnnnnnnnnnnnnnnnnnnnnnnnnnnnnnnnnnnnnnnnnnnnnnnnnnnnnnnnnnnnnnnnnnnnnnnnnnnnnnnnnnnnnnnnnnnnnnnnnnnnnnnnnnnnnnnnnnnnnnnnnnnnnnnnnnnnnnnnnnnnnnnnnnnnnnnnnnnnnnnnnnnnnnnnnnnnnnnnnnnnnnnnnnnnnnnnnnnnnnnnnnnnnnnnnnnnnnnnnnnnnnnnnnnnnnnnnnnnnnnnnnnnnnnnnnnnnnnnn

SEQ ID NO: 3053 - DNA, 955 bp, Homo sapiens
  misc_feature 5, 72, 74, 81, 84, 85, 93, 232, 251, 277, 279, 280, 283,287, 293, 302, 303, 310, 312, 318, 321, 338, 346, 347, 349,362, 368, 370, 373, 374, 376, 385, 394, 398, 399, 400, 409,410, 411, 412, 415, 418, 424, 426, 430, 431, 435, 437: n = A,T,C or G
  misc_feature 445, 456, 460, 461, 463, 468, 474, 475, 476, 483, 486, 497,498, 499, 502, 504, 506, 511, 518, 519, 520, 524, 533, 534,535, 537, 547, 554, 558, 559, 561, 562, 570, 577, 581, 582,583, 584, 586, 587, 592, 595, 597, 599, 600, 601, 605: n = A,T,C or G
  misc_feature 614, 615, 621, 622, 625, 628, 629, 634, 635, 638, 641, 651,656, 658, 660, 663, 666, 670, 671, 672, 683, 688, 700, 706,707, 708, 710, 711, 724, 725, 726, 729, 733, 736, 739, 741,745, 747, 758, 759, 763, 764, 768, 769, 770, 773, 779: n = A,T,C or G
  misc_feature 783, 794, 795, 796, 798, 801, 802, 809, 819, 825, 828, 832,840, 841, 847, 851, 852, 853, 859, 861, 863, 864, 865, 866,869, 870, 871, 877, 879, 884, 893, 894, 897, 902, 904, 910,912, 915, 918, 921, 935, 940, 944, 947, 948, 951, 952: n = A,T,C or G
  misc_feature 953, 954: n = A,T,C or G
aatgngtatcgactactatagggcgaattggagctccaccgcggtggcggccgttaaggacagttgcggctnangagaaangcnnccccaggntggcccttcattccgcaaaccacctgcacattacctctccatactgcagccctttatatggaaacttcttacatcactttgctgtgtgtgtcacacaggtggggtttttgcttgtacctcggcccgctctagaaactantgggatccccccgggctgnaggaatttcaatatcaagctttatcnannccntccnccccancgggggggnnggccccnancccagnttntgttcccttaaggtganggttaatnncncgcttggcgtaancatggncntanntncttggcccngggaaaggntatnnnaaaaatcgnnnnganacnattttnancgannaacntngcagtggnaaaattccggngtgnnanatatngttggnnnagaaatntgnggggaggaaannnccngngnatatnttcgggnnntaanataattgtnnngnaaatttatcnggatggntaanntnncgcggggnaaatatnttgnnnnannatatnttngngnnngganaatattgcnnagtacnntanaannatcgnnagngtnatataaaggnggagntngnaanagngcannngaggaaacttntcggncgtagaattttnagttgnnngnngaaatattttggnnncgnaaanatnatntntggngnggagaaattgnngggnngggnnnganctttgngggntataaaatttnnngnggnnatatatntatgggtganaaaaantancggnggggagannaaaatntggnnnatgagnanannnnatnnncggctntngaatnaaatggttnngantaatntnatagcngnggnagngantaattcgagggggnggggnaatnttnnttnnnng

SEQ ID NO: 3054 - DNA, 836 bp, Homo sapiens
  misc_feature 26, 215, 282, 288, 289, 293, 300, 320, 329, 331, 332, 340,345, 348, 353, 360, 373, 420, 422, 423, 426, 431, 437, 463,478, 481, 503, 516, 517, 597, 602, 603, 604, 605, 625, 631,637, 638, 643, 657, 667, 671, 673, 676, 677, 678, 679: n = A,T,C or G
  misc_feature 680, 681, 682, 683, 684, 685, 686, 687, 688, 689, 690, 691,692, 695, 698, 699, 700, 701, 702, 703, 704, 705, 706, 707,708, 709, 710, 711, 712, 713, 714, 715, 716, 717, 718, 719,720, 721, 722, 723, 724, 725, 726, 727, 728, 729, 730: n = A,T,C or G
  misc_feature 731, 732, 733, 734, 735, 736, 737, 738, 739, 740, 741, 742,743, 744, 745, 746, 747, 748, 749, 750, 751, 752, 753, 754,755, 756, 757, 758, 759, 760, 761, 762, 763, 764, 765, 766,767, 768, 769, 770, 771, 772, 773, 774, 775, 776, 777: n = A,T,C or G
  misc_feature 778, 779, 780, 781, 782, 783, 784, 785, 786, 787, 788, 789,790, 791, 792, 793, 794, 795, 796, 797, 798, 799, 800, 801,802, 803, 804, 805, 806, 807, 808, 809, 810, 811, 812, 813,814, 815, 816, 817, 818, 819, 820, 821, 822, 823, 824: n = A,T,C or G
  misc_feature 825, 826, 827, 828, 829, 830, 831, 832, 833, 834, 835, 836: n = A,T,C or G
agcgcgtatcgactactatagggcgnattggagctccccgcggtggcggccgaggtacatactttcctgtgtcttgctgttttcacttactatatcttggagctatttctatattgccacattcaaagctttttaaagcattttcaggatagctatttatagtcaagatgtatcacagtttgtcttatttacctgtccccccactgatgaacagnctggttgcttctgtttgtttttttctgttattgtaataaacatccttatagttgcacttttttattnttaaannttgntgtattnttaatcttttgttttaatanaaacaaggncnnactgtgtngcccnggntggtnttgaacncctgagctcaagngatcctcctgcctcagcctcccaaagtgctaggattacagacgtgancnnccnccacnggcaanagtcgcactttctaatgtgggtttgnaggacaggttttcantantgtagggcatgaaggtttattnttaggtaaaatgnngctagattgacctgcccgggcgggccggtttagaactaatggatcccccggcctgcaggaattcgatataaagcttatcnaaccnnnnaccttcagggggggcccggncccagnttttgnnccttnatgaggggaaatgncccctggccnaatnanggnnnnnnnnnnnnnnnnncgnggnnnnnnnnnnnnnnnnnnnnnnnnnnnnnnnnnnnnnnnnnnnnnnnnnnnnnnnnnnnnnnnnnnnnnnnnnnnnnnnnnnnnnnnnnnnnnnnnnnnnnnnnnnnnnnnnnnnnnnnnnnnnnnnnnnnnnnnnnnn

SEQ ID NO: 3055 - DNA, 847 bp, Homo sapiens
  misc_feature 15, 17, 20, 25, 425, 538, 620, 635, 642, 644, 650, 654, 656,687, 702, 784, 791, 792, 794, 822, 823, 828, 829, 830, 831,832, 833, 834, 835, 836, 837, 838, 839, 840, 841, 842, 844,846, 847: n = A,T,C or G
agcgcgtatcgactnantangggcngattggagctccccgcggtggcggccgcccgggcaggtacacctctagccttcactcacactcctttctatgttggtcaaaaggcaaaaacctcctgagtgacaattaccccttctcaggtagcagccaaaaagagttaattgtttctcatcagaatctgcatgtggccccagagcatcatgtatagaactattctggagtccttatcatcatcatataactacgtgtccactgtgcatctccagaaaagagatcctattatagtcatctttgcttctcagtttccaccacgatactaacaatagcagccattcaacagatggttgtggaatgactaaaattctgtgttccttattgcatgccttgccttccaactaagcttttcaagagtatggatacngtattataaggtatttatataacacccacacacagagacacataaagcacctgggaatcgcacttttcagacagaaaatacccaataaatcttaccgaataaattaatcaatngagaattaaagaacaattttgccagaagcatagctgaatctggtgctctgacagaaaaatggattcaggttatgaaaaaccngttatcaatgcttgnatgtgtngnaacatnccantncatctaaatgtgggtacctgtgaccctgggncggtttaaaactagngggttcccccggctggaggaattcgatattaagcttatcgatccgtcaaccttaagggggggcccgggccccacctttggtncctttanngngggtaattggcccctggggaatcatggnnttagnnnnnnnnnnnnnnntngnn

SEQ ID NO: 3056 - DNA, 837 bp, Homo sapiens
  misc_feature 59, 83, 98, 106, 107, 124, 132, 210, 245, 252, 290, 304,329, 341, 391, 491, 508, 562, 571, 580, 581, 582, 583, 584,585, 586, 594, 595, 617, 625, 632, 635, 636, 637, 640, 644,657, 659, 662, 664, 679, 685, 688, 691, 692, 700, 704: n = A,T,C or G
  misc_feature 723, 724, 727, 728, 729, 730, 731, 734, 735, 736, 737, 738,739, 740, 741, 742, 743, 744, 745, 746, 747, 748, 750, 752,753, 754, 755, 756, 757, 758, 759, 760, 761, 762, 763, 764,765, 766, 767, 768, 769, 770, 771, 772, 773, 774, 775: n = A,T,C or G
  misc_feature 776, 777, 778, 779, 780, 781, 782, 783, 784, 785, 786, 787,788, 789, 790, 791, 792, 793, 794, 795, 796, 797, 798, 799,800, 801, 802, 803, 804, 805, 806, 807, 808, 809, 810, 811,812, 813, 814, 815, 816, 817, 818, 819, 820, 821, 822: n = A,T,C or G
  misc_feature 823, 824, 825, 826, 827, 828, 829, 830, 831, 832, 833, 834,835, 836, 837: n = A,T,C or G
agcgcgtatcgactcactatagggcgaattggagctccccgcggtggcggccgcccggncaggtaccttggaatagatatttntctttacttttgctngtggggtnngattgtattttccaaanaggctgtntatgtatgtgtgtgcatactccccccatctcacccaatatgctatttttgagcctccatcaagcagtggggtctttgnttcctcctcttgaacccgtgcagacaggaattctnccccgancgttttggatcttgagcattgtgttttaagagcacagntgcaagatcaagancatgcacctggcactgctaggtgcncagcgccatcangccagcatctcccttcccattttccttgtgaccactgtttaggcattganattaagcactgtatatgtatatgtgttcattgagagaggggattaagtttttttacttttaaatgaaatcaacaatgaaaatatcaattgacatcaaaanagagtttcttttaagcngtgaaatgaaccaacatgaccgctgtcgggtgcattttttaaaaatcccctttnggaaaaaanggggggaannnnnnncccccccnngcccccttaaaaatagggaaancccggccncaaaaanttnnnttnaaanttttttttccccnanccncnggggggggggcgggncccccnttntgnncccttttngggnggaaaaaggccccttgggnnaannnnnggnnnnnnnnnnnnnnntngnnnnnnnnnnnnnnnnnnnnnnnnnnnnnnnnnnnnnnnnnnnnnnnnnnnnnnnnnnnnnnnnnnnnnnnnnnnnnnnnnnnnnn

SEQ ID NO: 3057 - DNA, 848 bp, Homo sapiens
  misc_feature 15, 21, 22, 26, 27, 211, 429, 485, 491, 568, 570, 574, 575,576, 577, 578, 579, 580, 582, 583, 584, 585, 586, 587, 588,589, 590, 591, 592, 593, 594, 595, 596, 597, 598, 599, 600,601, 602, 603, 604, 605, 606, 607, 608, 609, 610, 611: n = A,T,C or G
  misc_feature 612, 613, 614, 615, 616, 617, 618, 619, 620, 621, 622, 623,624, 625, 626, 627, 628, 629, 630, 631, 632, 633, 634, 635,636, 637, 638, 639, 640, 641, 642, 643, 644, 645, 646, 647,648, 649, 650, 651, 652, 653, 654, 655, 656, 657, 658: n = A,T,C or G
  misc_feature 659, 660, 661, 662, 663, 664, 665, 666, 667, 668, 669, 670,671, 672, 673, 674, 675, 676, 677, 678, 679, 680, 681, 682,683, 684, 685, 686, 687, 688, 689, 690, 691, 692, 693, 694,695, 696, 697, 698, 699, 700, 701, 702, 703, 704, 705: n = A,T,C or G
  misc_feature 706, 707, 708, 709, 710, 711, 712, 713, 714, 715, 716, 717,718, 719, 720, 721, 722, 723, 724, 725, 726, 727, 728, 729,730, 731, 732, 733, 734, 735, 736, 737, 738, 739, 740, 741,742, 743, 744, 745, 746, 747, 748, 749, 750, 751, 752: n = A,T,C or G
  misc_feature 753, 754, 755, 756, 757, 758, 759, 760, 761, 762, 763, 764,765, 766, 767, 768, 769, 770, 771, 772, 773, 774, 775, 776,777, 778, 779, 780, 781, 782, 783, 784, 785, 786, 787, 788,789, 790, 791, 792, 793, 794, 795, 796, 797, 798, 799: n = A,T,C or G
  misc_feature 800, 801, 802, 803, 804, 805, 806, 807, 808, 809, 810, 811,812, 813, 814, 815, 816, 817, 818, 819, 820, 821, 822, 823,824, 825, 826, 827, 828, 829, 830, 831, 832, 833, 834, 835,836, 837, 838, 839, 840, 841, 842, 843, 844, 845, 846-848: n = A,T,C or G
agcgctaatcgactnactatnnggcnnattggagctccaccgcggtggcggccgcccgggcaggtacgcgggacacattcagaggtgagcccagagcgggtaaagtggactggggagaacttcggaggatgttcatgtccaggagcagccccacgccctgtatggtcggtgtctagagcctcacagcaactaagaccaacccagctctcanaagaaggaatgtcaaaatgtcatgttcaattttacattcagtgcctggaatcttttcttcacaattgaaatgaaatgtgctgaaggaggtgaatccatgcattaatcttcagctcacaaaggaaatactacataagaagcaagaccacagactcaagacggacataattggattttttttgccatggcctggaaagaaaggtacctcggccgctctanaactagtggatcccccgggctgcaggaattcgatatcaagcttatcgataccgtcnacctcnagggggggcccggtcccaacttttgttccctttaatgagggttaattgcgcgcttggcgtaatcatggtcatactgntntttnnnnnnnannnnnnnnnnnnnnnnnnnnnnnnnnnnnnnnnnnnnnnnnnnnnnnnnnnnnnnnnnnnnnnnnnnnnnnnnnnnnnnnnnnnnnnnnnnnnnnnnnnnnnnnnnnnnnnnnnnnnnnnnnnnnnnnnnnnnnnnnnnnnnnnnnnnnnnnnnnnnnnnnnnnnnnnnnnnnnnnnnnnnnnnnnnnnnnnnnnnnnnnnnnnnnnnnnnnnnnnnnnnnnnnnnnnnnnnnnnnnnnnnnnnnnnnnnnnnnnnnnnnnnnnnnn

SEQ ID NO: 3058 - DNA, 886 bp, Homo sapiens
  misc_feature 397, 401, 403, 404, 405, 406, 407, 408, 409, 410, 411, 412,413, 414, 415, 416, 417, 418, 419, 420, 421, 422, 423, 424,425, 426, 427, 428, 429, 430, 431, 432, 433, 434, 435, 436,437, 438, 439, 440, 441, 442, 443, 444, 445, 446, 447: n = A,T,C or G
  misc_feature 448, 449, 450, 451, 452, 453, 454, 455, 456, 457, 458, 459,460, 461, 462, 463, 464, 465, 466, 467, 468, 469, 470, 471,472, 476, 477, 478, 480, 481, 482, 483, 484, 485, 486, 487,488, 489, 490, 491, 492, 493, 494, 495, 496, 497, 498: n = A,T,C or G
  misc_feature 499, 500, 501, 502, 503, 504, 505, 506, 507, 508, 509, 510,511, 512, 513, 514, 515, 516, 517, 518, 519, 520, 521, 522,523, 524, 525, 526, 527, 528, 529, 530, 531, 532, 533, 534,535, 536, 537, 538, 539, 540, 541, 542, 543, 544, 545: n = A,T,C or G
  misc_feature 546, 547, 548, 549, 550, 551, 552, 553, 554, 555, 556, 557,558, 559, 560, 561, 562, 563, 564, 565, 566, 567, 568, 569,570, 571, 572, 573, 574, 575, 576, 577, 578, 579, 580, 581,582, 583, 584, 585, 586, 587, 588, 589, 590, 591, 592: n = A,T,C or G
  misc_feature 593, 594, 595, 596, 597, 598, 599, 600, 601, 602, 603, 604,605, 606, 607, 608, 609, 610, 611, 612, 613, 614, 615, 616,617, 618, 619, 620, 621, 622, 623, 624, 625, 626, 627, 628,629, 630, 631, 632, 633, 634, 635, 636, 637, 638, 639: n = A,T,C or G
  misc_feature 640, 641, 642, 643, 644, 645, 646, 647, 648, 649, 650, 651,652, 653, 654, 655, 656, 657, 658, 659, 660, 661, 662, 663,664, 665, 666, 667, 668, 669, 670, 671, 672, 673, 674, 675,676, 677, 678, 679, 680, 681, 682, 683, 684, 685, 686-886: n = A,T,C or G
agccgtatcgactacttagggcgaattggagctccaccgcggtggcggccgaggtacattaccctacgctccaagcgcagcaagccggccaatatccgtggcaccgtgaagcccaagcgcaggaaaaagcatgcagtggcatcggctgccccagggcaggaggctttggtcggaccatcccttcagcccgcaggaagcggcaagggaagctgatgctgtagcacctgggtacctgcccgggcggccgctctagaactagtggatcccccgggctgcaggaattcgatatcaagcttatcgataccgtcgacctcgagggggggcccggtacccagcttttgttccctttagtgagggttaattgcgcgcttggcgtaatcatggtcatagctgtttnctgnannnnnnnnnnnnnnnnnnnnnnnnnnnnnnnnnnnnnnnnnnnnnnnnnnnnnnnnnnnnnnnnnnnnnnttcnnngnnnnnnnnnnnnnnnnnnnnnnnnnnnnnnnnnnnnnnnnnnnnnnnnnnnnnnnnnnnnnnnnnnnnnnnnnnnnnnnnnnnnnnnnnnnnnnnnnnnnnnnnnnnnnnnnnnnnnnnnnnnnnnnnnnnnnnnnnnnnnnnnnnnnnnnnnnnnnnnnnnnnnnnnnnnnnnnnnnnnnnnnnnnnnnnnnnnnnnnnnnnnnnnnnnnnnnnnnnnnnnnnnnnnnnnnnnnnnnnnnnnnnnnnnnnnnnnnnnnnnnnnnnnnnnnnnnnnnnnnnnnnnnnnnnnnnnnnnnnnnnnnnnnnnnnnnnnnnnnnnnnnnnnnnnnnnnnnnnnnnnnnnnnnnnnnnnnnnnnnnnnnnnnnnnnnnnnnnnnnnnnnnnnnnnnnnnnnnnnnnnnnnnn

SEQ ID NO: 3059 - DNA, 868 bp, Homo sapiens
  misc_feature 5, 14, 25, 29, 528, 530, 531, 532, 533, 534, 535, 536, 537,538, 539, 540, 541, 542, 543, 544, 545, 546, 547, 548, 549,550, 551, 552, 553, 554, 555, 556, 557, 558, 559, 560, 561,562, 563, 564, 565, 566, 567, 568, 569, 570, 571, 572: n = A,T,C or G
  misc_feature 573, 574, 575, 576, 577, 578, 579, 580, 581, 582, 583, 584,585, 586, 587, 588, 589, 590, 591, 592, 593, 594, 595, 596,597, 598, 599, 600, 601, 602, 603, 604, 605, 606, 607, 608,609, 610, 611, 612, 613, 614, 615, 616, 617, 618, 619: n = A,T,C or G
  misc_feature 620, 621, 622, 623, 624, 625, 626, 627, 628, 629, 630, 631,632, 633, 634, 635, 636, 637, 638, 639, 640, 641, 642, 643,644, 645, 646, 647, 648, 649, 650, 651, 652, 653, 654, 655,656, 657, 658, 659, 660, 661, 662, 663, 664, 665, 666: n = A,T,C or G
  misc_feature 667, 668, 669, 670, 671, 672, 673, 674, 675, 676, 677, 678,679, 680, 681, 682, 683, 684, 685, 686, 687, 688, 689, 690,691, 692, 693, 694, 695, 696, 697, 698, 699, 700, 701, 702,703, 704, 705, 706, 707, 708, 709, 710, 711, 712, 713: n = A,T,C or G
  misc_feature 714, 715, 716, 717, 718, 719, 720, 721, 722, 723, 724, 725,726, 727, 728, 729, 730, 731, 732, 733, 734, 735, 736, 737,738, 739, 740, 741, 742, 743, 744, 745, 746, 747, 748, 749,750, 751, 752, 753, 754, 755, 756, 757, 758, 759, 760: n = A,T,C or G
  misc_feature 761, 762, 763, 764, 765, 766, 767, 768, 769, 770, 771, 772,773, 774, 775, 776, 777, 778, 779, 780, 781, 782, 783, 784,785, 786, 787, 788, 789, 790, 791, 792, 793, 794, 795, 796,797, 798, 799, 800, 801, 802, 803, 804, 805, 806, 807-868: n = A,T,C or G
agccntaacgactntatacgactantatngggcgaattggagctccaccgcggtggcggccgaggtacaaagaaaccctttgcagacagcccatttatagagagaagctaagtatttatttacttgctactcaatttaaaatacgaccatggcaggcaaccaaccaggagaagagctaaaagtttgaaagcactgcccttttctctactatagaagttacagggtcaagccttggaaaatttccacaaaataaggctttgctaaacatatttaccttatcagaaagattgtatctcaaaaaagttacgtttttcttcaggcaagacaagaaaaactgcctgtcctaatcgacagtacctgcccgggcggcccgctctagaactagtggatcccccgggctgcaggaattcgatatcaagcttatcgatacccgtcgacctcgagggggggcccggtacccagcttttgttccctttagtgagggttaattgcgcgcttggcgtaatcatggtcatagctgttttcggnannnnnnnnnnnnnnnnnnnnnnnnnnnnnnnnnnnnnnnnnnnnnnnnnnnnnnnnnnnnnnnnnnnnnnnnnnnnnnnnnnnnnnnnnnnnnnnnnnnnnnnnnnnnnnnnnnnnnnnnnnnnnnnnnnnnnnnnnnnnnnnnnnnnnnnnnnnnnnnnnnnnnnnnnnnnnnnnnnnnnnnnnnnnnnnnnnnnnnnnnnnnnnnnnnnnnnnnnnnnnnnnnnnnnnnnnnnnnnnnnnnnnnnnnnnnnnnnnnnnnnnnnnnnnnnnnnnnnnnnnnnnnnnnnnnnnnnnnnnnnnnnnnnnnnnnnnnnnnnnnnnnnnnnnnnnnnnnnnn

SEQ ID NO: 3060 - DNA, 882 bp, Homo sapiens
  misc_feature 2, 466, 543, 567, 570, 571, 572, 579, 609, 610, 618, 634,640, 646, 656, 659, 662, 667, 683, 684, 689, 694, 696, 698,712, 715, 721, 724, 726, 730, 731, 732, 740, 747, 756, 780,781, 793, 794, 798, 802, 804, 805, 806, 807, 808, 809: n = A,T,C or G
  misc_feature 812, 817, 820, 827, 828, 830, 834, 841, 842, 843, 845, 847,854, 856, 857, 858, 859, 869, 871, 872, 874, 875, 877, 880,881, 882: n = A,T,C or G
angccgcgtaatcgactcactatagggcgaattggagctccccgcggtggcggccgcccgggcaggtacgcggggacacattcagaggtgagcccagagggggtaaagtggactggggagaacttcggaggatgttcatgtccaggagcagccccacgccctgtatggtcggtgtctagagcctacagcaactaagaccaacccagctctcagaagaaggaatgtcaaaatgtcatgttcaattttacattcagtgcctagaatcttttcttcacaattgaaatgaaatgtgctgaaggaggtgaatccatgcattaatcttcagctcacaaaggaaatactacataaggagcaaggaacacgcaagagatctacagctctgatctccaggatagtgaaatgaggtggtgaatgataagggtataatttagccagctcagtgaataaataatcattgcaaatgaancagtagcaccagaccacagactcaagacggaccataattggattttttttgccatggcctggaaagaaaggtacctnggccgctttagaaattgtgggatnccnnnggcttcnaggaattcatatcaactttattgataccgnncaccttcnaggggggggccccggnacccancttttngttccctttnagngangggtnaatggccccctaggcnnaatcntggtncntnggcttgtttcctgnggngaaaantgntnttcnnntttccaanttccccncaaactttnctaacccggggagccttaaattgnnaaaccttggggnncctnaatngnnnnnnctnacctnccnttaaatnngntttnggctaannngncncttttcnannnngggaaacctntnntnncnacnnn

SEQ ID NO: 3061 - DNA, 864 bp, Homo sapiens
  misc_feature 2, 4, 5, 6, 48, 644, 657, 666, 682, 705, 713, 714, 733, 736,740, 741, 744, 747, 755, 759, 764, 767, 770, 773, 775, 782,795, 798, 803, 810, 821, 825, 828, 835, 860, 861, 862: n = A,T,C or G
angnnncgacgcgcgtaatacgactactatagggcgaattggagctcnccgcggtggcggcccgaggtacattttacttgcttgatctctgattcccctcactgggtcacccgcacctctgagtgccctcctcaccctgcatgagtcttgacaccaggccctgagcctttcctctgtgtggttgtcctcacagtcctctgtgtgggatccagaactaggcaccaagctccccacgtaggagggtgccctccccattccctctgctgaggctcgaaccagcatgtcaggctgctcccccatgtggacacctgactctctttgggctcttactctacactggctgtacctgcccgggcggccgctctagaactagtggatcccccgggctgcaggaattcgatatcaagcttatcgataccgtcgacctcgagggggggcccggtacccagcttttgttccctttagtgagggttaattgcgcgcttggcgtaatcatggtcatagctgtttcctgtgtgaaattgtatccgctcacaattccacacaacatacgagccgggagcataaagtgtaaagcctggggtgcctaatgagtgagctaactacattaattgcgttggcgctcactgcccgcttttcaggcngggaaaacctggncgtgcccanctgcattaatgaaatnggcaaccccccggggaagaggcnggttggcnnaatggggcgctttttcccnttncttnnctnacntgacttcnctgngcttnggncgntcngnttgcggngagcgggattaanttnaattnaaaaggnggtaatacggntatncanaaaattnaggggaaaccaaggaaaaaaatgtnnnct

SEQ ID NO: 3062 - DNA, 698 bp, Homo sapiens
  misc_feature 94, 127, 238, 267, 342, 425, 493, 535, 561, 580, 593, 605,610, 612, 623, 625, 628, 629, 648, 649, 660, 674, 691, 692: n = A,T,C or G
agcgcgcgtaataccgactcactatagggcgaattggagctccaccgcggtggcggccgaggtacttttttttttttttttttttttttttttnaaaagggcctgcttattgttttgtgctacctancatccagccgcccctttaattttcaggttagcatgtgttgtgtgggtcccagtggactggccttgtcgtttctgctcacctcaggatagttatggaatgttcatgacatanacttagccaattcaatgtccttgtcctanattttgaatactgaaggaggaacaaagtgtagggacagttgaagtgtttacagtggtaagggcaatgatgtgganagtccaaaggtgagggctgcagcaagactacagtagtggcaagtgtctaataatagcaatgcacaatgtgacacacgaactanaccttgatcatctttcctgatgtctgatctggactctgttgcatctggcctggttctccagcctatanttgattctgcaagctccctgctatccttccaatacacttctntactgcttaaaagagtcatagtaagntctgttgcttgcaatcaanaagttttattcgngatttataattncctgntntatagctaaangntgnntataaaaaattcttctttnnggaaatttatnggggattatttttnttggggcctaacaaagnnaaattt

SEQ ID NO: 3063 - DNA, 865 bp, Homo sapiens
  misc_feature 459, 570, 594, 609, 614, 615, 631, 674, 687, 694, 702, 705,714, 724, 727, 733, 734, 741, 746, 760, 762, 766, 772, 779,781, 793, 810, 812, 814, 826, 831, 836, 842, 843, 859: n = A,T,C or G
acgccgcgtaatcgactactatagggcgaattggagctccccgcggtggcggcccgaggtacacagacagcaggtaggtaagctgatctggaaggtagggataacttgtataatgaatggaatgttaggagtctgtgatcctagctcttcaacttaagagttctgcaaacctggccgggcgcagtggttcacgcctgtaatcccagcactttgggaggccaaggtgggggcggtggatcacctgaggtcaggagttcgagaccagcctggccaatatggcaaaaccccgtctgtacctgcccgggcggccgctctagaactagtggatcccccgggctgcaggaattcgatatcaagcttatcgatacccgtcgacctcgagggggggcccggtacccagcttttgttccctttagtgagggttaattgcgcgcttggcgtaatcatggtcatagctgnttcctgtgtgaaattggtatccctcacaattccccacaacataccaacccgggagcataaagtgtaaaacctggggtgcctaatgaagtgagctaactcacattaattgcnttgcgctcactggccgcttttcantcgggaaacctgtcntgccnnctgcattaatgaaatnggcccaacccccggggaagaggccggttgcgtattgggccctntttccctttcctngcttaantgaattcnttncctcggccntccggcttcngcnaccggnnttaactnacttnaaaggcgggaatancnggtnattccnaaaaatnangggggatacccncggaaaaaaacattttnancnaaaagggccccnaaaanggccnggaacnntaaaaaggcccctttnttgctt

SEQ ID NO: 3064 - DNA, 861 bp, Homo sapiens
  misc_feature 471, 486, 501, 503, 507, 508, 523, 524, 525, 526, 531, 537,538, 539, 541, 544, 553, 555, 556, 558, 560, 561, 567, 568,569, 571, 579, 581, 582, 584, 585, 586, 587, 590, 591, 593,594, 595, 596, 598, 600, 601, 602, 606, 608, 609, 610: n = A,T,C or G
  misc_feature 611, 612, 613, 614, 615, 618, 619, 621, 622, 625, 626, 627,628, 640, 641, 642, 643, 647, 648, 649, 650, 651, 652, 653,654, 655, 656, 657, 659, 662, 664, 665, 666, 667, 668, 669,673, 674, 675, 676, 677, 678, 679, 680, 682, 684, 685: n = A,T,C or G
  misc_feature 686, 687, 689, 690, 692, 693, 694, 695, 696, 697, 698, 699,700, 701, 702, 703, 704, 705, 706, 707, 708, 709, 710, 711,712, 713, 714, 715, 716, 718, 719, 720, 721, 722, 723, 724,725, 726, 727, 728, 729, 730, 731, 732, 733, 734, 735: n = A,T,C or G
  misc_feature 737, 738, 739, 740, 741, 742, 743, 744, 745, 746, 747, 748,749, 750, 751, 752, 753, 754, 755, 756, 757, 758, 759, 760,761, 762, 763, 765, 766, 767, 768, 769, 770, 771, 772, 774,780, 781, 782, 783, 784, 785, 786, 787, 789, 790, 791: n = A,T,C or G
  misc_feature 792, 793, 794, 795, 796, 797, 798, 799, 801, 802, 803, 804,805, 806, 807, 808, 809, 810, 811, 812, 813, 814, 815, 816,817, 818, 819, 820, 821, 823, 824, 825, 826, 827, 828, 829,830, 831, 832, 833, 834, 835, 836, 837, 838, 839, 840: n = A,T,C or G
  misc_feature 841, 842, 843, 844, 845, 846, 847, 848, 849, 851, 852, 854,855, 856, 857, 858, 859, 861: n = A,T,C or G
cgcgcgcgtatcgactactatagggcgaattggagctccccgcggtggcggccggttccttgtgtcttaaagcaaacacaggcacagtattctgggcaaaccagatgttaatagcttgacctctctgtcaaaggaggacttggttgcttaagacccttaaagctgtcaaagttatagcttctcaggatactatcatcctcacccatttcttattctctttgcagggagagatcatctctcaaaaagctcccatcagagcaaccattctgggactttgagcagaatgcttaaggcagtggttctaaaattccacaccacctgttcttccagttgtgtcctctctgagctgcctctgacggtcacattccatggccatgtgccacagcagacttgtgatactgattttagtgttgtccttggccattgggggaagggaggaaggagagagaagagaaggggagagaagaaganaaatgggagtggggnccattcatccatctntnttgnnattaggggcccaccnnnncccantatggnnncntgnccgggcggncnntntnnaactgnnngnaccccccngnntnnnnganntnnnntntnnnactnannnnnnnnccnncnnttnnnnggggggggcccnnnnctcnnnnnnnnnnncnttntnnnnnngggnnnnnnnncncnnnncnncnnnnnnnnnnnnnnnnnnnnnnnnntnnnnnnnnnnnnnnnnnncnnnnnnnnnnnnnnnnnnnnnnnnnnncnnnnnnnncntaaatnnnnnnnncnnnnnnnnnnntnnnnnnnnnnnnnnnnnnnnntnnnnnnnnnnnnnnnnnnnnnnnnnnntnncnnnnnnan

SEQ ID NO: 3065 - DNA, 906 bp, Homo sapiens
  misc_feature 11, 21, 24, 34, 36, 41, 42, 47, 88, 534, 536, 539, 587, 608,612, 663, 666, 689, 696, 701, 737, 745, 755, 793, 805, 844,856, 861, 868, 872, 879, 895, 900: n = A,T,C or G
atgatcgactnctatacggcnaantgtgccctgnanaggcnngctcncgcggtgcgcggcccgaggtacttggtgaagtgagattcanactgagtggggtcacagcacagggcactgtcttgcctggctttatctgagccagtcacacctctcctggccactatctgtggtctagccccctttgtgcagaaagagaaagaagagccttgaggaccagcctagtcagccgggggccattgagactgccatggaagacttgaaaggtcacgtagctgagacttctggagagaccattcaaggcttctggctcttgacaaagatagaccactggaacaatgagaaggagagaattctactggtcacagacaagactctcttgatctgcaaatacgacttcatcatgctgagttgtgtgcagctgcagcggattcctctgagcgctgtctatcgcatctgcctggggcaagttcaccttccctgggatgtccctggacaagagacaaggagaaggccttaggatctactgggggagtncngangagcagtctcttcttgtcccgctggaacccatggtccacttgaagttncttatgctactttcacttgancatnctatgaaatacaccccagtggggaaaattctttgaaaatttgccaagttgnctngggttcatgtcttaaacttggtnccacttntccanaatgcccaacaaaaaattcaacttggatctgggaanaagaaaanaaacttgatngtgttaactgaacccatttttgattgaaacctacccanggcttgatgtcnttcattggaaaccccaacaaaacttgggtttttcctttncccgggggaaanttggnttttganagtnttttggnccctgcccggcggccnttttnaaataa

SEQ ID NO: 3066 - DNA, 686 bp, Homo sapiens
  misc_feature 555, 558, 560, 562, 563, 564, 565, 566, 567, 569, 570, 571,572, 573, 574, 575, 577, 578, 581, 582, 583, 584, 585, 586,588, 589, 590, 591, 592, 593, 594, 596, 597, 598, 599, 600,601, 602, 603, 604, 605, 606, 607, 609, 610, 611, 612: n = A,T,C or G
  misc_feature 613, 614, 615, 616, 617, 618, 619, 620, 622, 623, 624, 625,626, 627, 628, 629, 630, 631, 632, 633, 634, 635, 636, 637,638, 639, 640, 641, 642, 643, 644, 645, 646, 647, 648, 649,650, 651, 652, 653, 654, 655, 656, 657, 658, 659, 660: n = A,T,C or G
  misc_feature 661, 662, 663, 664, 665, 666, 667, 668, 669, 670, 671, 672,673, 674, 675, 676, 677, 678, 679, 680, 681, 682, 683, 684,685, 686: n = A,T,C or G
cgcgtaatacgactcctatagggcgaattggagctccccgcggtggcggccgcccgggcaggtacagaaaagcagaacatgacaaagccattagaaataccaagcatgtctcctggagggtaagaggacagtgagcccttgaagcaagttggggggattgggaatgattttacaggatggtcagagttcgaaagatgggtaggaattcaacaggagtgagaggtagaacacaagcttagctgaaagaacagcatagagaaaagacaagttattggttacttgaagaagagttagtgaagagcctcaatgcctagctaggcagctttatacctaatttcagtgggtgatgaggactactaaaggtaactgagtagggaagtgacatcatgatagctataatgactaggctggggcagtgggatatcagtccagttagcagatcaataatctggaccactttgaggaaaagcaaaggcatcgtagagaaaagaaccttaatttcaggccttatttttagttgaaaatggtctgagtttggtggtgtgtgtgtgtgtntgngngnnnnnntnnnnnnnanngannnnnngnnnnnnngnnnnnnnnnnnnannnnnnnnnnnncnnnnnnnnnnnnnnnnnnnnnnnnnnnnnnnnnnnnnnnnnnnnnnnnnnnnnnnnnnnnnnnnn

SEQ ID NO: 3067 - DNA, 864 bp, Homo sapiens
  misc_feature 7, 9, 21, 25, 31, 45, 48, 51, 55, 56, 58, 81, 109, 112, 116,120, 147, 431, 467, 500, 513, 526, 528, 530, 566, 574, 578,580, 581, 583, 586, 587, 588, 592, 601, 602, 615, 618, 626,629, 632, 636, 637, 640, 641, 647, 651, 667, 669: n = A,T,C or G
  misc_feature 675, 686, 697, 701, 702, 704, 712, 721, 722, 723, 735, 738,739, 744, 755, 757, 759, 762, 763, 764, 768, 770, 773, 781,783, 787, 788, 794, 796, 805, 806, 808, 810, 811, 815, 816,818, 821, 824, 826, 827, 828, 833, 834, 835, 836, 840: n = A,T,C or G
  misc_feature 849, 860, 864: n = A,T,C or G
gcggccntngcgcgcgtatantaanactccngggcgaattgtaanttnaancgcnncngcggcccgaggtacttccatgantattcaaagaaaaacaattttttccatntgntttntganatgaccaccagtggtgtgaactacctnctgcccccatccgcagtcccaggatcctgggacagggcttatgaacacaaccactgtagtcaagctcacttgatccacagcctggcacccccactgtctggctagggagcctcgaatgggtcccaaggccaccctgctcctcagttacatcatctgcataagtagtggtggttgtgaggaattcaggagctgcagcataagggctcggcaggtcctaagagcacagtaaatgccagtgattcttaagagtctgagctccattggagaggcaagtaagctgaggntcagagacagaaaatgacttgcccaagatcacccanctggggaagtgacaaggccagggttggagcccntggttgagctggntcccacaggccanancntaattctgccctttcctggaaagaacctcccacccnggccccangccntnngnttnnncctnaccccaaanncccggtggccttntangaaaaagnggnganccannggnnaaaccncacnagaagggagaggaaancnggaggnggggggaaatnctaacaggganacanncnttggaacnaggacaagnnnaacttggggggncannctggncccccaagccnananggnnnaccngnccngggcgggngnaatnnaaaagngntcccccggnngnannaaannanaangcnannnaaccnnnnactnagggggggnccgggcccaantttn

SEQ ID NO: 3068 - DNA, 886 bp, Homo sapiens
  misc_feature 4, 5, 13, 516, 551, 613, 648, 654, 663, 664, 665, 672, 714,728, 734, 749, 756, 761, 771, 773, 777, 781, 782, 805, 819,841, 870, 872, 877: n = A,T,C or G
gagnntcgactcntatacggcgaattgtgccctctagatgcatgctcgagcggccgccagtgtgatggatatctgcagaattcgcccttagcgtggtcgcggccgaggtactacaaagcatatctgaaaggaaagattgagcgcaccaactatttgcagaaacgagctgcagccattcaactacaagctgcttttaggagactgaaagctcataatttatgtagacaaattagagctgcttgtgttattcagtcatactggagaatgagacaagacagagttcgatttttaaaccttaagaagactattatcaaatttcaggcacatgtaagaaaacatcaacaacgacagaaatataagaagatgaagaaagcagctgttataattcagactcatttccgagcttatatttttgccatgaaagttctagcatcttaccagaaaacacgctctgctgtcattgtgctgcagtctgcatatagagggatgcaagccaggaaaatgtatattcacatnctccatctggtataaagattcaatcatattatcgngcttatgtttctaaaaaggaatttttgagcccttaaaaatgcttccattaaaattgcagtcnactggttaagaagaaaccaaccccgtaaaccaaanttggcnttaagaagnnntggcctnttttatccaacaatggttccggttccaaaaaaaatagcttcnccaaaaaaaaaaanagtttnttccaattgccgggnaattttngtttnaaactgcaancntttngttnnaaggataccctttcccaaagcanatgaggttccaaanaaaagcttgtttttcacttccngtcttttttaaaaagaaaaagggtcggcngnttttntgaaaattt

SEQ ID NO: 3069 - DNA, 817 bp, Homo sapiens
  misc_feature 2, 7, 580, 589, 618, 664, 677, 701, 713, 718, 733, 751, 764,766, 775, 798: n = A,T,C or G
gnctggncgcgcgtaatacgactcactatagggcgaattggagctccaccgcggtggcggcccgcccgggcaggtactttgctacacggtcgggggccattgagactgccatggaagacttgaaaggtcacgtagctgagacttctggagagaccattcaaggcttctggctcttgacaaagatagaccactggaacaatgagaaggagagaattctactggtcacagacaagactctcttgatctgcaaatacgacttcatcatgctgagttgtgtgcagctgcagcggattcctctgagcgctgtctatcgcatctgcctgggcaagttcaccttccctgggatgtccctggacaagagacaaggagaaggccttaggatctactgggggagtccggaggagcagtctcttctgtcccgctggaacccatggtccactgaagttccttatgctactttcactgagcatcctatgaaatacaccagtgagaaattccttgaaatttgcaaggtaggaggcatcttgggtattactctcagattagctttgttgctggagctatgtgccttttagggacntgtaccttnggccgctctagaactagtgggatcccccnggctgcaggaattctatatcaagcctatcgataccgtcgacctcanggggggcccccgnacccaaccttttgttccttttagngaggggtaaatngcccncttggcgtaaacatnggcataactgtttcctgngggaaaatgttantnccgttcacnaatttcccaacaaacataacaanccggggcataaaagtgtat

SEQ ID NO: 3070 - DNA, 891 bp, Homo sapiens
  misc_feature 1, 567, 571, 602, 689, 693, 694, 713, 728, 746, 752, 792,803, 812, 818, 822, 831, 832, 834, 839, 840, 842, 849, 852,866, 877, 884, 885, 886: n = A,T,C or G
nagccgtaatacgactactatagggcgaattggagctccccgcggtggcggccgcccgggcaggtacgcggggagagcgggtaaagtggactggggagaacttcggaggatgttcatgtccaggagcagccccacgccctgtatggtcggtgtctagagcctcacagcaactaagaccaacccagctctcagaagaaggaatgtcaaaatgtcatgttcaattttacattcagtgcctggaatcttttcttcacaattgaaatgaaatgtgctgaaggaggtgaatccatgcattaatcttcagctcacaaaggaaatactacataagaagcaagaccacagactcaagacggacataattggattttttttgccatggcctggaaagaaaggtacctcggccgctctagaactagtggatcccccgggctgcaggaattcgatatcaagcttatcgataccgtcgacctcgagggggggcccggtacccagcttttgttccctttagtgagggttaattgccgcttggcgtaatcatggtcatagctgtttcctgtgtgaaattgntatncgctcacaatttccacacaacatacgaaccnggagcattaaagtgtaaagcctggggtgcctaatgaagtgagcttaactcacatttaattgcgtttgcgcttcactggcccgctttncaanncgggaaacctgtcgtgccnaccttgcattaatgnaattcggccaaccccccngggaanaggccggtttgcttattgggcgccttttccggtttcttgnttaattaattngttgggctngggccntttnggttgcggnnanccggnntnaacttanttnaaaaggggggaatnccgggttttcncaaaatnnngggga

SEQ ID NO: 3071 - DNA, 844 bp, Homo sapiens
  misc_feature 473, 496, 504, 564, 602, 610, 636, 646, 718, 720, 723, 727,738, 744, 781, 783, 797, 801, 811, 837, 844: n = A,T,C or G
gccgtgacgccgtaatacgactactatagggcgaattggagctccccgcggtggcggccgcccgggcaggtacttttagaagagacagggtttcaccatggtggccaggctggtctcgatgtcttgacctcgtgatctgcctgcctcggcctcccaaagtgctgggattacaggtgtgagccaccacacccggcctgaattgcacttttgatggctgagccaaatgctcattctatttaatattgcacagcctgaaccaaaacccgtaacattataaaggaagagatgagagccatttcaaactgtgagagaagggaagacatcaagcaaaatctgggggttttagccaacagacttcagtcctggggcctcgcggcaaaaaaacaccttcagttgccccagggctttacagggtgtggctcgcctgttctgttgctacacgctcaaacccctgaggggaggggagcatgcanatggacaggtgcaggagcctaantgggggtnttgttacagtgtgcccttttagccctgctgtccatggatgggcttgaaatgttaaatcanctcaatggacactcttgccttttcacaaagggcagaanggccaatntgaccacttttttgttttccaagctntttgcccaancattcttggaagaaatcatggccacaacattgggcctttgaaaggcttgaaatgcaaggggttttaattgantnggngganggtgggttttntttaanggatggatgccaaaacttggaaagcgggggacccggnancgggaaagaaaaancttnctgcttgggngggcaaaaaccttttccgaacacccntttggtn

SEQ ID NO: 3072 - DNA, 877 bp, Homo sapiens
  misc_feature 7, 494, 495, 516, 526, 553, 555, 568, 575, 579, 591, 593,598, 607, 612, 621, 630, 631, 635, 645, 647, 651, 657, 666,678, 683, 691, 693, 696, 700, 701, 703, 707, 708, 709, 711,718, 723, 724, 725, 726, 728, 730, 731, 737, 742, 743: n = A,T,C or G
  misc_feature 748, 755, 760, 761, 762, 763, 765, 769, 771, 772, 773, 774,776, 779, 782, 784, 785, 786, 788, 792, 793, 794, 795, 796,802, 803, 806, 813, 814, 816, 817, 820, 821, 829, 830, 831,834, 838, 840, 841, 842, 844, 852, 853, 854, 855, 856: n = A,T,C or G
  misc_feature 859, 868, 869, 873, 875, 877: n = A,T,C or G
gcgccgncgcgcgtaatacgactcactatagggcgaattggagctccccgcggtggcggcccgcccgggcaggtacacactagctgataagacactgttgcccataatgtctatttattggatcagcaatttataagtcccacattctcatgccacatagctctacacagctgcaaaaatataccatagcttgcaggtgatcattggtttgataaaagatattgagtcgctcatcttgtgaaagtgatctttgatataagaggagcatcagcggggaagctcacatgtcccgtggctcacacaccagaaggtatttgtgtcttgtcattgtctgtctggcagtccatggcaatggctttttcagagaggcctgttttgtggttaactgtgtgtacctcggcccgctctagaactagtggatcccccgggctgcaggaattcgatatcaagctttatcgataccgtcgacctcgagggggggccccggaacccanncttttgttcccttttagtganggtttaattngccgcttggcgtaatcatggtccatancntggtattcttgantgaaaanaggnaacccggtcacnanttccncacatcatnccaanccgggagcnttaaagtgnnaaangccctggggngncctnaatgangtgacctanatcccaataatntgctntggcgctncnggncccnntntccnnnangggaaanctggnnnncncnnttcctntaaannaaatntgcaaantcccnnnngnagantnnnnanttnatnannngntatnnnnnttcctnnttngggaatnngnnganncctggaannntgnctgngnnnancggatttnnnnnatngaaaagcgnnaatntngn

SEQ ID NO: 3073 - DNA, 874 bp, Homo sapiens
  misc_feature 2, 3, 467, 507, 535, 553, 562, 564, 566, 618, 628, 699, 700,707, 714, 721, 722, 724, 725, 726, 727, 729, 733, 749, 754,763, 766, 769, 774, 777, 780, 781, 783, 786, 793, 794, 795,796, 797, 799, 808, 809, 813, 823, 829, 831, 837: n = A,T,C or G
  misc_feature 839, 842, 845, 846, 852, 855, 859, 862, 863, 866, 867, 868,869: n = A,T,C or G
gnntgacgcgcgtaatacgactcactatagggcgaattggagctccccgcggtggcggcccgcccgggcaggtactttttttttttttttttttttgtgacaatgccaatattccaagagcctgtaataaaggctctcagcataaatggtctactatctaacaccaccagaacccttttggcatcttttgcatctggatacttttgctctatgcatgagtgggatgtatggtcattccttttatgcaatcatgtagtaggcaaaacaatggctccctcaaagatgtccacatcttaatcccaagaatctgtgattatgttagtttatattgcaaaggagaattaaggctgcagattgaattaaggttgctaatcagcttgcttttaaatatggagagcatcctggattatctgtgggagcccagtgtaatcatgaggctacttaaaagtgaaagcggaagacagaanaagagtcaagagtgaaatgtgaccccggaagaactttcanaggcgcaatgttgctggccctgaaaaangaggaagggcttgctgancccaataangnangtgggcctccggaagaatgaaaagaaggatcaccccaaaaagcttccaaaanggaaaggcancctggccacacttttgtttttaccccaatggagaacctcagtaggaacggttcaaaaatcctaaaaaaagnnaaaatgngtatttnaaatggnngnnnntntttncccccccccccccccnttctnatgggtttnaanccnttaanccntgnnanttnttttggnnnnnanttaaaaaanntgtnccaataaacntccccngntttccnanaanaannataaantgngggnccnnccnnnnaaaaa

SEQ ID NO: 3074 - DNA, 643 bp, Homo sapiens
  misc_feature 5, 7, 48, 64, 191, 240, 277, 282, 287, 291, 292, 293, 294,295, 296, 297, 312, 324, 328, 334, 336, 340, 346, 352, 372,374, 381, 382, 384, 385, 386, 387, 388, 389, 390, 391, 392,396, 419, 423, 427, 430, 431, 432, 439, 446, 448, 449: n = A,T,C or G
  misc_feature 450, 451, 452, 453, 454, 466, 467, 468, 469, 476, 479, 489,499, 500, 502, 503, 505, 509, 511, 512, 519, 520, 521, 522,523, 524, 525, 526, 527, 528, 529, 530, 531, 532, 533, 534,535, 536, 537, 538, 539, 540, 541, 542, 543, 544, 545: n = A,T,C or G
  misc_feature 549, 551, 560, 561, 567, 575, 577, 578, 579, 580, 581, 582,583, 584, 585, 586, 587, 588, 601, 602, 603, 619, 627, 628,629: n = A,T,C or G
gagcncnccgtaatacgactcactatagggcagaattggagctccacncgcggtggcggccgangtacatgtcattttttggtggtagccagtaggatggtattacagtagggaaaaatccaacattttgttaaaccattccccctttcatgggttgccatttgcagactctgcctgcatgtgtcaaggcnacctttggcccttttaaaaatcatacagtatgtcaaggaatataattcnttaaaattattctcatccccccattttggaaggaagnttttnggggntttnnnnnnnaaaaaaattttccancccccccaaatngttnaaaaancntggnaacctngccctnaacccgggggtttaaaaaancnaaaaaanntnnnnnnnnntttnttccaaagggccaccccccaaanaaantttnccnnntttttcnttaaaanannnnnnnaaaaaccccccnnnngaaaaanttnaaaatccctnaaaaaccccnncnnanaaanannttttttnnnnnnnnnnnnnnnnnnnnnnnnnnncccngnaaaaaaaanncccccntttttttncnnnnnnnnnnnnggggggggggggnnnccccacaaaaaaaaancccccccnnntttttttttttttt

SEQ ID NO: 3075 - DNA, 706 bp, Homo sapiens
  misc_feature 5, 7, 661, 667, 669, 693, 699: n = A,T,C or G
gagcncngcgtaatacgactcactatagggcagaattggagctccaccgcggtggcggccgaggtacagtattgttgactggctaacagaggaccaattaataagccaaagaaacggctctttaacaatgaacatttctgccatcaactgacagatcccaggaataaatgttttccagtgaggagacttctctggttttcagaacacctctggctgcccctgcccaccccatagaagggctatccctccaggtcaggttagcatcatcacctagagccaacaagtcaaggaggtgatggtttgcctttgacatctctacccagaccagactccactgagaagactctccctttttcatcactgccctacctagttagttggtcctgccctggggccagagtttcactaggggctgaatagtatactgttagctcaggcaacagatgaactctgcctccatgcgcaaatacaaaaagctatctctgcttctttttcactcacttaagattttggaagaatggctcctaaagcgggtgatcatctgccctcacgacttacagtgcctcagcatcacatgctattcattttgcacagcaaaaccaggaagtgaatatgactggtatccctacttcacaagtagaggacactgaggccctgaganggtaanangggcaggtaagatttgaacctacnggctgngggcggg

SEQ ID NO: 3076 - DNA, 895 bp, Homo sapiens
  misc_feature 1, 4, 10, 12, 43, 538, 540, 543, 560, 688, 694, 700, 714,738, 759, 780, 785, 794, 800, 804, 807, 810, 827, 830, 840,856, 863, 876, 877, 878, 881, 882, 891: n = A,T,C or G
natntatagngngcgcgtaatacgactcactatagggcgaatnggagctccccgcggtggcggcccgaggtacttggtgaagtgagattcagactgagtggggtcacagcacagggcactgtcttgcctggctttatctgagccagtcacacctctcctggccactatctgtggtctagccccctttgtgcagaaagagaaagaagagccttgaggaccagcctagtcagccgggggccattgagactgccatggaagacttgaaaggtcacgtagctgagacttctggagagaccattcaaggcttctggctcttgacaaagatagaccactggaacaatgagaaggagagaattctactggtcacagacaagactctcttgatctgcaaatacgacttcatcatgctgagttgtgtgcagctgcagcggattcctctgagcgctgtctatcgcatctgcctgggcaagttcaccttccctgggatgtccctggacaagagacaaggagaaggccttaaggatctactgggggagtncngangagcagtcttttctgtncccgctggaacccatggtccacttgaagttccctatgctactttactgagcattctattgaaattccccagtggagaaatttcttggaaatttgcaagttgtcttggggtcattgttttaactttgtnccactnttccanaaatgccccccaanaaattcaaacttggatcttggaanaaggaaaagaaactggttggnggttacttgaacccattttgnttganaacctcccnagggcntggntgntanttcatttggaaaccccnacnaaacttgggntttttcccttgccccngggaagnatttgggtttttnnnaannttttttggnacct

SEQ ID NO: 3077 - DNA, 891 bp, Homo sapiens
  misc_feature 500, 530, 548, 559, 561, 579, 605, 611, 613, 615, 629, 645,646, 667, 687, 689, 699, 712, 726, 727, 738, 749, 757, 768,774, 778, 779, 780, 781, 783, 788, 791, 794, 796, 799, 801,804, 806, 811, 817, 820, 822, 823, 824, 826, 870, 873: n = A,T,C or G
  misc_feature 889: n = A,T,C or G
gcctatcgactactatagggcgaattggagctccccgcggtggcggccgccgggcaggtacctctgtgtggcaggcgatcaatggtgtttctatctcagccagggactcaggtgcgagactgagaagcccaggaggcaagaggcacctgcagctctagagcccactgcagattttccttgagggccgtatatccagaaccatcccagggcttggcttttgagagaaaatgtagtcttaaagaatgaacaagtgggccgggcgccgtggctcacgcctgtaatcccagcactttgggaggtcacgaggtcagaagatggagaccatcctggccaacacagtgaagccccgtctctactaaaaaaaaaaaaaaaaaaaaaaagtacctcggccgctctagaactagtggatcccccgggctgcaggaattcgatatcaagcttatcgataccgtcgacctcgagggggggcccggtacccaacttttgttccctttagtganggttaattgcccccttggcgtaatcatggncatagctggttttcctgngtggaaattgntnttccgctcacaattccanacaaacattaccaacccggggagccntaaaantntnaaagcctgggggtncccaaatggagtggannctaacttcacattaatttggngttggcgcctcacttggccngnttttcagtcngggaaaacctgtncgggcccacctggnntaaatgaattngcccaaccccnccggggangaggcgggttngcggtnttgnnnncnctttncgnttncnttntnaantnaattntttgcntangnnntnttggttgggggaaacggttttaacttattcaaagggggaatttngtnttcccaaaatcagggnat

SEQ ID NO: 3078 - DNA, 710 bp, Homo sapiens
  misc_feature 5, 74, 76, 79, 81, 84, 88, 90, 91, 102, 103, 106, 110, 112,114, 115, 116, 120, 123, 126, 130, 133, 135, 137, 145, 146,150, 157, 160, 178, 181, 605, 608, 611, 614, 617, 618, 619,630, 631, 633, 634, 635, 641, 643, 652, 654, 655, 657: n = A,T,C or G
  misc_feature 659, 661, 662, 664, 666, 669, 676, 678, 679, 682, 687, 690,692, 695, 697, 699, 700, 702, 709: n = A,T,C or G
gagcnccgccgtaatacgactcactatagggcagaattggagctccaccgcggtggcggccgaggtactcactnanatnanatnaggnannctacattaganntgnggtncncnnncttnagntantgcnttntntnccatatanntgtntaacaanctnccaccagacaccgatggngangagcctcatagcagatgtggcagtggccgtcacttcccatgacccgcgtacctgcccgggcggccgctctagaactagtggatcccccgggctgcaggaattcgatatcaagcttatcgataccgtcgacctcgagggggggcccggtacccagcttttgttccctttagtgagggttaattgcgcgcttggcgtaatcatggtcatagctgtttcctgtgtgaaattgttatccgctcacaattccacacaacatacgagccgggagcataaagtgtaaagcctggggtgcctaatgagtgagctaactcacattaattgcgttgcgctcactgcccgctttccagtcgggaaacctgtcgtgccagctgcattaatgaatcggccaacgcgcggggagaggcggtttgcgtattgggcgctnttncgnttnctnnnttactgattcnntnnnctcggncnttcggttgngnnancngnntnanctnactcaangnnggnatacngtntncananannangggatanc

SEQ ID NO: 3079 - DNA, 807 bp, Homo sapiens
  misc_feature 3, 4, 6, 590, 716, 742, 765, 783, 797: n = A,T,C or G
gcnntngacgccgtatcgactcactatagggcgaattggagctccccgcggtggcggccgaggtacagtgagggtgttcagagggaggcacaaagaatagctctgagattaggcaatggaaatgacaaaaaagagatgaataaatccgatttgaataccaacaatttgctcttcaaacctcctgtagagagccatatacaaaagaataagaaaattcttaaatctgcaaaagatttgcctcctgatgcacttatcattgaatacagagggaagtttatgctgagagaacagtttgaagcaaatgggtatttctttaaaagaccatacccttttgtgttattctactctaaatttcatgggctagaaatgtgtgttgatgcaaggacttttgggaatgaggctcgattcatcaggcggtcttgtacctgcccgggcggccgctctagaactagtggatcccccgggctgcaggaattcgatatcaagcttatcgataccgtcgacctcgagggggggcccggtacccagcttttgttccctttagtgagggttaattgcgcgcttggcgtaatcatggtcatagctgtttnctgtgtgaaattgttatccgctcacaattccccaacatacgagcccgggagcataaagtgtaaaagcctggggtgcctaatgagtgagctaacctcacattaattggggttgcgcttactggccgnttttcaatccgggaaaccctgtctgncaacctgcattaatgaattcggnccacccccccgggaggangccggtttgcgtanttgggcgcct

SEQ ID NO: 3080 - DNA, 903 bp, Homo sapiens
  misc_feature 512, 537, 564, 596, 613, 619, 620, 639, 644, 655, 665, 669,670, 674, 678, 680, 688, 698, 700, 706, 710, 723, 727, 736,741, 744, 750, 755, 757, 763, 769, 778, 779, 786, 787, 793,801, 804, 810, 813, 814, 816, 817, 824, 825, 829, 831: n = A,T,C or G
  misc_feature 833, 835, 837, 838, 840, 842, 844, 845, 846, 852, 855, 857,858, 859, 865, 866, 867, 869, 871, 873, 875, 876, 877, 878,879, 884, 885, 889, 891, 892, 897, 900, 901: n = A,T,C or G
agccgtgacgcgcgtaatacgactactatagggcgaattggagctccacccgcggtggcggcccgcccgggcaggtacaactgaccttctgggctggataattcttggttggggggactactctgcacatgatagggtgttcatctctggtcttcacctatcaggtgctgacagcaccacagcaccccaacaccgcattgtcaacagacactaccaaatgttatcaggggaggagagtgattcacccctcttaaggaaccactgaaaatgattttaaaaatacctattattttcatctttaaggaataattattggccaggctcaatggcacatgcctgtaatcccagcactttgggaggctgaggcaagcaaatagcttaaggccaggagctcaaaaccagccaggacaacataatgaaacctcgtatgtacctcggcccgctctagaactagtggatcccccgggctgcaggaattcgatatcaagcttatcgataccgtcgacctcgangggggggccccggtacccagctttngttccctttagtgaggggttaattgcncgcttggcgtaatcatgggtcatagctggttncttgtggtgaaaattgntatccnntcacaaattccacaccaanaattncgaacccgggnaccattaaangtgnnaaancctngngggggccntaattgaagngngctcancttnccattaaatggcntttnggccttaantgacnccntttttnaattntntaatanctttantaccccctnnaattaanntaattnggcatacnccngtgggnaanngnngtttttnnattnananancnntntncnnntatttngtnannntaatannntngntntnnnnntattnnatgnannaatanttnnaa

SEQ ID NO: 3081 - DNA, 894 bp, Homo sapiens
  misc_feature 1, 3, 31, 502, 553, 575, 585, 588, 590, 614, 620, 627, 630,639, 644, 659, 698, 702, 708, 709, 718, 731, 745, 746, 766,776, 777, 784, 793, 798, 808, 809, 813, 818, 828, 839, 841,848, 852, 856, 860, 862, 869, 886: n = A,T,C or G
nangcgcgtatcgactactatagggcgaatnggagctccccgcggtggcggcccgcccgggcaggtacaagcaaaacccacctgtgtaaacacacacagcaaagtgatgtaagaagtttccatataaagggctgtagtatggggaggtaatgtgcaggctggtttgcggctgtaggggccaccttgtgcagctctccactgatatggtacctcggccgctctagaactagtggatcccccgggctgcaggaattcgatatcaagcttatcgataccgtcgacctcgagggggggcccggtacccagcttttgttccctttagtgagggttaattgcgcgcttggcgtaatcatggtcatagctgtttcctgtgtgaaattgttatccgctcacaattccacacaacatacgagccgggagcataaagtgtaaagcctggggtgcctaatgagtgagctaactcacattaattgcgttgcgctcactgcccgcttttcaatcnggaaacctgtctgccagctgcattaatgaatcggccaacccgcggggagangccggttgcgtattgggcgctntttccgcttnctngnttactgactcgcttgcgctcgggncgttcnggttgcnggnaagccggtnttaancttaactcaaaggcngggaattccgggttttccccaaattaagggggattaacnccanggaaannaacttgttnaccaaaaaggccnaccaaaaagggccnngaaaccctaaaaaaggcccngtttgttggnnttttttncattagggnttccncccccctggnnaagnatttncaaaaaattnaccccttcaantnaaaaggngggnaaancccncnggggctnttaaaaatccccggggntttccccc

SEQ ID NO: 3082 - DNA, 865 bp, Homo sapiens
  misc_feature 1, 9, 44, 81, 113, 116, 124, 156, 158, 162, 191, 266, 448,452, 509, 511, 519, 536, 545, 600, 621, 623, 627, 676, 679,729, 741, 757, 785, 807, 817, 825, 826, 833, 834, 837, 841,842, 849, 855, 858, 862, 863: n = A,T,C or G
ngccctttncgcgcgtaattttactcactatagggcgaattggntctccaccgcggtggcggcccgaggtacacagagttncaaattaacccctccaacagcctctatcaacntcntgcaccantgtggtaaaccgttacaacaaataaacctacntngacngtccacagtttaccttagggttcactttntggtgttatacagtctatgggtttgtataaacagataatgacaggtttccatgattacagtatcatacagaatanattcactgccctaaaaaatctgtatgcttcaggaggccgagacgggagaatcgcttgagcccaggagttcaagaccggcctgggcaacataacgagaccccagctctacaaaaaaagtgaaactaacagcaaaaaaaattagccaggcatggtgccacacacctgtacctgcccgggcggcngttntaaaactagtggatcccccgggctgcaggaattcgatatcaagcttatcgattccgncnacctcganggggggcccggtcccancttttgttncctttagtggaggggttaaattgccccttggccgtaatcattggtcataagctgnttccttgtgggaaaatggtantnccgnttacaattccacacaacataacgagccggggaacataaagtgtaaaagnctngggtgcctaatgaggtgacctaactcacattaattgggtttgcgctaatngccgttttcagncgggaaaccctgtcgngccagcttgttttatgaatcggcccacnccccgggggaaaggcggtttgngttttggggnctttttcnntttcttnnttnaatnnatttgtnggcttnggncttnngg

SEQ ID NO: 3083 - DNA, 815 bp, Homo sapiens
  misc_feature 545, 587, 635, 639, 674, 696, 706, 717, 739, 747, 750, 763,802, 811, 814: n = A,T,C or G
atgcgcgtttacgactcctatagggcgaattggagctccccgcggtggcggccgaggtacatgggtaagtaaaactcgtgtaagtttccgcatagttcacactcatgggaaacaaaaactgcgccttgtatatcatcatcccccgactgtctgtcactcacagaattcaaggcacatatgaagtgctcaataaacaagagcttagaggaaatcaatgaggcttagtgcatagccttattgcaaactgtggtctccaatgcaaaaacaaaataaaacaaaaaccccacaactaaaaacaaagtaggggatgttaacaagagaacaaggatatgaaacctatctcatgaaagaataaacatttcacacagaaatcatgaatgttggtattaattttaaatgacatttgtcagccatagaaagtgatctctaataactcacgatagagcagtttaatgcccaaataattgaaaaaagaattggagaggtaacctaacggcagataagattaagtaaggaaaatttcaatctgtgtgaagaaagagaangctttaatttttcaaccctttgggacaattttggaacatcanggcttttccccaaaactcgactttatttatcctatatatatcccttanttanggatccctaaatttatttttttctttctttcatgnacctcgtaagtcagtcttctanggcaggggtncccaaggctgncggactggtacctggcccggcnggccgttntanaactagtgggatncccccgggctggagggaattcgatatcaagcttatcgantccgtcganctnc

SEQ ID NO: 3084 - DNA, 710 bp, Homo sapiens
  misc_feature 5, 512, 519, 543, 549, 576, 585, 600, 602, 610, 624, 628,642, 645, 649, 651, 652, 673, 675, 683, 688, 695, 710: n = A,T,C or G
gagcnccgccgtaatacgactcactatagggcgaattggagctccaccgcggtggcggccgcccgggcaggtacgtttaaatgggattgtttgtttttcacttgttgatttttttaagttcaccagatgcactgtgctggggttctgtgatagtccctaattgctgtgcaccctcccaagcctgagagcagcaggagggagggttgcgagacagcaaaaaggtggactgcctctctctttggaagctgcatgccggagaagtgtagagctgctcccagctggagaactcaggaggactagggtggcctcactagcatcccaggctagtgggccttatcctacaaggttcagtggtggtgaggtctgcagtctatcactgctcagccccatggacttggccccttttctggggagcgtgcaagaaaacttggccttcccaattgctggagctgcagcccctggttttggggtacctcggccgctctagaactagtggatcccccgggctgcangaattcnatatcaagcttatcgataccgtcnacctcnagggggggcccggtacccaacttttgntccctttantgagggttaattgcncncttggcgnaatcatgggcatanctgnttcctgtgtgaaantgntatncnntcacaattcacacaacatacnanccgggacntaaantgtaaancctggggtgcctaan

SEQ ID NO: 3085 - DNA, 811 bp, Homo sapiens
  misc_feature 2, 3, 4, 5, 6, 9, 623, 704, 726, 766, 772: n = A,T,C or G
gnnnnngancgcgcgtaatacgactcctatagggcgaattggagctccccgcggtggcggccgaggtacagaacttaaacaccactatttgttgagatgaaaaaaagcatatataggaagccttcaaaatgaaatggtcaagggtgagtttacacagatagatagatttaggtctcttccttttgctttgtgaaagcatctagtgttttaggtgtcagagagggagatatccttacaaagcagagattatcattacaggtttacatttcttacaaagagtttcaaaataaacaggtaaatgccaaaaacatatattttggtgacggattaattcactagttggtctattcaacttaacttgtttcctaatgagattaaattcatgcacaaataaccaaaccaaaaattaaaccaaaagaatactcaccagaaaggatgtcctttacaagagcagatcccccaaaatgtaagagttcactgaaaaggtgggagctcaaaccaagagaggacttatctcgcagcataaagacaacttgtacctcggcccgctctagaactaagtgggatcccccgggctgcaggaattcgatatcaagcttattcgatacccgtcgaccctcganggggggccccggtacccagcttttgttccctttagtgagggttaaatgcgcgcttggcgtaatcatggtcatagctggttnctgtggtgaaattgttatccgntccaaattccccccaccttcgaacccgggagccataaagngtaagnccgggggcctaatgagtgagctaactcactttaattgcc

SEQ ID NO: 3086 - DNA, 705 bp, Homo sapiens
  misc_feature 455, 487, 505, 544, 553, 563, 572, 575, 579, 590, 595, 615,617, 629, 643, 656, 663, 664, 670, 671, 675, 676, 683, 686,690, 693, 694, 695, 703, 705: n = A,T,C or G
gcgtaatacgactcactatagggcagaattggagctccaccgcggtggcggccgaggtactaacagtcaggaacaaatagaacacatagagaggacagtgggaggtccccctggctaaagcagagggtgtgttgagagaaggaaacctttgcctcaatggatcgtaggcaaactgagaaggaccataacaccttgctgagaagtttgaatgtgattccttggtgaccacagcaggaggtcctgaagtccctgtccttcagatgcaaacaaggaggctgtcccatacagactatcagggaaaaaatgcactgtttatcaaaagatatgaatgttcttgacaggcaaagccctgctcaaatgaaatggcagtgcagggagatgatattcagtgtgatgcagctgtgagtacctgcccgggcggccgctctagaactagtggatcccccgggctacangaattcgatatcaagcttatcgatacccgtcnacctcgagggggggcccngtacccagcttttgttccctttagtgagggttaattgcncgcttggcntaatcatggncatagctgnttnctgngtgaaattgtnttccntcacaattcccacacatacnanccggagcataantgtaaagcctgggngcctaatgagtgngctactnnttattnngttnnctcctgnccntttncannnggaacctncn

SEQ ID NO: 3087 - DNA, 836 bp, Homo sapiens
  misc_feature 5, 79, 572, 628, 630, 642, 649, 701, 726, 743, 744, 750,770, 782, 787, 806, 817, 824, 835, 836: n = A,T,C or G
tagcncgtatacgcgcgtatacgactcactatagggcgaattggagctccccgcggtggcggccgcccgggcaggtacncgggacacattcagaggtgagcccagagcgggtaaagtggactggggagaacttcggaggatgttcatgtccaggagcagccccacgccctgtatggtcggtgtctagagcctcacagcaactaagaccaacccagctctcagaagaaggaatgtcaaaatgtcatgttcaattttacattcagtgcctggaatcttttcttcacaattgaaatgaaatgtgctgaaggaggtgaatccatgcattaatcttcagctcacaaaggaaatactacataagaagcaagaccacagactcaagacggacataattggattttttttgccatggcctggaaagaaaggtacctcggccgctctagaactagtggatcccccgggctgcaggaattcgatatcaagcttatcgatacccgcgacctcgagggggggcccggtacccaacttttgttccctttagtgagggttaattgcgcgcttggcgtaatcatggncatagctgtttcctgtgtgaaattgttattccgctcacaatttcacacaacatacnancccggggagcantaaagtnttaaagccctgggggtgcctaaatgagtgaagcctaactcacattaattgcngttgcgcttacttgcccctttccanttcgggaaaaccctttnntgccanctgcatttaatgaaaccggnccaaaccccccngggangaaggccggtttgcggtanttgggcgcctnttttcgnctttcctaggnn

SEQ ID NO: 3088 - DNA, 845 bp, Homo sapiens
  misc_feature 6, 10, 29, 34, 214, 215, 221, 229, 236, 238, 240, 250, 257,259, 263, 266, 268, 270, 272, 276, 280, 289, 296, 299, 300,305, 319, 324, 330, 331, 333, 340, 345, 348, 358, 361, 363,366, 369, 372, 373, 380, 384, 385, 387, 393, 404, 407: n = A,T,C or G
  misc_feature 408, 409, 413, 414, 415, 423, 438, 443, 444, 447, 450, 453,458, 460, 472, 475, 476, 477, 485, 489, 501, 531, 541, 545,555, 557, 560, 563, 598, 605, 626, 639, 640, 641, 642, 643,645, 649, 658, 661, 676, 690, 691, 692, 693, 700, 701: n = A,T,C or G
  misc_feature 702, 703, 704, 705, 706, 707, 708, 713, 714, 723, 729, 736,758, 759, 769, 779, 791, 806, 820, 829, 835, 838: n = A,T,C or G
agccgnaatncataatcgacttactatanggctnattggagctccccgcggtggcggccgcccgggcaggtacgcctgtagtcccagctactctggaggctaaggcaggagaatcgcttgaatccgggaggtggaggtcgcagtgagccgagatcgggccactgcactccagcctgggagacagagcgagactctgtctcaagaaaaaaaaaannaaaaanaaaaaaanttggggngnantttttttttnccaaaananttanggncntntncaantttnaagtttttntagggtntcnnttttntagaaatttttttnaaaanccccanntnttaaacntaatnatntaaaattttnttntnatnaanccnntttttantaanngnggaaanttaaacccccnttnnnttannntaaaaaantaccaaattaattgnggaanntanggnttntaaananggttttttgtanatnnnaaagtggnaaanccaaaactgaanttcaggcctcctgacttttatctagggctntttttgcatnattngcctctgctntnaanaanattttttaaatgtgctttaaaaccattgggctttnaaaaatnttttttatttggaatttgccngacccaaaacctnnnnncntttnctttttttnggnaaacctgggccaaancaaaaatttttccnnnnaaaaaannnnnnnnnaaaanncccccggcncctttnaaaaaanggattcccccccgggcgggggnntttttttttnaaattttttncccccccccccncggggggggggcccncccccctttttttncttttaaangggttnaanccccccc

SEQ ID NO: 3089 - DNA, 881 bp, Homo sapiens
  misc_feature 4, 64, 592, 640, 675, 721, 727, 730, 738, 740, 754, 771,800, 807, 812, 813, 822, 825, 830, 850, 851, 855, 858, 861,864, 867, 872, 874, 876, 877, 880: n = A,T,C or G
agcngagcgcgcgtaatacgactactatagggcgaattggagctccaccgcggtggcggccgangtactcaagccacctgcctgtcatggccccccaaaatgctgggattgcaggccaccataaccggtcatcggggcaactatccttcagggcttcctccagtagggctccccaggttggccttgagggccacaataaaaaatctgacttagctatactccttccctgtccccaaccacagttattcttgtggatgaggcaaatggcagcaggacagctggagtataccagagttgactcatttattttatgcatgcttagtgtggcatccctggggacatgaaattccagtgaaatccagtctttgtgctggagaagctcatagatctgtggaggaggcagatgcccacccactcactgtacctgcccgggcggccgctctagaactagtggatcccccgggctgcaggaattcgatatcaagcttatcgataccgtcgacctcgagggggggcccggtacccaacttttgttccctttaatgaggggttaattgcgcgccttggcgtaatcatggtcatagcttgtttnctggtgtgaaaatgttattccgctcacaatttccacacaacaataccnagcccgggagcaataaagtgtaaaagcctggggtnccctaaatgagtgaacctaactcacattaaattggcgttgcgcctnacttgnccncttttcantncgggaaaacctgtngtgccaacttggaattnattgaattcgggccaaccccccggggaanaggcggntttgnntattgggcnctntttcngtttcttgattaattgaatnnttgnctnggnccnttnggttntngnnaant

SEQ ID NO: 3090 - DNA, 852 bp, Homo sapiens
  misc_feature 2, 5, 6, 406, 554, 555, 584, 589, 608, 619, 682, 728, 737,759, 760, 763, 764, 771, 776, 809, 813, 824, 826, 833, 840,847: n = A,T,C or G
anagnngacgcgcgtaatacgactcactatagggcgaattggagctccccgcggtggcggcccgaggtacttttttttttttttttttcccagaaaaggtttccaatagagattggaatggttttccaatagagatcttcttgggtccaatgatgatgtaatactaatgcttgttaatatactttacaaaattgctctctaaagctcttgtttctatctgaaatacccaattaatgacagtttgaactgtaaataacctctacaaggtatacaaactattgactgttaatatactttataaaattgctctctaaaactcgtttctatctgaaacatccaccaattaatgatagtttgatctacaataacctctataacatatacaaactattggtttttttgttgntgttttttgtttgttttggagatggagtcttgctctgttgtccaggctagagtgcagtggcatgatcatggctcactgcaacctctgcactccagcctgggtgacaaaatgagaccctgtctcaagaaaaacaaaacccaaaaatttnnacagcaaaactcaaaaacaaaaaaagtcnaagtnttattgttgactcaagggnacaacccaagngctataactttctattggctaaacactgtttacacagcgcttaattcattttcaaaactggtntataaaaatccctttaaaagggcaatgggttttttctcaaacaatncactttttntggtttacccttttggaagaannaanntttggangggcnaggtacctgcccggcggccgttttaaaacaagnggancccccggctgngnggaattnaaattancctatcnttccc

SEQ ID NO: 3091 - DNA, 874 bp, Homo sapiens
  misc_feature 2, 3, 576, 616, 632, 650, 676, 692, 729, 732, 750, 756, 757,761, 781, 782, 802, 830, 835, 839, 856: n = A,T,C or G
tnntacgcgcgtaatacgactcactatagggcgaattggagctccccgcggtggcggccgcccgggcaggtacctgaagtcccagctactcaggaggttgaggcagggggatcccttgggaccaggagtttgaggttacagtgagctacaatagcaccactgcactccagcctgggcaacacagcaagatcctgtctccttttaatgaaaaaaaaagaggggaggggggcagaggagacaataggtatttgccagaagaattactaaaccaccagtaaatatgaaattatgcacaacctcagtggcaattaaaatgcaaaattagaaagacaactttaggcctataagattcataatgatgtttttaaaaaaacttattgaaaaaggtataggaaaacatgttctgtattttcatctcttactatgttttcttacatattaataataatcccccacttcctatccttaggaaatatcaactcttccacctttattgggaactctagcatctctactgtagtcttttctactccccaactcataccataatcaggggcattctcgacgtacctcggncgctctagaactagtggatcccccgggctgcaggaattcnattatcaagcttatcnataccggtcgacctcgangggggggccccggtacccagcttttnttccctttaagtgganggttaaattgcgcgccttggcgtaatcttggcaatanctngttcctgtgtgaaattgntatccnnttcncaatttcaccacaacatacnnagcccggagccttaaagtgntaaagcctggggtgccttaatggagtgnacctnactnacattaatttgggttgngctcctgccccgctttct

SEQ ID NO: 3092 - DNA, 841 bp, Homo sapiens
  misc_feature 26, 502, 507, 513, 514, 519, 520, 523, 524, 534, 544, 546,559, 560, 571, 572, 573, 580, 592, 598, 599, 613, 620, 626,634, 636, 646, 652, 658, 659, 663, 664, 669, 670, 672, 673,674, 675, 676, 677, 678, 679, 680, 681, 682, 683, 684: n = A,T,C or G
  misc_feature 685, 686, 687, 688, 689, 690, 691, 692, 693, 694, 695, 696,697, 698, 699, 700, 701, 702, 703, 704, 705, 706, 707, 708,709, 710, 711, 712, 713, 714, 715, 716, 717, 718, 719, 720,721, 722, 723, 724, 725, 726, 727, 728, 729, 730, 731: n = A,T,C or G
  misc_feature 732, 733, 734, 735, 736, 737, 738, 739, 740, 741, 742, 743,744, 745, 746, 747, 748, 749, 750, 751, 752, 753, 754, 755,756, 757, 758, 759, 760, 761, 762, 763, 764, 765, 766, 767,768, 769, 770, 771, 772, 773, 774, 775, 776, 777, 778: n = A,T,C or G
  misc_feature 779, 780, 781, 782, 783, 784, 785, 786, 787, 788, 789, 790,791, 792, 793, 794, 795, 796, 797, 798, 799, 800, 801, 802,803, 804, 805, 806, 807, 808, 809, 810, 811, 812, 813, 814,815, 816, 817, 818, 819, 820, 821, 822, 823, 824, 825: n = A,T,C or G
  misc_feature 826, 827, 828, 829, 830, 831, 832, 833, 834, 835, 836, 837,838, 839, 840, 841: n = A,T,C or G
agcgcgtatcgactcactatagggcngattggagctccccgcggtggcggccgaggtactgtaactgaagaattaaaggcaaaaatttaagactggaatcaatggagaatagaaaaagttttagctggcaagtgaatatgcttcagataaatcaactaagatagactgaaataagccaggggtaagagtagttcttactagaatagaaatgccagccgggcgccgcggctcacgcctgtaatcccagcactttgggaagccaaggcgggtggatcacgaggtcaggagattgagaccacggtgaaaccccgtctctactaaaaatacaaaaaattagccgggcattggtggtgggcgcctgtagtcccagctactcgggaggcggaggcaggagaatggtgtgaacctgggaggcggagcttgcagtgagccgagattgtgccactgcactccagcctgggtaacagagcgagactccgtctcaaaaaaaaaaaaaaaaaanttttnaaaaannttttnntgnnggggggggcntttaaaaaanangggtcccccgggnnggggggaattnnntttaacntttttccccccncccccnnggggggggcccggnccccccntttggncccttttngngggggaaatnggcccncggggnnaaannggggnnannnnnnnnnnnnnnnnnnnnnnnnnnnnnnnnnnnnnnnnnnnnnnnnnnnnnnnnnnnnnnnnnnnnnnnnnnnnnnnnnnnnnnnnnnnnnnnnnnnnnnnnnnnnnnnnnnnnnnnnnnnnnnnnnnnnnnnnnnnnnnnnnnnnnnnnnnnnnnnnnnnnnnnnnn

SEQ ID NO: 3093 - DNA, 836 bp, Homo sapiens
  misc_feature 5, 14, 27, 203, 224, 235, 236, 257, 279, 296, 309, 333, 535,548, 568, 579, 581, 625, 633, 641, 647, 653, 660, 662, 670,681, 684, 685, 688, 689, 690, 691, 692, 693, 700, 701, 702,703, 704, 705, 706, 707, 708, 709, 710, 711, 712: n = A,T,C or G
  misc_feature 713, 714, 715, 716, 717, 718, 719, 720, 721, 722, 723, 724,725, 726, 727, 728, 729, 730, 731, 732, 733, 734, 735, 736,737, 738, 739, 740, 741, 742, 743, 744, 745, 746, 747, 748,749, 750, 751, 752, 753, 754, 755, 756, 757, 758, 759: n = A,T,C or G
  misc_feature 760, 761, 762, 763, 764, 765, 766, 767, 768, 769, 770, 771,772, 773, 774, 775, 776, 777, 778, 779, 780, 781, 782, 783,784, 785, 786, 787, 788, 789, 790, 791, 792, 793, 794, 795,796, 797, 798, 799, 800, 801, 802, 803, 804, 805, 806: n = A,T,C or G
  misc_feature 807, 808, 809, 810, 811, 812, 813, 814, 815, 816, 817, 818,819, 820, 821, 822, 823, 824, 825, 826, 827, 828, 829, 830,831, 832, 833, 834, 835, 836: n = A,T,C or G
gccgnacgcataanacgactactatanggcgaattggagctccaccgcggtggcggcccgaggtacaagttgtctttatgctgcgagataagtcctctcttggtttgagctcccaccttttcagtgaactcttacattttgggggatctgctcttgtaaaggacatcctttctggtgagtattcttttggtttaattcttggnttggttatttgtgcatgaatntaatctcattnngaaacaagttaaggtgaatanaccaactagtgaattaatccgnctccaaaatatatgttnttggcatataccngtttattttgaaactctttgtaanaaatgtaaacctgtaatgataatctctgctttgtaaggatatctgcctctctgacacctaaaacactagatgctttcacaaagcaaaagggagaaacctaaatctatctatctgagtaaactcacccttgaccatttcattctgaaggcttcctatatatgctttttttcatctaaacaaatactggtggttaagttctgtncctcggcggtctnaaactagtggatcccccggnctgcacgaatncnatatcaagcttatcgatccggccaccttgaagggggggccccgnccccactnttgttccnttaacnaagggnaaatggncncctggcgnaaaatgggganaanntgnnnnnnccggggnnnnnnnnnnnnnnnnnnnnnnnnnnnnnnnnnnnnnnnnnnnnnnnnnnnnnnnnnnnnnnnnnnnnnnnnnnnnnnnnnnnnnnnnnnnnnnnnnnnnnnnnnnnnnnnnnnnnnnnnnnnnnnnnnnnnnnnnn

SEQ ID NO: 3094 - DNA, 819 bp, Homo sapiens
  misc_feature 13, 20, 24, 374, 506, 507, 543, 631, 635, 669, 670, 672,673, 674, 675, 676, 681, 682, 683, 684, 685, 686, 687, 688,689, 690, 691, 692, 693, 694, 695, 696, 697, 698, 699, 700,701, 702, 703, 704, 705, 706, 707, 708, 709, 710, 711: n = A,T,C or G
  misc_feature 712, 713, 714, 715, 716, 717, 718, 719, 720, 721, 722, 723,724, 725, 726, 727, 728, 729, 730, 731, 732, 733, 734, 735,736, 737, 738, 739, 740, 741, 742, 743, 744, 745, 746, 747,748, 749, 750, 751, 752, 753, 754, 755, 756, 757, 758: n = A,T,C or G
  misc_feature 759, 760, 761, 762, 763, 764, 765, 766, 767, 768, 769, 770,771, 772, 773, 774, 775, 776, 777, 778, 779, 780, 781, 782,783, 784, 785, 786, 787, 788, 789, 790, 791, 792, 793, 794,795, 796, 797, 798, 799, 800, 801, 802, 803, 804, 805: n = A,T,C or G
  misc_feature 806, 807, 808, 809, 810, 811, 812, 813, 814, 815, 816, 817,818, 819: n = A,T,C or G
agccgtatcgctnactatanggcngattggagctccccgcggtggcggccgaggtacagaacttaaacaccactatttgttgagatgaaaaaaagcatatataggaagccttcaaaatgaaatggtcaagggtgagtttacacagatagatagatttaggtctcttccttttgctttgtgaaagcatctagtgtttaggtgtcagagagggagatatccttacaaagcagagattatcattacaggtttacatttcttacaaagagtttcaaaataaacaggtaaatgccaaaaacatatattttggagacggattaattcactagttggtctattcaacttaacttgtttcctaatgagattaaattcatgcncaaataaccaaaccaaaaattaaaccaaaagaatactcccagaaaggatgtcctttacaagagcagatcccccaaaatgtaagagttcactgaaaaggtgggagctcaaaccaagagaggacttatctcgcnncataaaaacaacttgtcctcgccgctctaaaactantggatccccgggctgcaggaattccatatcaagcttatcgatccgtcgacctcaaggggggccccggacccaacttttgttcctttantgangggtaaatgccccttggcgtaatcatggcatagnngnnnnnccggnnnnnnnnnnnnnnnnnnnnnnnnnnnnnnnnnnnnnnnnnnnnnnnnnnnnnnnnnnnnnnnnnnnnnnnnnnnnnnnnnnnnnnnnnnnnnnnnnnnnnnnnnnnnnnnnnnnnnnnnnnnnnnnnnnnnnnnnnnn

SEQ ID NO: 3095 - DNA, 838 bp, Homo sapiens
  misc_feature 2, 23, 145, 447, 480, 491, 618, 619, 620, 623, 624, 625,626, 627, 628, 629, 630, 631, 632, 633, 634, 635, 636, 637,638, 656, 658, 670, 674, 682, 696, 703, 711, 736, 750, 753,759, 760, 777, 781, 785, 786, 787, 792, 794, 795, 796: n = A,T,C or G
  misc_feature 797, 798, 799, 800, 801, 802, 803, 804, 805, 806, 807, 808,809, 812, 815, 816, 817, 818, 819, 820, 821, 822, 823, 824,825, 826, 827, 828, 829, 830, 831, 832, 833, 834, 835, 836,837, 838: n = A,T,C or G
ancgtatcgactactatagggcnaattggagctccccgcggtggcggccgaggtacctcaatggtttggaatgcagaaagtgtaattaaatttgaagctgaaaaggaaggcaccttggagagtcctggctcttattagctttcangctagggacaaacagatgccacagaccatttgagggctgtttgttggatgatgctaattgtttactgtgcttattattctgtgacatccttagaatcacccaggtggggagatgtcagactaaagttaccaatatctgtgctaagaaaaactcaacacttctatagtttaagtccattttggtcaaagcagaaggattcaaagccattctgaggtttatgaacaagattaagaaagcacctggcactgattttagcttgtaaaagtggaaccctcagaaattatttcagattatttcatacncctagaaaaaatatatagagaaaggtgtttacnaagaagaaatnatatcaaaaaccaagtacattattcaaaggtctatttcaaattaataatcatttgagcataatttctccctgtcaaaaaccactggtattttattttcaatcaattaaaaagtggttttatgcggannnggnnnnnnnnnnnnnnnnatttttgggggggggggngntttaaaaatttngggncccccccnctttaaaaatttantttaaantttttttncccccccccccggggggggcccggncccccccttttggnccntttaannggggtaattgggccctngggnaaannnggggnannnnnnnnnnnnnnnnttntannnnnnnnnnnnnnnnnnnnnnnn

SEQ ID NO: 3096 - DNA, 930 bp, Homo sapiens
  misc_feature 24, 417, 477, 587, 591, 606, 644, 684, 687, 703, 710, 719,737, 739, 759, 781, 791, 804, 810, 811, 813, 815, 817, 851,872, 896, 903, 904, 908, 920, 929: n = A,T,C or G
atcactacttagggcgaattgganctccccgcggtggcggccgaggtactatgtccctctcaagtcctgaatctaacttagggagtagccaggagactatgagaaggaactactccagggaaagaacatcccatgccctttctgaaacacaagtggcaaccataagacaccactctttatcctaccttttagcagactatgcacagtcccaggaacgaggccagaactgataagcaagtgtggcattggctccagccaaggttatgggattcgggaacctccccatcctggaattgggctgggaggggtttcacctgggagccacagttttatggcctggggttatattgcagtccaaagacaaactgcttgtgatttggctggctgcctcagctcgatgccagtggcaggccgtangatggtatcccgctaggttgagagcatgagagcaaggcaggtctcactaccacctgctangctatggaacccgagccaccccactttcccatgcttggttagttggaacagaaagaagttgcttcacttcttccttgaactattggttccagtgggcctgaagaactgtncctncaaccccccattaanggcttggcactttgtaccttgcccgggccgggcggttntaaaaactaagtggatccccccgggctggcaggaaattcnatnttcaagccttattgantcccgcnaaccttgangggggggcccggtccccncnttttgttcccttttagtgangggttaatttgcgccccttggnggtaatcaangggcataagctgntttccnngngngnaaaatgtttttccgcttacaaattccacaccaanataccaaacccgggggccttnaaagggtaaaagcccgggggggcntaattanngggncctacctcccanttaattggng

SEQ ID NO: 3097 - DNA, 915 bp, Homo sapiens
  misc_feature 77, 218, 222, 232, 403, 413, 422, 433, 499, 516, 570, 588,597, 633, 683, 686, 694, 697, 717, 720, 735, 738, 759, 765,779, 806, 817, 846, 850, 857, 861, 862, 869, 888, 893, 900,902: n = A,T,C or G
tacgtcgactactatagggcgaattggagctccccgcggtggcggccgaggtacttttttttttttttttttttttntagggttgtttgtttttttgagacagagtctcgttctgtcacccagactggagtgcagtggtgcgatctcggctcactgcactccaggctgggcaacggtgtgagacctggactcaaaacacacacacacacacacacacncacncacacacacnaagcgggaaaaattctggtgcttcgcaaagtcatcacaatacaaatcaaaataaatttgtcttaaagccacttagacaatactaaccaactttcaccaggtgttatccatgcacaaccaaaaccttttactgtgagagcgaagctcttatggagttctacctcatcagtgntctaccattntaagatatnaaagactagtngattctattcatgaaaccatttttcttggcttgggattaattttggtaaggagatgagttaccaangttagaaattaggtggngtcccaaattaaaacaattaaaaagaaccaccttaggtaaatataaatatgtgntataaaattgtcaaaatnaatcctttnagaccttacatcaatttttcaatggggaagtatatntcaagtcattgctaaacagcttgggttaattttatggtgaaataccacanaangtacctgnccngggcgggcggtctaaaaccnagnggatcccccgggctncanggaattccgattcaaagcttntcgatnccggcgaccctcanggggggggcccgggtccccacttttgnttccctttagnggagggttaattgccccctgggcggtaancatngggcatngctnnttcctgnggggaaatggtgttcccgntacanattcaananaattccagacccg

SEQ ID NO: 3098 - DNA, 906 bp, Homo sapiens
  misc_feature 1, 24, 346, 350, 495, 630, 632, 638, 640, 657, 663, 684,691, 718, 721, 736, 755, 762, 766, 780, 817, 825, 826, 845,849, 864, 874, 879, 881, 894, 897, 904, 905: n = A,T,C or G
ncgtcgactactatagggcgaatnggagctccccgcggtggcggccgcccgggcaggtactaaatttctaggagcaaagttctaggggctgtgtcaggccagctgagtgagagggtggtgtgaggaggcacaggcaggtccttactaatcacacagcatcagagctgccaactcgagtgtcgacagcctttcctgggcacaccttcctgaactcactctgaagggagggaggctattaggaaagaaatataagctgaaaatgcccccgaaaggtccactcacagaaaaccaagagctggccgccaccctgccagcagtggtgacgggaatcatgccagtgactcangcancagccacagcttccaaagtcctggagccggccccgcccaacacaccggatgccacaaagcaccacctacctgagcatactgttccttgagtggaccagagagccggaggacagcacagacatcagctccaagtctgctcttgcancgccttcggtcacgaaagtcctttcccggatttcctcttgcccgctgaacaagcaagtaccctcggcccgctcttagaactaagtggatcccccgggctgccaggaatttcgatatcaagcttatcgattcccgncnacctcnanggggggccggtacccancttttnttcctttagtgaagggttaanttgcgcncctgggcgtaatcatggcataagcttnttnctgtggtgaaaatgntatttccgtttcaatttcncaacaanatancaaacccgggggcnttaaagtgtaaaagcctgggggggcctaatgagggangctaactnnatttatttgcgttgggctnaacnggcccctttccagtngggaaaactnttttncncttggtttattanttngccaccnnc

SEQ ID NO: 3099 - DNA, 873 bp, Homo sapiens
  misc_feature 5, 531, 557, 570, 577, 600, 641, 656, 685, 738, 751, 758,769, 812, 821, 824, 825, 834, 835, 841, 859, 863, 864: n = A,T,C or G
cgtcngacgcgcgtaatacgactcactatagggcgaattggagctccccgcggtggcggcccgaggtacacgcctgtagtcctagctactcaggaggctgaggcaggaggatggcttgagctgaggaggcagaggctgcagtgagccaacattgcaacactgcaccccagcctgggcattagagccagacctagtctcaaaaaataaataaaataaaataaaataaaataaaatgtttaataatgcctactcagacaaagaaaggctcaggcaaaagactgagtctgatcttctacattgaggagaccatgttgattagtgttatattcaaaaaaaccaattcccaagtaatgcatacacagcttgaaagaaaggaagtattccagctacaccctccaagttttctacatctcagtaaacggcatcgccacccacctagaaactgggcatcatttggttcctcgttctcctttttttttttttgagatggagtctctgttgactccgggttcaagccccgcgtacctgccnggcgggcgctctagaactagtggatncccccggctggangaattcnatatcaagcttatcgatcccgcnaccttgaagggggggccggtcccaacttttggttcctttantgaagggtaattgcnccctggcgtaatcatggcatagctggttnccggggggaaaatggtattccgttacaatttcccacaaatacaacccgggagnttaaagggtaaanctggggngcctaatgagngacctacctccattattgggttggctactggcccttttccatngggaaaccnttnngccacttgnnttattnaatggccacccccggganaagnngtttggttt

SEQ ID NO: 3100 - DNA, 905 bp, Homo sapiens
  misc_feature 12, 14, 16, 462, 471, 519, 524, 578, 586, 633, 642, 658,661, 664, 675, 679, 729, 732, 738, 756, 758, 765, 799, 803,826, 840, 851, 856, 867, 869, 877, 878, 885, 895, 899, 900,901: n = A,T,C or G
tacgatacactncncncgtatacgactactatagggcgaattggagctccacccgcggtggcggccgaggtactttactcacccttcctctgacagaaaaggatgaagtcaagggcctggtagaggcaccactaagaaaggcatctgaaaggaccaaagagagtgaccagcaagcattttttacaaggctgaggagctgacagcttccatgaaaggctggaccacccagtggtgaaaagcatcatctgggttaccttgtgctgccataaaacacaccacagacttggtgacttaaaccacagatatttatcttctcacaatcctggaggctggaaagtctgcaatcacggtgccagcatggtcaggttctggtgagggcctttttccttctcactgtgtgctctttctttgtgcatggagagagagagcatgaacaagccctctactgtccctcttaagaanggcacttantcccataataaggcattcacccttctgaccttggctaaccctaagttnaagtnccttgccccgggccggccgaggtacatgatctttcatacacccttttgcaagantggtccanaaagtcttttggcctcggcttgatgttcaaatgactttcctgtcaanccagcattngacacaccaaaccaanttnatntaaaggggctngaangctttcggggggcttaaagctggaagacacctacaccaacaaaggacctnggntaaacnacttttaaagggcctttnangacattnttcaaaaagaaaaccaaggtttcctttactttcnattnacaattgggaacatttaacttgnccgggcgggcggtnttaaaaataantgggntcccccgggtngnagaaattnnttttaanccttttgatncctnnnccct

SEQ ID NO: 3101 - DNA, 885 bp, Homo sapiens
  misc_feature 1, 24, 66, 75, 91, 132, 348, 362, 469, 498, 550, 561, 569,599, 602, 611, 629, 637, 677, 683, 710, 715, 728, 744, 758,770, 800, 803, 804, 806, 818, 823, 827, 831, 832, 834, 836,837, 848, 852, 868, 871, 872: n = A,T,C or G
ncgtcgactactatagggcgaatnggagctccaccgcggtggcggccgcccgggcaggtacgcggngagactgantggggtcacagcacanggcactgtcttgcctggctttatctgagccaatcacacctntcctggccactatctgtggtctagccccctttgtgcataaagagaaagaagagccttgaggaccagcctagtcaggctgaagaaatgtcaacaattgggagttttgaaggattccaggctgtgtctctgaagcaagagggagatgaccaaccctctgagactgaccacctatcgatggaggaagaggacccgatgccaagacagatttcaaggcantcaaagtgtgaccnaatcaactctttaccccaatccttatcatcaagccttatatctcacggaagtactttgctacacggccgctctagaactagtggatcccccgggctgcaagaattcnatatcaagcttatcgataccgtctacctngagggggggcccggtacccaacttttgttccctttagtgagggttaattgcncgcttggcgtnatcatggncatagctgtttcctgtgtgaaattgttatncgntcacaattncacacaacatacgagccnggagcatnaaagtgttaaacctggggtgcctaatgagtgaacttactnacattnattgcggtgcgctcactggccgctttncagtngggaaacctgtcntgccagctgattaatnaattgggccacccnccgggaggaggngggttggggttttgggcccttttccgtttnttnntnaatgaattcttngcctngggngttnngntnngggggccggtntaantcaattaaaggcgggnttnnggttttcacaaaa

SEQ ID NO: 3102 - DNA, 895 bp, Homo sapiens
  misc_feature 10, 18, 28, 33, 36, 42, 370, 535, 559, 561, 597, 600, 667,690, 699, 708, 713, 730, 750, 762, 774, 775, 777, 795, 800,819, 821, 831, 837, 845, 862, 870, 874, 894: n = A,T,C or G
tacgtccgantcactctnatacgactcnctatntgncgaatnggagctgcccgcggtggcggcccgaggtactttttttttttttttttgtgatggggtcttgctctgtcgcccaggctggagtgcagtggtgcgatctcggctcactgcaagctctgcctcctgggttcacaccattctcctgctcagcctcctgagtagctgggactacaggtgcccaccaccataccaggctattttttttttttgtatttttagtagagacggagtttcaccgtgttggccaggatggtcttgatctcctgacctcgtgatccgccacctcgtcctcccaaagtgctggaattgtaggcgtaagccaccgtgcccngccagaaagcaccatttttttatatacctttaaaaaagaaaaatattgctaactaaattaagacatgtcttctgttgtaagacatattctggtttaagatatgttaaatggaaaaaaaacaaacaaactcaaaacccatgtacctgcccgggcgggccgctttanaactaggtggatcccccgggctgnangaattcgatatcaagcttatcgatcccgtcgacctnganggggggccccggtcccaactttttgttcctttagtgaggggtaattgcccccttggcgtaaatcatnggcataagctggttcctgggtgnaaatggttntccgttacnaattncacacaacaataccaanccgggaaccataaagtggtnaaagcctggggnggcttaatgagnnanctaacttacatttattgngttgngctcactggcccttttcantngggaaacctntcgtgncaactggnttaatgaatggccaacncccggganaagnggtttgcgttttgggccccnt

SEQ ID NO: 3103 - DNA, 918 bp, Homo sapiens
  misc_feature 6, 7, 8, 10, 369, 372, 375, 580, 635, 649, 660, 663, 703,712, 724, 741, 779, 785, 790, 814, 839, 853, 892, 895, 909: n = A,T,C or G
tacgtnnngncgcgcgtaatacgactactataggggcgaattggagctcccccgcggtggcggcccgggggccattgagactgccatggaagacttgaaaggtcacgtagctgagacttctggagagaccattcaaggcttctggctcttgacaaagatagaccactggaacaatgagaaggagagaattctactggtcacagacaagactctcttgatctgcaaatacgacttcatcatgctgagttgtgtgcagctgcagcggattcctctgagcgctgtctatcgcatctgcctgggcaagttcaccttcctgggatgtccctggacaagagacaaggagaaggccttaggatctactgggggagnccngangagcaagtctcttctgtcccgctggaacccatggtccactgaaagttccttatgctactttcactgagcatcctatgaaatacaccagtgagaaattccttgaaatttgcaagttgtctgggttcatgtctaaacctgttccaactatccagaatgcccacaagaattcaactggatctggaagaagaaagaagctgattggtgntaactgaacccattttgattggaacctacaccagggctgatgtcattcatttggnaaccgcaacaaacntggcttttccntgncccgggggaagtattgggtttttgagaagtcttttttggnacctggccnggccggccggtnttagaactaagtggatnccccccgggcttgcaggaatttcgatttcaaagctttntcgatnccgcnaaccttcaaggggggggcccggtncccactttttgtttccctttatgangggttaattgcccncttggcttaatcatgggcataagcttgtttcctgggggnaanttgttattcccttncaattccct

SEQ ID NO: 3104 - DNA, 930 bp, Homo sapiens
  misc_feature 9, 61, 336, 546, 622, 638, 643, 647, 649, 653, 666, 675,689, 707, 714, 746, 761, 767, 771, 777, 779, 780, 781, 793,794, 798, 803, 804, 822, 830, 832, 834, 837, 851, 852, 862,863, 864, 872, 873, 894, 896, 899, 904, 911, 912, 913: n = A,T,C or G
  misc_feature 915, 916, 926, 928, 929: n = A,T,C or G
tacgtctgncgcgcgtatacgactactatagggcgaattggagctccccgcggtggcggcncgaggtaccaccacctatccacactctcacacaatcaccccttttgaagtaaagcctatattttaaaaataaccattacagattgtgagtgcagtctaggatcacatagcagaactaaaagctaactggcccacccacaaagtaaatgtgagacagagggctcggggtagccatactctagccaagtagtacctgcccgggcggccgctctagaactagtggatcccccgggctgcaggaattcgatatcaagcttatcgataccgtcgacctcnagggggggcccggtcccagcttttgttccgtttagtgagggttaattgcgcgcttggccgtaatcatggtcatagctgtttcctgtgtgaaattgttatccgctcacaattccacacaacataccagccgggagcataaagtgtaaagcctggggtgcctaatgagtgagctaactcacattaattgcgttgcgctcactggccgctttncagtcgggaaacctgtcggtggccagctgcattaattgaatcgggccaacgcgccggggagaggccgttttgcgtnttgggccgctcttttngcttncttngnttanttgacttgcttgngctcggtcnatttcggttgcggnaagcggtattaagcttanttcaaangggggtaataccgggtattccaccaaaaattnatggggattaacccnaggaanaaancatgtnannntaaaaggccaannaaanggccnnaacccttaaaaggggccnttttggtntngnttntttccataggtttnngcccccttgnnngggcgttnnaaaaattcaatcctttattcnangtnggaanaaccctnnngnnctttttaatntnnt

SEQ ID NO: 3105 - DNA, 905 bp, Homo sapiens
  misc_feature 1, 4, 16, 24, 724, 741, 754, 768, 833, 841, 848, 854, 857,877, 887, 903: n = A,T,C or G
ncgncgactcctatanggcgaatnggagctcccccgcggtggcggcccgaggtacttttggagtataagagagtcagtgttttctaaaacagttgttcttagagaataataatgatatctaccattactgaaagatattttatttcaccctaaccataactatatgaggtaggtgttgggttctctagaggaccaaataagtgacaacctcattttctacctgagatctgaatccatggaaatcttttttaaaagattaaaagattgagagattaaaagactgctttataaatgatgttaaaagaatgtagctttttatttgttggcaaatgcacttcctaaccctgaacttcccctcccagtcacagacaatgttgggccaaggtagacctccttcacagaaaatcctgctcttgccaaacaagagtattggaataacagagtgaactgtgcttcctatgagcagtttgctccaagtgtaatttggaagggcagagctacacatccctagttccttattctcatcaaaagaatcactatgcatgagaggatagagagttgctacaagtattttgctgctggaagtccctttccacggaaaatatcggtaaaagcaggcacttttattatattttgggagaaagccacctatgtatatgatcacttcctcaaagaatggcattttctggatatttaatgcttttcttggtaaaagtttattgtngggcagaaggggccagnccccattgagcanggtcttaccttggnaatacctttcttttccaatccaacatatttcacaccttctttaattttcaatcacctattcaggncctggttntccagcntttganggnggggccagctttgcttaaangccctggggngggggcttggccctcncg

SEQ ID NO: 3106 - DNA, 910 bp, Homo sapiens
  misc_feature 7, 8, 9, 10, 11, 13, 45, 72, 428, 545, 579, 596, 621, 642,672, 700, 702, 736, 743, 751, 756, 766, 778, 794, 822, 843,866, 893, 906: n = A,T,C or G
tacgctnnnnngncgcgcgtaatacgactcactatagggcgaatnggagctccaccgcggtgggcggccgangtacctggaattcaggttacaggttttccttttcagggcagggtgccctcccatctaacctctctacccagtctcccccaaacaagctgaaggcacttacattggcatgttgctaggcataaggttactgcaagcagcaacaaagtccgcgtatccacaaagctgagcatgtctagcacttagacatgcagactccttgtgtcgcaaagcctctgggtcaccggcggaggtatcacctggcgggcgcgggcatgcagtcgtggccagtacctgcccgggcggccgctctagaactagtggatcccccgggctgcaagaattcgatatcaagcttatcgataccgtccgacctcganggggggcccggtacccaagcttttgttccctttaagtgaagggttaattgcgcgccttggcgtaatcatggtcataagctgtttcctgtgtgaaatttgttatccgcttcacaattncacacaacatacgagccgggagcataaaagtgtnaaagcctggggtgcctnaatgaagtgaacctaacttacattnattggcgttgcgctcacttgnccgcttttcaagtcgggaaaacctgtcgtnccaacctgcattaatgaatcggccaacncnccggggaagaagccggtttgcgtattgggcgctntttccgntttcttgnttaanttgaactcgnttggcttcggtncgttcgggttgcggcnaagcggtattaacttcacttcaaaggcngtaataccggttttccccaanaatcaaggggattaaccccaggnaaaaaacattttaaccaaaaaggccancaaaaaggcccgnaact

SEQ ID NO: 3107 - DNA, 909 bp, Homo sapiens
  misc_feature 548, 550, 622, 705, 714, 731, 737, 751, 819, 825, 831, 842,856, 868, 887, 894, 906: n = A,T,C or G
tacggtcgcgacgcgcgtaatacgactcactataggggcgaattggagctccaccgcggtggcggcccgaggtaccaggctagccttcctgatgactgcagcagcaaggctgcccatgggccaccccagacagcctgcttagaatctctagaagagctgcttgatgtaagacattaagacattcttaaacgaagccagtcttcaaggactagaataaatccttaattcttccaatacatagacattaacgtaaagcaacaagaaacaaggaaagtcaaatagacatagcactccccaaagcatataataatctctaagttgatccaaagatacaaactgcctgacaaataattcaaaatagctcattaaaaaatgctcactaaacttccataggatacagggaaacaattcaatggaatcaggaaaaccaataaattaccaaaaagaggatatttaccaaattaccaaaattaccaaattacaaaattacccaaaaggagatatttaacagacagattgaaattttaaaaccaaccaaccaacaacancnacaacaaaaatcaaacaagaatttctggggcagaaaaattagaggtggaacggaaataaaaacccacccggngaaaatatcaagttaccagaattggatcaagttggaaaaaagattttttccatgaatttggaagacaagttatttggaaaatntacccgtcnggaagaggaaaaaattnaaccanatttaaaagggganttaggaaatttattttttagaaatttttaaggacttttgggaaaaatttttcaaagggccaatttttnaggttntaaganttcaagaaggngagaaggaaccaangggggaaaggcntccaaccttttttaaagangcatttnccatcattcttncat

SEQ ID NO: 3108 - DNA, 900 bp, Homo sapiens
  misc_feature 16, 17, 18, 26, 30, 536, 541, 620, 634, 673, 674, 682, 710,714, 722, 751, 755, 756, 766, 785, 795, 822, 827, 831, 868,887, 888, 890, 899: n = A,T,C or G
tacgtcactactatannncgactcantatntggcgaattggagctccccgcggtggcggcccgaggtacaagaagggctgaggcttctgtctgagttgaccgtgacctgtggttacagcattttaggacttcgtaacagaatgatccacagaggtcagcaggcccttgaaagaacgctgaaggaaacttgcatacaaacagtctcaaggaggcaaacacatgcttcaagcgctgcccgcgtacctgcccgggcggccgctctagaactagtggatcccccgggctgcaggaattcgatatcaagcttatcgataccgtcgacctcgagggggggcccggtcccagcttttgttccctttagtgagggttaattgcgcgcttggcgtaatcatggtcatagctggtttctgtgtgaaattgttatccgctcacaattccacacaacatacgagcccgggagcataaagtgtaaagcctggggtgcctaatgagtgagctaactcacattaattgcgttgcgctcactgcccgctttncagtncgggaaacctgtcgtgccagctgcattaatgaatcggccaacgcgccgggaagaggccggtttgccgttttgggcgctnttccgtttccttgnttactgacttcgcttgcgctcgggtcgttcggctgcggnnagcgggtntcagcttacttcaaaaggcggttatacngttnttcaccanaatcaggggatacccatgaaaagaacttntgannaaaaggccancaaaaggccaagaaccttnaaaaggccgngttgctggcctttttcatagcttccgnccccnacangcattacaaaaaatcgaactttaagttaaaggtgggnaaacccaaaggcctttaanntnacaagtttnt

SEQ ID NO: 3109 - DNA, 876 bp, Homo sapiens
  misc_feature 3, 594, 619, 633, 688, 731, 760, 766, 778, 780, 783, 802,803, 813, 817, 836, 857, 862: n = A,T,C or G
tangatacgactactatagggcgaattggagctccaccgcggtgggcggcccgaggtacacctgtaatggctaccccgctggctcagagctctgcctcaccgccctgccccggcacctgcaagccagtgtgccacttttttgatgttgtatgtttttaatattccctgagacagactccagagttctgagttttcttacttggggtgtcaaattatattccaggaaccaatttgggttttcctggcttctggttaaaaagctggacagattttgagttgtttgctcttagttctctcataaactgcactatttttagggcactattttgtagaacacaagatttttcaggaagtatattgaaaggcctgtacctgcccgggcggccgctctagaactagtggatcccccgggctgcaggaattcgatatcaagcttatcgataccgtcgacctcgagggggggcccggtacccagcttttgttccctttagtgagggttaattgcgcgcttggcgtaatcatggtcatagctgtttcctgtgtgaaattgtatcccgctcacaattccacacaacataccaacccgggagcatnaagtgtaaaagcccgggggtgcctnatggagtgagcctnactcacatttaattgcgttgcgcttactggcccgctttccaagtcgggaaacctntcgtgcccagctgcattaatggaatcggccaacccccgggganaggcggttgcgtattgggcgctttttcgnttcctnggtcaattactngntgngcctcggtcgttcggttgnngcaacgggtnttancttactcaaaaggcggtanttcggttttccacagaatcanggggntaccccaggaaaat

SEQ ID NO: 3110 - DNA, 930 bp, Homo sapiens
  misc_feature 14, 24, 26, 41, 439, 446, 517, 522, 543, 552, 562, 584, 608,624, 652, 666, 668, 672, 681, 687, 692, 702, 719, 726, 727,738, 742, 746, 753, 766, 770, 771, 773, 781, 782, 783, 793,794, 802, 807, 812, 816, 817, 824, 834, 836, 839: n = A,T,C or G
  misc_feature 847, 849, 854, 879, 880, 883, 887, 888, 897, 913, 916, 919,927, 929: n = A,T,C or G
gacgactactatanggcgaatagnanctccccgcggtggcngcccgcccgggcaggtacttggtgaagtgagattcagactgagtggggtcacagcacagggcactgtcttgcctggctttatctgagccagtcacacctctcctggccactatctgtggtctagccccctttgtgcagaaagagaaagaagagccttgaggaccagcctagtcaggctgaagaaatgtcaacaattgggagttttgaaggattccaggctgtgtctctgaagcaagagggagatgaccaaccctctgagactgaccacctatcgatggaggaagaggacctgatgccaaagacagatttcaaaggcagtcagagtgtgacccgaatcaaacttttttaccccaaatcccttatcaatcggccttatattttcacggaagtacctcggnccgcccnggacaggtaccaagcgccatgctgtttaaagtatcaagaggcttcatagtatgtttttaatattggcttanactangccctgcttcaaaactctttntttcctgtngttttcctanactattgggtgggtattttttncataaaaactttaagcgttcaacntatcttggttcccatncaaaaagcattatgttgggttgtttttnggggtgaccaattnancctnttcaaattnactccnggganaactgacatntttattgcagggtaagntttttcnntccgaggggtntggnttanaccgggnagcccccaaaaantacnntnggggccannntgccaacccnngggtggcntttgncaaanaatnnagggccnggaaatgaantnaancctgtttnanttaanaagcccttttttttttcctacccanntanaaanntttttcttnttttttcccctggttnctnttntttcccancnt

SEQ ID NO: 3111 - DNA, 908 bp, Homo sapiens
  misc_feature 9, 480, 553, 580, 581, 602, 622, 627, 634, 638, 650, 654,671, 687, 695, 704, 716, 730, 739, 744, 748, 754, 755, 760,767, 784, 787, 788, 794, 797, 799, 801, 807, 808, 816, 817,820, 834, 837, 838, 846, 849, 856, 860, 862, 868, 873: n = A,T,C or G
  misc_feature 875, 877, 879, 883, 885, 894, 897, 899, 902, 903: n = A,T,C or G
gcgcgactnctatagggcgaattggagctccccgcggtggcggcccgcccgggcaggtacggaagaacatgggagtctgtatgcagcacgacgtcttgttcagttacctcactactaaggagcaccttctcctatatggttccatcaaagttcctcactggactaaaaagcagctccacgaggaagtaaaaaggactttaaaagatactggactatatagccatcgtcataagagagttggaacactgtcaggaggcatgaagaggaagttatctatatccatagctctcattggtggatcaagggtagtaattttggatgaaccatctactggagttgacccatgttctcgccgaagtatatgggatgttatatccaagaacaaaactgccagaacaatcattctgtcaacgcaccacttggacgaggctgaagtgctgagtgaccgcatcgccttcctggaacaggggtggggcttangtgctgtggggtcccccattttacctcaaggaagcctttggcgatgggtatcaccttacgcttaccaagaagnaagagtccaaatttaaatgcaaatgcnntattgtgacaccatggcccgngacagcaattgatcccaatnacatnttccccnaaanccttaccttaangggnggatatttggggggganagcttggtttattgtncctttggnccgctttanaactaaggggancccccgggctgganggaatttcnatttntaancttttnnggatnccggcgnacttgggggggggcccnggnncccacnttngntncctttnntgaggggnnaantgcccccctggggnaannagggcaanagntgtttcntggngnaaattngtttncntncnattncnacaaaattnaancnggnncttat

SEQ ID NO: 3112 - DNA, 878 bp, Homo sapiens
  misc_feature 547, 550, 586, 611, 625, 666, 695, 699, 708, 718, 735, 738,739, 755, 759, 761, 765, 766, 779, 787, 790, 791, 794, 796,799, 810, 820, 824, 837, 845, 846, 847, 853, 854, 857, 859,861, 864, 867, 868, 876: n = A,T,C or G
gcgccgtatcgactcactatagggcgaattggagctcccccgcggtggcggcccgaggtacatttggctgatactgcaaaaatgacggtccctgggttaacgggaggcatgtctggctgctaggtcatcccgagaggcagattggggcaggtttctaggaagtataggctcgccttgcggaggaccaggttggcacagtttgactgctgtgcactaaggcagggcacagagctgatgccctcaaggtcaattccagccacatttctctgtgattctatgactcaaaagcttggaaacaacctcaaaggattaaataaatgggggaacaaagtatttgctctcctctattaagccttggctgggaagtctttcttccacactcctcacatgcaaaatgctgtttgtgggagcagattaacatttcaaaccacttcctgcaattagacgggaacacctggttttgcaataactctcattttctgtgtgtgctgagaggtttttgaaaattcccatgctcagtggattaccctaatggctggtcaccagntgntacgtttggcatgtttgcacaacaaatttattgcancttcccacagccattttggcagaanccccaacaaaaatnaaggaagcaggttaatgcttgacaccttcaatttcttcttntaccatgggggcccaagaatccttttaantgantaagtggcntcaagcttangggggagaagttgtcanggnncttggagaccatttangggnangcannaaaaaaacccttnttggcctnaannatntnggnttgattaattnaaacccaagnttcnggccaagggggcnaatttagnnntgggannttnananatnttnntttttaanct

SEQ ID NO: 3113 - DNA, 878 bp, Homo sapiens
  misc_feature 10, 301, 364, 385, 406, 407, 409, 459, 520, 522, 526, 540,561, 565, 580, 585, 589, 596, 606, 613, 616, 622, 625, 629,631, 641, 649, 652, 660, 666, 668, 671, 674, 684, 697, 698,699, 703, 705, 707, 710, 711, 712, 714, 717, 720, 722: n = A,T,C or G
  misc_feature 728, 729, 730, 731, 735, 736, 739, 745, 746, 754, 756, 759,760, 762, 763, 766, 768, 782, 784, 788, 789, 790, 791, 792,794, 798, 800, 801, 802, 803, 804, 805, 806, 810, 811, 813,815, 816, 817, 821, 822, 824, 825, 827, 828, 829, 830: n = A,T,C or G
  misc_feature 831, 832, 833, 838, 839, 841, 842, 843, 844, 845, 846, 850,852, 854, 855, 858, 860, 864, 865, 866, 868, 871, 873, 874: n = A,T,C or G
tggccgcgtntggcgcgcgtatacgactcactatagggcgaattggagctccccgcggtggcggcccgaggtacagaacttaaacaccactatttgttgagatgaaaaaaagcatatataggaagccttcaaaatgaaatggtcaagggtgagtttacacagatagatagatttaggtctcttccttttgctttgtgaaagcatctagtgtttaggtgtcagagagggagatatccttacaaagcagagattatcattacaggtttacatttcttacaaagagtttcaaaataaacaggtnaatgccaaaaacatatattttggagacggattaattcactagttggtctattcaacttaactngcttcctaatgagattaaatncatgcacaaataacccagccnnancattaaaccaaaagaatactcaccagaaaggatgtcctttacaagagcanatcccccaaaatgtaagaagttcctgaaaaggtgggagctcaaaccaagagaggacttatntngcancataaaatacaacntgtacctcgggccgcttctanaacntagtgggatcccccnggctnccangaatttngatatcaaancttatcnatncccgtngancttnanggggggcccnggtacccnagnttttgttncctttngnganggnttaattgccncttgggcgtaatnnngggncntnctnnntnctnggngngaaatnnnnttcnnttnactaanncccccccntnctnntnnggnanccttaaattttaanancctnnnnntncttnannnnnnncctnncncnnntttnntnncnnnnnnnttacnngnnnnnntttntntnnggnanaacnnntnttncnnaccc

SEQ ID NO: 3114 - DNA, 867 bp, Homo sapiens
  misc_feature 9, 566, 571, 596, 605, 625, 659, 691, 694, 696, 704, 705,734, 736, 738, 745, 746, 750, 755, 757, 759, 762, 769, 776,777, 782, 783, 786, 787, 794, 798, 803, 810, 812, 813, 816,818, 819, 821, 823, 827, 831, 833, 843, 844, 847, 851: n = A,T,C or G
  misc_feature 854, 856, 857, 860, 861, 865: n = A,T,C or G
ggcgccgtngacgcgcgtaatacgactactatagggcgaattggagctccccgcggtggcggccgaggtacatactttcctgtgtcttgctgttttcacttactatatcttggagctatttctatattgccacattcaaagctttttaaagcattttcaggatagctatttatagtcaagatgtatcacagttttgtcttatttacctgtccccccactgatgaacagtctggttgcttctgtttgtttttttctgttattgtaataaacatccttatagttgcacttttttatttttaaatttttttttatttttaatttttttttttaatagagacaaggtctcactgtgttgcccaggctggtcttgaactcctgagctcaagtgatcctcctgcctcagcctcccaaagtgctaggattacagacgtgagcaaccacgactggtcaatagttgcactttctaatgtgtgtttgtaggacagtttttcaagtagtgtagggcatgaaggtttatagttaggtaaaaatggttgctagattggtacctgcccggggcgggccgntctanaactagtggatccccccgggctggnaggaaattngatattcaagcttatcgatnccgtcgacctcgaggggggggcccggttcccaantttttggtccctttagtgaggggtaattggcnccntnggcggaannatgggcaatagctgggtcctgtgggaaantngnaattccnntcanaattncncnaanatacgancccgggnnataannggnnaagcctngggngcctnaaggagngnnccnanntncnattnaatngngttgggcacnntgnccgnttntnnaanngggnaa

SEQ ID NO: 3115 - DNA, 861 bp, Homo sapiens
  misc_feature 458, 542, 561, 577, 592, 627, 648, 651, 660, 667, 668, 698,699, 740, 752, 764, 773, 775, 794, 818, 819, 823, 838, 844,845, 853, 854: n = A,T,C or G
gccgcgtatcgactactatagggcgaattggagctccccgcggtggcggccgaggtacgcgggtatgtctcgagaaaaaagccaatacagtctcttttgaggaccttgaaaactaacctgctagggatatcatactaggcctctgggtgccgctgtccgccaatccgtggctggagggaaacaaagcaatccactgacgcagcagtccccgcaggcttttgagacacacattaggagaggactctgcccgctgtctgtctcacaatctgctcgaaatatcttggtcaggaatctcaggatgtctagtgaccccgagtgaggtgctgccttttattcctgagcatctttggaagcaggaagcagggagcaacggtagcgagaggtattcggatctgagtatcagcaggaagaagaaacagaggaagaagtcccccataaggaaggcgtgaggagcgcangaagcgctgtttccctgcctgagatctttattctactaggtctttattctacgtagcccgataccctgtaaaattctggaaganaaagctaggggtttaaagnttggtaatcttctcanaagatctgcgtcttnggtgaccggaaagaactaagggtaaagtgcttganaaaccttttttttacagccanaanaaccagccnaaacccnnccttgaaaatgaccgggattgatctaacannttttccccaaggaaaacctcggccctttgaatttgaaggcnctgaaaaatcgntaaatggttttnatataaacntntgccttttttgatataaanaacaaaaaggcttttaacccaaanntttnttttggaaattttgnaaaacnntttataannaggaatg

SEQ ID NO: 3116 - DNA, 893 bp, Homo sapiens
  misc_feature 3, 408, 582, 597, 614, 645, 670, 673, 687, 692, 696, 705,709, 727, 737, 738, 739, 741, 748, 750, 756, 757, 775, 776,779, 780, 783, 784, 787, 788, 789, 791, 792, 796, 798, 799,800, 803, 804, 805, 806, 807, 810, 813, 816, 817, 818: n = A,T,C or G
  misc_feature 819, 821, 823, 824, 827, 835, 836, 838, 844, 850, 851, 853,856, 861, 868, 870, 884, 887: n = A,T,C or G
cgncgactactatagggcgaattggagctccccgcggtggcggccgaggtacacacagttaacccaaaacaggcctctctgaaaaagccattgccatggactgccagacagacaatgacaagacacaaataccttctggtgtgtgagccacgggacatgtgagcttcccgctgatgctcctcttatatcaaagatcactttcacaagatgagcgactcaatatcttttatcaaaccaatgatcacctgcaagctatggtatatttttgcagctgtgtagagctatgtggcatgagaatgtgggacttataaattgctgatccaataaatagacattatgggcaacagtgtcttatcagctagtgtgtacctgcccgggccggccgctctagaactagtggatcccccnggctgcaggaattcgatatcaagcttatcgatccgtcgacctcgagggggggcccggtacccagcttttgttccctttagtgagggttaattgcgcgcttggcgtaatcatgggcatagctgtttcctgtgtgaaatttgttatcccgttcaccaattcccacaacatacgaanccgggagcataaagngtaaaagcccggggggnctaatgagtgagctaactaacatttaattgnttggggctaatggcccggttttcantcngggaaacctgttgngcccncttnattaaatanattnggccaccccccggggganaggcgggttnnntnttggggncnttttcnntttcttggttattgactnnttnnccnnggnnntnngggntnnnggnnnnnggnttnaannnnantnnaangggggganncngggttntccccnnanatnggggnttccccngnaaaaaaattgggcnaanggccct

SEQ ID NO: 3117 - DNA, 879 bp, Homo sapiens
  misc_feature 6, 10, 517, 566, 572, 577, 582, 590, 594, 610, 613, 616,620, 622, 623, 624, 633, 644, 647, 654, 656, 660, 664, 676,692, 696, 698, 704, 713, 718, 719, 723, 724, 725, 740, 742,744, 745, 746, 750, 758, 759, 760, 761, 762, 765, 766: n = A,T,C or G
  misc_feature 770, 771, 779, 783, 784, 790, 797, 799, 801, 803, 805, 807,808, 813, 818, 822, 823, 824, 826, 827, 828, 829, 831, 832,833, 841, 843, 844, 848, 855, 859, 861, 862, 865, 870, 874,875: n = A,T,C or G
ttgcgncgtngagcgcgcgtaatacgactactatagggcgaattggagctccaccgcggtggcggcccgaggtactcaagccacctgcctgtcatggccccccaaaatgctgggattgcaggccaccataaccggtcatcggggcaactatccttcagggcttcctccagtagggctccccaggttggccttgagggccacaataaaaaatctgacttagctatactccttccctgtccccaaccacagttattcttgtggatgaggcaaatggcagcaggacagctggagtataccagagttgactcatttattttatgcatgcttagtgtggcatccctggggacatgaaattccagtgaaatccaagtctttgtgctggagaagctcatagatctgtggaggaggcagatgcccacccactcactgtacctgcccgggcggccgctctagaactagtggatcccccgggctgcaggaattcgatatcaagcttatcgatacccgtcaccttganggggggcccggtacccagcttttgttcctttaatgaagggttaattgcncgcttngcgtnatcangggtcatnactngtttcttgtgtgaaanttnttnttcngnnnaacaatttnccacaaaattncgnacccggnanccanaaangggtaaaacctnggggggggcctaaatnaatnancttaantcacattantatgnnttgnnnttaatttccgttttncnannngggnaaaacttnnnnntcnngttnntttaaaanaaanngccaanaccccgnananangnanntttantaatntagnnntnnnntnnnttttattntnntaanaaatctnatananntangtaantttnntacg

SEQ ID NO: 3118 - DNA, 907 bp, Homo sapiens
  misc_feature 3, 395, 428, 543, 581, 589, 620, 639, 640, 665, 673, 676,688, 718, 724, 733, 735, 737, 743, 757, 758, 769, 782, 784,792, 798, 809, 814, 816, 831, 835, 840, 845, 848, 850, 867,868, 871, 872, 873, 876, 882, 890, 893, 905: n = A,T,C or G
cgnccgactactataggggcgaattggagctcccccgcggtggcggccgcccgggcaggtactcttaaaatacccccttaaaaaagctaaaacaccactttggcaaaaattaaggcatttaacaattcatgtcttagtgtatttcctgttatcatttgctcagatatcataagctgtggttcattcatcaatttcctacagctttgaatctaaggctacaaaagtcccactgctgttaaatcctggagcagctttttacacaattctacaatcctcttgtcttcaggttaccgagagcctatgaaagcctggaaaagcccccaagggagtgccactgaacaactcttcgccagaagtgggattttgcttgaatatatcagccaatcgatagcatncacagagcagtcagggaagtctttgaaacttgnctgaatttacacacaagatcagacccaccggctgtttgggcttaatgagaccttagagatcacctagtctggggttttcattctccatatgaaaaaaattgaggctcaagggctnggaccatgacttggtcttgatgtcacccattaatggcnagagctgnaacccttaattattttcccatactaccaggncagggcttaaacagaccannttacctgccatgcaggagttccctnggccggtntanaaatagggggtncccccggctggcaggaattcgattttaagntttttngatacccgncnanccttangggggggccccggnncccaacttttngttcccttttagngnggggtaanatggcnccccttggggnaaatnangggcaaagggggttncctnggggnaaatngtntnccttcaaattcccaaannaannnaanccgggncataaagntgnaaacctgggggnct

SEQ ID NO: 3119 - DNA, 961 bp, Homo sapiens
  misc_feature 258, 327, 384, 393, 397, 399, 400, 401, 402, 403, 408, 410,421, 423, 424, 425, 426, 437, 452, 456, 463, 466, 479, 482,494, 499, 501, 504, 506, 508, 509, 523, 525, 534, 537, 538,541, 546, 547, 550, 557, 560, 561, 563, 568, 574, 575: n = A,T,C or G
  misc_feature 579, 581, 584, 594, 596, 599, 603, 607, 610, 615, 620, 632,635, 638, 639, 641, 648, 649, 654, 659, 662, 670, 671, 672,673, 674, 678, 679, 685, 691, 696, 697, 702, 705, 710, 719,729, 735, 741, 744, 767, 768, 770, 778, 780, 781, 785: n = A,T,C or G
  misc_feature 794, 796, 800, 801, 804, 808, 810, 813, 822, 830, 840, 841,850, 856, 858, 863, 865, 870, 871, 873, 878, 884, 889, 898,899, 904, 911, 916, 924, 929, 933, 934, 943, 946, 953, 954: n = A,T,C or G
cgtcgactactactactatagggcgaattggagctccccgcggtggcggcccgaggtactcacatgctgagggtaagaggcagaatttcttttgcttgtaagtaacaggatcttttccagagcctgggtctgaagaccccaggtgtagatggaacttcagttatgactggatccgtgagttcaaaggatgccactccccgcgtacctgcccgggcggccgctctagaactagtggatcccccgggctgcaggaattcngatatcaagcttatcgataccgtcgacctcaagggggggcccggtacccagcttttgttccctttagtnagggttaattgccccgcttggcgtaatcattggtcatagctgattctgtgttgaaanttgttatcncgcntnnnnntgccncncaaccatactntnnnnggagcataaanggggaaaagcctggnggtncctaatnaantgaagctaacttncantattaattgcgnttgcngnttnantnncccgatttccaagntnggaaaaacnttnntgngccannttncattaantgnntncgggncaacgnncctngntgnagccgcttancntanttgngcgnttnttccnattcntatgttcaattngcntanntngggctcnnttagnttcgnatnctggcatnnnnntttnnagttantcaaanggtgnnaagantgngtttntccaacaanttcgcggggntagacncatganaanaaacatttgtgcaaaaaggcccnncnaaaggtcngnnaacnggtaaaaantncccnnttnattngncgnttttttctnatggtgtnacgccccctnngcgtgtttnccaaananccatncntttanntnaaaangttgtnaatantcgtctctnngactnttaaaanaatcntcgttgtnttcancttnngaataatanttnggggacnncatttct

SEQ ID NO: 3120 - DNA, 966 bp, Homo sapiens
  misc_feature 6, 350, 369, 387, 415, 471, 479, 481, 490, 502, 506, 513,520, 541, 542, 547, 550, 558, 561, 563, 565, 569, 575, 576,588, 595, 600, 609, 610, 611, 613, 616, 619, 621, 632, 639,642, 643, 644, 647, 648, 649, 656, 657, 659, 664, 665: n = A,T,C or G
  misc_feature 666, 673, 690, 693, 698, 699, 703, 710, 711, 712, 724, 725,726, 727, 731, 732, 744, 754, 755, 757, 770, 773, 784, 786,791, 796, 797, 799, 800, 803, 805, 807, 808, 810, 816, 817,818, 820, 823, 824, 827, 829, 838, 843, 844, 845, 846: n = A,T,C or G
  misc_feature 848, 849, 850, 853, 859, 861, 864, 865, 867, 869, 871, 874,898, 903, 905, 906, 909, 910, 911, 916, 917, 924, 925, 926,928, 934, 935, 936, 942, 943, 946, 948, 949, 951, 957, 960,961, 962: n = A,T,C or G
cgtccnttatacgactcctatagggcgaattggagctccccgcggtggcggcccgcccgggcaggtacttaggactatggagaaacaatggaagacattaattctgcttgtcttgatggtaagggtggggatgaaaatacagatcgaatttgggggagcatgttaaggttaggggaatagagatagcttatatttagaacaagttagtagagactgtatgattttccaaatagagaagggtaaaaagacattccatagaggaagaaaattacatgcaaaaccacagagaccttagtttataaagagtaactgggtatggccgggtgcggtggctcacgcctgtaatcccnggcctttgagaggcttgangaggggttgatcattgangtcaggagatcgagaccatccttggctnacacggtgaaaccccgtctttacctaaaaattcaaaaaattagctggggtgtggtnggtgggantncctgcattnccatctactttnggangcttggnggcatgnagaattggtggtgaacccctnngaggncanatctttgnatntntncccnaaatcnntgccacttgtanttccaantcctntttgtacannngnctnttntncatttttctanaataaanatnnnatnnngaatatnncnccctnnnccgcttntataaacctaaatggtntcnccccnnggcntccaatnnnattccaataatnnnngccnnaatttttacccnttgatcctcnnanggggggggccctnttncccatactttngncctcntttanngnnggntntnntnaccctnnncnttnntantngggctattnttggnnnncnnnttnaaattntnatnncncntnaanattcccccttatttatttatctgntgtcnannttnnnaatanntcgtgtnnncnatatcnnngtgctnnttntnnanattacnttnnnttcg

SEQ ID NO: 3121 - DNA, 802 bp, Homo sapiens
  misc_feature 619, 659, 675, 676, 690, 693, 764, 777, 778, 792, 800: n = A,T,C or G
gactactatagggcgaattggagctccaccgcggtggcggccgcccgggcaggtacgcggggggacttacaagatggataggacctggtggcagctgtccttgaggaagccagagcctggagagacagatctcatgttatagcagagtacctcggccgctctagaactagtggatcccccgggctgcaggaattcgatatcaagcttatcgataccgtcgacctcgagggggggcccggtacccagcttttgttccctttagtgagggttaattgcgcgcttggcgtaatcatggtcatagctgtttcctgtgtgaaattgttatccgctcacaattccacacaacatacgagccgggagcataaagtgtaaagcctggggtgcctaatgagtgagctaactcacattaattgcgttgcgctcactgcccgctttccagtcgggaaacctgtcgtgccagctgcattaatgaatcggccaacgcgcggggagaggcggtttgccgtattgggcgctcttccgctttctcgctcacttgactcgctgcgctcggtcgttcggctgcggcgagcggtatcagctcacttcaaaggcggtaataccggttatccacagaatnagggggattaacgcaaggaaaagaacatgtgagccaaaangccagcaaaaaggccnnggaaccgtaaaaanggncgcgtttgcttggcgttttttccataaggctcccgccccccttgaccgaagcattacaaaaatccgacctnaaagtcaaaaggnnggggaaaaccccanaagggacntt

SEQ ID NO: 3122 - DNA, 856 bp, Homo sapiens
  misc_feature 455, 533, 559, 587, 603, 634, 649, 674, 676, 686, 689, 696,698, 700, 706, 712, 713, 716, 724, 732, 734, 738, 741, 745,750, 751, 762, 770, 777, 778, 780, 783, 791, 801, 804, 812,813, 822, 824, 825, 826, 830, 841, 846, 847: n = A,T,C or G
tagcgcgtatcgactcactatagggcgaattggagctccccgcggtggcggccgcccgggcaggtactttcttggcatcacatggtttggttctggcacagccaagcctagaacccaaccttcctactgcctgctgtgtttcttcaccacccagttgctccttggcaagtgaaccaattcaaaggctgtcttacttgtccaaggacagagagaaaggtgcatcctgggtgactggaaatgggagtgggagggagaggatggaggcagcagacattgaaagtaagtattgactagacttggtgacagaatggctcaactcggctcaatgaaaaaagggagtccaaaagccaaactttcaaccctggtgggatggctatacagttaaagtaaagtaaaatcagtagaatggtgttggtttttttgcttcatgatgaatttaaagggactgccttatncagatagaaatatgttaaagatataggtaggagaggtagctccattaaagatcaagattttgagattaatgccacaanaaggagagcttgaacccttgtacctnggcccgtctaaaactaatggatcccccnggcttgcaggaattcnatatcaagcttatcgatacccgtcgacctcnaggggggggcccggnaccccaacttttggtccctttaatnangggtaattgnccncttggcntnancatggncaaaanntgnttcctgtntgaaatgntntccnctnacanttccnncaacttacaancccgggancttaaanngnaancctggggngcctatgagnganctaacctnnattaattcntnnncctnctgcccctttnaaatnngggaaacct

SEQ ID NO: 3123 - DNA, 870 bp, Homo sapiens
  misc_feature 5, 16, 191, 203, 230, 252, 284, 321, 394, 425, 450, 479,518, 588, 628, 681, 690, 700, 749, 754, 765, 768, 779, 780,782, 783, 791, 802, 814, 817, 818, 826, 837, 844, 850, 861,862, 869: n = A,T,C or G
cacgncactactatanggcgaattggagctccccgcggtggcggccgaggtacgcggggacattgtagtgggtgtgatggaacaggctctcagctgtgcattggggtgctttaaattctcatcaaggaactcatcttttggagtaagatactgtgtctccgggaggcctttgctggaaagaaaatacattngctgtgaaagtncataaagacaatgaatccttaactaangttaataacagagtgggagcangttctggccatgtgtcaggcgatcataagcancaattctgaacggcttcccgatatcaacatctaccanctgaaggtgctcgactgcgccatggatgcctgcatcaacctcggcctgttggaggaagccttgttctatggtncctgcccgggcggccgctctagaactagtgnatcccccggctgcaagaattcgatntcaagcttatcgataccgtcgacctcganggggggcccggtcccagcttttgttccctttagtgaggnttaattgccccttggcgtaaatcatggtcatagctgtttcctgtgtgaaattgttatccgctcacaattncacacaacatacgatcccgggagcataaagtgtaaagccnggggtgcctaatgagtgagctactcacattaatggcggtgcctcactgccccntttccatcnggaaacctgnctgccactggattaatgaatcggccacccgcggggaaaagcggttgctnttggngctttcccttnctngttactgcttnntnncttggtcntcgcttggggnaagcggattaanttnntcaaaggnggaatacggtnttcccanaattangggttaccccnnaaaaacnt

SEQ ID NO: 3124 - DNA, 896 bp, Homo sapiens
  misc_feature 3, 7, 8, 9, 12, 18, 19, 31, 388, 477, 566, 579, 628, 630,661, 679, 731, 739, 742, 764, 770, 814, 831, 848, 868: n = A,T,C or G
tangtcnnntantatacnnctatagggcgantcggagctccaccgcggtggcggcccgcccgggcaggtacttactttgattcctctagtgcaagattatagtggggttatacctgagacttcaataaatgtttgactaactaaactaaaatagcttagggtaaggactacttccccaaacgcccttttaaacatgtgagaaagggaatctccctgacatactggtatggccatttgtagcaatatactgagagtgacttgggtgattttctggggtgatcaaccacattccatgagcaggttaactgtggaagacacctgcccttgagcatcgcgtttgggccgcatgcgtcaatggggaaatttgtgtttccattctgcttcttgntttgccttcacaacttcaagggatagaagcgtattccatttttagttaataatcaagctctctggggcttccatgtaatgagtcaaganactgatgactgactccactctgctcattatcatgtctcccaaaaacaacccgagaacccactgtgtcaagtgaagctttaatttttcangggaggttttctncattgagaccaatacatcttttcttgtgacagatccaggttaccatatntncttatttttaactgtcgaaaagacagttaanctgcaacaagaatatggngagtttaccaattttaatacttggagccccaaacaaaggatcagtgttgcangctgtctnttnttgacttttttcaacctcttcntaccanataaccaggatgatattttttctgctttcaacatgatgaatctntttttttatattaactnttaaaattgaattgcanccaaatattcctctcactgnattaaaattttctaaaagacatgaacct

SEQ ID NO: 3125 - DNA, 889 bp, Homo sapiens
  misc_feature 5, 7, 664, 670, 713, 722, 759, 767, 793, 798, 803, 822, 832,834, 839, 843, 855, 871, 881, 883: n = A,T,C or G
tagtntntactatagggcgaattggagctcccccgcggtggcggccgaggtacacacagttaaccacaaaacaggcctctctgaaaaagccattgccatggactgccagacagacaatgacaagacacaaataccttctggtgtgtgagccacgggacatgtgagcttccccgctgatgctctcttatatcaaagatcactttcacaagatgagcgactcaatatcttttatcaaaccaatggtcacctgcaagctatggtatatttttgcagctgtgtagagctatgtggcatgagaatgtgggacttataaattgctgatccaataaatagacattatgggcaacagtgtcttatcagctagtgtgtacctgcccgggcggccgctctagaactagtggatcccccgggctgcaggaattcgatatcaagcttatcgataccgtcgacctcgagggggggcccggtacccagcttttgttccctttagtgagggttaattgcgcgcttggcgtaatcatggtcatagctgtttcctgtgtgaaattgttatccgctcacaattccacacaacatacgagccgggagcataaagtgtaaagcctggggtgcctaatgagtgagctaactcacattaattgcgttgcgctcactgcccgctttncagtcnggaaacctgtcgtgccagctgcattaatgaatcggccaacccncggggagangcggtttgcgtattgggcgcttttcgcttcttggttnactgactngctgggcttggtcgttcggctgcggngagcngtttnagctcacttaaaaggcggnaatacgggtntncccanaatnaggggatacccngggaaaaacatgtgancaaaaggccncnaaaagg

SEQ ID NO: 3126 - DNA, 888 bp, Homo sapiens
  misc_feature 1, 4, 660, 666, 706, 727, 738, 739, 766, 770, 784, 790, 819,825, 829, 831, 853, 880, 887, 888: n = A,T,C or G
ncgncactactatagggcgaattggagctccccgcggtggcggccgcccgggcaggtacgcggggggactggggagaacttcggaggatgttcatgtccaggagcagccccacgccctgtatggtcggtgtctagagcctcacagcaactaagaccaacccagctctcagaagaaggaatgtcaaaatgtcatgttcaattttacattcagtgcctggaatcttttcttcacaattgaaatgaaatgtgctgaaggaggtgaatccatgcattaatcttcagctcacaaaggaaatactacataagaagcaagaccacagactcaagacggacataattggattttttttgccatggcctggaaagaaaggtacctcggccgctctagaactagtggatcccccgggctgcaggaattcgatatcaagcttatcgataccgtcgacctcgagggggggcccggtacccagcttttgttccctttagtgagggttaattgcgcgcttggcgtaatcatggtcatagctgtttcctgtgtgaaattgttatccgctcacaattccacacaacatacgagccgggagcataaagtgtaaagcctggggtgcctaatgagtgagctaacttacattaattgcgttgcgcttactgcccgctttncagtcnggaaacctgtcgtgccactgcattaatgaatcggccaacnccccgggaaaagcggtttgcnttttgggcgcnntttcgctttcttgttaaattgacttgnttgngcttggtcgttcgnttcggnaagcggtattaactcactcaaaaggcggnaatacngttntncacagaattaggggataccccngaaaaaacatttgaacaaaaggccacnaaaggcnn

SEQ ID NO: 3127 - DNA, 891 bp, Homo sapiens
  misc_feature 3, 601, 606, 676, 679, 689, 708, 722, 726, 742, 771, 791,802, 834, 839, 856, 865, 878, 890: n = A,T,C or G
cgncgctcctatagggcgaattggagctccccgcggtggcggccgcccgggcaggtactgagcacagcacagtatggctatcatagagggaaaattaaactgagtcacaaaatgcattttataataacacagtaatgcatttcatccctgggtataaattgaaaatgtcctattacagagtgttttaaaaattcactggaattattgttctagcataggtaagtttgaataaaaagagtaaaatgaaatcagtctagtcttaaaattgaacttttaaaacaagaaaaatcattacaactactaagattatttttaaaggtatcacttaatgacttaattacatcttgctatcattatctctattttgtatacaatccatttctgtattttaccataactgggaaaattaagaatatacgtgatctttaaccagatcaaaaaccttcatatcccatgctgattattcagctgcctctgaatcctgtatcttcacgctgctctcacgtgtgctgcctgataagtatatgtgaggttgtaagttattccttactcgcggttccgggtgctcttgtggattttgacctggagagtcttttcttanggcanggtctttcacatggtctacttctactttattagacccataattaaggtgtttaagggccaagaatgaaantantactcaacantttaccatgccttcatcantttcatttcaccanaagntttcagttgggccagnttcaccggttcttgatggccaacattatnggtttattgagcgtaccctnggccggtctanaactaatggatcccccggcctgcaggaattcnatttnaagcctattgatcccgncaacctgangggggggccgggncccacttttttnt

SEQ ID NO: 3128 - DNA, 890 bp, Homo sapiens
  misc_feature 2, 24, 32, 602, 647, 682, 735, 786, 788, 816, 817, 826, 849,851, 852, 866, 873, 884: n = A,T,C or G
tnttcgctcactctactactatanggcgaatnggagctccccgcggtggcggccgcccgggcaggtacatgacagataaatacagttatttccggcaatcattagtctcaataagaaaatgattctcttttctaagatagtctaagaagtgggaggcttccaaactaagtgtcaggacttaccaggtggtaggtgggccatgatattatcaatcccctcagcccctctgcacatagactgaggcatccagagtccctggatgagtcttgcccatgctgccttgtaatatattccaaatattatcatttttaaaatcatttttccaaagacaggggtctctcaaggttacccaggcaggcattgaactcctgggctcaaatgattcttttacctcagcctcctgagtagctgggattgaaggtgcccatcaccacgcctggccacttttgtgtcttcacatgaaagctattggaaattattgactaaggaacctcatatgatgaaattctacgttgaaaagttgaggtagaaagtgggcagataaattttcctacttaagaattataaatctatagagataaaagtttattatgaatgcttangtgtctggattcttttgctgtattattcatcttctagtttcctgncttaatagtcaccttttagtgaacctgttcaaatnaggactttaatgaatatccttattggggtaaatctctattctctgcttcactncttttataccttaatttggggggataaatgcaaaattttaaaaaggaatancncccggagacctttaatgttttggaccgnnaaataaaancattattcaatcaaatgtctgantnnatctatgtaccctnggccgtnttgaacctagnggtcct

SEQ ID NO: 3129 - DNA, 406 bp, Homo sapiens
cgtatacgactcactatagggcgaattggagctccaccgcggtggcggccgaggtactcatctgtgagaagtggaataattcaaagattcacaatggctttcctcccccaaggtcatcagtgttaactgccaactagatccctagcccaccctctctgctcatccgagcagcagatgccaggtgggagttgcttttatgcacatgggatgtcactgtgactctgttcctgtcactctgtaacataagctcatttcatttttctctaggtatataggtatggatttaattattttagtcattacataatagtccacagtttagattggccacagctaaccattctgtatatcatggacattcaggctcttatagttttaagctgcttaattattcagactatgatgc

SEQ ID NO: 3130 - DNA, 403 bp, Homo sapiens
cgcgtaatacgactcactatagggcgaattggagctccaccgcggtggcggccgaggtacaaaccattgcaggagctgaaacatcaacagctacccatactactgctaataattcaggctctcttggctctgagaacttcagcaaaaaagctgaaaaggctaacctataacatgtaaataggttctcatttatcatcttgataactccacttggctgattcaaatacatatggctacacaccataagctaaagaaacacctcctaagagcctgctagatgtcaggaaagcaataaagggcaagcagggaacccaaagttggccccagggtgtcacgagtcaggaaagtaatataaagaatatggcatgtagctgggtgcggtggctcacgcctataatcccaa

SEQ ID NO: 3131 - DNA, 409 bp, Homo sapiens
gcgtatacgactcactatagggcgaattggagctccaccgcggtggcggccgaggtacatgaaaatgcacaagactcttcccaccactgacctcagtgtctgccccaggaagaagaagaaaagttttggctcgaaaatgctcttcaaggacacaaggcggtcaccaaattacagcatgcagctttcaggggatgactaaaaggatgaggatgatgactcatagctggggacagaagcgaatccctcttgctgacctgtgccctcctttgcaccggtgttctttctcagccctcctggggtgaggatgtgactgtcccctgggaaagcttggcaagataagagtaggagcacaaagaaggaggtagatagagagtggtttgcagtcgatactcagtggtttgggtaggct

SEQ ID NO: 3132 - DNA, 409 bp, Homo sapiens
gagcgcgcgtaatacgactcactatagggcgaattggagctccaccgcggtggcggccgaggtacgcgggggggtccccagtggaacatgcagttcttaggacagagcaggggatggggccagctgacctagtgaggaaatttaggctcctgcatcagtctttctgcataagtaaagaaaggacagttgtgctaattgacattggctatgaggtcatagccacagacaggattatgaaagatgcaaatatgcgaaacatggcacatgacctccctccctcaagctaggcccttgctttgtgtggttgggaaatgttgggagtagcagagagaggacctaggcaaatagatgggcatttccttgaagaaatcggttttccagtaacatctgggttgtgttgcagctggtt

SEQ ID NO: 3133 - DNA, 399 bp, Homo sapiens
  misc_feature 5, 361, 368, 382: n = A,T,C or G
gagcnccgcgtaatacgactcactatagggcgaattggagctccaccgcggtggcggccgcccgggcaggtacgcggggtgtgtgtgtgtgtgtgtgtgtgtgtgtgtgtatgtatgtgtatgtaaaacagagaaagatagtggtccagaggccaacacacctggaatctatttgtgagggtccctgcttcagtccacgaattgggccattcatttatttctcagtaagtgaacatctgggattcagtttgaaacgccaataagtttggatgggatcgcaaagctgtggttgggatgtggaactgctcgcctgaggtgggagtgagcgaggtgagcgggggctcttaaactatttctgcanacttcanttcaaatgcaatanccagagggttgagaaat

SEQ ID NO: 3134 - DNA, 408 bp, Homo sapiens
gagcgcgcgtaatacgactcactatagggcgaattggagctccaccgcggtggcggccgaggtacgcgggatatggtttgagatattattgcttgtgtttacatttccacatttgaggcaaagttagactccaagttgaattcattaaattttgattccaacattctgttcttcctttgggcacagaattcctatgaaatgaaacactgggttttgttccagaacaagaacagactaacccaaaatttctcctgggggaaaaaaaaagagtaaaattacatttctcattgaaaattgtatttctcattgaggaagggtgtgttactttattatataaaatgccttatcttcattataagaaaaaaatgcccttgcatttgtcactgttgccatacattaggcctgtat

SEQ ID NO: 3135 - DNA, 405 bp, Homo sapiens
  misc_feature 98, 280, 373, 405: n = A,T,C or G
gcgcgcgtaatacgactcactatagggcgaattggagctccaccgcggtggcggccgcccgggcaggtacaagttacctaccctttccttgcctcagnttcctcctttgtgacaatggggacaataacagaaactgccacacaagagggatgttagagaactgaccaagcgaatgtaagtaatgacttggagcaacgtatggctaagagtaagttaggggttgttacgatgactttcctgagataaacagggagatcttttagctgtgggtcaagtgcangaggacagtggagctcaaggcctaatggaaactaacactaattgtacctcggccgctctagaactagtggatcccccgggctgcaggaattcnatatcaagcttatcgataccgtcgacctcgan

SEQ ID NO: 3136 - DNA, 400 bp, Homo sapiens
  misc_feature 5: n = A,T,C or G
gagcnccccgtaataccgactcactatagggcgaattggagctccaccgcggtggcggccgaggtacaatggaaactcaacggattacactattttctaaagggccactcataaaaatgaagttgggttatggttttttttttcccccttccattctaatttaggaagtggaaagtcacagcaagggcaggggcttacccacggtgacacagcttagcacagcgtcatcatttcatcctgtgcttcccatggattctatcctctcaaagattaactaagcattttgctatttgatctgggtagagggaaaaggtgcccaagacatgagaagataaaattcttgacaggaggaaccaaggttaaaacatgtaacaaggttcactcacttaaaaatatataa

SEQ ID NO: 3137 - DNA, 412 bp, Homo sapiens
  misc_feature 244, 245, 250, 297, 322, 327, 381, 389, 409: n = A,T,C or G
gagcgcgcgtaatacgactcactatagggcgaattggagctccaccgcggtggcggccgaggtacagagcctggcacgtagcaagtgttgaaatatctcttggagagagagaaaaaaaatgaatctattaaaatgtctctatgatgcactgcggaagctagacttggtagatcgagtttaagggaatgaagagggggtgaatgtttgctacttccgtatatttggagtatttgataaaacagannaccantttctcttcaaacttcatgtcggtttgtaggccaccgctaccagggnttagggtacctgcccgggcggccgntctanaactagtggatcccccgggctgcaggaattcgatatcaagcttatcgataccgncgacctcnagggggggcccggtacccanctc

SEQ ID NO: 3138 - DNA, 404 bp, Homo sapiens
cgcgtaatacgactcactatagggcgaattggagctccaccgcggtggcggccgaggtactcaagccacctgcctgtcatggccccccaaaatgctgggattgcaggccaccataaccggtcatcggggcaactatccttcagggcttcctccagtagggctccccaggttggccttgagggccacaataaaaaatctgacttagctatactccttccctgtccccaaccacagttattcttgtggatgaggcaaatggcagcaggacagctggagtataccagagttgactcatttattttatgcatgcttagtgtggcatccctggggacatgaaattccagtgaaatccagtctttgtgctggagaagctcatagatctgtggaggaggcagatgcccacc

SEQ ID NO: 3139 - DNA, 405 bp, Homo sapiens
cgcgtaatacgactcactatagggcgaattggagctccaccgcggtggcggccgaggtacgcgggagtaactaatagaaaaaactctaaaatgcatcgggagggaaacacatttaaagctctggaggcataaaaacctgcatataaattcaggccgcaccgattgataagtgtgttactttctcaatttacttattctttcttaaccttagttttctcatcagcaaactatcttaattacatgactttgtaatccataaagcttgcttcaagctcttagcatgcacacagcacatctgcaaaagtaagcatttgccactttcggttctcaggataacatattcacccttccctacctactagcaagctgtgctcacaagattaatcaggtagtgctagagagaag

SEQ ID NO: 3140 - DNA, 413 bp, Homo sapiens
gagcgcgcgtaatacgactcactatagggcgaattggagctccaccgcggtggcggccgaggtacacgagctaaaggaatccaattcactatcccagggttgcatcgcagtggatttcatacaggccaagaaaaaacaaaaacgtttttaagcctccatcctcagatcaaaacaataaacaaaaaattatgatatccttaacaatgtcctgggttaatattttattccataaatcaagttttcagaactctttaccctctaagagatacagattgaacatgcctttataggctctgaatttcataacttctaatctatgctcataacctggaaaatgtcatcatactgaatgcccacatgaaaaggtacctgcccgggcggccgctctagaactagtggatcccccgggctgc

SEQ ID NO: 3141 - DNA, 401 bp, Homo sapiens
cgcgtaatacgactcactatagggcgaattggagctccaccgcggtggcggccgaggtacttggactgtgagacccctgaaggcacagacaatgtggccctggcacttggcatgctgtctagcacatcacagaccctcaatgaatactataggttgaattaaatgtaggacctaagggagtaaaaagaacagcgtcctccagcatttatacagctggaggccaggaatcttccctctggctttgcactacagtaaagatatttacttatttttttaacaaagttttattttaggctcaggagaatacatgtgcatgtttcttctataggtaaactcgtgtcatggcggtttgttgtacctgcccgggcggccgctctagaactagtggatcccccgggctg

SEQ ID NO: 3142 - DNA, 407 bp, Homo sapiens
  misc_feature 74, 141, 166, 176, 201, 230, 252, 261, 272, 285, 313, 325,341, 343, 372, 377, 383, 388, 389, 403: n = A,T,C or G
agcgcgcgtaatacgactcactatagggcgaattggagctccaccgcggtggcggccgcccgggcaggtacgcngggaggttgtggcggcggcgccctgctcttccccgctcgtctggggcttctgctggctagtgggganaagtgctcttctaggggggcttttntggcccttgncaggggtttggagttggagtcacangggccaataactcatcaccccaacacttntgaggtggctccttgtgccacngactccaangagtccttcanctactgaacactnaaagctgaggagggcaatttaggttttnatgctgtaccanaaatcttctgacaatnanttactggaacttggaaaaaaggaactgantgcantacctnggccnntctacaactagtgnatcc

SEQ ID NO: 3143 - DNA, 415 bp, Homo sapiens
gagcgcgcgtaataccgactcactatagggcgaattggagctccaccgcggtggcggccgaggtacacctgtaatggctaccccgctggctcagagctctgcctcaccgccctgccccggcacctgcaagccagtgtgccacttttttgatgttgtatgtttttaatattccctgagacagactccagagttctgagttttcttacttggggtgtcaaattatattccaggaaccaatttgggttttcctggcttctggttaaaaagctggacagattttgagttgtttgctcttagttctctcataaactgcactatttttagggcactattttgtagaacacaagatttttcaggaagtatattgaaaggcctgtacctgcccgggcggccgctctagaactagtggatcccc

SEQ ID NO: 3144 - DNA, 410 bp, Homo sapiens
gagcgcgcgtaatacgactcactatagggcgaattggagctccaccgcggtggcggccgaggtacaagttgtctttatgctgcgagataagtcctctcttggtttgagctcccaccttttcagtgaactcttacattttgggggatctgctcttgtaaaggacatcctttctggtgagtattcttttggtttaatttttggtttggttatttgtgcatgaatttaatctcattaggaaacaagttaagttgaatagaccaactagtgaattaatccgtcaccaaaatatatgtttttggcatttacctgtttattttgaaactctttgtaagaaatgtaaacctgtaatgataatctctgctttgtaaggatatctccctctctgacacctaaaacactagatgctttct

SEQ ID NO: 3145 - DNA, 415 bp, Homo sapiens
  misc_feature 5: n = A,T,C or G
gagcnccgcgtaatacgactcactatagggcgaattggagctccaccgcggtggcggccgaggtactttagctactcgaacagcatgcagacagggtaagaatcacagaacctggccgaatacacagctcattcagcatcaaccacaaggtggcgctgcttcaatgctgattcagatgcacagccctgctagagacgtttctccaccatcaaggctacatttgcttgtgtcctttccaggccggccaaaaatgctttctccttaaggtttcaggtaatacacatatggctaacagtctatattgagaaagtaaaccactgaggcacagcaactccctacccccatcttaggacagactctgactgcacctgagaggacttatctcagcctcccttagttaacaaggcaacaaagt

SEQ ID NO: 3146 - DNA, 383 bp, Homo sapiens
gcgtaatacgactcactatagggcgaattggagctccaccgcggtggcggccgtcggctcccagctactcacagagaacgtttctgtttctgacagcagagtaagagaagaggtgagaagagagacagcccattctcttttggcctaattcctaaggaatcatgcctctgccttcgggccattctcaagtcttgttcaaggataaaatgatttattgatggccgtaattaaaaagcaatgccaacggaagcagcgtcagcatttttcatttatacctcggccgctctagaactagtggatcccccgggctgcaggaattcgatatcaagcttatcgataccgtcgacctcgagggggggcccggtacccagcttttgttccct

SEQ ID NO: 3147 - DNA, 859 bp, Homo sapiens
  misc_feature 558, 639, 666, 707, 715, 718, 759, 780, 782, 851, 858: n = A,T,C or G
cgcccgtaatcgactactatagggcgaattggagctcccccgcggtggcggccgcccgggcaggtacgcgggtagggatgcagaactggccacagtcagggctggccaacaagggatgggatggcaagggaaccagtgggagactgtttacacctttgacttcctcttcacaggtcaaggcaggactgtagcattaggtctcagagatgcaatgaacaggacaaatacacttccccttcatctggacctgaggctctgggcaagtcagtacctcggccgctctagaactagtggatcccccgggctgcaggaattcgatatcaagcttatcgataccgtcgacctcgagggggggcccggtacccagcttttgttccctttagtgagggttaattgcgcgcttggcgtaatcatggtcatagctgtttcctgtgtgaaattgttatccgctcacaattccacacaacatacgagccgggagcataaagtgtaaagcctggggtgcctaatgagtgagctaactcacattaattgcgttgcgctcactggcccgctttncagtcgggaaacctgtcgtgccagcttgcattaatgaatcggccaacccccggggaaaggccgtttgcgtattgggcgctntttcgctttcttgcttaattgactcgnttgcgctcggtcgttcgcttgcggcgagcggtattaacttnattcaaangcnggaattccggttattcacaaaaatcaggggataacgcaggnaaagaacatgttgaccaaaangncaacaaaaaggccaggaaccctaaaaaggcccgtttcttggcgtttttcataggctccgccccctgacnacataana

SEQ ID NO: 3148 - DNA, 408 bp, Homo sapiens
cgtaatacgactcacctatagggcgaattggagctccaccgcggtggcggccgcccgggcaggtactatgttcacccaggaaacagccacttaggacactggtgagctactccttagggggttgtggaaatagagcccaatctggccttgactccatcgtagagcacaatttactgagcaaattctaataaatgtaaattgaaatttacatatgatgctgttcttttcagaaccaagattcgttcgcttactgcttatcaactcttcctcctgtttaggtctagttctctcctgtgcaagattgcgacagaagctgagaggagccttctggtgtttgatcgatacactcccttgaccacaatttattcactgtagtcacaatggatagtcttatgaaatcttaaatac

SEQ ID NO: 3149 - DNA, 403 bp, Homo sapiens
cgtatacgactcactatagggcgaattggagctccaccgcggtggcggccgcccgggcaggtacgcgggctgcacatctggtctctaacaatgaatcaagtaattctctcagctcatgttgctacagcagccagccgggacagccaagtggttcggagagaaattgctaaagcccttagcaaaagctttacgatgcactcactcaccattcagatggaatctccagttgaccaggaccccgactgccttttctgtgaagacccctgtgactagctcagtcacaccgtcagtttcccaaatttgacaggccaccttcaaacatgctgctatgcagtttctgcatcatagaaaataaggaaccaaaggaagaaattcatgtcatggcgcaatgcacattttatct

SEQ ID NO: 3150 - DNA, 401 bp, Homo sapiens
gcgtatacgactcactatagggcgaattggagctccaccgcggtggcggccgaggtacgtgacggaagggaggctcacagggatggtgtctgcgacccactcagctctgccatttaccatcacctgactttaagccagtgtctattttgtagggctgctgtggggaccaatatgagctgagagctctgccaggcaccctacatgatatacctgtaagggagcgtccttctgcggcctgaacctgaagctcttcagagggacccatgctgggctctgaagaaagtgactcaccttggaggagcaagggcaggtcacattccatgatgagaaattctcacaccaccctccttcatatttgactcacatcatgcagcatggacttccactccagtaaatgagtc

SEQ ID NO: 3151 - DNA, 443 bp, Homo sapiens
  misc_feature 21, 23, 27, 28, 30, 31, 34, 38, 40, 48, 50, 63: n = A,T,C or G
tttttttttttttttttttantntttnntnnttntttngncgcgcgtnanacgtactcactanagggcgaattggagctccaccgcggtggcggccgcccgggcaggtaccaggctagccttcctgatgactgcagcagcaaggctgcccatgggccaccccagacagcctgcttagaatctctagaagagctgcttgatgtaagacattaagacattcttaaacgaagccagtcttcaaggactagaataaatccttaattcttccaatacatagacattaacgtaaagcaacaagaaacaaggaaagtcaaatagacatagcactccccaaagcatataataatctctaagttgatccaaagatacaaactgcctgacaaataattcaaaataactcattaaaaaatgctcactaaacttccataggatacagggagacaa

SEQ ID NO: 3152 - DNA, 405 bp, Homo sapiens
  misc_feature 5, 405: n = A,T,C or G
gagcnccgcgtaatacgacctcactatagggcgaattggagctccaccgcggtggcggccgaggtacaagttgtctttatgctgcgagataagtcctctcttggtttgagctcccaccttttcagtgaactcttacattttgggggatctgctcttgtaaaggacatcctttctggtgagtattcttttggtttaatttttggtttggttatttgtgcatgaatttaatctcattaggaaacaagttaagttgaatagaccaactagtgaattaatccgtcaccaaaatatatgtttttggcatttacctgtttattttgaaactctttgtaagaaatgtaaacctgtaatgataatctctgctttgtaaggatatctccctctctgacacctaaaacactagan

SEQ ID NO: 3153 - DNA, 401 bp, Homo sapiens
  misc_feature 104: n = A,T,C or G
gcgtaatacgactcactatagggcgaattggagctccaccgcggtggcggccgcccgggcaggtacagacattcaggttaaatgctggccagtggtggggggcngggggttgtcattatttcccattactaaggaacaacaaataccacatctatttatttatatatttagtgcattgagtaaagataagagagacctgcaaaagaaaaaatatctagtgtgtatcaatgactgaatttgtgtctacatttgggataggaaaagtgataagacatttttaatattcccagcacaaatttccttcctgtgtggttgtacctcggccgctctagaactagtggatcccccgggctgcaggaattcgatatcaagcttatcgataccgtcgacctcgagggggg

SEQ ID NO: 3154 - DNA, 407 bp, Homo sapiens
  misc_feature 5: n = A,T,C or G
gagcnccgccgtaatacgacctcactatagggcgaattggagctccaccgcggtggcggccgaggtacaagttgtctttatgctgcgagataagtcctctcttggtttgagctcccaccttttcagtgaactcttacattttgggggatctgctcttgtaaaggacatcctttctggtgagtattcttttggtttaatttttggtttggttatttgtgcatgaatttaatctcattaggaaacaagttaagttgaatagaccaactagtgaattaatccgtcaccaaaatatatgtttttggcatttacctgtttattttgaaactctttgtaagaaatgtaaacctgtaatgataatctctgctttgtaaggatatctccctctctgacacctaaaacactagatg

SEQ ID NO: 3155 - DNA, 404 bp, Homo sapiens
  misc_feature 404: n = A,T,C or G
gcgtaatacgactcactatagggcgaattggagctccaccgcggtggcggccgcccgggcaggtactaggattgcaggcatgagtcactacactcgcccagaaatttgtttttagagtaactaccatgccattaacaaacctgacaaaattaacaatttcttatcttcaagaactcaattcatattcaaatttttatcatctcaaagctggtttgttcaaacaggagtccaaagtccccatactgcatgtcattactgagaccatactgggactaaggcagggaggaatgagccctaagtgagtctgtaacaagcgagaaagaagctcattcaactaaaagaattaaattggaggtctggcccaagaaagtggaaaaataaacaaagaaaactaaaactattcn

SEQ ID NO: 3156 - DNA, 403 bp, Homo sapiens
  misc_feature 61: n = A,T,C or G
gccgtaatacgactcactatagggcgaattggagctccaccgcggtggcggccgaggtacncgggcgtttttgttttttttttaacttagtttctttgcttattcaagggaagaaaatcaggtttagttggtgtctatatgaatgatagaccaattaaatgcttttactttccagttgctggaagacctgggtcaaattggtatataaggacatggatttcttatgtaacaataaatagaaaattaggacagacctcaggctgaacagcagtatcattcaggacttaagtatttttctcctgttatcattcatagcattaacttcatcccaaggatggtgccccctctagttgttataagatgcctgctgacacagttatggcatattcttcctggttcaggt

SEQ ID NO: 3157 - DNA, 396 bp, Homo sapiens
tacgactcctatagggcgaattggagctccccgcggtggcggccgaggtacagttccatctttggccataaggagacaatggtgtcaagaggctaaggccatatgatctgtaggtgaaaaacctgggatgagaatcaaggcctcaaactttttccactacatcacagatttaggagcagttagagggaaggcttcaatctggagaacactaacaggctctagagattattgggtcatggtggctgggacagaaataaggattcacagaaagatgtttgttgtcaatgttcttttacagtaaatgttcttttgagattttgcttgataaaaaggttgagcagaagtgaaaaaaatttttttctttttttctttctttttcttttctttttgcttttt

SEQ ID NO: 3158 - DNA, 332 bp, Homo sapiens
  misc_feature 5, 7, 207, 275, 278, 279, 298, 305, 306, 318, 325, 332: n = A,T,C or G
gagcncnccgtaatacgactcactatagggcgaattggagctccaccgcggtggcggccgcccgggcaggtaccattctccaggcacatacaacatgaaatatcatacagctgtgaaagatctggtggaaagctggaatattgaggaagaaacattttttgaaaattatttctctctctaagtcagtaaatgtttgatataattctngagtgcatggctgtagtctgaaagtttattgtgcccctaaaattaatatggtcaaaaattccctaaanccnncccctggtgatgatatcanggagggnnggggcccttttnggggggnaaaaaan

SEQ ID NO: 3159 - DNA, 403 bp, Homo sapiens
  misc_feature 5, 187, 189, 204, 210, 219, 226, 240, 242, 243, 244, 246,350, 369, 372: n = A,T,C or G
gagcnccgccgtaatacgactcactatagggcgaattggagctccaccgcggtggcggccgggggccattgagactgccatggaagacttgaaaggtcacgtagctgagacttctggagagaccattcaaggcttctggctcttgacaaagatagaccactggaacaatgagaaggagagaattctntntgggtcacagacaanactctnttgatctgnaaatacnacttcatcatgttntnnngngtgcagctgcagcggattcctctgagcgctgtctatcgcatctgcctgggcaagttcaccttccctgggatgtccctggacaagagacaaggagaaggccttangatctactgggggagtccngangaacagtctcttctgtccccgctggaaccca

SEQ ID NO: 3160 - DNA, 425 bp, Homo sapiens
  misc_feature 5: n = A,T,C or G
gagcnccgccgtaataccgaccttcactattagggcgaattggagctccaccgcggtggcggccgcccgggcaggtacgcggggagacacattcagaggtgagcccagagggggtaaagtggactggggagaacttcggaggatgttcatgtccaggagcagccccacgccctgtatggtcggtgtctagagcctcacagcaactaagaccaacccagctctcagaagaaggaatgtcaaaatgtcatgttcaattttacattcagtgcctggaatcttttcttcacaattgaaatgaaatgtgctgaaggaggtgaatccatgcattaatcttcagctcacaaaggaaatactacataagaagcaagaccacagactcaagacggacataattggattttttttgccatggcctggaaagaaaa

SEQ ID NO: 3161 - DNA, 380 bp, Homo sapiens
cgcgtaatacgactcactatagggcgaattggagctccaccgcggtggcggccgcccgggcaggtactatcccattttcctttgccatgcacctgtcttcctcttcaggattgatcacaaaatcaaaaccattcctaccagccagaggtgggcacatgacccaggtcagaccagtcacagttcctgattcccggccacagtgcttgatgggggaatgagcatatatcaaaccaggacagtccaagtccttccggggactttgctgccacagttgacagggggaggtatttgcataacttcaccacacacagctaagctggtgatcctgctgcttggcagcatcttcccagcgtacctcggccgctctagaactagtggat

SEQ ID NO: 3162 - DNA, 352 bp, Homo sapiens
  misc_feature 5, 17, 180, 181, 186, 189, 217, 222, 232, 242, 252, 253,256, 269, 275, 282, 283, 284, 285, 290, 291, 292, 306, 311,332, 336, 337, 338: n = A,T,C or G
gagcnccgcgtaatacngactcactatagggcgaattggagctccacccgccgggttggcggccgcccgggcaggtacgcggggaggtggtggcgaagccgccttcccctttcccgaaaggtttcggaagcttggtggtagctcttgaagataacgcttgcgttagggcattacttgccnnaaccnggnaaagggaatgggaacttcccattgaaanccaantttcttgganttggaacacnaattttaaannaanccccatttttttnaaaaanttttttnnnnaaaannnccgtaaaaaaggtnttttntaattttttttttaaaaaacncccnnnaaaaaaaaaataaa

SEQ ID NO: 3163 - DNA, 372 bp, Homo sapiens
  misc_feature 3, 5: n = A,T,C or G
gcncngcgtaatacgactcactatagggcgaattggagctccaccgcggtggcggccgcccgggcaggtacatttttttcaatttaaaaaataaaattttaagaataaaaaatttttaaattttaaacatttttttaaataaaaaagaaaagcagataatttgtctaccaagcctagatggatgtatactcataaacaggtaatactgtagtgtgccatagggtgataagcgccatggaggggattaatttcatgcagagcgggcctgcaggaagtaaaggagcgagccgtgaaactgtctggattaacgagttctcaggtagagggaatagcaagtgcaaagtctcttgagcgaatttgcagggggaaggg

SEQ ID NO: 3164 - DNA, 382 bp, Homo sapiens
gcgcgcgtaatacgactcactatagggcgaattggagctccaccgcggtggcggccgaggtacgcggggacacattcagaggtgagcccagagcgggtaaagtggactggggagaacttcggaggatgttcatgtccaggagcagccccacgccctgtatggtcggtgtctagagcctcacagcaactaagaccaacccagctctcagaagaaggaatgtcaaaatgtcatgttcaattttacattcagtgcctggaatcttttcttcacaattgaaatgaaatgtgctgaaggaggtgaatccatgcattaatcttcagctcacaaaggaaatactacataagaagcaagaccacagactcaagacggacataattggatt

SEQ ID NO: 3165 - DNA, 453 bp, Homo sapiens
  misc_feature 1: n = A,T,C or G
naatacactactatagggcgaattggagctccccgcggtggcggccgcccgggcaaggtacagtgaagctttgacctgaggagctcttctgtaggtgaagagtggttaactatggttcctgtgtgcctggggccccccactcctaggactcatccaccccctacccagaacttactagtacctcggccgctctagaactagtggatcccccgggctgcaggaattcgatatcaagcttatcgataccgtcgacctcgagggggggcccggtacccagcttttgttccctttagtgagggttaattgcgcgcttggcgtaatcatggtcatagctgtttcctgtgtgaaattgttatccgctcacaattccacacaacatacgagccgggagcataaagtgtaaagcctggggtgcctaatgagttgagctaactcacattaattgcgttgcgc

SEQ ID NO: 3166 - DNA, 399 bp, Homo sapiens
  misc_feature 65, 69, 72, 75, 105, 108, 109, 110, 112, 123, 124, 125, 133,139, 140, 145, 146, 148, 149, 150, 156, 163, 167, 193, 312,399: n = A,T,C or G
gagccgccgcgtaatacgacctcactatagggcgaattggagctccaccgcggtggcggccgacntacnttnttntcttttttttttttcaaaggaagacccggnaannntntcgaggttgannnatacaagnacaatnncgganncnnnattgancatgacnatancctcacagcaactaagaccaacccanctctcaaaagaaggaatgtcaaaatgtcatgttcaattttacattcagtgcctggaatcttttcttcacaattgaaatgaaatgtgctgaaggaggtgaatccatgcattaatcttcanctcacaaaggaaatactacataagaagcaagaccacagactcaagacggacataattggattttttttgccatggcctggaaagaan

SEQ ID NO: 3167 - DNA, 422 bp, Homo sapiens
gccgtaataccgacctcacctatagggcgaattggagctccaccgcggtggcggccgaggtacgcgggcgtttttgttttttttttaacttagtttctttgcttattcaagggaagaaaatcaggtttagttggtgtctatatgaatgatagaccaattaaatgcttttactttccagttgctggaagacctgggtcaaattggtatataaggacatggatttcttatgtaacaataaatagaaaattaggacagacctcaggctgaacagcagtatcattcaggacttaagtatttttctcctgttatcattcatagcattaacttcatcccaaggatggtgccccctctagttgttataagatgcctgctgacacagttatggcatattcttcctggttcaggttcagtggaagaacact

SEQ ID NO: 3168 - DNA, 407 bp, Homo sapiens
  misc_feature 3, 5: n = A,T,C or G
gcncngcgtaatacgactcactatagggcgaattggagctccaccgcggtggcggccgcccgggcaggtactccctatgtctcttgtccttcttggacaggggagtcatttttatcataagatgacagaggtgcaagaagctaagaagaaaatgaaggacatttttaggttaggctctgtatggccacactgttacctccaccctcatgtgcttgaccagcgcagttcctgtggctgagcccaaagccaaagggtggcgattacactggcttccagggaaagacttcaaagccatataacataagggtgcagtattgggccaataattcagcctgccatacttctcaacccatatagtttggtatgatctgaatctcccacgatctccatatacttcacattaatga

SEQ ID NO: 3169 - DNA, 459 bp, Homo sapiens
  misc_feature 2, 3, 4, 5, 10, 14, 396, 422, 431, 459: n = A,T,C or G
gnnnncgccnatcnctactatagggcgaattggagctccccgcggtggcggccgcccgggcaggtacaattattttgacttttatgtctgaaaatggtcatcacaaaatgttagggaaaaaaataagagatgtgggttaacatctctggtctctggtatcttcatagccacagacttggtttatacctcattacatctttttttttttttttttttttttttttggagacaagagttttgctcttgttgtccaggctggagtgcaatggcatgatctcagctcactgcaacctccacctcctgggtttaagcgattctcctgcctcagccttccgagtagctcggattacaggcattgcgccaccacgcccggctaattttttgtatttttattanagacagggtttctccatgttgttcanactggtctntaagtcccgacctcaggtgatctgcccn

SEQ ID NO: 3170 - DNA, 407 bp, Homo sapiens
  misc_feature 5, 7: n = A,T,C or G
gagcncngcgtaatacgactcactatagggcgaattggagctccaccgcggtggcggccgaggtaccccttcatgagaggcgagcacaactcgacctcctatgactctgcagttatttaccgtggtttctgggcagtcctgatgctcctgggggtagttgctgtagtcatcgcaagctttttgatcatctgtgcagcccccttcgccagccattttctctacaaagctgggggaggctcatatattgctgcaggcatcctattttcattggtggtgatgctgtatgtcatctgggtccaggcagtggctgacatggaaagctaccgaaacatgaaaatgaaggactgcctggatttcaccccttctgttctgatggctggtcatttttcctggccccagctgggatg

SEQ ID NO: 3171 - DNA, 396 bp, Homo sapiens
  misc_feature 2, 4, 10, 202, 281, 314, 336, 340, 346, 349, 354, 369, 375,378, 380, 382, 383, 384, 385, 386, 390: n = A,T,C or G
tntngggcgnattggagctccaccgcggtggcggccgcccgggcaggtactgtccatccctgagccggcccacaagtgtcttctgttttctttaccctctccttagcaccagctgcctaacaaagtcagcgggcagccagggcaaagaacagtttgggcgacttcaatatgactctctcttctgagcccccgatccaaaagnaaggctcacccttagtgaatgtgcctttgccagagggtcttccctagggtgaaggggaaaaatcatgtttcacaatttnagggaaggactggaatggtaaggagccagggtntcacattctggactttaatgcntagntgggcnatncattncattaggcttgcganggggangananannnnnatgngtgaag

SEQ ID NO: 3172 - DNA, 457 bp, Homo sapiens
  misc_feature 2, 3, 4, 5, 12, 17: n = A,T,C or G
gnnnngccctancactncttagggcgaattggagctccccgcggtggcggccgaggtacggggagggcgtaagaatgactaccagcaatctggctgaaagagagaatgggataaggaagactgaaggagaaatgattttagagtggggagtctcaggagctctatctcagatataccaagtttgaggtgtattaagacaaccagccaggtgcagtagctcatgcctgtaatcccagcaagttgggaggccaaggcgggcagaacccgaggtcggtagttcgagaccagcctggccaatatggtgaaatcccgtctctaaattttgtatctaaagatacaaaaattagccaggtgtagtggcaccgtgcctgtagtcctagctactcaggagactgaggcagaagaatcacttgaatcccgggggcggagcttgcagtgagccgagatccgcgccact

SEQ ID NO: 3173 - DNA, 411 bp, Homo sapiens
  misc_feature 5: n = A,T,C or G
gagcnccgcgtaatacgacctcactatagggcgaattggagctccaccgcggtggcggccgaggtaccccagtccctccctcttagcctggagcagctcctcaatgtgctaagccttccaaggataagctgagccctggacagaggaggctccccttcaggccagcactgcccattacttgaagacaaggtgagcctcagcctgatgttgaaggctagcattaggaaccccgctcaggatctcccattctccaagatctgctttatcaataagaaaggggatgctgccgggcctggtggctcatgcctgtattcccagcactttgggaggccgaggcgggtggattacctgaggtggggagttcgagaccagcctgaccaacatggagaaaccccgtctctactgaaaata

SEQ ID NO: 3174 - DNA, 390 bp, Homo sapiens
cgtaatacgactcactatagggcgaattggagctccaccgcggtggcggccgcccgggcaggtactgtccatccctgagccggcccacaagtgtcttctgttttctttaccctctccttagcaccagctgcctaacaaagtcagcgggcagccagggcaaagaacagtttgggcgacttcaatatgactctctcttctgagcccccgatccaaaagaaggctcacccttagtgaatgtgcctttgccagagggtcttccctagggtgaaggggaaaatcatgtttcacaatttcagggaagtctgaatggtaggagccaggttttcacattctggtctttaatgcatagtggccattcattccattaggcttcttatgtcatgacataat

SEQ ID NO: 3175 - DNA, 458 bp, Homo sapiens
  misc_feature 1, 2, 9: n = A,T,C or G
nnagcctancactacttagggcgaattggagctccccgcggtggcggccgcccgggcaggtacgcgggggcgggtaaagtggactggggagaacttcggaggatgttcatgtccaggagcagccccacgccctgtatggtcggtgtctagagcctcacagcaactaagaccaacccagctctcagaagaaggaatgtcaaaatgtcatgttcaattttacattcagtgcctggaatcttttcttcacaattgaaatgaaatgtgctgaaggaggtgaatccatgcattaatcttcagctcacaaaggaaatactacataagaagcaaggaccacagactcaagacggacataattggattttttttgccatggcctggaaagaaaggtacctcggccgctctagaactagtggatccccccgggctgcagggaattcgatattcaagccttatcgata

SEQ ID NO: 3176 - DNA, 402 bp, Homo sapiens
cgcgtaatacgactcactatagggcgaattggagctccaccgcggtggcggccgcccgggcaggtacgcggggagactgagtggggtcacagcacagggcactgtcttgcctggctttatctgagccaatcacacctctcctggccactatctgtggtctagccccctttgtgcagaaagagaaagaagagccttgaggaccagcctagtcaggctgaagaaatgtcaacaattgggagttttgaaggattccaggctgtgtctctgaagcaagagggagatgaccaaccctctgagactgaccacctatcgatggaggaagaggacccgatgccaagacagatttcaaggcagtcaagtgtgaccgaatcaactctttaccccaatccttatcatcagcct

SEQ ID NO: 3177 - DNA, 408 bp, Homo sapiens
cgcgtaatacgactcactatagggcgaattggagctccaccgcggtggcggccgaggtacctttctttccaggccatggcaaaaaaaatccaattatgtccgtcttgagtctgtggtcttgcttcttatgtagtatttcctttgtgagctgaagattaatgcatggattcacctccttcagcacatttcatttcaattgtgaagaaaagattccaggcactgaatgtaaaattgaacatgacattttgacattccttcttctgagagctgggttggtcttagttgctgtgaggctctagacaccgaccatacagggcgtggggctgctcctggacatgaacatcctccgaagttctccccagtccactttacccgctctgggctcacctctgaatgtgtcccgcgtac

SEQ ID NO: 3178 - DNA, 419 bp, Homo sapiens
gagcgcgcgtaatacgacctcactatagggcgaattggagctccaccgcggtggcggccgaggtaccccaaaaccaggggctgcagctccagcaattgggaaggccaagttttcttgcacgctccccagaaaaggggccaagtccatggggctgagcagtgatagactgcagacctcaccaccactgaaccttgtaggataaggcccactagcctgggatgctagtgaggccaccctagtcctcctgagttctccagctgggagcagctctacacttctccggcatgcagctcccaaagagagaggcagtccacctttttgctgtctcgcaaccctccctccttgctgctctcaggcttgggagggtgcacagcaattagggactatcacagaaccccaacacagtgcatctggtgaac

SEQ ID NO: 3179 - DNA, 396 bp, Homo sapiens
  misc_feature 5, 7, 396: n = A,T,C or G
gagcncngcgtaatacgactcactatagggcgaattggagctccaccgcggtggcggccgcccgggcaggtacttcctgcaatggtggaaatgttctctgtctacactgtcctatatcgtagccactcgccacatgtggctatggagctcttgaagtgcggacagatggactgagaaactgaaatttaaatcttacataattttaatcatgagatagtggctacttgacaagatgctggagaacaggctttggaaccaacatgattcactgacatgaagctcccacatcttggcctatggacacaatgaacaatgcatctactagctgtttagggcagcctgtgaacagagcacacagctattgcaaacaaacagacccgggttcagagtcaggan

SEQ ID NO: 3180 - DNA, 433 bp, Homo sapiens
  misc_feature 5, 433: n = A,T,C or G
gagcnccgccgtaatacgacctcactatagggcgaattggagctccaccgcggtggcggccgaggtacttgattcaaagcctgggtctcccagaagtgagctgtgtggcttgggccactttatctcctgaggtctcagagttttcatgtataaaattgtagaacttgtcttgatggttttgaacattctttctaattctgcacaacagtccatttgtgggttagatgagcctttaccaaactgtatttcatggaacaatggtcccaagagctgttctgtgaaaagtaagtttcatcatcaaataattttgagaaattctgaatcctatatgcgtgttgattcctatttctttccttccattctttcttgagtccactctgattggtccttaaagttggagtttatttttatcattattgttattgtcatggtn

SEQ ID NO: 3181 - DNA, 411 bp, Homo sapiens
gcgtaatacgactcactatagggcgaattggagctccaccgcggtggcggccgcccgggcaggtactcaaactatagccccaggggaagacaaacggtcacagatgaggcaggaagagtgcctgggagaatttccccattcaccatggagccaagtgaaagacctcaccatcagctgctgcacagaaatgacacagccacccacacaagtgggagatcgaggaggaggcacggccagtttgtttggaatggacaggtgtgttaggtaggagtccagccttcacaccctgtgtttcctttcttttgctttggaccttctttcctaactaaaaagagagccagtgaaggttcttgagaaggggatggcaaagagccatgagattttatctttgtaaacctcgaagtgtgggtt

SEQ ID NO: 3182 - DNA, 416 bp, Homo sapiens
  misc_feature 5, 190, 207, 242, 280, 386, 416: n = A,T,C or G
gagcnccgcgtaataccgactcactatagggcgaattggagctccaccgcggtggcggccgcccgggcaggtacggaagaacatgggagtctgtatgcagcacgacgtcttgttcagttacctcactactaaggagcaccttctcctatatggttccatcaaagttcctcactggactaaaaagcagctncaccgaggaagtaaaanggactttaaaagatactggactatatagccatcgncataagagagttggaacactgtcaggaggcatgaagangaagttatctatatccatagctctcattggttggatcaagggtagtaattttggatgaaccatctactggagttgacccatgttctcgccgaagtatatgggatgntatattccaagaacaaaactgccagaacan

SEQ ID NO: 3183 - DNA, 455 bp, Homo sapiens
  misc_feature 2, 3, 7, 8, 33: n = A,T,C or G
gnnatcnnctctctctactatagggcgaattgnagctccccgcggtggcggccgaggtactctgctataacatgagatctgtctctccaggctctggcttcctcaaggacagctgccaccaggtcctatccatcttgtaagtccagttcttaacgtccccgcgtacctgcccgggcggccgctctagaactagtggatcccccgggctgcaggaattcgatatcaagcttatcgataccgtcgacctcgagggggggcccggtacccagcttttgttccctttagtgagggttaattgcgcgcttggcgtaatcatggtcatagctgtttcctgtgtgaaattgttattccgctcacaattccacacaacatacgagccgggagcataaagtgtaaagcctggggtgccctaatgagtgagctaactcacattaattgcgttgcgctcactggcc

SEQ ID NO: 3184 - DNA, 409 bp, Homo sapiens
  misc_feature 394: n = A,T,C or G
gagcgcgcgtaatacgactcactatagggcgaattggagctccccgcggtggcggccgaggtactggaggtccgagctaccacagaagacaacaaaaatcaatataaggtataggaagattggaaagaaagaaaacaaaccacctaggctgaaatcccaaacaaactggacacgcaaattattaaaggtgatttcataaatgttatgtcatttaagacagccatataaaaggaatcattattcccattttctctatgaggaaatagaggctcagaaaggttttgagcaacttgcctgaagttgaagtccccccagcatattaagtgctgaagccagaattcaaaccaattgataatttcagtgctcttcaccgtagaccacatggcctcccctnagttaatattcaccc

SEQ ID NO: 3185 - DNA, 414 bp, Homo sapiens
  misc_feature 414: n = A,T,C or G
gagcgcgcgtaatacgactcactatagggcgaattggagctccaccgcggtggcggccgaggtacttccatcaagtcgagggagtaacgcaaactagaatagtagccatctattaaggatagttctgaggtttggaatttgtaactgatttttaggagctacgacatgaatatcatatcaggtagaaatactcagagtgatcaccttttatgaaagttagttctatctttcatgtctaggaaaatataacagtgaatgtttgctttttgtatgttttgtctccaagcagaggaaactgacagttttatgttttaggtgccgaaagttgttttttggctaggcagttccagagttaatcacttgggatgctaacttgaatttttgtctttaaaatgttttagatttttaaaaccn

SEQ ID NO: 3186 - DNA, 453 bp, Homo sapiens
  misc_feature 2, 3, 4: n = A,T,C or G
gnnnatccgccctatacgactactatagggcgaattggagctccccgcggtggcggccgaggtacctactatgggacctagacaggctgtttcacttctcttatatctgtaatataagcagagtaactggagcccttttgttcacctgcagttggatctcagtgatttggggaaggatcttgggcctccacttgcagtgactatagtcactatagcttcatcagcaggggcgggaaatgatgctgcctccagcttgagagtgatgaggccagcacctcctgggagccctcgataattttatcttcttttgcaatccttccccaaatctcttggttccactcaaaactaggaacagtcctgcccactgtggcaagctgtggtgcccacctctcttacagctgtccccacaggactactataattattcacttttatcccattgcctgtaatgca

SEQ ID NO: 3187 - DNA, 416 bp, Homo sapiens
  misc_feature 394: n = A,T,C or G
gagcgccgcgtaatacgactcactatagggccgaattggagctccaccgcggtggcggccgcccgggcaggtacttttagaagagacagggtttcaccatggtggccaggctggtctcgatgtcttgacctcgtgatctgcctgcctcggcctcccaaagtgctgggattacaggtgtgagccaccacacccggcctgaattgcacttttgatggctgagccaaatgctcattctatttaatattgcacagcctgaaccaaaacccgtaacattataaaggaagagatgagagccatttcaaactgtgagagaagagaagacatcaagcaaaatctgggggttttagccaacagacttcagtcctgggacctcgcagcaaaaaaacaccttcanttgccccagggctttacagggt

SEQ ID NO: 3188 - DNA, 439 bp, Homo sapiens
  misc_feature 5: n = A,T,C or G
gagcnccgcgtaatacgacctcactatagggcagaattggagctccaccgcggtggcggccgcccgggcaggtacgcgggtgtccttgagttttgagctcatggttaaagctgagaattaagcactgcccttacaactgctaggtaagctcagtaaggtgttgcaaggtggtgcaaagggccctgggaggagggtcccagttgcccaccctttgtccactgctttgtgatgaattctagatcaccttgtggttacctgcctattaggaggtgctgttgaaaagcgactttaaaaaaataggactttgggagagtggggcagatcaaatgaagggaccagcagtgttcataatggtgctgaaatttaatttcagtgctgaccttttatttgacattttagataatgctatggatgtgctcagctatttgttcttaacata

SEQ ID NO: 3189 - DNA, 418 bp, Homo sapiens
  misc_feature 5: n = A,T,C or G
gagcnccgcgtaatacgactcactattagggcgaattggagctccaccgcggtggcggccgcccgggcaggtacgcggggagagcgggtaaagtggactggggagaacttcggaggatgttcatgtccaggagcagccccacgccctgtatggtcggtgtctagagcctcacagcaactaagaccaactcagctctcagaagaaggaatgtcaaaatgtcatgttcaattttacattcagtgcctggaatcttttcttcacaattgaaatgaaatgtgctgaaggaggtgaatccatgcattaatcttcagctcacaaaggaaatactacataagaagcaagaccacagactcaagacggacataattggattttttttgccatggcctggaaagaaaggtacctcggccgctctaga

SEQ ID NO: 3190 - DNA, 398 bp, Homo sapiens
  misc_feature 5: n = A,T,C or G
gagcnccgcgtaatacgactcactatagggcgaattggagctccaccgcggtggcggccgaggtacttaaccatgggttgccatgcttttatagcacatgacttcactactctgagcacagctaagagaattaaaaatcagcaactgatgcaaaggtaaggtagacattttcaaaatagccagaagctgatgatgtgacctggcagctctgcccaaaggggcatactacatgaagttgtcactaggcaaaaccaatcaggtcctctcttaggaaggctgaatacagagtcaacagacaccgtaagttttgcataagacaggaaaaacacaaaataaaagcagtaagctaagaggctgagaagagatgagataggcaggtcctccgcagtggaagaggg

SEQ ID NO: 3191 - DNA, 396 bp, Homo sapiens
cgtaatacgactcactatagggcgaattggagctccaccgcggtggcggccgaggtacctctcataaactttgttcattcagccacttgaaataagccacgtgggttatgtgccacgcaaaatttcagtaatgggttttgggggtgtttagatagcaacaacttcatagactgaaccttttggtttttttttctttctctccaactcagaggttaaaaattaacctgaaaaatcaatgctgcaatatgaatgcgctgtatgtttcttgcatggacttgcagacactctgtaacggtgtttccagtctccagcagttcatattggaaggtgagctttcacatggacaagccctttgcgttgccaagtagtagtgatattacaagtttgaaagacatt

SEQ ID NO: 3192 - DNA, 413 bp, Homo sapiens
  misc_feature 4, 6, 66, 76, 77, 171, 196, 336, 353, 390: n = A,T,C or G
agcncngcgtaatacgactcactatagggcgaattggagctccaccgcggtggcggccgaggtacnccaaaaccannggctgcagctccagcaattgggaaggccaagttttcttgcacgctccccagaaaaggggccaagtccatggggctgagcagtgatagactgcanacctcaccaccactgaaccttgtangataaggcccactagcctgggatgctagtgaggccaccctagtcctcctgagttctccagctgggagcagctctacacttctccggcatgcagctcccaaagagagaggcagtccacctttttgctgtctcgcaaccctncctcctgctgctctcangcttgggagggtgcacagcaattagggactatcacanaaccccagcacagtgcatctggt

SEQ ID NO: 3193 - DNA, 399 bp, Homo sapiens
  misc_feature 5, 375: n = A,T,C or G
atacnactcactatagggcgaattggagctccccgcggtggcggccgaggtacacaagtagaactgttaaaaccgtgtggcttccaactgctctaataactttaagattcacagtcttcaactttcttacagtggaagccatgggggcattgtcctgttgccttctctctcattcctcattaatgagaaagatgttaagctcacttgacgtaagtcccagtgaagtcttctccagaactcagaagggccataaatagagagacaaagggcaggaggtgggagttattcaccagcgtggaggaagcaggataagcccagaggaatggcctctgggaattatacaaagaatttggaggcgactgggggtggccctgngaacaaagtgaaactgtcagaact

SEQ ID NO: 3194 - DNA, 458 bp, Homo sapiens
  misc_feature 2, 3, 4, 5, 7, 13, 16, 23, 28, 65, 73, 86, 98, 99, 101, 102,180, 215, 428: n = A,T,C or G
gnnnnanactganccntttctantatcnggcgaattggagctccccgcggtggcggccgcccggncaggtacncggggacattcanaggtgagcccanntnnggtaaagtggactggggagaacttcggaggatgttcatgtccaggagcagccccacgccctgtatggtcggtgtctanagcctcacagcaactaagaccaacccagctctcanaagaaggaatgtcaaaatgtcatgttcaattttacattcagtgcctggaatcttttcttcacaattgaaatgaaatgtgctgaaggaggtgaatccatgcattaatcttcagctcacaaaggaaatactacataagaagcaagaccacagactcaagacggacataattggattttttttgccatggcctggaaaaggaaaggtacctcggcncgcttctaggaactaggtgggatccccccc

SEQ ID NO: 3195 - DNA, 409 bp, Homo sapiens
  misc_feature 5, 7, 17, 407: n = A,T,C or G
gagcncngcgtaatacngactcactatagggcgaattggagctccaccgcggtggcggccgaggtacaatctgaacaaccctttttattgcttactttgcgttttaagggtctcagttaatgaagtatctcctagcacaggggatgagaagaggggaaagaaggcagggcatcaccaatccactattcccttttactaatcctcacaggaaaagaccatcctacaacatcctccaagtccagctggctatctgttctgcctcatttcttctatgttttattccaccaacacgaacaggcttagttttccccagccctgaacagaagctctgtcctccttaggagacacctcattttgcagtttgtttccaagcttcaacttcattccaatgttcttagacacagttngt

SEQ ID NO: 3196 - DNA, 395 bp, Homo sapiens
tttgcgcgtaatacgactcactattagggcgaattggagctccaccgcggtggcggccgaggtacgcgggtgagaaaaggctctaacatgagttgatcttgagcccaatgttgaacagctccagaccttacaatttaaaaaagtagttcagaccgggtgtcttgagttccgcagtatacctggtccagtggacacttgcagaatgccgttggcacatgccactggccattgaggggtccccagatgcataaacagcctgatcctgtagctccccttccccacacggatgcatggaggcaggtggcgaactctaaagcctcactgaaaggcagattgctggactgttagaaggggctcactcacctgcctccaagcgcttgtcttctgtttacata

SEQ ID NO: 3197 - DNA, 407 bp, Homo sapiens
  misc_feature 5, 7: n = A,T,C or G
gagcncnccgtaatacgacctcactatagggcgaattggagctccaccgcggtggcggccgaggtacgtttcctcacagatatatcaactattgtgcatatctctagttctgattctagttaatcaatatcagcagaaagcttatcatttcatgtctaagtgtctgtgtgggcatgaaattgttaggaattgttttagtgaataactgattcaaaaattcattgcttaaaaacaagattttttttttacagaagcattcagaactccaaagagattataactcacagagaattattttaaaaagcagataatatcttattccttttttccacacatctccacataccaacttaaatcttcaccagtaaagaggaatccaggggaaatcataagagaagcatctttac

SEQ ID NO: 3198 - DNA, 468 bp, Homo sapiens
  misc_feature 1, 2, 3, 376, 382, 409, 419, 422, 442, 443, 444, 445, 446,452, 459: n = A,T,C or G
nnnagggccctatcgactacttagggcgaattggagctccccgcggtggcggccgggggccattgagactgccatggaagacttgaaaggtcacgtagctgagacttctggagagaccattcaaggcttctggctcttgacaaagatagaccactggaacaatgagaaggagagaattctactggtcacagacaagactctcttgatctgcaaatacgacttcatcatgctgagtttgtgtgcaagctgcagcggattcctctgagcgctgtctatcgcatctgcctgggcaagttcaccttccctgggatgtccctggacaagagacaaggagaaggccttaggatctactgggggagtccggaggagcagtctnttctgncccgctggaacccatggtccactgaanttttcttatnctncttccactgagcatactatnnnnnacaccnaatgagnaaatcccaa

SEQ ID NO: 3199 - DNA, 397 bp, Homo sapiens
  misc_feature 2, 4: n = A,T,C or G
cncnccgtaatacgactcactatagggcgaattggagctccaccgcggtggcggccgcccgggcaggtactagaaaaactcagaagctggaacgtgggaatacatcttcatttcacagatgaggaggacctgtctcaggaaaagaggtgactcacccaaggttatagctggttagtggcagaaccaggaccagaagcaaggcctgcagcctcttgtgtaggctttcctagtgcgtgctgctgaccctcaaagctgtccttggccaactcaccacctgtgtgacacttacccccaggcagctgtagggaggaacacagatgttcggggaaggcacttgtgttactgtataagcacaaaggaagctgggatctgagtatggtggcccttgtcggtctct

SEQ ID NO: 3200 - DNA, 452 bp, Homo sapiens
  misc_feature 2, 3, 4, 6, 13, 452: n = A,T,C or G
gnnnangccctancactacttagggcgaattggagctccccgcggtggcggccgaggtacgcggggacacattcagaggtgagcccagagcgggtaaagtggactggggagaacttcggaggatgttcatgtccaggagtagccccacgccctgtatggtcggtgtctagagcctcacagcaattaagaccaacccagctctcagaagaaggaatgtcaaaatgtcatgttcaattttacattcagtgcctggaatcttttcttcacaattgaaatgaaatgtgctgaaggaggtgaatccatgcattaatcttcagctcacaaaggaaatactacataagaagcaagaccacagactcaagacggacataattggatttttttgccatggcctggaaagaaaggtaccttgcccgggcggccgctctagaactagtggatcccccgggctn

SEQ ID NO: 3201 - DNA, 413 bp, Homo sapiens
  misc_feature 27: n = A,T,C or G
gttttcgcgtaatacgactcactattnggcgaattggagctccaccgcggtggcggccgaggtactacagtcactaaagctcagtttcttaaatccatattttaatgggactctgctggacattgaataccaccagtccacttgtcaggatgtctgttctcatgtgcagtgtgatgaagcctctttcatgatgtattgactttactggactgaaatattttgaagagtgtcagccctttgacaagatccatctgaccatttctgttcacaaatgatttctccacacgattccactcaaagcacactcatttatataacacaaagtaactttcccaaataatcatcactttcaaaaaaagatcgtgaaaatactgataaaaagaattctcccggccaggcacggtggctcacgc

SEQ ID NO: 3202 - DNA, 458 bp, Homo sapiens
  misc_feature 2, 3, 4, 6, 10, 14, 452, 458: n = A,T,C or G
gnnnangccnctancactcctatagggcgaattggagctccccgcggtggcggccgcccgggcaggtactgtcagcctcactggcatagaaagaaggtggaggaaatgggtgctgctttcatttctgaggtataagtggtgatgtagataactgctataggaaatgcccacgcatagaacaaatggtaaagaagttccaggtagtcagctggtttcaacaatgaataaagcaggacaccctgcttagaggttgaaatcaaaatgaagagctttggaaagagatacctgctctacagtgtggtgagtgctggaatggaggagaaagcaagaggaatagcaatagagtcaagtcttgaaggatgacggcacataaggagaaagtgttccccacactaaggaagagaaagtggaagcacagagtttgaaagggtgtggcacattccaggggaagnagtggn

SEQ ID NO: 3203 - DNA, 459 bp, Homo sapiens
  misc_feature 1, 8, 13, 380, 459: n = A,T,C or G
ngccctancactncttagggcgaattggagctccccgcggtggcggccgaggtacgatctgacttatgtttagtaagatcctgggccactgggtgccctgtagagaagagactgaactggtctaagagcagaaactgtgagagcagttagggcactactaaaatatgccaggtgaggcatggtgattgcctagactggtgtgcaagctgtggatgcagaaaaaagtagctggattgtcgatggattctgaaggtggagtcaagaatttggtcatggacacgggtgtgaaagaaggaacccaaaggattctggcctgagccactagaagacttggagatgccatcatttgagatacaaccaaggcttgtgggaagaagaanattttggggtgggagttgaggtaattggggaaaaagggtattaagggagcctcaattcgggataaattaaggaattggn

SEQ ID NO: 3204 - DNA, 459 bp, Homo sapiens
  misc_feature 2, 3, 4: n = A,T,C or G
gnnngcgccgcgccgacacgactcactatagggcgaattggagctccccgcggtggcggccgcccgggcaggtactctcagttcacttccatgtgggagggtcatttgccatccatccagattacctttttgattaggcttttcagtgtctataaatatttcggtcttttctgatcatttaatttctaatacatgcatatgctcctatgtataataaatagacaacttcaaatttgcagtttctagatggttggaaaagggaaacattgtggtgtgtaatttatcagccatcaagatcctagatatttgagattttaactaagcaaggtattaagatagaccatgttgttttggcttcacagaattcattcatattgtgcattacacaattcagtgtgcatattgcacaattgattttatctgtaagttgtcttttatcagtggttctcaaagtgtggc

SEQ ID NO: 3205 - DNA, 452 bp, Homo sapiens
  misc_feature 5, 10, 70, 77, 402, 419, 421: n = A,T,C or G
ggcgngtggnagctccctcgcggtggcggccgaggtaccctgggcagtagaatttcattgaaaacgcctntggactncaactaaagatgcagagaagcccaagttcctccctctctcttgcttctggagctccttgtagttacatctattatagtatcattatatcaagttataacaatctgtttccctttatctcctctagtggcctgggaacctctaagaggcaaacacagtccccatacaggaatgggatgtctgcagagctgtataactcctctcttctgtctgaagaataaaaacaacattatacaaaggaaaaagaagtggttcattttcttctcctcagccagaaaatgtcccaatggtgggaaaatggccaggaagaaaggatcaaagcccttngcccggtaatggtgggntnaacccaccttgcctttatcctgcaaataccc

SEQ ID NO: 3206 - DNA, 456 bp, Homo sapiens
  misc_feature 2, 3, 4, 5, 13, 19, 23, 456: n = A,T,C or G
gnnnngcctctcncacctntacngcgaattggagctccccgcggtggcggccgcccgggcaggtacgcgggtgtccttgagttttgagctcatggttaaagctgagaattaagcactgcccttacaactgctaggtaagctcagtaaggtgttgcaaggtggtgcaaagggccctgggaggagggtcccagttgcccaccctttgtccactgctttgtgatgaattctagatcaccttgtggttacctgcctattaggaggtgcttgttgaaaagcgactttaaaaaaataggacttttgggagagtggggcagatcaaatgaagggaccagcagtgttcataatggtgctgaaatttaatttcagtgcttgaccttttatttgacattttagataatgctattggatgtgctcagctatttgttcttaaccatattttccatcttttggggggcn

SEQ ID NO: 3207 - DNA, 463 bp, Homo sapiens
  misc_feature 2, 3, 4, 11, 14, 292, 403: n = A,T,C or G
gnnnatgcccntancactacttagggcgaattggagctccccgcggtggcggccgaggtacacacacgttaaccacaaaacaggcctctctgaaaaagccattgccatggactgccagacagacaatgacaagacacaaataccttctggtgtgtgagccacgggacatgtgagcttccccgctgatgctcctcttatatcaaagatcactttcacaagatgagcgactcaatatcttttatcaaaccaatgatcacctgcaagctatgggtatatttttgcagctgtgtanaagctattgtggcatgagaatgtgggacttataaattgctgatccaataaatagacattatgggcaacagtgtcttatcagctagtgtggtactaaggtttcaggaacagntgttctgaccttactatccaacgagggagtaactgattcacttctcagaaggtatattaa

SEQ ID NO: 3208 - DNA, 467 bp, Homo sapiens
  misc_feature 2, 3, 4, 6, 10, 15: n = A,T,C or G
gnnnancccncgccnaatacgactactatagggcgaattggagctccccgcggtggcggccgaggtacttccgtgagatataaggctgatgataaggattggggtaaagagttgattcggtcacacttgactgccttgaaatctgtcttggcatcgggtcctcttcctccatcgataggtggtcagtctcagagggttggtcatctccctcttgcttcagagacacaagcctggaatccttcaaaactcccaattgttgacatttcttcagcctgactaggctggtcctcaaggctcttctttctctttctgcacaaagggggctagaccacagatagtggccaggagaggtgtgattggctcagataaagccaggcaagacagtgccctgtgctgtgaccccactcagtctccccgcgtacctgcccgggcggccgctctagaactagtggatcccccgggctgca

SEQ ID NO: 3209 - DNA, 471 bp, Homo sapiens
  misc_feature 2, 3, 4, 20, 24, 200, 368: n = A,T,C or G
gnnnatccttcccgaatacnactnctatagggcgaattggagctccaccgcggtggcggccgaggtacgcgggtaggcacctgccaccacgcccggctgatttttgtattttgtaattttgtatttttagtagagactaggtttcaccatgttggccaggctgatcttgaactcctgacataaggtgatccgcccacctnccaaagtgctaggattacaggcgcgcccagccctgttgtattagttttctattgcttccatgacaacaaatcaccacaggcttggcagtttaaataccactgattatctcacaattctctaagtcagatgcctgagttcagccaggcccagctgggtcctctgctcantctcatggggccagtgtcttgaggtgcttgggttcacccttggaggccttcaagcttatgcacagttggctcaattattccttgcagctgtaggactgggtcc

SEQ ID NO: 3210 - DNA, 463 bp, Homo sapiens
  misc_feature 2, 3, 4, 5, 10, 17, 19, 25, 30, 39, 101, 108, 444: n = A,T,C or G
gnnnnagttngatttcntngcatantactnctatagggngaattggagctccccgcggtggcggccgaggtacccccaaacaaccatctaaaaatataccnttcctgncaggtgccaaacttgctttttcagtttcttggacaaaaattctgggaccatccttgaattttctatttcccagatacactgcagttaattcactaacaaattgtgttatctgtgccttaaaaaacatgcccaaaggcccgggccgtgttggctcacgcctctaatcctagcactttgggaggcagaggcgggtggatcacgagttcaggagttcaagaccagcctggcttgcacggtgaaaccccgtctctattaaaaatacaaaaattggctggggcatggttggcggtcacctgtagtcccccggttacctgcccggggccggccgcttctagnaaactagttgggatccccc

SEQ ID NO: 3211 - DNA, 468 bp, Homo sapiens
  misc_feature 2, 3, 4, 8: n = A,T,C or G
gnnnatcncgccgcgaatacgactactatagggcgaattggagctccccgcggtggcggccgaggtacgtgggctttacgtaaagaaaatgtgccattttttcaagccagatatagcttctgtatcaacaaatggaacacaaatctttagtctaggacttagagttggggaaaaagggaaaaaacaactataacacttaaatgaaatctttgtatcttaggtttgttgaccagagtattatatatatatctaatgctactaaaattatgatgttatcgaatattcaagttaattcaataagtggtggttatctgtagtaatcatagagaaaggaactattactatgagggacctgcgggtacctgcccgggcggccgctctagaactagtggatcccccgggctgcaggaattcgatatcaagcttatcgataccgtcgacctcgagggggggcccggtacccagctt

SEQ ID NO: 3212 - DNA, 470 bp, Homo sapiens
  misc_feature 2, 3, 4, 9, 29, 71, 100, 102, 315: n = A,T,C or G
gnnnatccnttaacactatttagggcganttggagctcttcgcggtggcggccgaggtacatttcacggangtgggaccaaaagaggaaagaacaaaatntnctaagtgccagcatgttgggaatgcatcattgcaataagattgtgaaactaatgctggcaggcaaacaacaaaaaacaacaactgccacaaactgcaatatgcttatcagggtctgaccaagaagaaaggcccccgatcttccacagaggacactggcaccagtcccaggtcctgcaactcttgaatagctccatgtgccgtgttctcttcangtacctgcccgggcggccgctctagaactagtggatcccccgggctgcagggaattcgatatcaagcttatcgataccgtcgacctcgagggggggcccggtacccagcttttgttccctttagtgagggttaattgccgcgcttggccgtaatc

SEQ ID NO: 3213 - DNA, 579 bp, Homo sapiens
  misc_feature 2, 3, 4, 5, 10, 16, 18, 25, 29, 34, 43, 105, 106, 239, 244,245, 246, 250, 252, 258, 261, 264, 274, 286, 288, 293, 294,295, 298, 306, 307, 308, 310, 311, 313, 315, 316, 317, 325,329, 332, 333, 334, 335, 340, 354, 357, 369, 371, 374: n = A,T,C or G
  misc_feature 376, 379, 388, 389, 391, 392, 394, 398, 400, 405, 406, 411,416, 417, 423, 424, 428, 436, 439, 442, 443, 444, 445, 447,451, 452, 454, 460, 468, 476, 482, 483, 484, 485, 490, 503,504, 505, 507, 508, 511, 512, 519, 534, 543, 546, 550: n = A,T,C or G
  misc_feature 552, 553, 561, 566, 567, 570, 573, 578: n = A,T,C or G
gnnnnaggtngattcntngcaattnctantatcnggtgaattnttctccccgcggcggcggccgcccgggcaggttcgcgagggaaggaattacacatttagaannttataagtaagaggttgtgtttttgttaagggaaaaagagagtattttttgtctaaaagtagaatgtcttactgttccaaaaagaaaaagagaaaaaatatagacaaaaactgaataagataactggatgaantttcnnnactnangccatnttnttnacaattattntatttttattcnanatgtnnnttntttgatgnnncnnanannnggccccanttantannnnaaggntcttttatatatgnganttttgtgacctnanttntnaanaccgtcttnntnntnactntnttttnntattnctatnnttcttnnatcnatgtaaanatntcnnnnantgannanatttantttcttanccaattgntatttnnnnttaanacatccattttcnnncnnagnncccccantccctttttttattntatggatanctntctnannaaaccccnttttnnaantcnttgcng

SEQ ID NO: 3214 - DNA, 458 bp, Homo sapiens
  misc_feature 2, 3, 4, 5, 21, 34, 46, 92, 93, 285, 362, 458: n = A,T,C or G
gnnnnaggcccttaacgactnctttagggcgaantggagctctttngcggtggcggccgcccgggcaggtacctaattttactcttaagcanntgcgccttgtaatttaggttggtttcatttcatttcaacgggagagagtcctgcttcacacctgttgcagtgtgtccttccagtgaacacccaagcctgggctacaagagcgagagtccatctcaaaaaaaaaaaggaaaaaaaaataaagaaaaaaagaggcaaagcatccactgatcctacattcgtgtntttatcacattaccttgtctcatcttcaacttcggtctctccacattgaagggaaggtgacatgatgtcttcttagncattcaaatccaattaacttttaattctgaaggttaaagtaatgaggatattaaactaaggagatggataatattcaatttttatgttcactgaan

SEQ ID NO: 3215 - DNA, 471 bp, Homo sapiens
  misc_feature 2, 3, 4, 15, 28, 39, 72, 86, 100: n = A,T,C or G
gnnnatcctttaacnctatttagggcgnttggagctctncgcggtggcggccgaggtacaagttgattatgnaggtggccggggtncaggcttcatcttnctgtgctctgaacacaccccacacctcctctattttagcacatttcccagttgattccaaatgcgtgctcactcctcttttccccccactagagagtaagcctgatcttgctcactcgcagttaagcttctggacaacttgtggcgtataataaattttgctcaacaaaatttattaaatgaaggagtatctccaatttgaaggcaaattttctttgttatcttggaaactgccataggagctgtgtctgaatgtggtgatgggtgaagatcttgtacctgccgggcggccgctctagaactagtgggatcccccggggctgcaggaattcgatatcaagcttatcgataccgttcgacctcgaggggggg

SEQ ID NO: 3216 - DNA, 515 bp, Homo sapiens
  misc_feature 9, 10, 16, 29, 324, 335, 337, 348, 357, 366, 372, 390, 402,403, 409, 412, 414, 418, 428, 430, 433, 455, 459, 461, 462,470, 471, 472, 473, 486, 488, 491, 492, 502, 508, 509, 510,514: n = A,T,C or G
ttttagggnngcggcngctaatacgactnctatagggcgaattggagctccccgcggtggcggccgcccgggcaggtacttaacaaccccatgaggaaattaaggcagggtggttcagtaatttgtcaagggaaacaaggaagtagagcaggcagcagaggcgttctggctctgaactactctgttctgtagaaatcagtgcaaaagtccaagcttcagcatacttgtttcatcttgtgatcacaggtagttttttttgtttttttttgtgagttgtttgttgatgtttattaatgtgttattgcagatggaccaatggacttnaataaatttananatgcttttgcntaatgcccntttttgttngtaaantatcttgtgtgctggacnaaattttaaaannaaactnggnanaatnacccaaaggntnaanaatatatattattaaattaatntttntnntttttttnnnnaaatatatatttntnttnntataaattcntatttnnnggant

SEQ ID NO: 3217 - DNA, 470 bp, Homo sapiens
  misc_feature 54, 56, 72, 78, 81, 87, 93, 96, 99, 105, 110, 131, 148, 150,155, 162, 168, 172, 200, 202, 212, 243, 388: n = A,T,C or G
cgcctatcactacttagggcgaattggagctccccgcggtggcggccgcccggncnggtacgctggggcagngggaanctngcagcngctggnganganccaaancctcngcgctcacctaagccgcaggnagatacacccaactggnanatgangaaacancaaccnatanaggagaactaacccacacaggatcattncncgaaggaacnaggctgaagaaccagacctggactttcttangacaaacttactgcagcttgaaggagccaaccatggatttgaggcgtgtgaaggaatatttctcctggctctactatcaataccaaatcattagctgctgtgctgtttttagagccctgggagccgatctatgtttaacaccatnttactaaccattattgctatggtggtatacactggcctatgtctttattccaaatccacattcgcctggcttggggaatttt

SEQ ID NO: 3218 - DNA, 828 bp, Homo sapiens
  misc_feature 2, 3, 4, 6, 10, 20, 22, 25, 27, 38, 41, 43, 50, 54, 56, 58,66, 73, 74, 77, 78, 83, 85, 87, 89, 98, 102, 363, 370, 375,383, 388, 396, 404, 445, 451, 455, 466, 467, 489, 498, 500,509, 530, 536, 556, 562, 564, 570, 571, 575, 595, 603: n = A,T,C or G
  misc_feature 611, 618, 625, 661, 665, 682, 708, 714, 722, 724, 729, 741,753, 758, 773, 778, 794, 795, 828: n = A,T,C or G
tnnnanattncactttcttnantantnatttcttccanatnanctgattnattntntnattatatntcattannttnnaaaanantnantatttttcnttanatagattgagccctatacgatcatatagggcgaattggagctccaccgcggtggcggccgcccgggcaggtacactgtgttccagaccctgtgccaggcacatggaagacacatctttgtttatacccttcccatggtgtctacatgacactgcctgtattatatttatctgtgttcatatcttgcacaagaggtttgaaaccagtgcccaggcctaattcttttctggtggtcccaaagcacccaaaggccttggggggnaaaattnccccnaaaggggnaaggncccttccnaattaagnttggcttttaattggaaaaaaaatttggaaaattttttggnaccggntggntaattaacccnnccaaaaaggtccttggggccanggaaggggncnttggggaangaaaaatgaaccaaggaaaantccctnttggcctaaaaaaaccttcnaaccangnggtaanntttncaataaccccccccaaaagngggctttnctttaggnccttggnttcttcnaattccaaaaaagggggccccaattccttggggggncctnggaaggggccaatttcnaatttggggttccaaggttttccaancctaanggggtcananaaaangggaaggggggnctcaaccccacnccaanaggggttggccttgnccttngggttggggccttttnnatttttaagggggggaaccccttttccccaaan

SEQ ID NO: 3219 - DNA, 361 bp, Homo sapiens
  misc_feature 5, 6: n = A,T,C or G
gagcnntccgtaatacgactcactatagggcgaattggagctccaccgcggtggcggccgcccgggcaggtacccagggaacaaatgctactgggactccacacctacctaagaagcagctctacccagactccacatggctctctgttttggtctggagaccccagctggggtatctcctgagcccagggattcaaaggttcgtggcagaaatatgcatcccacgggactctcactcactcaccattttcttgtagggggattcccctgggtctgtgccactcctgggtgaatggctgatctgtctcactcttctccgtgatccgaaggtcacactatgtcactgatgaatccttatgta

SEQ ID NO: 3220 - DNA, 406 bp, Homo sapiens
  misc_feature 5: n = A,T,C or G
gagcnccgcgtaatacgactcactatagggcgaattggagctccaccgcggtggcggccgcccgggcaggtacacatttttccattctatctcacgagctcaagagctttatactaaccagcccagaagatattttccttgctctaaataactgtaattttgggggtcatttataccccactttttatttctttcaaggacctcttactgctcattataaatgccattatccttctctacaagcgatcaaatattataaggtctgacaagttagttttatgtttgcattgtaactgaagtcccatccatctatccttcgggagtttctgaaaactctatatgaacttcactcaaaatacacaagtagcatgtaagcgtgctgatcatatttttaaaattatgaaga

SEQ ID NO: 3221 - DNA, 410 bp, Homo sapiens
gagcgcgcgtaatacgactcactatagggcgaattggagctccaccgcggtggcggccgaggtacttgggagggagcaggaggattgcttgggcccagaagtttgaggttgcagtgagctatgattaaaccactgcactccagcgtgggctacagagtgagagcctatctcaaaaaaaaaaaaccaaacccaaaacaataaaaaaaatacttatgtcgcctatcacatttgaccttttcactgcaaattactctatatttgaaataattttatctttctagtaaaaaagggagatttcaccatatctaatgttacttaatataatacttaatgttacttaatgttaatataatacttaatgttactggctcagagactttgccaaaggatagaaataattcataaaacag

SEQ ID NO: 3222 - DNA, 405 bp, Homo sapiens
cgcgtaatacgactcactatagggcgaattggagctccaccgcggtggcggccgaggtacagtgtggttgggagcagctgtgatcccgccaaagacgtgcagcagagactggagagagctcgagccgccacccacttgtgaccagccctgaggatgcagctgcgtgaaagaacctggcagaaaatagaagccgccacagatgcgaatgacgcctgaacgctcagtgtgctccctgtccacacacagccgtgggccaaggaagccttactgtgctcgaggtatttgagcccagcgtttttccagtgctggctaattgctaagctgtgcagacacggtggtgaccccttggaagccaaggttgaaaattaaaataggcatgtgggaaggaacggggtggccacgagc

SEQ ID NO: 3223 - DNA, 407 bp, Homo sapiens
agcgcgcgtaatacgactcactatagggcgaattggagctccaccgcggtggcggccgcccgggcaggtacgcggggacgttaagaactggacttacaagatggataggacctggtggcagctgtccttgaggaagccagagcctggagagacagatctcatgttatagcagagtacctcggccgctctagaactagtggatcccccgggctgcaggaattcgatatcaagcttatcgataccgtcgacctcgagggggggcccggtacccagcttttgttccctttagtgagggttaattgcgcgcttggcgtaatcatggtcatagctgtttcctgtgtgaaattgttatccgctcacaattccacacaacatacgagccgggagcataaagtgtaaagcctggg

SEQ ID NO: 3224 - DNA, 388 bp, Homo sapiens
  misc_feature 5: n = A,T,C or G
gagcnccccgtaatacgactcactatagggcgaattggagctccaccgcggtggcggccgaggtacacgcctgtagtcctagctactcaggaggctgaggcaggaggatggcttgagctgaggaggcagaggctgcagtgagccaacattgcaacactgcaccccagcctgggcattagagccagacctagtctcaaaaaataaataaaataaaataaaataaaataaaatgtttaataatgcctactcagacaaagaaaggctcaggcaaaagactgagtctgatcttctacattgaggagaccatgttgattagtgttatattcaaaaaaaccaattcccaagtaatgcatacacagctgaaagaaggaagtattccagctacacc

SEQ ID NO: 3225 - DNA, 387 bp, Homo sapiens
  misc_feature 5: n = A,T,C or G
gagcnccgcgtaatacgactcactatagggcgaattggagctccaccgcggtggcggccgaggtacagagcctggcacgtagcaagtgttgaaatatctcttggagagagagaaaaaaaatgaatctattaaaatgtctctatgatgcactgcggaagctagacttggtagatcgagtttaagggaatgaagagggggtgaatgtttgctacttccgtatatttggagtatttgataaaacagaagaccagtttctcttcaaacttcatgtcggtttgtaggccaggctgccagggtttagggtacctgcccgggcggccgctctagaactagtggatcccccgggctgcaggaattcgatatcaagcttatcgataccgtcgacct

SEQ ID NO: 3226 - DNA, 409 bp, Homo sapiens
gagcgcgcgtaatacgactcactatagggcgaattggagctccaccgcggtggcggccgaggtacagagggtgccaggcactgtggtgcacacctgtagtcccagctacttgggaggcttgaggcgggcggatgcttgaggccaggagtttgaggctgcagtgtgctgtgattgctcctgtgagtagccactgcacttcagccctggcaacatagcaagaccctgactctaaatataaaaaaaagtatagcgggcacaaatggggcgaagccagggtgggatgcagagtctagagggagatgaagctggagaggcaggcagtggtcaacatgtggccatggaaaatagtttaggtttgattctgatggcactgggctgccattagagggtttgaagcaggtcagtgatg

SEQ ID NO: 3227 - DNA, 371 bp, Homo sapiens
  misc_feature 5: n = A,T,C or G
gagcnccgcgtaatacgactcactatagggcgaattggagctccaccgcggtggctgttaagggaaaccacaggacaacaggtgagtcaccaagcagcaggacagcaacagtgagttaatcatacagagggctaccaccccactgggctgatttcttctgtttaaagaacacattcaaatccaaagcaaagaacgaaataatgtatttctccccatttctccaaaagacaatgctgagctcatgaccacatctcaaaaaagctcctaaccacacccagcagaacctcagcattgagtatataatgcttggctgacaatgtgcccaggggaaatacagtacctcggccgctctagaactagtggatcccccg

SEQ ID NO: 3228 - DNA, 396 bp, Homo sapiens
  misc_feature 5: n = A,T,C or G
gagcnccgccgtaatacgactcactatagggcgaattggagctccaccgcggtggcggccgaggtacaaagttgggaaacaggtgagcaaagaaatccatgggttgagttaacagtgatttctaacttcttgaagaaagagggcatttatttttcaacactctcttctttccagctcaccctaaaatatctaattataagtttacgccatacattaaagtgaaattaaattgaatatgttttaagaaataacattcctaatattctaggaaataagagaattcctaggggctccaccatatcaaacctttgattttactatcacacaatttcttttctcctattttcgaactaccactgtttctagacaaaataccagatggttattttgtttcct

SEQ ID NO: 3229 - DNA, 366 bp, Homo sapiens
  misc_feature 146: n = A,T,C or G
gagcgcgcgtaatacgactcactatagggcgaattggagctccaccgcggtggcggccgaggtaccaatattctgcagaaaaccaaaaccccacctgcattcctactcctatcatgatgttctgccccccgggacccttgtttatngctggtctctccttttgaaagaacgttacccttttcttcacccagcaaattcttactcagacttcaagactcagttcagagtctggggatgaatattctacaaatggcccccaggattgtcatggtcctcacggcaggtacctgcccgggcggccgctctagaactagtggatcccccgggctgcaggaattcgatatcaagcttatcgataccgtcgac

SEQ ID NO: 3230 - DNA, 415 bp, Homo sapiens
gagcgcgcgtaatacgacctcactatagggcgaattggagctccaccgcggtggcggccgcccgggcaggtactaggattgcaggcatgagtcactacactcgcccagaaatttgtttttagagtaactaccatgccattaacaaacctgacaaaattaacaatttcttatcttcaagaactcaattcatattcaaatttttatcatctcaaagctggtttgttcaaacaggagtccaaagtccccatactgcatgtcattactgagaccatactgggactaaggcagggaggaatgagccctaagtgagtctgtaacaagcgagaaagaagctcattcaactaaaagaattaaattgggggtctggcccaagaaagtggaaaaataaacaaagaaaactaaaactattcaggat

SEQ ID NO: 3231 - DNA, 435 bp, Homo sapiens
  misc_feature 5: n = A,T,C or G
gagcnccgccgtaatacgactcactattagggcgaattggagctccaccgcggtggcggccgaggtacacagagacacacacactgagacacacatacacagacacacatacgcttctcatagctgaaaacatggaaggcagtccatctttctagacagtgagtatctaatacaagtcaagacacagtaattacgctacagacaaagggagggaggataaaaaggaaggtcactctgattgaagaggagatggttagtagggggatggatgcaaaggccagatgtgggagaaagagactggcaggcctaaggtcaattcttatcttgtcagtgtggagaaaaatgtgttaccagcagcgtttagtctaatgatgtgtgagagatacacaaaacaaaaaggggggtgagggttttgggtagaaggaaatcatgatc

SEQ ID NO: 3232 - DNA, 436 bp, Homo sapiens
  misc_feature 5: n = A,T,C or G
gagcnccgccgtaatacgacctcactattagggccgaattggagctccaccgcggtggcggccgaggtacttaaggaagggcaagcgttggtagcaagcttggctttttagtgtcctggagctcccaggagaggagcaaagtcttgtctaactaaggcttgttcctgtgaatatgaagatgcttctctccagtcgctcagtgggaaagtcaaatccaaggctttggggaatgagaattccaacattaaggggtaaggagaagagagactcagcattccataggatgctgggcttgaagatggctctccctcctaccacggcatagggatgagaagaaggagggggcacaggttaggtaggagcttactcagtgcatctggaggatggaaaaccaatggcgcactcctccccttcttcaatgtgaagacatttgtct

SEQ ID NO: 3233 - DNA, 435 bp, Homo sapiens
  misc_feature 5, 428: n = A,T,C or G
gagcnccgccgtaataccgacctcactatagggcgaattggagctccaccgcggtggcggccgaggtacaggagggactttgtggagaattcagggtggcagaataagctcctgagaatttaacttaatcttattcttctcaaatttagcttcaatgaagagaaatgaaagctattgtttctcattctcacatctcccagaaagtaacattgaaggtaatctcagtgtccttgaagttagcctttttgagtggttaagttgaaaagaagttctatcttggtgggctcccccagaggctaaatgggcctttgcattgggaggtcaaagtccgggttcatgccattctcccgcctcagcctcctgagtagctgggactacagcccatgaggctactgagctagagtttttgtttgaagatggaggagaanaggaggt

SEQ ID NO: 3234 - DNA, 416 bp, Homo sapiens
  misc_feature 5: n = A,T,C or G
gagcnccgcgtaatacgactcactatagggcgaattggagctccaccgcggtggcggccgcccgggcaggtaccacggtttgtcggtttgtcgctggccctgagtcgctcctagggatggggtgagtgaaattgatgtggagtggcccactcttgccgcagacctctgggagcctacctgtgggagaccccatgattctcatgaacatctgagctggcaggaagaacttcctggagagttgacagagatggaactctagcctgcatggagcccagagggtttgttgtgggaacagttgcagtggagcatggctgtggatatccataacaccatactcctctaggcagctctagcctttgttggctgccagacctggacaatagagggctggcttgcttgtggaatgggaccagtct

SEQ ID NO: 3235 - DNA, 405 bp, Homo sapiens
  misc_feature 5, 348, 349, 350, 351, 352, 353, 354, 355, 356, 357, 358,359, 361, 362, 363, 365, 366, 367, 368, 369, 370, 371, 372,373, 374, 375, 376, 377, 379, 380, 381, 382, 383, 384, 385,387, 388, 389, 390, 391, 392, 393, 394, 396, 397, 398: n = A,T,C or G
  misc_feature 399, 400, 401, 402, 403, 404, 405: n = A,T,C or G
gagcnccgcgtaatacgactcactatagggcgaattggagctccaccgcggtggcggccgaggtacagttcccctgactgttgacgacggagtcctgtttgtggacccgccacctgggttttcttccttggcatgtgtagtccgtgggtgggatggctggagcatcactggctataacctgtttccagagcaagcctgtccaggacaagaaactgtgtgtttttcctatgggaacacagatttccaggaacaagcctgcagcttctctcgcaggtcagagtgatttgtccaatagcagtggcttcaaccaggtcaaatcacggatctgagaggaggggaaggggagtnnnnnnnnnnnntnnntnnnnnnnnnnnnntnnnnnnngnnnnnnnnannnnnnnnnn

SEQ ID NO: 3236 - DNA, 431 bp, Homo sapiens
  misc_feature 5: n = A,T,C or G
gagcnccgccgtaatacgactcactatagggcgaattggagctccaccgcggtggcggccgaggtactacatgtaacaatgacaaagcaattctgtgacagaattgttgtctgatggatgcctgagttttctgattctagatcccaaatatttatagactgtgagaacgcaccttgctagcactggtcaagccaatgtttctgactttttttattatcagtgaagagggctttttgttatagttttaattttcttttattctagaaattgcctcagacagggattgatgtcaggagccttcaaggagaaaaatatacatgaatgggagaccccaggttgcgggcaacaagagtcacaggtatgggagaaaccaggaagtctgtgccatgttgactttgctcatctcatcgtgctttgtacctgcccggcgg

SEQ ID NO: 3237 - DNA, 439 bp, Homo sapiens
  misc_feature 5, 385: n = A,T,C or G
gagcnccgcgtaataccgactttcactattagggccgaattggagctccaccgcggtggcggccgggggccattgagactgccatggaagacttgaaaggtcacgtagctgagacttctggagagaccattcaaggcttctgggctcttgacaaagatagaccactggaacaatgagaaggagagaattctactggtcacagacaagactctcttgatctgcaaatacgacttcatcatgctgagttgtgtgcagctgcagcggattcctctgagcgctgtctatcgcatctgcctgggcaagttcaccttccctgggatgtccctggacaagagacaaggagaaggccttaggatctactgggggagtccggaggagcagtctnttctgtcccgctggaacccatggtccactgaagttccttatgctactttcactg

SEQ ID NO: 3238 - DNA, 427 bp, Homo sapiens
  misc_feature 102, 138, 199, 221, 243, 252, 265, 292, 321, 328, 376, 377,385, 406, 411, 412, 424: n = A,T,C or G
gagcgcgcgtaataccgacctcactatagggccgaattggagctccaccgcggtggcggccgaggtactacatgtaacaatgacaaagcaattctgtgacanaattgttgtctgatggatgcctgagttttctgattntagatcccaaatatttatagactgtgagaacgcaccttgctagcactggtcaagccaatgnttctgactttttttattatcantgaagagggctttttgttatanttctaattntcttttattctanaaattgcctcagacagggattgatgtnaagagccttcaaggagaaaaatatacatngaatggnagaccccaggttgcgggcaacaagagtcacaggtatgggagaaaccannaagtctgngccatgttgactttgctcatntcatnncgctttggaccngcc

SEQ ID NO: 3239 - DNA, 416 bp, Homo sapiens
  misc_feature 1, 61, 64, 65, 68, 69, 71, 77, 78, 80, 85, 86, 95, 99, 100,101, 102, 107, 111, 113, 120, 121, 124, 127, 129, 137, 138,139, 143, 150, 152, 159, 169, 182, 183, 184, 185, 188, 189,192, 194, 196, 199, 200, 201, 202, 203, 204, 208, 215: n = A,T,C or G
  misc_feature 216, 230: n = A,T,C or G
ngagcgcgcgtaatacgactcactatagggcgaattggagctccaccgcggtggcggccgnccnnccnngnactgcnncngattnncctatgatngtgnnnncaatnaatnanactaacnnatnttncntcattttnnntctnagggtgngnatataancccttaattnttatgggctcaannnnagnnagntngncannnnnntatntaaaagnnctgtaggggacatnacccaattccctagccctgcaaggatgtctatagcaaagactgccagttgcctatccaataccccttctgccatcttctgccttttatggctcacagctgcccagtccctcatagctagatgtgaccttgtgactaagttctggcctatgagaagtaagacgtatctcatggtgttttgagaaatc

SEQ ID NO: 3240 - DNA, 432 bp, Homo sapiens
  misc_feature 430: n = A,T,C or G
gagcgcgcgtaatacgacctcactatagggccgaattggagctccaccgcggtggcggccgcccgggcaggtacatggaaccttatgggacacaaacaggagagtcaggcaatgtgaaaagacttctacactattgttattgtgtttccaaaaaaagtaaaaaatagatggataaagtggaaagacaacagagagatagtttggctagctgggtgagttcagtttttctcccacaacttaacctaagcaaaagcttttaagaaattcagactgggaaggctgggtgcggtggctcacgcctgtaatcccagcacttttggggaggccaaggcaggtggtggatcacctgaggtcaggagttcaagaccaacctgaccaacatggcgaaaccccatctctactaaaaatacaaaaattagccaggtgcagngg

SEQ ID NO: 3241 - DNA, 414 bp, Homo sapiens
  misc_feature 5, 177, 200, 221, 238, 315, 403: n = A,T,C or G
gagcnccgccgtaatacgactcactatagggcgaattggagctccaccgcggtggcggccgaggtacttttttttttttttttttttttttttttaggggagacagggtttcaccatgttgcccaggctggtcttgaacccctgatctcaagtgattcgcctgcctcaaactcccanagtgctgggattacaggcatganccaccgtgactggccagtatntttattttaaagatganacaagtaacttgctcaggattgctcacggagtaagtagggaatgtgggatttgaattcaggcagtctgattccagantcattctctcttgctctgtatgactgtgtgttctgtgaccaataaatacacacccccaacttggaggaaaggaatatcatttccaagntgaactaccca

SEQ ID NO: 3242 - DNA, 407 bp, Homo sapiens
gagcgcgcgtaatacgactcactatagggcgaattggagctccaccgcggtggcggccgcccgggcaggtactaggtgcaactgggacaatgctgtgaattttcatgaggagctttgatggtaatgtaatggggagaaaaaaagatgttattttaaaagcatgctgaaattgtttgaaatagtgggaaaaaagcaaacaataaactggcaaaaccaaactaaagactactatacaaccatttaaaagaatgaagtcacaatattgatgacattggaaggagctccaagatttaggtggtggaagagggaaggccaagtttcagaaaatgtgcacaatatgataccacttatgttaaaatacaaagtaaaactacaaaaactgaaaaggcttggaatggttacctctt

SEQ ID NO: 3243 - DNA, 419 bp, Homo sapiens
  misc_feature 5, 20, 419: n = A,T,C or G
gagcncgccgtaatacgacnttcactattagggccgaattggagctccaccgcggtggcggccgcccgggcaggtactaattttacaaaatatggaggcctttcctagaataacaaaatcattataggtttttagtggcaggtttttttgtttgtttggcatggtgtttctttggcataatgatcaatttcttgatcaggaaacccagttctaacatttctaaaattgttttgtttagtgttttctaggagtatttggaagtcaaatgtgtaagcgacttctgtcaggttgacttaaaagtagtcacctcctataatagcgctgtttcaggtggtttcttcctggacacctggacatttcccaggtgttgtcccctcttactcttcaaccctgcaacctaattctacaagctttgcccn

SEQ ID NO: 3244 - DNA, 418 bp, Homo sapiens
  misc_feature 5, 270: n = A,T,C or G
gagcnccgcgtaatacgactcactatagggcgaattggagctccaccgcggtggcggccgcccgggcaggtaccctataccttatcccctcccacctcttgagcctggcctttgtgtagcaaatgttgcttaaggggcagtggcttctcccttcttctgccttgaccctgcccatttatagagtgacctgcctatgtattccttgatttttgattctgataaagcacttgacattttaaacattcttttttttttttttttctttttganacggagtgttgctctctcgccaggctggagtgctgtggcgtgatcttggctcactgcagcctccgcctcccgggttcaagtgattctcctgcgtcggcctcccgagtagctgggactacaggtgcacaccaccatgcccggctaattt

SEQ ID NO: 3245 - DNA, 424 bp, Homo sapiens
  misc_feature 5: n = A,T,C or G
gagcnccgcgtaatacgacctcactatagggcgaattggagctccaccgcggtggcggccgcccgggcaggtacttcctctactttctgataagctttaaaagaaaaaaactaaactaaatatttcaaaatcaatggacttcaagtaatccaagagaatttggaaaacatttctctaaaaactaatccagaacacaaggtgtcagtttggaaataacggaagcatatttcgttttaaaaatctaaaacattttaaagacaaaaattcaagttagcatcccagtgattaactctggaactgcctagccaaaaacaactttcggcacctaaaacataaaactgtcagtttcctctgcttggagacaaaacatacaaaaagcaaacattcactgttatattttcctagacatgaaagatagaactat

SEQ ID NO: 3246 - DNA, 644 bp, Homo sapiens
  misc_feature 72, 124, 187, 197, 267, 305, 310, 377, 387, 397, 436, 460,489, 496, 515, 528, 537, 545, 568, 571, 578, 580, 583, 584,587, 595, 598, 599, 603, 614, 616, 619, 621, 622, 625, 627,630, 632, 633, 634, 638, 644: n = A,T,C or G
gagcgccgcgtaatacgactcactatagggcgaattggagctccaccgcggtggcggccgcccgggcaggtncacactagctgataagacactgttgcccgtaatgtctatttattggatcacncaatttataagtcccacattctcatgccacatagctctacacagctgcaaaaatataccatancttgcaggtnatcattggtttgataaaagatattgagtcgctcatcttgtgaaagtgatctttgatataagaggagcatnagcggggaagctcacatgtcccgtggctcacacaccanaaggnatttgtgtcttgtcattgtctgtctggcagtccatggcaatggctttttcagagaggcctgttttgnggttaactgngtgtacctcngccgaggtacctgggaaaaggctgtttgtgtcaccaggnggggagaaattcaccttatggtanaattgctctctttggttcattatttctgngaactcntcaggagacacacactttngggaggctaggcnttttggcangtctatgngctggacaccaacttgtccaggnganaacctgnancannatnctgggatnctnnaaangaaaaaaactngntgntnnccnanccntnnnaaangccccn

SEQ ID NO: 3247 - DNA, 630 bp, Homo sapiens
  misc_feature 97, 519, 537, 551, 561, 587, 609, 628, 629, 630: n = A,T,C or G
gagcgcgcgtaatacggactcactatagggcgaattggagctccaccgcggtggcggccgaggtactacggtggtaacagtgttgagaattcagcancaacaagattgagaatccggcagagctgaaccagtgacagattcgcaaggtggactatttggtggcacgaccctggttgtgtttgccactgctgagctttccttgatttctgctcattttcagatctggttctcccatgttcttgctgattctgagagctgcccaacctacttcaataaattccttttctgcataagacagccagagtcagtttcttggttacagacaagacttccaactcatagtcacccaaaatatacccatcctaactcccgctgtaataattagccacattcatttgtttaaataagcaaagatcactcaaagttcctgaaaactccattatttaatgactgtgtctatcaataccaaacttcctaattcagaaggacaaacaaaagaacaaaagaataacaaatacnatcaaaaggttaggtcanaagtgccggatttngaaagaatanatgaaatatgcattttcattttcagnatttttatttattttttttganatggagtctcactctgtcnnn

SEQ ID NO: 3248 - DNA, 650 bp, Homo sapiens
  misc_feature 93, 94, 247, 579, 598: n = A,T,C or G
gagctcgcgtaataccgactcactatagggcgaattggagctccaccgcggtggcggccgaggtactttttctttgtttatttcaagagggtnnattgggcaatctacacaagtttggggtccttgcaatcaatcaagacccgaagggagtagcggtttctcagttttattactcctgtaaatccttcttctagtttatttctggtcttgcagaaatatttttcctaccagctgcattggacatggngaagtttttttgtaacttttgaagattttcagttttctgcattaaataatactttggagtatatacaatttttttgttctacatcatatatccacactgcacatagatattttctggcagaacaatatcccataaaaaatcttaagcttctttagttagaataccataaccttcatatgctacatggtaacattacccgcgtacctcggccgctctagaactagtggatcccccgggctgcaggaattccatatcaagcttatcgatacccgtcgacctcgagggggggcccggtacccagcttttgttccctttagtgagggttaattgcncccttggcgtaatcatggncatagctgtttcctgtgtgaaattggtatcccctcacaattccacacaacaa

SEQ ID NO: 3249 - DNA, 642 bp, Homo sapiens
  misc_feature 5, 90, 97, 144, 360, 515, 604, 618, 619, 624: n = A,T,C or G
gagcnccgcgtaatacgactcactatagggccgaattggagctccaccgcggtggcggccgaggtacctccgcatccctttcctccccangtggctngagtggcttcaagctctagcactgcctaacaaacaaacaaacacctnagtgacttgtgatttccccccagaaaaatatctattaattatttcccaatggtctccacctcggcatcagggcacaaggtgtaggcacatgctctgatcttgcacctaggaaaccgtcattatcaagggcatcccctagtccactgtgctccccggtaagtacctgcccgggcggccgctctagaactagtggatcccccgggctgcaggaattcnatatcaagcttatcgataccgtcgacctcgagggggggcccggtacccagcttttgttccctttagtgagggttaattgcgcgcttggcgtaatcatggtcatagctgtttcctgtgtgaaattgttatccgctcacaattccacacaacatacnagcccggagcataaagtgtaaagcctggggtgcctaatgagtgagctaactcacattaattgcgttgcgctcactggcccctttccagncgggaaacctgtcnngccanctgcattaatgaatcggc

SEQ ID NO: 3250 - DNA, 427 bp, Homo sapiens
  misc_feature 5: n = A,T,C or G
gagcncgcgtaatacgactcactatagggcgaattggagctccaccgcggtggcggccgaggtactttagctactcgaacagcatgcagacagggtaagaatcacagaacctggccgaatacacagctcattcagcatcaaccacaaggtggcgctgcttcaatgctgattcagatgcacagccctgctagagacgtttctccaccatcaaggctacatttgcttgtgtcctttccaggccggccaaaaatgctttctccttaaggtttcaggtaatacacatatggctaacagtctatattgagaaagtaaaccactgaggcacagcaactccctacccccatcttaggacagactctgactgcacctgagaggacttatctcagcctcccttagttaacaaggcaacaaagtggggcagaaaggc

SEQ ID NO: 3251 - DNA, 836 bp, Homo sapiens
  misc_feature 3, 4, 5, 6, 8, 515, 583, 601, 619, 642, 651, 672, 727, 729,735, 748, 758, 760, 767, 769, 781, 785, 794, 801, 809, 823,829: n = A,T,C or G
ggnnnngncgcgcgtaatacgactactatagggcgaattggagctccaccgcggtggcggccgaggtactcacatgctgagggtaagaggcagaatttcttttgcttgtaagtaacaggatcttttccagagcctgggtctgaagaccccaggtgtagatggaacttcagttatgactggatccgtgagttcaaaggatgccactccccgcgtacctgcccgggcggccgctctagaactagtggatcccccgggctgcaggaattcgatatcaagcttatcgataccgtcgacctcgagggggggcccggtacccagcttttgttccctttagtgagggttaattgcgcgcttggcgtaatcatggtcatagctgtttcctgtgtgaaattgttatccgctcacaattccacacaacatacgagccgggagcataaagtgtaaagcctggggtgcctaatgagtgagctaactcacattaattgcgttgcgctcactgcccgcttttcaagtcnggaaacctgtcgtgccagctgcattaatgaatcggccaaacgcgccggggagaggcggtttgcgtatnggcgctcttcgctttctnggttcattgactcgctgngctcggtccgttcggctgcggcnagccggtantcagcttactcaaaggcggtnaataccggttatttcccaagaattaaggggaataaccccaaggaaaagaacattntngagcanaaaagggccaacnaaaaagggcnangaacccntnaaaaagggcccngttngcttggcgnttttttncataaagnttcccccccccttnaacgangaaatat

SEQ ID NO: 3252 - DNA, 422 bp, Homo sapiens
  misc_feature 4, 28, 29, 90, 240, 245, 262, 274, 279, 296, 331, 344, 345,346, 347, 348, 349, 350, 351, 352, 353, 354, 355, 356, 357,358, 359, 360, 361, 362, 363, 364, 365, 366, 367, 368, 369,370, 371, 372, 373, 374, 375, 376, 377, 378, 379, 380: n = A,T,C or G
  misc_feature 381, 382, 383, 384, 385, 386, 387, 388, 389, 390, 391, 392,393, 394, 395, 396, 397, 398, 399, 400, 401, 402, 403, 404,405, 406, 407, 408, 409, 410, 411, 412, 413, 414, 415, 416,417, 418, 419, 420, 421, 422: n = A,T,C or G
gttntcgcgtaataccgactcactattnnggcgaattggagctccaccgcggtggcggccgaggtacagttcccctgactgttgacgacngagtcctgtttgtggacccgccacctgggttttcttccttggcatgtgtagtccgtgggtgggatggctggagcatcactggctataacctgtttccagagcaagcctgtccaggacaagaaactgtgtgttttttttatgggaacacanatttncaggaacaagcctgcancttctctcgcangtcanagtgatttgtccaatancagtggcttcaaccaggtcaaatcacggatctganaggaggggaaggnnnnnnnnnnnnnnnnnnnnnnnnnnnnnnnnnnnnnnnnnnnnnnnnnnnnnnnnnnnnnnnnnnnnnnnnnnnnnnn

SEQ ID NO: 3253 - DNA, 417 bp, Homo sapiens
  misc_feature 5: n = A,T,C or G
gagcnccgcgtaataccgactcactattagggcgaattggagctccaccgcggtggcggccgcccgggcaggtacgcggggacacattcagaggtgagcccagagcgggtaaagtggactggggagaacttcggaggatgttcatgtccaggagcagccccacgccctgtatggtcggtgtctagagcctcacagcaactaagaccaacccagctctcagaagaaggaatgtcaaaatgtcatgttcaattttacattcagtgcctggaatcttttcttcacaattgaaatgaaatgtgctgaaggaggtgaatccatgcattaatcttcagctcacaaaggaaatactacataagaagcaagaccacagactcaagacggacataattggattttttttgccatggcctagaaaga

SEQ ID NO: 3254 - DNA, 652 bp, Homo sapiens
  misc_feature 5, 88, 527: n = A,T,C or G
gagcnccccgtaatacgactcactatagggcgaattggagctccaccgcggtggcggccgaggtacctgtctcattctggcaacttgngacatttctcaatccaaacaatatctttaaggtattaaaccctatgtttttggctgaagaaactgacctcagaaatgacaagcaatgtatctaaagagcagtaagtaggccgggtgcagtggctcacgcctgtaatcccagcactttggaaggctgaagcggacagatcacctgaggtcgggagttcgagaccagcctgaccaacatgcagaaaccccatctctactaaaaatacaaaattagctaggtgtggtggcaggcacctgcagtctcagctactcaggaacctgaagtaggagaattgcttgaacctgggaggcggaggttgcagtgagctgagatcacgccactgcactccagtctgggcgacagagcaagactctgtctcaaaaaaaaaacaaaaacaaaaacaaaaacaaaaacaaaaaaaaaaaacggnaagtagcaaatctgagatttgaattgagaattgactctaaaagcccatgctgcttctaaaacagaaccttctgcaccttctctctatccctaatacttcttttccacctatacaggaatagacca

SEQ ID NO: 3255 - DNA, 660 bp, Homo sapiens
  misc_feature 10, 17, 89, 95, 393, 620, 642, 657: n = A,T,C or G
gagctccccntaatacnactcactattagggcgaattggagctccaccgcggtggcggccgaggtacgcggggggaatggcttgtgccntacccnattctgatcggtcactgatgcaggaaacagggaatggcgtgccttaccccattctgatcagtcactgatgcaggaaacagggaatggcttgtgccttaccccattctgatcagtcactgatgcaggtaacagggaatggcgtgccttaccccattctgatcagtcactgatgcaggtaacagggaatggcgtgccttaccccattctgatcagtcactgatgcaggtaacagggaatggcgtgccttaccccattctgatcagtcactgatgcaggtaacggaatgggcgtgccctangcaaggctttgctttcagatgaagcagggcttaaatttgaatgacatgagggctattttatgccttcctgggactccagatggcgcctcataggatctcacacaagtgaatcatttatatcatgggttcgtcatgtttttagcatgttaacagatatgccaaagtgtaatggagaatcaatgaaaagaaaaataatgtattaatggaaatattaagaaaaggcttcntgcacattgaataacaggcatnaatacaatgggtgcnttt

SEQ ID NO: 3256 - DNA, 425 bp, Homo sapiens
  misc_feature 3: n = A,T,C or G
gcnccgcgtaataccgactcactatagggccgaattggagctccaccgcggtggcggccgcccgggcaggtacagatcccaaggccattgttcgcatagacagtgtgcacacctggtcagtcaaacagccttgcccgtgcctgtgcctctcctgtggggcctctgagcctggactcttcaccctagctcaaccactcctctgtctttttcttcactgctgtttgcttatttcaaagggagaaaatctgttggtcacagtggtcaccaccgtatccactggccagtctttctatgccacctgcagtctgctggctgattgtccttgagttacatatccactccaagcaaacatacactccaatcacccatggccgagatgttgggttcacacttggcactagtgagatttcttatgggagtggatt

SEQ ID NO: 3257 - DNA, 425 bp, Homo sapiens
  misc_feature 5: n = A,T,C or G
gagcnccgcgtaataccgactcactatagggccgaattggagctccaccgcggtggcggccgaggtactgccacaaatttgctatctggtaacatatgaatggtttactctcaacaagtctaccgagacatatttcctgtcttgttaagacactttaagagaagagtctagtaattacacatgtaatgactttgcagtggctcacgcctgcaatcccagcactttgggaggctgaggggcggtggatcatgaggtcaagagatcgagaccatcctggtcaacatggtgaaaccccgtctctactaaaaatacaaaaagtagctgggtgtggtggttcatgcctgtaatcccagctagtttgtaggctgaggcaggagaactgcttgaacctgggaggcagaggttgcagtgagccgagatcgtgc

SEQ ID NO: 3258 - DNA, 427 bp, Homo sapiens
gagcgcgcgtaataccgactcactatagggcgaattggagctccaccgcggtggcggccgcccgggcaggtacgcggggagagctcaggacctctgagaagaatggagccctcctggcttcaggaactcatggctcaccccttcttgctgctgatcctcctctgcatgtctctgctgctgtttcaggtaatcaggttgtgccagaggaggagatggacgatcagagccatgcacctgtttcctgcaccccctgcgcactggttctatggccacaaggagtcttacccagtaaaagagtttgaggtgtatcctgagctgatggaaaaatacctatgtgccgttcccttgtgggttggaccctttacgatgttcttcaatatccatgacccagactatgtcaagattctcctgaaaagacaaggtaaaa

SEQ ID NO: 3259 - DNA, 429 bp, Homo sapiens
  misc_feature 5: n = A,T,C or G
gagcnccgcgtaataccgactcactatagggcgaattggagctccaccgcggtggcggccgaggtactgcataactaaaattgactttttttaaaagccagaactatgtcacagttggtgcttataattgtttcaaaattataccgactttatttaattccatgcaacgcatttccacatagaaatggaatagcaaactcctactcaatagcaaacaataaaataaaataaaataaagtatgtaagctttttcctcttcttagacactgtccccagaatggaaaagttataaagaaaggtaggtaaaaatcctgcagcttacacatttttccactgagaaggcaaatccttactcctccagaaactaaaatattagaccccaaacagtgtagggggaagaggggtaggaagttgaaaaaaagaaaaaaa

SEQ ID NO: 3260 - DNA, 424 bp, Homo sapiens
  misc_feature 2, 7, 30, 32, 36, 37, 49, 68, 75, 83, 86, 89, 127, 229, 230,235, 236, 248, 249, 253, 266, 290, 291, 292, 293, 296, 300,301, 302, 305, 312, 315, 316, 323, 324, 332, 335, 341, 345,348, 349, 352, 356, 361, 362, 365, 367, 372, 378: n = A,T,C or G
  misc_feature 379, 390, 405, 410, 419, 424: n = A,T,C or G
gnttcgnggaaccgactcactccctggcgnanaacnnctccaccgcggnggcggccgacgctagattntttgagnggcaaaanaanccnctcacatcatgagtgagtcttctaactcggacaatgcnttcaacaaattctaagaccaaatcccggaggcactggctccaaaaaaaaaaaaaaaaaaaggacctcggccgctctagaactagttggaacccccgggcttnnggaanncgaaatcaaccnnaacnaaaccggcgaccncgagggggggcccgggacccagcnnnnggncccnnnagngaggggnaanngcgcgcnnggcggaancangggcanagcnggnnccngggngaaannggnanccgcncacaannccacacaacanacgagccgggagcanaaagnggaaagccnggggn

SEQ ID NO: 3261 - DNA, 429 bp, Homo sapiens
  misc_feature 220, 406: n = A,T,C or G
gagcgcgcgtaataccgactcactatagggcgaattggagctccaccgcggtggcggccgcccgggcaggtccgggcaggtactttgttgggaattaaggatgatgatgcagatctgagtcaggctctttgtctggccatctccgtgtcagagatccttcaagcgaatcagctacaaggggaaggagtccggttctttgtggtggattgccgtcctgcanaacaatataatgctgggcatttatcaactgctttccacttagattcagacctgatgcttcagaatccatctgagtttgcacagtcagtaaaatccttgctggaagcacagaagcagtccattgagtctggctccatagctggtggggagcacctctgttttatgggcagtggcagggaggaagaanacatgtatatgaacatggtcctg

SEQ ID NO: 3262 - DNA, 663 bp, Homo sapiens
  misc_feature 5, 10, 89, 93, 248, 249, 539, 545, 591, 613, 656, 659: n = A,T,C or G
gagcnccgcntaatacgactcactatagggcgaattggagctccaccgcggtggcggccgaggtacaatgcccttggagggagaggggnttcntggaaaatggttgccatgataggatttggggagaacctctatgtttgagggagtttgggtcaggacctatccgtggaagcaaaaactagtgcccaaatattcaaaacatagtttggtgaaagatcacctatgattctgaacgaaatagtgtagannaagacatctggaagttttcctattgaaaaaaagaaagtgtgaaatcagatacttttgtttttaaggctctctttcttaaatttcctaacttggccaaaatgtcaatggtacctgcccgggcggccgctctagaactagtggatcccccgggctgcaggaattcgatatcaagcttatcgataccgtcgacctcgagggggggcccggtacccagcttttgttccctttagtgagggttaattgcgcgcttggcgtaatcatggtcatagctgtttcctgtgtgaaattgntatccnctcacaattccacacaacatacgagccgggagcataaagtgtaaancctggggtgcctaatgagtganctaactcacattaattgcgttgccctcactgccccctttccantcnggaa

SEQ ID NO: 3263 - DNA, 680 bp, Homo sapiens
  misc_feature 87, 93, 249, 635, 646, 659, 676, 678: n = A,T,C or G
agcgcgcgtaatacgactcactatagggcgaattggagctccaccgcggtggcggccgcccgggcaggtaccatcgccctttccttntctatngcaaacccagagtagggagacagggaaccagcaatgtcagaaggagccgatattttgcatggagctaaggcttctgctcatcatttctcctctaggaagcaggaagccattgaaatccatccctaatgtatcccaaatgtccacttgctgagggcnggattgcacaagcaacaatcttttgctcatgaagcttagggagcactgtcccagggtatcaattggcccaaagctggtctcttcctacagaccatgcggcaaatcagaacataagaggacttgaggcccacagccctgagtttcaattccagttctgtattttaggtctgtgttcgtaattagtatcataattaactgagaaggttatttagatttattgagcctcttttttgtaaaatggactattcatatacaactgcagaaaaaccaaatccccccaaaaaacccttgctacttaatacaaaaacctaactgcaggcacttctactttgcgtgggttgacagaataacccatcactattcaccacccaaaacaaacaccccanatcccgtgggnggtattaaaaaanaatgctggaatctcttncnca

SEQ ID NO: 3264 - DNA, 443 bp, Homo sapiens
  misc_feature 443: n = A,T,C or G
gatttccgcgtaatacgactcactattatggcagaattggagctccaccgcggtggcggccgcccgggcaggtacttaggactatggagaaacaatggaagacattaattctgcttgtcttgatggtaagggtggggatgaaaatacagatcgaatttgggggagcatgttaaggttaggggaatagagatagcttatatttagaacaagttagtagagactgtatgattttccaaatagagaagggtaaaaagacattccatagaggaagaaaattacatgcaaaaccacagagaccttagtttataaagagtaactgggtatggccgggtgcggtggctcacgcctgtaatcccggcactttgagaggctgaggagggttgatcatgaggtcaggagatcgagaccatcctggctaacacggtgaaacccgtctctactan

SEQ ID NO: 3265 - DNA, 440 bp, Homo sapiens
  misc_feature 5, 351, 371, 390, 396, 411, 425, 429, 435, 439: n = A,T,C or G
gagcnccgcgtaatacgactcactatagggcgaattggagctccaccgcggtggcggccgaggtacactttaatatcccaaagtgggcttggcagctcatctgcgcagagattccagcattctctttaataccaccacggatctggggtgtttgttttggtggtgatagtgatgggttattctgtcaaccacgcaaagtagaagtgcctgcagttaggtttttgtattaagtagcaagggttttttggggggatttggtttttctgcagttgtatatgaatagtccattttacaaaaaagaggctcaataaatctaaataaccttctcagttaattatgatactaattacnaacacagacctaaaatacanaactggaattgaaactcanggctgngggcctcaagtcctnttatgttctgattngccncatggnctgna

SEQ ID NO: 3266 - DNA, 414 bp, Homo sapiens
  misc_feature 31: n = A,T,C or G
gagcttttcgtaatacacactcactataggnttgaattggagctccaccgcggtggcggccgaggtacctgaggctctgtgccagtggggatgacgggggctgatgtctcttcccatgggctcctatggatttgcccttcagatgacctggtagggctctgagtgactgacttaaagaccttcgtaacgccaaagtggcaagattttggagacagatttgtgtctcctcatccatgatttttgactttaatcttttctgagaagaccagaaatcagagagtttgtcttctcagcctctctgtgcaaggatctgctgagctcaagcttcccttttcagcgtcagctttttaagttgagaataataattaaagaaaactccaatctcaattccaacatcaagtgtccatgaagctg

SEQ ID NO: 3267 - DNA, 413 bp, Homo sapiens
  misc_feature 5, 413: n = A,T,C or G
gagcnctccgtaatacgactcactatagggcgaattggagctccaccgcggtggcggccgcccgggcaggtacagtagtcactcttgtcacagtggttattgtatcagacgatacagaacatgttaatcatcatagaaagttctggacagtggtgctctagagtctcaacatgtcacgtgttcgggggatcactggatctaaagccattccttatgggaaatgttggctttcttgaaaatacaccggagaccagagaaggtcaccatgtggagaagaggcagccttcactctgccaagaatgctggccaggcttctctgttttatatctcatcacaatgagggccattctggccctccaaaatatggataccaacctttacgcactgtcagaaatgggccacaattaagtgtn

SEQ ID NO: 3268 - DNA, 410 bp, Homo sapiens
gagcgcgcgtaatacgactcactatagggcgaattggagctccaccgcggtggcggccgaggtaccagagtccatgttcttaaaccattaatctacgatgcctctcaagtaaatagtcaattagtggtaggtgtgaggctgtaggaaaaagaggagacgaagggacaggaaagcagtcctcattggaaaactaggtttcgactggcactgttggactgggctgcagtttaggtcctcccactgctgagttccctcacttcatctcctggtgcttctggtttcccatttataaaatgcaagggaaggattctatttatgtcacaaggtgcatctaaggagtaaaaagtcacgtcatgtttgaccaatgttagtcagatcaagatttattttagataaattatctgttagtt

SEQ ID NO: 3269 - DNA, 421 bp, Homo sapiens
  misc_feature 17: n = A,T,C or G
gagctttcgtaatacanactcactataggtgttgaattggagctccaccgcggtggcggccgcccgggcaggtacaagcagtaggctgaactcatgtgccaggcagaggtctgatgaacaccaccgccagtccaccggcactggggtcagtgtgttagcggggatatgtggtgctgtttcccagagtgcaaaaaggacagggaggccctgtcacatgaatgctgagtcaaatttatatatatagaaacaagacattgcctggcagggaagatgagccatgttagtgtgggctgtgccaccacttcaccattgcactgattacattgtcgcacagatagctactgcccataatcctgtctcctggcttaagtaagtcagaaatcactgctttataaatgaattcctaaggtggttagcaatg

SEQ ID NO: 3270 - DNA, 415 bp, Homo sapiens
  misc_feature 4: n = A,T,C or G
agcncgcgtaatacgactcactatagggcgaattggagctccaccgcggtggcggccgcccgggcaggtactaagttgaagtaaagctcaccctttacttccctacttgaaagttctactctgagccttgactcttagccacagtgaggcatgttgaaggttcctgctggtttattctttttttttttttttttagacagagtctcactctgttgcccaggctggagtgcagtggcacgatctcggttcactgcaagctccgcctcccgggttcatgccattctcctgcctcagcctcccaagtggctgggactgcaggcacccgccaccacgcctggctaattttttgtatttttagtagagacaggatttcaccatgttagccaggatggtctcgatctcctgacctcgtgac

SEQ ID NO: 3271 - DNA, 410 bp, Homo sapiens
gagcgcgcgtaatacgactcactatagggcgaattggagctccaccgcggtggcggccgaggtacctaccccagtgttcctcctgagatggcctatggttggatggttgagcacaaacacaggcaccgtcacaaacacagagaacgccgttcttctgaacaaccccaggtttctatggacactggctcttctcgatctgtcctggaatctttgaagcgctatagatttggaaaggatgctgttggagagcgatataagcataaggaaaagcaccgttgtcacatgtcctgccctcatctctctccttcaaaaagcttaataaacagagaggaacagtgggtccaccgagagccttcagaatctagtccattggccttgggattgcagacacctttacagattgactgttc

SEQ ID NO: 3272 - DNA, 413 bp, Homo sapiens
  misc_feature 3: n = A,T,C or G
gcnccgcgtaataccgactcactatagggcgaattggagctccaccgcggtggcggccgaggtactacaaagatcctggggagcctgtaggtgacacgtatgatttgctgcaagaaatttcacaattaataacaattctaggtctatatggttgatttgtgataaaagtcacctatggcaaaaacaagagagaagttgtagggagtagtttgggaagtggtaaggtgagcaaaggcaggaatcttctggacaccaggaatgtaaattgggggaagaaaaatattccaaattttctagtcattgaggaactgccaataacattaattatgaatcatctatgtgagctgtagaatggtcttttctgtgtttgttcatccattcaataaatacatactgggggtggccatgtgcct

SEQ ID NO: 3273 - DNA, 414 bp, Homo sapiens
  misc_feature 17, 31: n = A,T,C or G
gagctttcgtaatacanactcactatagggngaattggagctccaccgcggtggcggccgaggtacggggggacgttcagaggtgagcccagagggggtaaagtggactggggagaacttcggaggatgttcatgtccaggagcagccccacgccctgtatggtcggtgtctagagcctcacagcaactaagaccaacccagctctcagaagaaggaatgtcaaaatgtcatgttcaattttacattcagtgcctggaatcttttcttcacaattgaaatgaaatgtgctgaaggaggtgaatccatgcattaatcttcagctcacaaaggaaatactacataagaagcaagaccacagactcaagacggacataattggattttttttgccatggcctggaaagaaaggtacc

SEQ ID NO: 3274 - DNA, 406 bp, Homo sapiens
gcgtatacgactcactatagggcgaattggagctccaccgcggtggcggccgcccgggcaggtacgcgggtgcccggcctcaattatttttcttacactagttccagaacgttatatgtatattatatgtgctcatacatttttacctttcctagcctcatttaaaaatgttccagctggctcacacctgtaatcccagttactcaggaggctgaagcaggataatcgcctgaacccaggaggcggaggtggcagtgagctcagatcacaccactgcactccagcctgggtgacagagcaaggctctgtctcaaaaaaaaaaaaaaaaaaaaaaaattagtacctcggccgctctagaactagtggatcccccgggctgcaggaattcgatatcaagcttatcgat

SEQ ID NO: 3275 - DNA, 420 bp, Homo sapiens
gagcgcgcgtaatacgactcactatagggcgaattggagctccaccgcggtggcggccgaggtactcacatgctgagggtaagaggcagaatttcttttgcttgtaagtaacaggatcttttccagagcccgggtctgaagaccccaggtgtagatggaacttcagttatgactggatccgtgagttcaaaggatgccactccccgcgtacctgcccgggcggccgctctagaactagtggatcccccgggctgcaggaattcgatatcaagcttatcgataccgtcgacctcgagggggggcccggtacccagcttttgttccctttagtgagggttaattgcgcgcttggcgtaatcatggtcatagctgtttcctgtgtgaaattgttatccgctcacaattccacacaacatacga

SEQ ID NO: 3276 - DNA, 408 bp, Homo sapiens
  misc_feature 60, 63, 65, 68, 71, 73, 74, 85, 90, 95, 296, 320, 327, 334,335, 338, 345, 347, 349, 351, 352, 353, 354, 356, 357, 358,359, 360, 361, 362, 364, 365, 366, 367, 368, 369, 370, 371,372, 373, 374, 375, 377, 378, 379, 380, 381, 382, 383: n = A,T,C or G
  misc_feature 384, 385, 387, 388, 389, 390, 391, 392, 393, 394, 395, 396,397, 399, 400, 401, 402, 403, 404, 405, 406, 407, 408: n = A,T,C or G
cgtatacgactcactatagggcgaattggagctccaccgcggtggcggccgaggtacttnttntnttntancnntgaaggcacanacaangcggncctggcactaggcatgctgtctagcacatcacagaccctcaatgaatactataggttgaattaaatgtaggacctaagggagtaaaaagaacagcgtcctccagcatttatgcagctggaggccaggaatcttccctctggctttgcactacagtaaagatatttacttatttttttaacaaagttttattttaggctcangagaatacatgtgcatgtttcttntataggnaaactcnngtnatggaangntngnnnnannnnnnnannnnnnnnnnnnannnnnnnnnannnnnnnnnnnannnnnnnnnn

SEQ ID NO: 3277 - DNA, 397 bp, Homo sapiens
  misc_feature 52, 57: n = A,T,C or G
gtatacgactcactatagggcgaattggagctccaccgcggtggcggccgangtacncggggacacattcagaggtgagcccagagcgggtaaagtggactggggagaacttcggaggatgttcatgtccaggagcagccccacgccctgtatggtcggtgtctagagcctcgcagcaactaagaccaacccagctctcagaagaaggaatgtcaaaatgtcatgttcaattttacattcagtgcctggaatcttttcttcacaattgaaatgaaatgtgctgaaggaggtgaatccatgcattaatcttcagctcacaaaggaaatactacataagaagcaagaccacagactcaagacggacataattggatttttttgccatggcctggaaagc

SEQ ID NO: 3278 - DNA, 391 bp, Homo sapiens
  misc_feature 2, 4: n = A,T,C or G
tntngggcaattggagcctccccgcggtggcggccgaggacacacagttaaccacaaaacaggcctctctgaaaaagccattgccatggactgccagacagacaatgacaagacacaaataccttctggtgtgtgagccacgggacatgtgagcttccccgctgatgctcctcttatatcaaagatcactttcacaagatgagcgactcaatatcttttatcaaaccaatgatcacctgcaagctatggtatatttttgcagctgtgtagagctatgtggcatgagaatgtgggacttataaattgctgatccaataaatagacattatgggcaacagtgtcttatcagctagtgtgtacctgcccgggcggccgctctagaactagtgga

SEQ ID NO: 3279 - DNA, 392 bp, Homo sapiens
  misc_feature 2, 4, 9: n = A,T,C or G
tntngggcnaattggagcctccccgcggtggcggccgcccgggcaggtacttaagtgtcccacgcaatgggttgggccagggaaagctcagtggtttgggtcttacactcagccttgggggaggggaggggactggtggggagaggtgaagctgggtagagctggactgggcaagacagccatttggtcccccagtagcaggcacaagcactggctctgacagggatctagggacagttgccaaaccctgtagaaatgcctaggcaaagatgagagcaactgacattgcatcaatgtcccagcacaggaaggcaagggcaaacccattgttaaaaccaggcaaacagtatgggacctgcctctctctctctctccagaaccatcaggactca

SEQ ID NO: 3280 - DNA, 417 bp, Homo sapiens
gccgtaataccgactcactatagggccgaattggagctccaccgcggtggcggccgcccgggcaggtactctgcgttgttaccactgctttcccgcgtacatgctgatatagggacagcttagagcattagggagctgctaagagagaagagggctggaatagcaagccaagagttacgtgggctcagagggaggaggaagccctcccaggtggcagtctgcgaaatgaggaaaggtcccatagagaagatgtcatttgagcagatctgttttgatagacagtatttagatgcagcctaaacgaagagaactgcatgggcagagactctgaggcaggaaagtacctcggccgctctagaactagtggatcccccgggctgcaggaattcgatatcaagcttatcgataccgtcgacc

SEQ ID NO: 3281 - DNA, 418 bp, Homo sapiens
gcgtaatacgactcactatagggcgaattggagctccaccgcggtggcggccgcccgggcaggtacttttagtagagacagggtttcaccatgttggccaggctggtctcaaactcctgacttcaagtgatccgcccacctcgacctcccaaagtgctgggattacaggcatgagccaccgcagctggccaaggcagagcttcttataaggtgagaggagtaaaagaggagcatgtgtaggttgaaaaggtgcacaggtgagtgtgttcactgacacacatcttatcccctgaaaaatatttaaaatgtatatgaatacatcccaggaaaaaataaatcaactaatcaactctgaaaatccttcatctctacttaaaaatgacaccacgctgactctacataagattaaaacaaaatg

SEQ ID NO: 3282 - DNA, 425 bp, Homo sapiens
  misc_feature 5: n = A,T,C or G
gagcnccgcgtaatacgactcactatagggccgaattggagctccaccgcggtggcggccgaggtactggaggtccgagctaccacagaagacaacaaaaatcaatataaggtataggaagattggaaagaaagaaaacaaaccacctaggctgaaatcccaaacaaactggacacgcaaattattaaaggtgatttcataaatgttatgtcatttaagacagccatataaaaggaatcattattcccattttctctatgaggaaatagaggctcagaaaggttttgagcaacttgcctgaagttgaagtccccccagcatattaagtgctgaagccagaattcaaaccaattgataatttcagtgctcttcaccgtagaccacatgacctcccctcagttaatattcacccgttttgccagtgg

SEQ ID NO: 3283 - DNA, 420 bp, Homo sapiens
  misc_feature 5: n = A,T,C or G
gagcnccgcgtaatacgactcactattagggccgaattggagctccaccgcggtggcggccgaggtacctccgcatccctttcctccccaactggcttgagtggcttcaagctctagcactgcctaacaaacaaacaaacacctcagtgacttgtgatttccccccagaaaaatatctattaattatttcccaatggtctccacctcggcatcagggcacaaggtgtaggcacatgctctgatcttgcacctaggaaaccgtcattatcaagggcatcccctagtccactgtgctccccggtaagtacctgcccgggcggccgctctagaactagtggatcccccgggctgcaggaattcgatatcaagcttatcgataccgtcgacctcgagggggggcccggtacccagcttttgttc

SEQ ID NO: 3284 - DNA, 425 bp, Homo sapiens
gccgtaataccgacctcacctatagggccgaattggagctccaccgcggtggcggccgaggtacacaggtaaccacatttagatggactgggatgttgccacacatacaagcattgataactgacttctcattacctgaatacattcttctgtcagagcaacagactcagctatgcttctggcaaaattgttcttaattctctattgattaatttattcggtaagtatttattgggtattttctgtctgaaaagtgcgattccaggtgctttatgtgtctctgtgtgtgggtgttatataaatacttataatactgtatccatactcttgaaaagcttagttgggaaggcaaggcatgcaataaggaacacagaattttagtcattccacaaccatctgttgaatggctgctattgttagtatcg

SEQ ID NO: 3285 - DNA, 426 bp, Homo sapiens
cgccgtaataccgactcacctatagggccgaattggagctccaccgcggtggcggccgaggtactctaagactcctaatccaggccaattcctagtggaccaataacaaaaagcccaattaccttcttcaactacacttaaaatcataaagcttcaaagatgcaatgacctaatacaacccaccttccagttttggaagcactgtgctccatgcaatattctgcgatggtcagtctagtataaaaggacttcctggagggtctgctccaaatactaatgcagaggtcacaaattggtggccctcaggccacatttggcccattaaagtattgttttatttgcttcatagtctttaaaaaaaaaactcaattagtcatcaacatttacagaataaagatgtcacataaaaatttgtgttactagctc

SEQ ID NO: 3286 - DNA, 422 bp, Homo sapiens
cgcgtaataccgactcactatagggcgaattggagctccaccgcggtggcggccgaggtactacaattaaaccgcagcccatctccagatattcagaccatttaatctccaaatagcaggcatttaacacctcatctgtgacctgggggttgacagaaccacctaggactcaggacagatagcaggaaaagaggtaacacttaggtaacaccttcagcttgtcaaattgtatcactgttcatcaaagggaaacacacacatgtagccatgaagtttgaaaggcatcctggactacctctgctgtggaagaagaggcttgccagggttttcagaacccgaatttgtgctgtggctctgtgttgtgattctagagggttctatagtcctagcatcccagggcctgaggcttactagacatttcc

SEQ ID NO: 3287 - DNA, 415 bp, Homo sapiens
gccgtaataccgactcactatagggcgaattggagctccaccgcggtggcggccgaggtactgagctgagccatgccagagagccttttattgcaagtttctctggactgaggaagaaatttcctctgagcactctgagaagtaatcttatatatcaaaattatataaggaagcacacggctaagaagatgaagaccgtgctgggcccaagccagcgtgtcccatgtgataattctcaacaagtctttgggctctttcttggatcacatccctgtaggggagctgaataaggagagaagtgacattcctacactgcttcctggtttatgaaatgttcttacctaccctagatcttcacaacaatccaggaaggaaacgggcattactgcattgttttaaaggtatggatactagc

SEQ ID NO: 3288 - DNA, 424 bp, Homo sapiens
gcgtaataccgactcacctatagggccgaattggagctccaccgcggtggcggccgaggtacacaagggttggcctgagtccctgtgttgtgaaagttggcctacaaaatgagtccacagggactgtcatgggttttgagtttatggaggtttgtccattgctggagtctactgggatgagccttggtctgctgagcaggtatggaacctgagtctggggaagtgtggggccatagaggtcagactgaagggtagggttatggggactagcctagtacctgcccgggcggccgctctagaactagtggatcccccgggctgcaggaattcgatatcaagcttatcgataccgtcgacctcgagggggggcccggtacccagcttttgttccctttagtgagggttaattgcgcgcttggcgtaa

SEQ ID NO: 3289 - DNA, 421 bp, Homo sapiens
  misc_feature 236, 361: n = A,T,C or G
cgcgtaatacgactcactatagggcgaattggagctccaccgcggtggcggccgaggtaccttaagaattgctgacacatttattacaatttcaaggctacaactcaaatcccaggaacacaggattgcagtgacctacataatttgggctcaaataccttcaaggcattccgaagagacagagaacaccagaacaagggagaattggagtggaggtggatgctgaaattccagtntaaaaatctactctggctgaggaataagacaaaatgtaagtgatttaggaaaattatcccagacaaatgagaggtgaactttggaagggggtataaatcaagataataatttccatatttgctgnttcttttactttttgcagaagaaatgcaatatagtcgctactcaggaattttgactgagg

SEQ ID NO: 3290 - DNA, 424 bp, Homo sapiens
cgtaatacgactcactatagggcgaattggagctccaccgcggtggcggccgcccgggcaggtacgcgggacccactgtgcccagcccttgaatttctcctagcccttcagttcctcaagcttcatgcctcccaaggttgcaccccccatggcctgtcctgcagtcctggggcccttctctgaggggatgaagggggcacttccctgaacagagagaaagggagacccacaccacttggattaaactccctgggccccagctggctctgcaacttggccaagaagccctatctcctagggcctcagtgtcttagtccgtaaaatggttcctgaacttttaaaatacaaacactcttttgtagagtcgaaacactttgcagacctgcactctgtggcagtacctcggccgctctagaactagtgg

SEQ ID NO: 3291 - DNA, 392 bp, Homo sapiens
  misc_feature 5: n = A,T,C or G
gagcnccgcgtaatacgactcactatagggcgaattggagctccaccgcggtggcggccgaggtaccaccatgcctgactaatttttatttttttagagatggggtcttgctatgttgcccaggctggtcttgaactcctgggcttaagcagtcctcccacctcggcctcccaaagtgctgggattactaataggcatgaaccacaacacccagccggcatatctgtattttggttgcacggaggctgctgctataaaccgtgggcaccagtgcccacgagtcatacataattgctggcccccatggctggaagtatctgagggaacctcaggcaaggccgtttcttttctggaagctccaagttctgggtccttcttaataaatcttctcg

SEQ ID NO: 3292 - DNA, 396 bp, Homo sapiens
  misc_feature 5, 7, 63, 68, 110, 130, 191, 270, 273, 320, 321, 376, 377: n = A,T,C or G
gagcncnccgtaataccgactcactatagggcgaattggagctccaccgcggtggcggccgangtggnagaatcacctgagcttgggaagttgaggtgcagtgagctganatcgcactgctgcattccanccagggtgatgggagtgagaccgtgtcttaaacaaataataataatttgggggtgatgtanacagaaataaggacagaggtatgaaaaggaataattatttagcattttactagccagagatttgggcagtcccaaaaancancttttctaatctccctctcctttcccaaaaaactttaatcagatccnntagtatcctatcatctttgggttatttacatactactttttggaggggggattgnnggaaagctatcgagatctt

SEQ ID NO: 3293 - DNA, 385 bp, Homo sapiens
  misc_feature 5, 6: n = A,T,C or G
gagcnncgcgtaatacgactcactatagggcgaattggagctccaccgcggtggcggccgaggtactatgtccctctcaagtcctgaatctaacttagggagtagccaggagactatgagaaggaactactccagggaaagaacatcccatgccctttctgaaacacaagtggcaaccataagacaccactctttatcctaccttttagcagactatgcacagtcccaggaacgaggccagaactgataagcaagtgtggcatttggctccagccaaggttatgggattcgggaacctccccatccttggaattgggctgggaggggtttcacctgggagccacagttttatggcctggggttatattgcaagtccaaagacaaa

SEQ ID NO: 3294 - DNA, 852 bp, Homo sapiens
  misc_feature 2, 4, 265, 512, 516, 526, 538, 549, 559, 575, 577, 583, 588,589, 605, 623, 624, 641, 648, 669, 670, 675, 677, 678, 679,680, 682, 683, 684, 685, 686, 687, 688, 689, 690, 693, 694,695, 696, 697, 698, 699, 700, 701, 702, 703, 704: n = A,T,C or G
  misc_feature 705, 706, 707, 708, 709, 710, 711, 712, 713, 714, 715, 716,717, 718, 719, 720, 721, 722, 723, 724, 725, 726, 727, 728,729, 730, 734, 737, 738, 739, 740, 741, 742, 743, 744, 745,746, 747, 748, 749, 751, 752, 753, 754, 755, 756, 757: n = A,T,C or G
  misc_feature 758, 759, 760, 761, 762, 763, 764, 765, 766, 767, 768, 769,770, 771, 772, 773, 774, 775, 776, 777, 778, 779, 780, 781,782, 783, 784, 785, 786, 787, 788, 789, 790, 791, 792, 793,794, 795, 796, 797, 798, 799, 800, 801, 802, 803, 804: n = A,T,C or G
  misc_feature 805, 806, 807, 808, 809, 810, 811, 812, 813, 814, 815, 816,817, 818, 819, 820, 821, 822, 823, 824, 825, 826, 827, 828,829, 830, 831, 832, 833, 834, 835, 836, 837, 838, 839, 840,841, 842, 843, 844, 845, 846, 847, 848, 849, 850, 851: n = A,T,C or G
  misc_feature 852: n = A,T,C or G
gngncgcgcgtatcgactactatagggcgaattggagctccccgcggtggcggcccgcccgggcaggtacatagttgctcattgcctaaaaaaaaaatgtttgcccgtgtgagacatcgatgcatcaatagtgcttaattataatgacagcttcaagccacagtatttttccacatttttttagttctatgttctcttaaaactagtctacctaggctgggcgtggtggctcacgcttgtaatcccagttctctgggaggccaanatgggcggatcacctgaggccaggagttcaagaccagcctccccaacatggtgaagccccatctctaccaaaaatagaaaaattaaccaggcatggtggcgcatgcctgcagtcccagctaccagcaaggctgaagctggatgatatcttgaacccgggaggcagaggatacagtgagccgagattgcgccactgcactccagcctaggagacagatggagaccctgtctcaaaaaaaaaaaaaaangggnaaaaaaaaanccccttggcccntttaaaaattngggacccccnggggcgggggaattcntntttagnctttnnaaccccccccccttgngggggggcccgggccccnncttttttcccttttaangggggtnattggccccctggggaaaaannggggnannnngnnnnnnnnnggnnnnnnnnnnnnnnnnnnnnnnnnnnnnnnnnnnnnnngggnggnnnnnnnnnnnnngnnnnnnnnnnnnnnnnnnnnnnnnnnnnnnnnnnnnnnnnnnnnnnnnnnnnnnnnnnnnnnnnnnnnnnnnnnnnnnnnnnnnnnnnnnnnnnnnnnnnnn

SEQ ID NO: 3295 - DNA, 847 bp, Homo sapiens
  misc_feature 23, 56, 393, 566, 635, 645, 646, 652, 653, 654, 655, 656,657, 658, 661, 662, 663, 664, 665, 666, 667, 668, 669, 670,671, 672, 673, 674, 675, 676, 677, 678, 679, 680, 681, 682,683, 684, 685, 686, 687, 688, 689, 690, 691, 692, 693: n = A,T,C or G
  misc_feature 694, 695, 696, 697, 698, 699, 700, 701, 702, 703, 704, 705,706, 707, 708, 709, 710, 711, 712, 713, 714, 715, 716, 717,718, 719, 720, 721, 722, 723, 724, 725, 726, 727, 728, 736,737, 738, 739, 740, 741, 743, 744, 746, 748, 750, 751: n = A,T,C or G
  misc_feature 752, 753, 754, 755, 756, 757, 758, 759, 760, 761, 762, 763,764, 765, 766, 767, 768, 769, 770, 771, 772, 773, 774, 775,776, 777, 778, 779, 780, 781, 782, 783, 784, 785, 786, 787,788, 789, 790, 791, 792, 793, 794, 795, 796, 797, 798: n = A,T,C or G
  misc_feature 799, 800, 801, 802, 803, 804, 805, 806, 807, 808, 809, 810,811, 812, 813, 814, 815, 816, 817, 818, 819, 820, 821, 822,823, 824, 825, 826, 827, 828, 829, 830, 831, 832, 833, 834,835, 836, 837, 838, 839, 840, 841, 842, 843, 844, 845: n = A,T,C or G
  misc_feature 846, 847: n = A,T,C or G
gggccgcgtatcgactactatanggcgaattggagctccccgcggtggcggccgangtacattattcctcctaagctcctgatttattttgcacctaattatttcagaacaagcttgaggatttctcctcctcttccagaaccctgtgacagctttttgacacttgaaggatattttcacacacttgtaggtcggcagttctgctctgaacattgaggctgtgaaaaatcctatcactcacgggtggccctaaactctctctcttcacagaagactcatttgaactgaaatatttcaagaaatgaaatttgaccagaaagggtaaaatacctgacaaagtggcaaataaatgtgtcagactaatgggttcagcacccacatccaatgactcangcagccacacatgcaatgacaaagccatagaaggagaatcctactgcctgtcagccactgagccacagggtggaactatgccagtagtacctgcccgggcggccgctctagaactagtggatcccccgggctgcaggaattcgatatcaagcttatcgataccgtcgacctcnagggggggcccggtcccaacttttgttccctttagtgagggttaattgcgcgcttggcgtaatcatggncatagctgtnnttcggnnnnnnnaannnnnnnnnnnnnnnnnnnnnnnnnnnnnnnnnnnnnnnnnnnnnnnnnnnnnnnnnnnnnnnnnnnngaaggagnnnnnngnngngngnnnnnnnnnnnnnnnnnnnnnnnnnnnnnnnnnnnnnnnnnnnnnnnnnnnnnnnnnnnnnnnnnnnnnnnnnnnnnnnnnnnnnnnnnnnnnnnnnn

SEQ ID NO: 3296 - DNA, 889 bp, Homo sapiens
  misc_feature 2, 3, 22, 704, 731, 738, 743, 777, 779, 789, 799, 842, 865,871, 880, 887, 888: n = A,T,C or G
gnnaggggacgcgcgtaatacnactactatagggcgaattggagctccccgcggtggcggccgaggtactactggcactgagccaatgtatgctatcaaggaaagctttatctgtcactgagcaaaaggtgaagttcaattaggtcagttttatcacttcttttcctacacacaaactatgaggagagatcatttcttttctttcttttatttatttattttttttgagacagggtcccactctgttgcccaggttagagtacctgcccgggcggccgctctagaactagtggatcccccgggctgcaggaattcgatatcaagcttatcgataccgtcgacctcgagggggggcccggtacccagcttttgttccctttagtgagggttaattgcgcgcttggcgtaatcatggtcatagctgtttcctgtgtgaaattgttatccgctcacaattccacacaacatacgagccgggagcataaagtgtaaagcctggggtgcctaatgagtgagctaactcacattaattgcgttgcgctcactgcccgctttccagtcgggaaacctgtcgtgccagctgcattaatgaatcggccaacgccccggggagaggcggttttgcgtattggggcgctctttccgctttcttcggttcactgactcgcttcgcttcggtcgttccggctgcgggcgagccggtnttaagcttactcaaaggcgggaatacnggtattncacangaatcaggggataccccaggaaaagaacattgtngngccaaaaggncaaccaaaanggccaggaacccgtaaaaaaggccccgtttgttggcgtttttncataaggcttccgccccctgacnagcttnacaaaaatngacgctnnt

SEQ ID NO: 3297 - DNA, 858 bp, Homo sapiens
  misc_feature 2, 3, 4, 5, 6, 7, 8, 10, 12, 673, 682, 747, 791, 795, 796,805, 820, 835, 847, 855: n = A,T,C or G
gnnnnnnncncncgtaatacgactcactatagggcgaattggagctccccgcggtggcggcccgaggtactacgccagatgctgtttacacatagagttttgagctgtttctcaaggaggggcattggtggcatttgggcagaatgattctttgatgggcagaaaggtcccacccttcgcagaatgtctatcactaaactgcaatcattctcgccaatctttagggtggatgggaagagtaatgcccaaatgagagccctcccagatgttcagagcagcggatatgaagtcatacagccgggtttggtttttattccatccattcctctcctggggaccttagacaagtgataatgctctatgcttcagtttccccccttgtaaaatggtggtaattcccgcgtacctgcccgggcggcccgctctagaactagtggatcccccgggctgcaggaattcgatatcaagcttatcgataccgtcgacctcgagggggggcccggtacccagcttttgttccctttagtgagggttaattgcgcgcttggcgtaatcatggtcatagctgtttctgtgtgaaattggtatccgctcacaattccacacaacatacgagccgggagcataaagtgtaaagcctggggtgcctaatgaagtgagctaactcacattnattgcgttncgctcactggccgcttttcaagtcgggaaacctgtcgtgccagctgcattaatgaatcggccacnccccgggagaggcggttgcgttttgggcgctcttcgctttcttngttnntgactcctnggctcggtcttcggntggggggagccggtnttaactcactcnaagggggnatt

SEQ ID NO: 3298 - DNA, 856 bp, Homo sapiens
  misc_feature 636, 653, 683, 697, 782, 797, 809, 822, 829, 856: n = A,T,C or G
ccgcgtaatacgactactatagggcgaattggagctccccgcggtggcggccgaggtactacgccagatgctgtttacacatagagttttgagctgtttctcaaggaggggcattggtggcatttgggcagaatgattctttgatgggcagaaaggtcccacccttcgcagaatgtctatcactaaactgcaatcattctcgccaatctttagggtggatgggaagagtaatgcccaaatgagagccctcccagatgttcagagcagcggatatgaagtcatacagccgggtttggtttttattccatccattcctctcctggggaccttagacaagtgataatgctctatgcttcagtttccccccttgtaaaatggtggtaattcccgcgtacctgcccgggcggccgctctagaactagtggatcccccgggctgcaggaattcgatatcaagcttatcgataccgtcgacctcgagggggggcccggtacccagcttttgttccctttagtgagggttaattgcgcgcttggcgtaatcatggtcatagctgtttcctgtgtgaaattgttatccgctcacaattccacacaacatacgagccgggagcataaagtgtaaagcctgggggtncctaatgaagtgagctnactcacattaattgcgtttgcgctcactgnccgtttccaagtcnggaaacctgtcgtgccactgcatttaatgaatcggccaacccccggggagaaggcggtttgcgtattggcgctcttccctttctngcttacttgactcgntgcgctcggtcnttcggctgcggcnagcggtntagcttacttcaaagcgggaataccgn

SEQ ID NO: 3299 - DNA, 384 bp, Homo sapiens
cgtaatacgactcactatagggcgaattggagctccaccgcggtggcggccgcccgggcaggtacagtgaagctttgacctgaggagctcttctgtaggtgaagagtggttaactatggttcctgtgtgcctggggccccccactcctaggactcatccaccccctacccagaacttactagtacctcggccgctctagaactagtggatcccccgggctgcaggaattcgatatcaagcttatcgataccgtcgacctcgagggggggcccggtacccagcttttgttccctttagtgagggttaattgcgcgcttggcgtaatcatggtcatagctgtttcctgtgtgaaattgttatccgctcacaattccacacaacata

SEQ ID NO: 3300 - DNA, 858 bp, Homo sapiens
  misc_feature 1, 598, 601, 602, 603, 604, 605, 606, 607, 608, 609, 610,611, 612, 613, 614, 615, 616, 617, 618, 619, 620, 621, 622,623, 624, 625, 626, 627, 628, 629, 630, 631, 632, 633, 634,635, 636, 637, 638, 639, 640, 641, 642, 643, 644, 645: n = A,T,C or G
  misc_feature 646, 647, 648, 649, 650, 651, 652, 653, 654, 655, 656, 657,658, 659, 660, 661, 662, 663, 664, 665, 666, 667, 668, 669,670, 671, 672, 673, 674, 675, 676, 677, 678, 679, 680, 681,682, 683, 684, 685, 686, 687, 688, 689, 690, 691, 692: n = A,T,C or G
  misc_feature 693, 694, 695, 696, 697, 698, 699, 700, 701, 702, 703, 704,705, 706, 707, 708, 709, 710, 711, 712, 713, 714, 715, 716,717, 718, 719, 720, 721, 722, 723, 724, 725, 726, 727, 728,729, 730, 731, 732, 733, 742, 744, 745, 746, 747, 748: n = A,T,C or G
  misc_feature 749, 750, 751, 752, 755, 756, 757, 758, 759, 760, 761, 762,763, 764, 765, 766, 767, 768, 769, 770, 771, 772, 773, 774,775, 776, 777, 778, 779, 780, 781, 782, 783, 784, 785, 786,787, 788, 789, 790, 791, 792, 793, 794, 795, 796, 797: n = A,T,C or G
  misc_feature 798, 799, 800, 801, 802, 803, 804, 805, 806, 807, 808, 809,810, 811, 812, 813, 814, 815, 816, 817, 818, 819, 820, 821,822, 823, 824, 825, 826, 827, 828, 829, 830, 831, 832, 833,834, 835, 836, 837, 838, 839, 840, 841, 842, 843, 844: n = A,T,C or G
  misc_feature 845, 846, 847, 848, 849, 850, 851, 852, 853, 854, 855, 856,857, 858: n = A,T,C or G
ngacgcgcgttatacgactcactataggggcgagattggagctccccgcggtgggcggccgcccgggcaggtacacatctgctcctgggcagaccttacaagtatctcaaactcatatctccatgagaggtagataagctacgtaaacaagggaagccaagataacagggaagacaggagactatctgccttctaaaaacactcaaattcttttctataagcactgctgatttaatccattacaccaccagcagctgccagtttacaatctctgctacacaagccctccattgagtttaaagacaaccgtcaaaatatctctccagtttctccattcacctgactgttaccatagagaatacaggtattcccactctggccagctgtgtgcagtgttttctcctatcagaatccaaaccacctaccagtccccgtacctcggccgctctagaactagtggatcccccgggctgcaggaattcgatatcaagcttatcgataccgtcgacctcgagggggggcccggtacccagcttttgttccctttagtgagggttaattgcgcgcttggcgtaatcatggtcatagctgttttcgngannnnnnnnnnnnnnnnnnnnnnnnnnnnnnnnnnnnnnnnnnnnnnnnnnnnnnnnnnnnnnnnnnnnnnnnnnnnnnnnnnnnnnnnnnnnnnnnnnnnnnnnnnnnnnnnnnnnnnnnnnnnnnnnnnnnngaggggggngnnnnnnnnnagnnnnnnnnnnnnnnnnnnnnnnnnnnnnnnnnnnnnnnnnnnnnnnnnnnnnnnnnnnnnnnnnnnnnnnnnnnnnnnnnnnnnnnnnnnnnnnnnnnnnnnnn

SEQ ID NO: 3301 - DNA, 855 bp, Homo sapiens
  misc_feature 31, 71, 464, 465, 466, 467, 468, 469, 470, 471, 472, 473,474, 475, 476, 477, 478, 479, 480, 481, 482, 483, 484, 485,486, 487, 488, 489, 490, 491, 492, 493, 494, 495, 496, 497,498, 499, 500, 501, 502, 503, 504, 505, 506, 507, 508: n = A,T,C or G
  misc_feature 509, 510, 511, 512, 513, 514, 515, 516, 517, 518, 519, 520,521, 522, 523, 524, 525, 526, 527, 528, 529, 530, 531, 532,533, 534, 535, 536, 537, 538, 539, 540, 541, 542, 543, 544,545, 546, 547, 548, 549, 550, 551, 552, 553, 554, 555: n = A,T,C or G
  misc_feature 556, 557, 558, 559, 560, 561, 562, 563, 564, 565, 566, 567,568, 569, 570, 571, 572, 573, 574, 575, 576, 577, 578, 579,580, 581, 582, 583, 584, 585, 586, 587, 588, 589, 590, 591,592, 593, 594, 595, 596, 597, 598, 599, 600, 601, 602: n = A,T,C or G
  misc_feature 603, 604, 605, 606, 607, 608, 609, 610, 611, 612, 613, 614,615, 616, 617, 618, 619, 620, 621, 622, 623, 624, 625, 626,627, 628, 629, 630, 631, 632, 633, 634, 635, 636, 637, 638,639, 640, 641, 642, 643, 644, 645, 646, 647, 648, 649: n = A,T,C or G
  misc_feature 650, 651, 652, 653, 654, 655, 656, 657, 658, 659, 660, 661,662, 663, 664, 665, 666, 667, 668, 669, 670, 671, 672, 673,674, 675, 676, 677, 678, 679, 680, 681, 682, 683, 684, 685,686, 687, 688, 689, 690, 691, 692, 693, 694, 695, 696: n = A,T,C or G
  misc_feature 697, 698, 699, 700, 701, 702, 703, 704, 705, 706, 707, 708,709, 710, 711, 712, 713, 714, 715, 716, 717, 718, 719, 720,721, 722, 723, 724, 725, 726, 727, 728, 729, 730, 731, 732,733, 734, 736, 737, 738, 739, 740, 741, 742, 743, 744-855: n = A,T,C or G
ggcgcgcgtaatacgactactatagggcganattggagctccacccgcggtgggcggccgaggtaccggangggatgcagcagtttgctccctgttctacttgaccttcctttaaatatttgaaaccagatatcagctcactaatccactttcccagcttgctcttgtctagctaaactgtcccaaggtccttcaacggttccttgtttaagtcgcttttcaggcctttcactacccgggttcactccagctgtgtagcaactctccccacaaaatggaaatgcgatagctagtacctgcccgggcggccgctctagaactagtggatcccccgggctgcaggaattcgatatcaagcttatcgataccgtcgacctcgagggggggcccggtacccagcttttgttccctttagtgagggttaattgcgcgcttggcgtaatcatggtcatagctgttcctgnnnnnnnnnnnnnnnnnnnnnnnnnnnnnnnnnnnnnnnnnnnnnnnnnnnnnnnnnnnnnnnnnnnnnnnnnnnnnnnnnnnnnnnnnnnnnnnnnnnnnnnnnnnnnnnnnnnnnnnnnnnnnnnnnnnnnnnnnnnnnnnnnnnnnnnnnnnnnnnnnnnnnnnnnnnnnnnnnnnnnnnnnnnnnnnnnnnnnnnnnnnnnnnnnnnnnnnnnnnnnnnnnnnnnnnnnnnnnnnnnnnnnnnnnnnnnnnnnnnnnnnnnnnnnnngnnnnnnnnnnnnnnnnnnnnnnnnnnnnnnnnnnnnnnnnnnnnnnnnnnnnnnnnnnnnnnnnnnnnnnnnnnnnnnnnnnnnnnnnnnnnnnnnnnnnnnnnnnnnnnnnnnnnnnnn

SEQ ID NO: 3302 - DNA, 870 bp, Homo sapiens
  misc_feature 2, 3, 4, 7, 10, 12, 586, 699, 724, 737, 741, 751, 768, 799,839, 858, 865, 868: n = A,T,C or G
tnnnatntgncncgcgtatacgactcactatagggcgaattggagctccccgcggtggcggcccgaggtactttcaaagactttagaaccaaatgtcattcagctgaaaccataatgtattataaactacgtcttctagagttttgttgtcatagagtcaaatgagatgccaaatgctagcaatcctatttaggaggcctactattaggatttaaaagaagtggactgccagagatgaattatgtgacacagatgctaacatctagttattatgagtgatccattctgtcatgaggtagcacttgaaaaacaacctgggacaaaagaacaggcctctggcactactgaatttttggagagagaaacctttagaagttagcatgtggttctttctggacatgttcattgccttagttcttcttttgcaaatattttgtaaatattcatgaagtgaaatgagatgtttgagaaggcagatctgcagatcccctaaagagcattgtcagttatgctgggctgttcctaccctatccctctgtttacctgcggcggcctctcagagccgtgatcgtggtggctttgtggnggttttaaatgtaatcgtgagaaagctagctgagagaatgctagcagtgttccttcggatcaagttgagactactggtacctgcccgggcgggcggtctagaactagtggatncccccggctgcaggaattcgatttnaagcttatcgatnccgncgacctcganggggggcccggtcccancttttgttcctttagtgaggggttaattgcncgcttggcggtaatcatgggcataacttgtttccctgggngaaaatggttttccgtcanaatttcncanat

SEQ ID NO: 3303 - DNA, 905 bp, Homo sapiens
  misc_feature 2, 6, 503, 538, 676, 740, 756, 805, 825, 843, 849, 862, 901,904: n = A,T,C or G
antggncgccgtaatacgactcactatagggcgaattggagctccccgcggtggcggcccgcccgggcaggtacagggctggatccttcccagccagggtgcctgggattattggctttcagcagccgactcacggaggcctcctttgggctaggcactgggacagacccctgcctccccaaaggcatgagaccctggcctgccatttgggagctcagagcctggctagaggcaggagaggtgaggagggaagataaggacacagatggtgaatgtggtgagaaaggaagcatgagggggtgggcatggtgcatgggagaacagaggaggcgatggaggagtccaggaagccttcctgggaggcggtcgcctgagctgagcctcaaggagtatgagcagcttctcaacaggagaagagagtggagagcactttgggcagaaagttacaggcagagggagcattccaggcagagggagcattccaggcagaaggagcactgcanggagagggtgcactcaaggaagcaggagcactcanagagagagaacacttccaagggagagaaaagcaagaaggttccaagggttgcactgcaagggagagggagccacttatgggggagaaaggtgcactcaagggaaccaggagcccctcagaagagaagaagaaccaatncaagggagaagggaaccaaagaagggtgcaaccgtgcacttgaaagggagaaggggaagcactnaagggagagggagccncccaaggggagaagggagcccctcaagggagagggagcccttaaccaanacacttcagggagagggaancaagaaggtgccaggacncactgnagggaaaggggcnctacagggagagggtgccctcagggacccggaccccccnaant

SEQ ID NO: 3304 - DNA, 882 bp, Homo sapiens
  misc_feature 2, 3, 4, 10, 11, 13, 14, 317, 318, 320, 321, 322, 323, 324,325, 326, 327, 328, 329, 330, 332, 333, 334, 335, 336, 337,338, 339, 341, 342, 343, 344, 345, 346, 347, 348, 349, 350,351, 352, 353, 354, 355, 356, 357, 358, 359, 360, 361: n = A,T,C or G
  misc_feature 362, 363, 364, 365, 366, 367, 368, 369, 370, 371, 372, 373,374, 375, 376, 377, 378, 379, 380, 381, 382, 383, 384, 385,386, 387, 388, 389, 390, 391, 392, 393, 394, 395, 396, 397,398, 399, 400, 401, 402, 403, 404, 405, 406, 407, 408: n = A,T,C or G
  misc_feature 409, 410, 411, 412, 413, 414, 415, 416, 417, 418, 419, 420,421, 422, 423, 424, 425, 426, 427, 428, 429, 430, 431, 432,433, 434, 435, 436, 437, 438, 439, 440, 441, 442, 443, 444,445, 446, 447, 448, 449, 450, 451, 452, 453, 454, 455: n = A,T,C or G
  misc_feature 456, 457, 458, 459, 460, 461, 462, 463, 464, 465, 466, 467,468, 469, 470, 471, 472, 473, 474, 475, 476, 477, 478, 479,480, 481, 482, 483, 484, 485, 486, 487, 488, 489, 490, 491,492, 493, 494, 495, 496, 497, 498, 499, 500, 501, 502: n = A,T,C or G
  misc_feature 503, 504, 505, 506, 507, 508, 509, 510, 511, 512, 513, 515,516, 517, 518, 519, 520, 521, 522, 523, 524, 525, 526, 527,528, 529, 530, 531, 532, 533, 534, 535, 536, 537, 538, 539,540, 541, 542, 543, 544, 545, 546, 547, 548, 549, 550: n = A,T,C or G
  misc_feature 551, 552, 553, 554, 555, 556, 557, 558, 559, 560, 561, 562,563, 564, 565, 566, 567, 568, 569, 570, 571, 572, 573, 574,575, 576, 577, 578, 579, 580, 581, 582, 583, 584, 585, 586,587, 588, 589, 590-595, 596, 597-716, 718-881: n = A,T,C or G
gnnnagtggnngnncgcgcgtaatacgactcctatagggcgaattggagctccccgcggtggcggcccgagggtacttaataaattactgttattattaataactcaccattattagttcaaatgaatgaacttatccaaagtttcaaagagtctacacaaaaatatttgctttcatgtgcttgagtaaagaatttagtatctaagaagcataacacctttaacgtttaaaacaatggttaatataatttataggaaaaattttttaatattctgttaaaaacagcaataaaagaaagaagatgccgggcgcagtgnntnnnnnnnnnnntnnnnnnnntnnnnnnnnnnnnnnnnnnnnnnnnnnnnnnnnnnnnnnnnnnnnnnnnnnnnnnnnnnnnnnnnnnnnnnnnnnnnnnnnnnnnnnnnnnnnnnnnnnnnnnnnnnnnnnnnnnnnnnnnnnnnnnnnnnnnnnnnnnnnnnnnnnnnnnnnnnnnnnnnnnnnnnnnnnnnntnnnnnnnnnnnnnnnnnnnnnnnnnnnnnnnnnnnnnnnnnnnnnnnnnnnnnnnnnnnnnnnnnnnnnnnnnnnnnnnnnnnnnnnnnnnnnnnnnnnnnnnnnnnnnnnnnnnnnnnnnnnnnnnnnnnnnnnnnnnnnnnnnnnnnnnnnnnnnnnnnnnnnnnnnnnnnnnnnnnnnnnnnnnnnnnnnnnnnnnnnntnnnnnnnnnnnnnnnnnnnnnnnnnnnnnnnnnnnnnnnnnnnnnnnnnnnnnnnnnnnnnnnnnnnnnnnnnnnnnnnnnnnnnnnnnnnnnnnnnnnnnnnnnnnnnnnnnnnnnnnnnnnnnnnnnnnnnnnnnnnnnnnnnnnnnnnnnnnnnnnnnnnnc

SEQ ID NO: 3305 - DNA, 848 bp, Homo sapiens
  misc_feature 28, 70, 72, 77, 78, 93, 103, 107, 110, 111, 146, 162, 177,178, 184, 197, 201, 202, 209, 212, 216, 217, 222, 223, 227,235, 266, 271, 285, 290, 297, 304, 585, 586, 588, 589, 590,591, 592, 593, 594, 595, 596, 597, 598, 599, 600, 601: n = A,T,C or G
  misc_feature 602, 603, 604, 605, 606, 607, 608, 609, 610, 611, 612, 613,614, 615, 616, 617, 618, 619, 620, 621, 622, 623, 624, 625,626, 627, 628, 629, 630, 631, 632, 633, 634, 635, 636, 637,638, 639, 640, 641, 642, 643, 644, 645, 646, 647, 648: n = A,T,C or G
  misc_feature 649, 650, 651, 652, 653, 654, 655, 656, 657, 658, 659, 660,661, 662, 663, 664, 665, 666, 667, 668, 669, 670, 671, 672,673, 674, 675, 676, 677, 678, 679, 680, 681, 682, 683, 684,685, 686, 687, 688, 689, 690, 691, 692, 693, 694, 695: n = A,T,C or G
  misc_feature 696, 697, 698, 699, 700, 701, 702, 703, 704, 705, 706, 707,708, 709, 710, 711, 712, 713, 714, 715, 716, 717, 718, 719,720, 721, 722, 723, 724, 725, 726, 727, 728, 729, 735, 737,738, 739, 740, 741, 742, 743, 744, 745, 746, 748, 749: n = A,T,C or G
  misc_feature 750, 751, 752, 753, 754, 755, 756, 757, 758, 759, 760, 761,762, 763, 764, 765, 766, 767, 768, 769, 770, 771, 772, 773,774, 775, 776, 777, 778, 779, 780, 781, 782, 783, 784, 785,786, 787, 788, 789, 790, 791, 792, 793, 794, 795, 796: n = A,T,C or G
  misc_feature 797, 798, 799, 800, 801, 802, 803, 804, 805, 806, 807, 808,809, 810, 811, 812, 813, 814, 815, 816, 817, 818, 819, 820,821, 822, 823, 824, 825, 826, 827, 828, 829, 830, 831, 832,833, 834, 835, 836, 837, 838, 839, 840, 841, 842, 843-847: n = A,T,C or G
ggacgcgcgttatacgactactataggngcgagattggagctccaccgcggtgggcggccgaagtacctntntttcnnggccatggcaaaaanaaatccaatnatgnccnnctcgagtctgtggtcttgcttcttatgtagtattncctttgtgagctgaanattaatgcatggatnnacctgnttcagcacatttnattnnaattgcnaanaaannattcnnggcnctgaatgnaaaattgaacatgacattttgacattccttnttctnacagctgggttggncttanttgctgngaggctntagacaccgaccatacagggcgtggggctgctcctggacatgaacatcctccgaagttctccccagtccactttacccgctctgggctcacctctgaatgtccccgcgtacctgcccgggcggccgctctagaactagtggatcccccgggctgcaggaattcgatatcaagcttatcgataccgtcgacctcgagggggggcccggtacccagcttttgttccctttagtgagggttaattgcgcgcttggcgtaatcatggtcatagctgtttcctgannannnnnnnnnnnnnnnnnnnnnnnnnnnnnnnnnnnnnnnnnnnnnnnnnnnnnnnnnnnnnnnnnnnnnnnnnnnnnnnnnnnnnnnnnnnnnnnnnnnnnnnnnnnnnnnnnnnnnnnnnnnnnnnnnnnnnnnnnnnnnnggaggnannnnnnnnnngnnnnnnnnnnnnnnnnnnnnnnnnnnnnnnnnnnnnnnnnnnnnnnnnnnnnnnnnnnnnnnnnnnnnnnnnnnnnnnnnnnnnnnnnnnnnnnnnnnnnc

SEQ ID NO: 3306 - DNA, 848 bp, Homo sapiens
  misc_feature 1, 3, 25, 29, 30, 467, 525, 562, 617, 632, 664, 700, 728,736, 737, 738, 739, 740, 741, 742, 745, 747, 748, 749, 750,751, 752, 753, 754, 755, 756, 757, 758, 759, 760, 761, 762,763, 764, 765, 766, 767, 768, 769, 770, 771, 772, 773: n = A,T,C or G
  misc_feature 774, 775, 776, 777, 778, 779, 780, 781, 782, 783, 784, 785,786, 787, 788, 789, 790, 791, 792, 793, 794, 795, 796, 797,798, 799, 800, 801, 802, 803, 804, 805, 806, 807, 808, 809,810, 811, 812, 813, 814, 815, 816, 817, 818, 819, 820: n = A,T,C or G
  misc_feature 821, 822, 823, 824, 825, 826, 827, 828, 829, 830, 831, 832,833, 834, 835, 836, 837, 838, 839, 840, 841, 842, 843, 844,845, 846, 847, 848: n = A,T,C or G
ngncgcgcgtatcgactcactatanggcnnattggagctccccgcggtggcggccgcccgggcaggtaccaccttggttgagaactcctgactaaaagaaggcagggcagagcagggtatgccattgatgttgattcctagcatccaagaaccacatctgggcatttgtctgaaggaagaaattgggaagtttccatgataaaagctccagtggaaattgtagaccttgggaatgaatatgctaaactgaggttctcaaccaagggccagatcacaacttcagaggcctgaggcagacgtgtattttggaaaagcttcccaggtgattctgattcaggtccctccctcagtgagtcataagactgaacaggaagacaagaaaagttgccccataatgatggctcatggttatggccttatgatggggatatagctgaggcagcacacaccttggagctgggctatangcagagctcttattttagatggtggcagaagaaaccacacacaatatgaaggcagaanagcaaaggtcactgagaggccatgttttgcccttcantgttgccaggtcctgctgtgtgtcctcggccgctctagaactagtggatcccccnggctgcaggaattcnatatcaagcttatcgataccctcgaccttcanggggggccccggtcccacttttgttcctttaatganggttaattgccccctggcgtaatcttgncatagctnnnnnnnctngnnnnnnnnnnnnnnnnnnnnnnnnnnnnnnnnnnnnnnnnnnnnnnnnnnnnnnnnnnnnnnnnnnnnnnnnnnnnnnnnnnnnnnnnnnnnnnnnnnnnnn

SEQ ID NO: 3307 - DNA, 867 bp, Homo sapiens
  misc_feature 5, 6, 7, 542, 583, 763, 798, 844, 866: n = A,T,C or G
taggnnnggcgcgcgtaatacgactcactatagggcgaattggagctccccgcggtggcggcccgcccgggcaggtacagggtttactcagtcctgttgtgtaataggaagcaggaaagggcaagggccctgggaacaacctcagccctgccacttactggtcatgtaaccccgagcaaaatgaccacctctgagccccagtctcctcttctgtaaatgggtataccaccacctactcataggctgcgtgatgagaaatggaataatgtcagggagtgcctggcatgacgctggcaccctggaggctccccaggaacggtggctactgccttcagaaaaactgaatctacttcaacttattttacgtaggccaaagcatccagtcagtgagtaaatcaagctgcaagattcatttctacttaacttttaggaggagtcatcccatgatacctcgaataggtctcaaagcacatgcatgatataaatgattcactgatatgactctggtcagatgtatgttcttatgaaaaacctaagttcangggtttacctaacatacatggggatactcatcttccacctnccaaagctttcaaatcaaggccagagacttccggtcatcatcactatttttgggccatatatctggcttccgtgggtaactgcttgcctggctggatgggggagtgagatagcccataaccctatacatggatggctggcaaggagcatgaccaggcttaaagaatcgcaaccttaatgnggggataatggtactaaagctaaaacaccccccancttgccatcaataccttgggccgttttaaaactagtggatcccccnggctggcaggaattcgatattnt

SEQ ID NO: 3308 - DNA, 863 bp, Homo sapiens
  misc_feature 24, 626, 677, 705, 714, 741, 745, 781, 794, 809, 841, 849,852, 857: n = A,T,C or G
ggacgcgcgttatcgactactatngggcgagattggagctccccgcggtggcggcccgaggtacgcggggtcactggactgaaagttccctaaggccaaaggccattcctctttggctttcagtagtatgccctggcattttctgcaaacttaccacttgatgggtgctaaaatatgttttaaactgagtattgcacccaacggatgaaaattttctaaaagtgcttctatcaagaattaggaaaccaaagtatagaaataaatgaagctgataagcataagtttgtgatgctaaataaaattacactgaagtcctagccacagattggcaaggacagttttgtgggggcagccccacatgccatagtcctctgcagggagccataacttaacatccccatgtttaaattttaaattatatacccagccccttgttttgtccattaccagttgagaagtgaggtaattcattctcctttctactgcttctgcccatggtgagaacagaacttccatatacatcttctctgcccagctggagggggctgatggaggacacagcttctgtcatccacgcctcccctgggagtctctttactgattggtcttcatttgatctacattanggcacatttactgatggatggaataaactgctttaacagaatcatggtctncaagtttcacttcaccttctgtcctcangtgtggcangtgccctggcccgaacctgctattctnttcngcttcctggttcttgggggcttttatctaccggtcngaaaaaaagaatngagtccggggagatnggaattttaaataaaaaggcccggctgggggnatggggtnatncctgnaaaccc

SEQ ID NO: 3309 - DNA, 860 bp, Homo sapiens
  misc_feature 435, 499, 534, 584, 631, 642, 653, 673, 680, 712, 720, 730,740, 743, 746, 752, 767, 780, 801, 818, 830, 831, 840, 857: n = A,T,C or G
ggccgcgtatcgactactatagggcgaattggagctcccccgcggtggcggccgaggtacaatgggcttcattattgccaacttggaataagaagtagcagaggctcaaaatagtaatgtgaatgctcaatgttacataataattcaatggcgaggccaagattgggattccaattctcacatttctagccactgctcttcttttacacaataaagatggggaaaaaacatttaagcaagtttgacaggagagtgccctctccaccaacaaaaattattgaggctcaaaagttcagggatttgcagagaccattcaaatgggaaagggcaagtctcttcaacatggtggtggaaaaactggatatccacatgcaaaagaatgaagttggacccttaccttataccatatacaaaaattaattcaaaatagattanagatctaaacagaagatctaaagctataaaactcttaaaacacaggagaaaagcttcagtgacnttggatttagcaatgatttgtggatgacacccaangccaggccattaaagtaaaaatatgttactgggccctccaaaattaaaantttgggccctggaaaaaccacccgaattttaaagcccactccctatnggggaaaaaantttgccaatcntttttttggtaaggggtttntttcccnaaaattttaagaaattcctaagctccccaccnaaaaccanttttaaaccngccaaagggnctngantgacantttttcgaaaaacgngtccttgcccggngggcgtttttaaatatgggancccggctgccggaatcnttttaacctttnnatccccccnccccagggggggccggnccc

SEQ ID NO: 3310 - DNA, 908 bp, Homo sapiens
  misc_feature 2, 3, 10, 11, 12, 13, 17, 45, 492, 599, 618, 623, 626, 689,709, 721, 788, 796, 807, 814, 830, 836, 849, 857, 868, 869,898, 904, 907: n = A,T,C or G
tnnatagggnnnncacntcgtctacactactatagggcgaattgnagctccaccgcggtggcggcccgaggtacctttctttccaggccatggcaaaaaaaatccaattatgtccgtcttgagtctgtggtcttgcttcttatgtagtatttcctttgtgagctgaagattaatgcatggattcacctcttcagcacatttcatttcaattgtgaagaaaagattccaggcactgaatgtaaaattgaacatgacattttgacattccttcttctgagagctgggttggtcttaagttgctgtgaggctctagacaccgaccatacagggcgtggggctgctcctggacatgaacatcctccgaagctctccccagtccccccgcgtacctgcccgggcggccgctctagaactagtggatcccccgggctgcaggaattcgatatcaagcttatcgataccgtcgacctcgagggggggcccggtacccancttttgttccctttagtgagggttaattgcgcgcttggcgtaatcatggtcatagctgtttcctgtgtgaaaattggtatccgtcacaattccacacaacataccanccgggagcattaaagtggnaaagnctngggtgcctaatgagtgaagctaacctcacaattaaattgcgttgcgctcactggcccgctttncagtcggggaaacctgtccntgccagctggantaatgaattcggccaacccccggggaagaagccggtttgcgtattggggcgccttttccgctttctngcttaatngaactcgttgngctcggnccttcgggttggggcnaacggnattaacttacttnaaaggggngaataccggtnnttccacaaaaatcaaggggtataaccccnggaaanaant

SEQ ID NO: 3311 - DNA, 892 bp, Homo sapiens
  misc_feature 2, 3, 6, 11, 13, 14, 15, 605, 698, 701, 770, 773, 799, 802,804, 808, 811, 812, 817, 829, 833, 859, 869, 873, 875, 888,890: n = A,T,C or G
gnnagnggggncnnntcgactcctatagggcgaattggagctccccgcggtggcggccgccgggcaggtacattttctaaaatccaaaattacccttaataaatcttggcaaaacacacactataggagataaagacatccctaaaatttcactctaatttactgaaaatagaagtcaaattaaattcaaatgttggcttacattaaaatagcacaggatcttataatttacttttaatcttggaggaattctcattattctctcatcaattcttcttcaaaaaaataaattaataaaaacttccttgtttgtcacatacagtgtcctaaacagaaacatctgatttttctttgggtcagcaagaacaacttaacttccaaattcctttatggccactattttagacactaagaccaagaactccaaagaaagctataaaaaaaaatgctactatatgactatatagtagcatatatatatatagaaaaaaatatagtatatgataccaaatattatagtttacaaaaccacattcatatacaacagggttcaattttttaaatcacatcacgagtggaaaagaaacccaaactatatattctanggaaaaaagcaccggtcacagtggcttaagcctataatcccagcactttgggagggccaggcagacagatccttgaaggccaggaagtttganggncagcccgggccaacattgggtggaaacccctctcttcccaaaaataccaaaaatttagctgggtatggnggnccatgcctggtatctcacctacttangangnttgnggnnggaanaatcacttaaanccangaggcggcgggtgcagtgagccaaancatgccctgnactnancccgggggacagngngg

SEQ ID NO: 3312 - DNA, 891 bp, Homo sapiens
  misc_feature 5, 7, 8, 14, 17, 26, 407, 425, 426, 427, 428, 429, 430, 432,435, 436, 437, 438, 439, 440, 441, 442, 443, 444, 445, 446,447, 448, 449, 450, 451, 452, 453, 454, 455, 456, 457, 458,459, 460, 461, 462, 463, 464, 465, 466, 467, 468: n = A,T,C or G
  misc_feature 469, 470, 471, 472, 473, 474, 475, 476, 478, 479, 480, 481,482, 483, 484, 485, 486, 487, 488, 489, 490, 491, 492, 493,494, 495, 496, 497, 498, 499, 500, 501, 502, 503, 504, 505,506, 507, 508, 509, 510, 511, 512, 513, 514, 515, 516: n = A,T,C or G
  misc_feature 517, 518, 519, 520, 521, 522, 523, 524, 525, 526, 527, 528,529, 530, 531, 532, 533, 534, 535, 536, 537, 538, 539, 540,541, 542, 543, 544, 545, 546, 547, 548, 549, 550, 551, 552,553, 554, 555, 556, 557, 558, 559, 560, 561, 562, 563: n = A,T,C or G
  misc_feature 564, 565, 566, 567, 568, 569, 570, 571, 572, 573, 574, 575,576, 577, 578, 579, 580, 581, 582, 583, 584, 585, 586, 587,588, 589, 590, 591, 592, 593, 594, 595, 596, 597, 598, 599,600, 601, 602, 603, 604, 605, 606, 607, 608, 609, 610: n = A,T,C or G
  misc_feature 611, 612, 613, 614, 615, 616, 617, 618, 619, 620, 621, 622,623, 624, 625, 626, 627, 628, 629, 630, 631, 632, 633, 634,635, 636, 637, 638, 639, 640, 641, 642, 643, 644, 645, 646,647, 648, 649, 650, 651, 652, 653, 654, 655, 656, 657: n = A,T,C or G
  misc_feature 658, 659, 660, 661, 662, 663, 664, 665, 666, 667, 668, 669,670, 671, 672, 673, 674, 675, 676, 677, 678, 679, 680, 681,682, 683, 684, 685, 686, 687, 688, 689, 690, 691, 692, 693,694-738, 740-813, 815, 816, 818-891: n = A,T,C or G
agagngnnccgtantantatatggcnaattggagctccaccgcggtggcggccgaggtactactggcactgagccaatgtatgctatcaaggaaagctttatctgtcactgagcaaaaggtgaagttcaattaggtcagttttatcacttcttttcctacacacaaactatgaggagagatcatttcttttctttcttttatttatttattttttttgagacagggtcccactctgttgcccaggttagagtacctgcccgggcggccgctctagaactagtggatcccccgggctgcaggaattcgatatcaagcttatcgataccgtcgacctcgagggggggcccggtacccagcttttgttccctttagtgagggttaattgcgcgcttggcgtaatcatggncatagctggttccctggnnnnnncnggnnnnnnnnnnnnnnnnnnnnnnnnnnnnnnnnnnnnnnnnnnannnnnnnnnnnnnnnnnnnnnnnnnnnnnnnnnnnnnnnnnnnnnnnnnnnnnnnnnnnnnnnnnnnnnnnnnnnnnnnnnnnnnnnnnnnnnnnnnnnnnnnnnnnnnnnnnnnnnnnnnnnnnnnnnnnnnnnnnnnnnnnnnnnnnnnnnnnnnnnnnnnnnnnnnnnnnnnnnnnnnnnnnnnnnnnnnnnnnnnnnnnnnnnnnnnnnnnnnnnnnnnnnnnnnnnnnnnnnnnnnnnnnnnnnnnnnnnnnnnnngnnnnnnnnnnnnnnnnnnnnnnnnnnnnnnnnnnnnnnnnnnnnnnnnnnnnnnnnnnnnnnnnnnnnnnnnnnanngnnnnnnnnnnnnnnnnnnnnnnnnnnnnnnnnnnnnnnnnnnnnnnnnnnnnnnnnnnnnnnnnnnnnnnnnnn

SEQ ID NO: 3313 - DNA, 818 bp, Homo sapiens
  misc_feature 2, 21, 25, 511, 595, 613, 626, 648, 670, 680, 693, 710, 718,722, 729, 730, 735, 767, 768, 771, 794, 796, 798, 799, 800,801, 802, 803, 804, 805, 806, 807, 808, 809, 812, 813, 814,815, 816, 817, 818: n = A,T,C or G
gncgcgtatcgactactatanggcnaattggagctccccgcggtggcggccgggggccattgagactgccatggaagacttgaaaggtcacgtagctgagacttctggagagaccattcaaggcttctggctcttgacaaagatggaccactggaacaatgagaaggagagaattctactggtcacagacaagactctcttgatctgcaaatacgacttcatcatgctgagttgtgtgcagctgcagcggattcctctgagcgctgtctatcgcatctgcctgggcaagttcaccttccctgggatgtccctggacaagagacaaggagaaggccttaggatctactgggggagtccggaggagcagtctcttctgtcccgctggaacccatggtccactgaagttccttatgctactttcactgagcatcctatgaaatacaccagtgagaaattccttgaaatttgcaagttgcctgggttcatgtctaaacttgttccagctatccanaatgcccacaagaattcaactggatctggaaaaagaaagaaactgatggtgttaacttgacccattttgattgaaacctcacanggctgatgtcttcttggnaaccgaaccaacntggcttttccttgcctgtggantttggttttgaaagcttttgtncctggccgtntaaaatagggatncccggcttgaggaattnatttaacntatnattccgnnacctnaggggggcccggccccacttttgttcctttannganggtaatccccctgggtatatggnanannnnnnnnnnnncgnnnnnnn

SEQ ID NO: 3314 - DNA, 882 bp, Homo sapiens
  misc_feature 3, 5, 612, 637, 708, 726, 741, 758, 776, 794, 812, 822, 830,839, 840, 847, 848, 858, 865, 870: n = A,T,C or G
agngngcgccgtaatacgactactatagggcgaattggagctccccgcggtggcggcccgcccgggcaggtacttggcacatctggaaaatgacggagtctttcaaaaatactgctgggaagatgacctgttttcactctctctctaggcaggttcacatcaccagatgatgctggatatggctccactccaaggaaaacaaccttttcttggtctttcaatggctgtttatgagtatacaacaagtgctttctatatactgcaaactcgttagacagacaagtccctctgtcaatcccactctacagtgcatatgcttctgtgtggtacctcggccgctctagaactagtggatcccccgggctgcaggaattcgatatcaagcttatcgataccgtcgacctcgagggggggcccggtacccagcttttgttccctttagtgagggttaattgcgcgccttggcgtaatcatggtcataagctgtttctgtgtgaaattggtatccgctcacaattccacacaacatacgaacccgggagcataaagtgtaaagcctggggtgcctaatgagtgagctaactcacattaattgcgttggcgcttcactgnccgcttttcaagtcgggaaacctgnccgtgccaagcttgcattaatgaatcggcccaacccccggggagaaggcggtttgcgtaattgggcgcctntttccgctttcttgcttnactgacttcgcttgngcctcggtccgttccgnttggggggagcgggattnagcttactcaaaggcggnaataccggttatcccaanaatcaggggnttaacccngggaaaaanncttgtgnncaaagggccnccaaaanggccngaacccgaaaat

SEQ ID NO: 3315 - DNA, 858 bp, Homo sapiens
  misc_feature 3, 4, 7, 32, 498, 577, 582, 584, 585, 586, 587, 588, 589,590, 591, 592, 593, 594, 595, 596, 597, 598, 599, 600, 601,602, 603, 604, 605, 606, 607, 608, 609, 610, 611, 612, 613,614, 615, 616, 617, 618, 619, 620, 621, 622, 623, 624: n = A,T,C or G
  misc_feature 625, 626, 627, 628, 629, 630, 631, 632, 633, 634, 635, 636,637, 638, 639, 640, 641, 642, 643, 644, 645, 646, 647, 648,649, 650, 651, 652, 653, 654, 655, 656, 657, 658, 659, 660,661, 662, 663, 664, 665, 666, 667, 668, 669, 670, 671: n = A,T,C or G
  misc_feature 672, 673, 674, 675, 676, 677, 678, 679, 680, 681, 682, 683,684, 685, 686, 687, 688, 689, 690, 691, 692, 693, 694, 695,696, 697, 698, 699, 700, 701, 702, 703, 704, 705, 706, 707,708, 709, 710, 711, 712, 713, 714, 715, 716, 717, 718: n = A,T,C or G
  misc_feature 719, 720, 721, 722, 723, 724, 725, 726, 727, 728, 729, 730,731, 732, 733, 734, 735, 736, 737, 738, 739, 740, 741, 742,743, 744, 745, 746, 747, 748, 749, 750, 751, 752, 753, 754,755, 756, 757, 758, 759, 760, 761, 762, 763, 764, 765: n = A,T,C or G
  misc_feature 766, 767, 768, 769, 770, 771, 772, 773, 774, 775, 776, 777,778, 779, 780, 781, 782, 783, 784, 785, 786, 787, 788, 789,790, 791, 792, 793, 794, 795, 796, 797, 798, 799, 800, 801,802, 803, 804, 805, 806, 807, 808, 809, 810, 811, 812: n = A,T,C or G
  misc_feature 813, 814, 815, 816, 817, 818, 819, 820, 821, 822, 823, 824,825, 826, 827, 828, 829, 830, 831, 832, 833, 834, 835, 836,837, 838, 839, 840, 841, 842, 843, 844, 845, 846, 847, 848,849, 850, 851, 852, 853, 854, 855, 856, 857, 858: n = A,T,C or G
agnnatnccgtaaacgacttactatatggctnattggagctccaccgcggtggcggcccgcccgggcaggtacgcggggacacattcagaggtgagcccagagggggtaaagtggactggggagaacttcggaggatgttcatgtccaggagcagccccacgccctgtatggtcggtgtctagagcctcacagcaactaagaccaacccagctctcagaagaaggaatgtcaaaatgtcatgttcaattttacattcagtgcctggaatcttttcttcacaattgaaatgaaatgtgctgaaggaggtgaatccatgcattaatcttcagctcacaaaggaaatactacataagaagcaagaccacagactcaagacggacataattggattttttttgccatggcctggaaagaaaggtacctcggccgctctagaactagtggatcccccgggctgcaggaattcgatatcaagcttatcgataccgtcgacctcnagggggggcccggtacccaacttttgttccctttaatgagggttaattgcgcccttggcgtaatcatggtcatagctgntttcngnnnnnnnnnnnnnnnnnnnnnnnnnnnnnnnnnnnnnnnnnnnnnnnnnnnnnnnnnnnnnnnnnnnnnnnnnnnnnnnnnnnnnnnnnnnnnnnnnnnnnnnnnnnnnnnnnnnnnnnnnnnnnnnnnnnnnnnnnnnnnnnnnnnnnnnnnnnnnnnnnnnnnnnnnnnnnnnnnnnnnnnnnnnnnnnnnnnnnnnnnnnnnnnnnnnnnnnnnnnnnnnnnnnnnnnnnnnnnnnnnnnnnnnnnnnnnnnnnnnnnnnnnnnnnnnnnnn

SEQ ID NO: 3316 - DNA, 850 bp, Homo sapiens
  misc_feature 2, 3, 6, 7, 30, 35, 65, 68, 72, 74, 80, 85, 87, 88, 90, 98,99, 102, 103, 105, 110, 116, 117, 118, 120, 124, 125, 131,141, 144, 151, 157, 162, 163, 165, 173, 174, 177, 183, 189,196, 198, 200, 203, 211, 212, 213, 219, 220, 221, 225: n = A,T,C or G
  misc_feature 226, 227, 235, 242, 243, 244, 245, 246, 247, 248, 249, 251,254, 255, 258, 260, 265, 268, 273, 282, 285, 296, 299, 301,302, 303, 309, 319, 324, 331, 333, 338, 339, 340, 341, 344,355, 356, 357, 358, 359, 360, 361, 364, 365, 369, 370: n = A,T,C or G
  misc_feature 386, 388, 397, 415, 424, 435, 472, 587, 588, 594, 596, 597,598, 599, 600, 601, 602, 603, 604, 605, 606, 607, 608, 609,610, 611, 612, 613, 614, 615, 616, 617, 618, 619, 620, 621,622, 623, 624, 625, 626, 627, 628, 629, 630, 631, 632: n = A,T,C or G
  misc_feature 633, 634, 635, 636, 637, 638, 639, 640, 641, 642, 643, 644,645, 646, 647, 648, 649, 650, 651, 652, 653, 654, 655, 656,657, 658, 659, 660, 661, 662, 663, 664, 665, 666, 667, 668,669, 670, 671, 672, 673, 674, 675, 676, 677, 678, 679: n = A,T,C or G
  misc_feature 680, 681, 682, 683, 684, 685, 686, 687, 688, 689, 690, 691,692, 693, 694, 695, 696, 697, 698, 699, 700, 701, 702, 703,704, 705, 706, 707, 708, 709, 710, 711, 712, 713, 714, 715,716, 717, 718, 719, 720, 721, 722, 723, 724, 725, 726: n = A,T,C or G
  misc_feature 727, 728, 729, 730, 731, 732, 733, 734, 735, 736, 737, 738,739, 740, 741, 742, 743, 744, 745, 746, 747, 748, 749, 750,751, 752, 753, 754, 755, 756, 757, 758, 759, 760, 761, 762,763, 764, 765, 766, 767, 768, 769, 770, 771, 772, 773-850: n = A,T,C or G
gnnganngcgcgttatacgacttactatanggctnattggagctccaccgcggtggcggcccgcncgngcangntcgcgngattntnncngcctcatnnttnngnaagtngctagnnnangtgnntcatgnggtataatgnatnaataccncctttnttatnntnacctactnnctnacgacncctctnattatgncntnacngagatcgnnngcatannnaagnnncgcccctnattgccnnnnnnnngnacnnccnanaaatntanaaagnacatggganaanttataactaantgntnnnctcacnttcctgaatnaaagntgacacncntgcannnnaanaaaacacttgnnnnnnngtnngacnnccttgacattaatctntnataggatangaaaactcttcatctatncataaagcnaacatgtcctnggcccgctctagaactagtggatcccccgggctgcangaattcgatatcaagcttatcgataccgtcgacctcgagggggggcccggtacccaacttttgttccctttaatgagggttaattgcgcccttggcgtaatcatggtcatagctnnttctgngnnnnnnnnnnnnnnnnnnnnnnnnnnnnnnnnnnnnnnnnnnnnnnnnnnnnnnnnnnnnnnnnnnnnnnnnnnnnnnnnnnnnnnnnnnnnnnnnnnnnnnnnnnnnnnnnnnnnnnnnnnnnnnnnnnnnnnnnnnnnnnnnnnnnnnnnnnnnnnnnnnnnnnnnnnnnnnnnnnnnnnnnnnnnnnnnnnnnnnnnnnnnnnnnnnnnnnnnnnnnnnnnnnnnnnnnnnnnnnnnnnnnnnnnnnnnnnn

SEQ ID NO: 3317 - DNA, 851 bp, Homo sapiens
  misc_feature 2, 5, 33, 34, 453, 490, 513, 517, 557, 579, 582, 609, 637,638, 642, 649, 673, 674, 679, 682, 687, 695, 699, 701, 708,711, 742, 749, 766, 773, 802, 811, 812, 818, 819, 827, 832,841, 843, 844, 847, 849: n = A,T,C or G
gnggncgcgcgttatacgactcactatagggcnnattggagctccccgcggtggcggcccgaggtactaggcccatggtagacagtcaacaaatatttgtccaactacttaagagaagataaattatttttctaaatacaactttatctatgctcttgctttcataaacaatacctcctaagagcagagattaatatgagtagctgaagtcaatttaatatagtggagttaactgctctgactggatgttatctatcaatcaacaatcataaattgagcatcaactatatattcagcatgaatatcctcatcaatatctatgtatgtatgtatgtatgtatgtatgtatgtatctatctatctatctatctatctatctatctatctatctaatccatccatccatccacactctgaagatgctatatatagaggccatgggaaatacagaantctatctatggcagggccctgccctcaaggaaatggngggggtccaacagtattcactgnggtngaagggacctgcccgggcgggccggccgggcaggtacttncccaacccctaacccatcttancanaaagttcaaagctttttgttgcttagngaccatttcttcaatttcccaattgttnntganggcggtntaaatggatcctaatatgctcctnnaggantcntttanaacattcnttgntnttcatanggnctttatgtactaaggaaaaatcattcctttngggaaanccaaacccttttggaangggctgnttcccttggaaaaaaaaatggaggcccanttccctttnnaggccnnagctgggnccaanaatttgtancnnacncngg

SEQ ID NO: 3318 - DNA, 888 bp, Homo sapiens
  misc_feature 581, 602, 650, 656, 696, 707, 729, 739, 740, 742, 744, 746,747, 748, 749, 750, 751, 752, 753, 754, 755, 756, 757, 758,759, 760, 761, 762, 763, 764, 765, 766, 767, 768, 769, 770,771, 772, 773, 774, 775, 776, 777, 778, 779, 780, 781: n = A,T,C or G
  misc_feature 782, 783, 784, 785, 786, 787, 788, 789, 790, 791, 792, 793,794, 795, 796, 797, 798, 799, 800, 801, 802, 803, 804, 805,806, 807, 808, 810, 811, 812, 813, 814, 815, 816, 817, 818,819, 820, 821, 822, 823, 824, 825, 826, 827, 828, 829: n = A,T,C or G
  misc_feature 830, 831, 832, 833, 834, 835, 836, 837, 838, 839, 840, 841,842, 843, 844, 845, 846, 847, 848, 849, 850, 851, 852, 853,854, 855, 856, 857, 858, 859, 860, 861, 862, 863, 864, 865,866, 867, 868, 869, 870, 871, 872, 873, 874, 875, 876: n = A,T,C or G
  misc_feature 877, 878, 879, 880, 881, 882, 883, 884, 885, 886, 887: n = A,T,C or G
agcgcgcgtatcgactactatagggcgagattggagctccccgcggtggcggccgcccgggcaggtacttcctctactttctgataagctttaaaagaaaaaaactaaactaaatatttcaaaatcaatggacttcaagtaatccaagagaatttggaaaacatttctctaaaaactaatccagaacacaaggtgtcagtttggaaataacggaagcatatttcgttttaaaaatctaaaacattttaaagacaaaaattcaagttaacatcccagtgattaactctggaactgcctagccaaaaacaactttcggcacttaaaacataaaactgtcagtttcctctgcttggagacaaaacatacaaaaagcaaacattcactgttatattttcctagacatgaaagatagaactaactttcataaaaggtgatcactctgagtatttctacctgatatgatattcatgtcgtagctcctaaaaatcagttacaaattcccaaaccttagaactatccttaatagatggctactattctagtttgcgttactccctcgacttggtggaagtaccttcggncgctcttagaactagtggatncccccggctgcaggaattcgattttcaagcttattcgataccggcganctcganggggggggcccggtccccaacttttggttcccttagtgangggttaattgngccgcttgggggaatcatgggnttagctgggnntncngnnnnnnnnnnnnnnnnnnnnnnnnnnnnnnnnnnnnnnnnnnnnnnnnnnnnnnnnnnnnnnngnnnnnnnnnnnnnnnnnnnnnnnnnnnnnnnnnnnnnnnnnnnnnnnnnnnnnnnnnnnnnnnnnnnnnnnnnnnnnnc

SEQ ID NO: 3319 - DNA, 845 bp, Homo sapiens
  misc_feature 553, 618, 619, 620, 621, 622, 623, 624, 625, 626, 627, 628,629, 630, 631, 632, 633, 634, 635, 636, 637, 638, 639, 640,641, 642, 643, 644, 645, 646, 647, 648, 649, 650, 651, 652,653, 654, 655, 656, 657, 658, 659, 660, 661, 662, 663: n = A,T,C or G
  misc_feature 664, 665, 666, 667, 668, 669, 670, 671, 672, 673, 674, 675,676, 677, 678, 679, 680, 681, 682, 683, 684, 685, 686, 687,688, 689, 690, 691, 692, 693, 694, 695, 696, 697, 698, 699,700, 701, 702, 703, 704, 705, 706, 707, 708, 709, 710: n = A,T,C or G
  misc_feature 711, 712, 713, 714, 715, 716, 717, 718, 719, 720, 721, 722,723, 724, 725, 726, 727, 728, 729, 730, 731, 732, 733, 734,735, 736, 737, 738, 739, 740, 741, 742, 743, 744, 745, 746,747, 748, 749, 750, 751, 752, 753, 754, 755, 756, 757: n = A,T,C or G
  misc_feature 758, 759, 760, 761, 762, 763, 764, 765, 766, 767, 768, 769,770, 771, 772, 773, 774, 775, 776, 777, 778, 779, 780, 781,782, 783, 784, 785, 786, 787, 788, 789, 790, 791, 792, 793,794, 795, 796, 797, 798, 799, 800, 801, 802, 803, 804: n = A,T,C or G
  misc_feature 805, 806, 807, 808, 809, 810, 811, 812, 813, 814, 815, 816,817, 818, 819, 820, 821, 822, 823, 824, 825, 826, 827, 828,829, 830, 831, 832, 833, 834, 835, 836, 837, 838, 839, 840,841, 842, 843, 844: n = A,T,C or G
agcgcgtatcgactactatagggcgaattggagctccccgcggtggcggccgcccgggcaggtactgagtaagaagcccatttggtttgtgtctgggaggatgggcagtgaggatgagtgaggatgagtttaatttagcttggtgagagggggacaaatccaccttttcacgagagctgtttctcatcgctttttgtcccccttcatccacaacccccgcagccaaggcagtgtcagtaaattttgggatggaaaagccttaggtaggattcttatgttttcgaaatgtgactgattggaattgggggaaagctgtattaaaattggatatgtggtaaaagctggatatgtggttattacccatatccagtaagtgagtcatgttcctgtgctaccatgatctgcccgcagtaacctagcaagacatcaaatcacagtgtgcagtagatggtacctcggccgctctagaactagtggatcccccgggctgcaggaattcgatatcaagcttatcgataccgtcgacctcgagggggggcccggtacccagctnttgttccctttagtgagggttaattgcgcgcttggcgtaatcatggtcatagcttttttcgtggnnnnnnnnnnnnnnnnnnnnnnnnnnnnnnnnnnnnnnnnnnnnnnnnnnnnnnnnnnnnnnnnnnnnnnnnnnnnnnnnnnnnnnnnnnnnnnnnnnnnnnnnnnnnnnnnnnnnnnnnnnnnnnnnnnnnnnnnnnnnnnnnnnnnnnnnnnnnnnnnnnnnnnnnnnnnnnnnnnnnnnnnnnnnnnnnnnnnnnnnnnnnnnnnnnnnnnnnnnnnnnnnnnnc

SEQ ID NO: 3320 - DNA, 862 bp, Homo sapiens
  misc_feature 4, 629, 660, 668, 675, 687, 707, 750, 757, 771, 780, 793,812, 820, 830, 858, 861: n = A,T,C or G
tagnccgtatcgactcctatagggcgaattggagctccccgcggtggcggccgaggtactcgggaggctgaaggaggagaattgcttgaacccaggaggcagaggttgcagtgagcagagatcatcgcaccactgcactccagtctgggcaataagagtgaaactgtctcaaaaaaaaaaaaaggaaaaattaattacacctgagggaaattcccatgcaacatttaatgaatgccttcagtgctgttataatgcattaatttctatgagaaatgttctctcttttttgtgccttttaggaaaattgcattttggtgatagaagataaaaacttggctaattaggccaggcatggtgggtcatgcatgtaatgatatgggaggctggcatatcacttgaggccaggagttcgagactagcctgtccaacacagtgaaaccccgtctctactaaaaatacaaaaattagctggatgtggtggtggatgcctgtaatcccagctacctgggaggctgaggcaagaagaatcgcttgaatccaggaggtggaggttgaagtgagccgaaatcacgtcacttgtacctgcccgggccggccgctctagaactagtggatcccccgggctgcangaaattcgatatcaagcttatcgatcccgcnacctcganggggggncccggtacccancttttggtccctttagtganggttaattgcgccctttgccgtaatcatggtcatagctggttnctgtgtngaaattgttatccnttacaattncacacaacatacnaacccgggacataaaattntaaacctngggtgccctnatgagtggacctacctcccattaattgncgnt

SEQ ID NO: 3321 - DNA, 858 bp, Homo sapiens
  misc_feature 1, 4, 5, 7, 8, 9, 725, 746, 814, 843, 852, 858: n = A,T,C or G
ntgnngnnncgcgtaatacgactcctatagggcgaattggagctccccgcggtggcggcccgaggtacagaacttaaacaccactatttgttgagatgaaaaaaagcatatataggaagccttcaaaatgaaatggtcaagggtgagtttacacagatagatagatttaggtctcttccttttgctttgtgaaagcatctagtgtttaggtgtcagagagggagatatccttacaaagcagagattatcattacaggtttacatttcttacaaagagtttcaaaataaacaggtaaatgccaaaaacatatattttggagacggattaattcactagttggtctattcaacttaacttgtttcctaatgagattaaattcatgcacaaataaccaaaccaaaaattaaaccaaaagaatactcaccagaaaggatgtcctttacaagagcagatcccccaaaatgtaagagttcactgaaaaggtgggagctcaaaccaagagaggacttatctcgcagcataaagacaacttgtacctcggccgctctagaactagtggatcccccgggctgcaggaattcgatatcaagcttatcgataccgtcgacctcgagggggggcccggtacccagcttttgttccctttagtgaggggttaatttgccgcttggcgtaatcatggtcatagctgttcctgtgtgaaattggttatccgctcacattncacacaacatccagccggganccttaaagtgtaaagcctggggtgcctaatgaagtgagctactcccttaaatgcgttgcgctcactgnccgcttttccagtcgggaaccttgcgtgnccgcttgcnttatgn

SEQ ID NO: 3322 - DNA, 857 bp, Homo sapiens
  misc_feature 1, 3, 668, 675, 692, 723, 756, 802, 857: n = A,T,C or G
ntnccgtatcgactactatagggcgaattggagctccaccgcggtggcggcccgaggtacagcttgggcctccagctttgggcactagaattggacccctgcacccccatcatgggactggagcaggagatttgcctgagaggtgtggttttggacccaatagcaaatttgcaggctgaaggagatatatggtctgtctgattcctgtggttgggatgaggaaatgagtcctgatggttctggagagagagagaggcaggtcccatactgtttgcctggttttaacaatgggtttgcccttgccttcctgtgctgggacattgatgcaatgtcagttgctctcatctttgcctaggcatttctacagggtttggcaactgtccctagatccctgtcagagccagtgcttctgcctgctactgggggaccaaatggctgtcttgcccagtccagctctacccagcttcacctctccccaccagtcccctcccctcccccaaggctgagtgtaagacccaaaccactgagctttccctggcccaacccattgcgtgggacacttaagtacctgcccgggcggccgctcttagaactagtggatcccccgggctgcagaattcgatattaaagcttatcgatccgtcgacctcgaaggggggggcccggtncccaacntttgttcctttaatgangggtaattgcccccttggccgtaatcatggncaatagcttgtttcctgtgtggaaattggtatncccttacaattcccacaacatacgaacccgggaacctaaaagtgtnaaagcctggggtgcctaatgagtgagctaactcacattaattgcgttcgctcacn

SEQ ID NO: 3323 - DNA, 846 bp, Homo sapiens
  misc_feature 29, 372, 395, 492, 509, 548, 555, 567, 568, 569, 570, 571,572, 573, 574, 575, 576, 577, 578, 579, 580, 581, 582, 583,584, 585, 586, 587, 588, 589, 590, 591, 592, 593, 594, 595,596, 597, 598, 599, 600, 601, 602, 603, 604, 605, 606: n = A,T,C or G
  misc_feature 607, 608, 609, 610, 611, 612, 613, 614, 615, 616, 617, 618,619, 620, 621, 622, 623, 624, 625, 626, 627, 628, 629, 630,631, 632, 633, 634, 635, 636, 637, 638, 639, 640, 641, 642,643, 644, 645, 646, 647, 648, 649, 650, 651, 652, 653: n = A,T,C or G
  misc_feature 654, 655, 656, 657, 658, 659, 660, 661, 662, 663, 664, 665,666, 667, 668, 669, 670, 671, 672, 673, 674, 675, 676, 677,678, 679, 680, 681, 682, 683, 684, 685, 686, 687, 688, 689,690, 691, 692, 693, 694, 695, 696, 697, 698, 699, 700: n = A,T,C or G
  misc_feature 701, 702, 703, 704, 705, 706, 707, 708, 709, 710, 711, 712,713, 714, 715, 716, 717, 718, 719, 720, 721, 722, 723, 724,725, 726, 727, 728, 729, 730, 731, 732, 733, 734, 735, 736,737, 738, 739, 740, 741, 742, 743, 744, 745, 746, 747: n = A,T,C or G
  misc_feature 748, 749, 750, 751, 752, 753, 754, 755, 756, 757, 758, 759,760, 761, 762, 763, 764, 765, 766, 767, 768, 769, 770, 771,772, 773, 774, 775, 776, 777, 778, 779, 780, 781, 782, 783,784, 785, 786, 787, 788, 789, 790, 791, 792, 793, 794: n = A,T,C or G
  misc_feature 795, 796, 797, 798, 799, 800, 801, 802, 803, 804, 805, 806,807, 808, 809, 810, 811, 812, 813, 814, 815, 816, 817, 818,819, 820, 821, 822, 823, 824, 825, 826, 827, 828, 829, 830,831, 832, 833, 834, 835, 836, 837, 838, 839, 840, 841-846: n = A,T,C or G
gacgcgcgtaatacgactactatagggcnaattggagctccccgcggtggcggccgcccgggcaggtacctggcctattcctggctttgaaaaaatggttttcggacactaaatcttttattataattcaaacacattatagttgcttctgggagacttttgccttttgccctgcttacaaactagcatcatattctaaaatctcaggaactaaaattactcattgtaatttctctaaaattcaaagcctattggaatccctgctcttgttatgtaaaatataaatattcgagacatttcacaccacattttcattattcagcattcccatcaagtgctggaaggccagttcgctattttataatgaacgtnctgggtttgttctgaaagggcanccttgtacctcggccgctctagaactagtggatcccccgggctgcaagaattcgatatcaagcttatcgatacccgtcgacctcgagggggggcccngtacccaacttttgttncctttaatgagggttaattgcgcccttggcgtaatcatnggcatancttttttcctgnnnnnnnnnnnnnnnnnnnnnnnnnnnnnnnnnnnnnnnnnnnnnnnnnnnnnnnnnnnnnnnnnnnnnnnnnnnnnnnnnnnnnnnnnnnnnnnnnnnnnnnnnnnnnnnnnnnnnnnnnnnnnnnnnnnnnnnnnnnnnnnnnnnnnnnnnnnnnnnnnnnnnnnnnnnnnnnnnnnnnnnnnnnnnnnnnnnnnnnnnnnnnnnnnnnnnnnnnnnnnnnnnnnnnnnnnnnnnnnnnnnnnnnnnnnnnnnnnnnnnnnnnnnnnnnnnnnnnnnn

SEQ ID NO: 3324 - DNA, 881 bp, Homo sapiens
  misc_feature 1, 2, 4, 9, 12, 615, 645, 700, 736, 742, 790, 825, 840, 841,859, 864: n = A,T,C or G
nngncgcgngcncgtaatacgactcactatagggcgaattggagctccaccgcggtggcggccgcccgggcaggtactgtgctcagaaatgtgaccagcaatgtaaaccgacagaaccaatggcttttttgaaaataacaaagtatttccgatccttttttaagtagagaattttctcccagcacatcctatttccaattgtgcgcaaaaaaccttccagcttacaaatgttaattcaggggttggcaaataaaggcccagaggccaaatctggcccaccacctgctcagtctgcaagctaaggatgttttcttacatttttaaatggttggggagaaatagaaagagtatttttgaatatgtgaaaattacatgaaaaatcaagtgttcagtgtcaatgtttctttggtatacagccacacccattcattcacgtattgtacctcggccgctctagaactagtggatcccccgggctgcaggaattcgatatcaagcttatcgataccgtcgacctcgagggggggcccggtcccagcttttgttccctttagtgagggttaattgcgcgcttggcgtaatcatggtcataagctggttcctgtgtgaaattgntatcccgcttacaattccccacaacattcnagcccgggagcataaagtgtaaagcctggggtgcctaatgaggtggagctaactnacattaaattgggttggcgctcacttgcccgttttncaatcngggaaaacctgtcgtgccagcttgcattaaatgaatccggccaacccncggggaggaggccggtttgcgtattggggcgcctntttccgctttccttnnttcacttgacttcgttgngctcnggtcgttcggtgggggg

SEQ ID NO: 3325 - DNA, 969 bp, Homo sapiens
  misc_feature 2, 3, 4, 5, 6, 7, 8, 9, 10, 11, 12, 13, 14, 15, 16, 17, 18,19, 20, 21, 22, 23, 24, 25, 26, 27, 28, 29, 30, 31, 32,33, 34, 35, 36, 37, 38, 39, 44, 45, 46, 48, 49, 52, 53,54, 55, 56, 57, 59, 60, 61, 62, 63, 64, 65, 66, 67, 69,70: n = A,T,C or G
  misc_feature 71, 72, 73, 74, 75, 76, 77, 78, 79, 80, 81, 82, 83, 84, 85,87, 88, 94, 99, 101, 102, 107, 111, 114, 118, 121, 125,129, 135, 137, 142, 143, 157, 192, 195, 196, 197, 219, 400,656, 657, 658, 660, 661, 663, 664, 665, 674, 675, 676: n = A,T,C or G
  misc_feature 679, 682, 684, 685, 688, 689, 691, 693, 694, 695, 704, 705,707, 709, 711, 717, 719, 729, 730, 733, 735, 738, 739, 751,752, 754, 755, 756, 763, 766, 767, 768, 771, 773, 774, 775,776, 778, 781, 785, 788, 792, 795, 796, 804, 808, 809: n = A,T,C or G
  misc_feature 812, 813, 815, 816, 817, 818, 825, 826, 827, 830, 833, 837,842, 845, 847, 855, 856, 857, 859, 860, 861, 862, 864, 865,867, 868, 874, 879, 880, 885, 886, 889, 892, 893, 895, 896,899, 900, 902, 904, 909, 910, 913, 918, 919, 921, 923: n = A,T,C or G
  misc_feature 925, 926, 929, 931, 932, 933, 934, 938, 941, 942, 945, 949,953, 954, 956, 957, 959, 960, 964, 969: n = A,T,C or G
gnnnnnnnnnnnnnnnnnnnnnnnnnnnnnnnnnnnnnnagagnnnanngtnnnnnnannnnnnnnngnnnnnnnnnnnnnnnnngnnaggganagctngnngatcnactnacngctnatngganctgnaccgcngnggcgnncgcccgggcaggancccgggaattaccaccattttacaaggggggaaanttnnntcatagagcattatcacttgtntaaggtccccaggagaggaatggatggaataaaaaccaaacccgtctgtatgacttatatccgctgctctgaacatctgggagggctctcatttgggcattactcttcccatccaccctaaagattggcgagaatgattgcagtttagtggtagacattctgcgaagggtgggacctttcngcccatcaaagaatcattctgcccaaatgccaccaatgcccctccttgagaaacagctcaaaactctatgtgtaaacagcatctggcgtagtacctcggccgctctagaactagtgggatcccccgggctgcaggaattcgatatcaagcttatcgataccgtcgacctcgagggggggcccggtacccaacttttggtccctttaagtgagggttaattgcgcgctttggcgtaatcatggtcatagctgtttcnnngnnannnagggggtannntanacngnnatnnantnnntgcgaaggnngnangnttttantnaaaaaaagcnnagngnganngaaaaaataaannannntagaagnaannnaanannnnangtnctgnggngggncgnncccccaantatnntanntnnnnagagagnnnggnagnaagnactcnganantaaataannnannnngnnannaggatnattannaaaannatngannannganngntngaaanntgncaagnnantntnntangnnnntggnagnntancganactnngnngnngggncgagn

SEQ ID NO: 3326 - DNA, 943 bp, Homo sapiens
  misc_feature 2, 4, 15, 23, 28, 313, 342, 356, 398, 428, 458, 484, 505,509, 515, 532, 543, 560, 561, 567, 575, 577, 578, 585, 595,598, 599, 604, 609, 615, 624, 633, 634, 635, 636, 642, 643,653, 657, 660, 662, 664, 667, 669, 688, 691, 698, 704: n = A,T,C or G
  misc_feature 705, 711, 712, 715, 716, 719, 727, 734, 743, 746, 751, 764,768, 774, 777, 779, 783, 790, 791, 795, 808, 815, 817, 818,819, 823, 825, 827, 831, 848, 851, 853, 854, 859, 860, 862,863, 864, 866, 871, 873, 874, 879, 881, 882, 885, 892: n = A,T,C or G
  misc_feature 900, 901, 903, 913, 923, 929, 931, 932: n = A,T,C or G
gngnacgaatcgacntactatanggctnattggagctccccgcggtggcggccgaggtacaaaactttctaaacatcctgttttccctcaagacagggcactgttcttaataaactgaacattcttttgcactggccctggggcaagggtgtcccaaaagctttgacaggggtgccatttggcataaacagtgtggtaatagggtggagtcagaaagaaattctctcatcccttttacaactccaggcaattctagaaccaacccttgggaacccagggaaagaactctgaaatgatacgctggctgaggttngcccgtggccacacctcagggttaaagcnattgaaggagctangcaaagaagtgtggtgtgtttagctacagactaagttcacanatcaaagaggcttttgggtattcttccatnttttgccttaagaattcttatgatggtttnttggaaaatattatttggcccttacntttatggttcttaccttgtanatcncaatanaggttccctggtaaaantttaagctttntgcccagggtttccggnnagggtncttacccnanntaattgngcatgaagtnaanntgaancccantcaaanggaatttgntttgggatnnnngaaaannttccatattncccntgncnangcncntttaaacccctaaaaaagnatntattgcnccttgnnaatttnnctnngtncccccctnacctttngggcgcttnttnttttntttttttttttanaagnggggtntantnaggntggtttnntaantctaagagagtgnggggggngnnncccncngngcanaattaattgtaaaaganaangnngacgnncnnnangggcntnntaaananngangagttantttttttnngngggataaatnacacgggagngataananngacaccgccgg

SEQ ID NO: 3327 - DNA, 840 bp, Homo sapiens
  misc_feature 3, 4, 6, 7, 238, 479, 482, 492, 498, 514, 562, 583, 603,702, 704, 707, 713, 726, 737, 769, 790, 793, 794, 795, 796,797, 798, 799, 800, 801, 807, 808, 809, 810, 811, 812, 813,814, 815, 816, 817, 818, 819, 820, 821, 822, 823, 824: n = A,T,C or G
  misc_feature 825, 826, 827, 828, 829, 830, 831, 832, 833, 834, 835, 836,837, 838, 839: n = A,T,C or G
agnngnngcgcgtaatacgactcactatagggcgaattggagctccccgcggtggcggccgcccgggcaggtactgagatcctcttcccaaaccaatcaaaggcccatttattgagaggtaaccagataaaataaaatggttgtaaaccaaacactccctggtggttcctcgtaggaagccatgcttccccagcttcaagcctttctatgaattctatccaaaacagggttggatcanattcttactgagatcctacttgacttaatccttggcttggggttactagggaattaagacatattcaaaggaaaagaaaaggaaaaaataagcagctggagtttgtgtgcttgggtatgcttctatgtatgtatacacaatagtttaagcctggctaagacttttatgattcatgtcatttcttgtatacagacttcatctcagttcttaatggtttttcagtaacaaggtatttgcttancanggaaaataantgtttntccctgtgaatgccanactggtgttggtctctctgcaaagcacatttgctcatcaagaactcangccctctaaatagggacagancaacaagtattggcatgcanacaaaaacctgccagagtgccactgactcttcaatttctttaccaggtcctcgggccgtttaaaactagtggatcccccggctgcaggaattcaaattnanctnataaanccgtcaaccccanggggggcccgnacccactttggtccctttatgagggttaatgncccctggcgtaacattggtgntannnnnnnnntcccgnnnnnnnnnnnnnnnnnnnnnnnnnnnnnnnnnc

SEQ ID NO: 3328 - DNA, 856 bp, Homo sapiens
  misc_feature 2, 3, 5, 6, 16, 17, 24, 28, 81, 130, 140, 272, 331, 432,517, 535, 539, 540, 548, 553, 556, 557, 558, 559, 561, 565,568, 583, 586, 587, 588, 591, 592, 593, 601, 609, 613, 617,618, 620, 625, 635, 643, 648, 649, 651, 659, 660, 661: n = A,T,C or G
  misc_feature 663, 666, 670, 688, 709, 715, 716, 720, 721, 722, 724, 725,726, 727, 742, 747, 748, 749, 750, 752, 753, 754, 755, 757,758, 759, 760, 761, 768, 769, 770, 803, 804, 815, 816, 817,818, 820, 821, 824, 825, 831, 832, 833, 854: n = A,T,C or G
gnngnngcgcgttatnngacttantatngggctgattggagctccccgcggtggcggcccgaggtaccctgatcatatcangggccccattttaaaaggagacattctgatgaatcaaaggaaagatatnctaggagcanaaaaatgttttgaaaggattttggagatggatccaagcaatgtgcaaggaaaacacaatctttgtgttgtttattttgaagaaaaagacttattaaaagctgaaagatgccttcttgaaacactggcattancaccacatgaagaatatattcagcgccatttgaatatagtcagggataagatttcctcntctagttttatagagccaatattcccaaccagtaagatttcaagtatggaaggaaagaaaattccaactgaaagtgtaaaagaaattagaggtgaatccanacaaacacaaatagtaaaaacaagtgataataaaagtcagtctaaatccaacaaacaattaggaaaaaatggagacgaagagacnccccacaaaacaaccaangaannatactatnataanaannnngntccntgnccgggggggcccccnggnnnttnnncccccttntttataanattnaaannanttttngaactgggcngtgggganaaaanntngggttttnnncnggntttncccccccaaaaaaattanaaatttttttgggaaaaaaantctttnngaannngnnnntttttttgggggaanccccnnnnannnncnnnnnccccttnnncttttttaaaaaaaaattttttggttttttggnnacccccccccnnnnannctnnaaaaannncgggcttttggccaaaattantt

SEQ ID NO: 3329 - DNA, 846 bp, Homo sapiens
  misc_feature 2, 207, 223, 257, 263, 277, 297, 304, 306, 309, 323, 345,362, 379, 480, 492, 513, 539, 584, 610, 623, 649, 652, 653,655, 656, 657, 658, 659, 660, 661, 662, 663, 665, 666, 667,668, 669, 670, 671, 672, 673, 674, 675, 676, 677, 678: n = A,T,C or G
  misc_feature 679, 680, 681, 682, 683, 684, 685, 686, 687, 688, 689, 690,691, 692, 693, 694, 695, 696, 697, 698, 699, 700, 701, 702,703, 704, 705, 706, 707, 708, 709, 710, 711, 712, 713, 714,715, 716, 717, 718, 719, 720, 721, 722, 723, 724, 725: n = A,T,C or G
  misc_feature 726, 727, 728, 729, 730, 731, 732, 733, 734, 735, 736, 737,738, 739, 740, 741, 742, 743, 744, 745, 746, 747, 748, 749,750, 751, 752, 753, 754, 755, 756, 757, 758, 759, 760, 761,762, 763, 764, 765, 766, 767, 768, 769, 770, 771, 772: n = A,T,C or G
  misc_feature 773, 774, 775, 776, 777, 778, 779, 780, 781, 782, 783, 784,785, 786, 787, 788, 789, 790, 791, 792, 793, 794, 795, 796,797, 798, 799, 800, 801, 802, 803, 804, 805, 806, 807, 808,809, 810, 811, 812, 813, 814, 815, 816, 817, 818, 819: n = A,T,C or G
  misc_feature 820, 821, 822, 823, 824, 825, 826, 827, 828, 829, 830, 831,832, 833, 834, 835, 836, 837, 838, 839, 840, 841, 842, 843,844, 845, 846: n = A,T,C or G
gncgcgttatcgactactatagggcgaattggagctccaccgcggtggcggccgcccgggcaggtactttgaaacattcctggcaggcaatgtgtccaagagggagaatctgagacccactttcctgaggtcatccaatcccctcccatcttatcaggggtatggtatggcagctgtggcagagggatggaggagaggagacaccanagggaaaaaaaaaacncaaatcctgttcacccaggaggtcaacattgganggaatncagaggaaaaagcnccaggagggtgtaccaggcntaccccnanatnaaaaggggtttggncaaatttggatgtgcaaacaantcaaccccaccatgacntgaaggaggccaccgtntgaacacagggcctggaacaatgggtgtaatgagttactgccacgtcaaaaaaattggttgctcctgttgatatggtttgactgtgtcccccccaaatctnatcttgaattgncctcggccgctctaaaactantggatcccccgggctgcaggaattcnatatcaagcttatcgataccgtcaaccttaagggggggcccggtncccaacttttgttccctttaattganggttaattgcgcncttggcgtaatcatggtcatagctgnttnngnnnnnnnnnannnnnnnnnnnnnnnnnnnnnnnnnnnnnnnnnnnnnnnnnnnnnnnnnnnnnnnnnnnnnnnnnnnnnnnnnnnnnnnnnnnnnnnnnnnnnnnnnnnnnnnnnnnnnnnnnnnnnnnnnnnnnnnnnnnnnnnnnnnnnnnnnnnnnnnnnnnnnnnnnnnnnnnnnnnnnnnnnnnnnn

SEQ ID NO: 3330 - DNA, 836 bp, Homo sapiens
  misc_feature 3, 23, 27, 28, 622, 624, 625, 628, 629, 630, 631, 633, 634,635, 636, 637, 638, 639, 640, 641, 642, 643, 644, 645, 646,647, 648, 649, 650, 651, 652, 653, 654, 655, 656, 657, 658,659, 660, 661, 662, 663, 664, 665, 666, 667, 668, 669: n = A,T,C or G
  misc_feature 670, 671, 672, 673, 674, 675, 676, 677, 678, 679, 680, 681,682, 683, 684, 685, 686, 687, 688, 689, 690, 691, 692, 693,694, 695, 696, 697, 698, 699, 700, 701, 702, 703, 704, 705,706, 707, 708, 709, 710, 711, 712, 713, 714, 715, 716: n = A,T,C or G
  misc_feature 717, 718, 719, 720, 721, 722, 723, 724, 725, 726, 727, 728,729, 730, 731, 732, 733, 734, 735, 736, 737, 738, 739, 740,741, 742, 743, 744, 745, 746, 747, 748, 749, 750, 751, 752,753, 754, 755, 756, 757, 758, 759, 760, 761, 762, 763: n = A,T,C or G
  misc_feature 764, 765, 766, 767, 768, 769, 770, 771, 772, 773, 774, 775,776, 777, 778, 779, 780, 781, 782, 783, 784, 785, 786, 787,788, 789, 790, 791, 792, 793, 794, 795, 796, 797, 798, 799,800, 801, 802, 803, 804, 805, 806, 807, 808, 809, 810: n = A,T,C or G
  misc_feature 811, 812, 813, 814, 815, 816, 817, 818, 819, 820, 821, 822,823, 824, 825, 826, 827, 828, 829, 830, 831, 832, 833, 834,835: n = A,T,C or G
agncgcgttatcgactactatanggcnnattggagctcccccgcggtgggcggccgcccgggcaggtacacttgtgaatgttatggagctgttgataatgacggagaagtggccccactacaattacatcagggccatggcttttggaatatcggaagtcacagaactgacaattatagctcgtccatattatcctcggctcccttgctggagaagtccttctttttagccccactcgagctcttgtctgtcttggtcattgtctctccttctgaacttttggctagatcattctgattaatgacagagcccctggaaagcttatcatttaactctggattaaggccgcctgactgcactgctccgtgctgcttgccataatgttctagcagtttaagtgagctagatgactcacagctgaaactacaaaatttacaccagtagtaactggtggcctctgtacctcggccgctctagaactagtggatcccccgggctgcaggaattcgatatcaagcttatcgataccgtcgacctcgagggggggcccggtacccagcttttgttccctttagtgagggttaattgcgccgcttggcgtaatcatggtcatagctgtttncnnggnnnnannnnnnnnnnnnnnnnnnnnnnnnnnnnnnnnnnnnnnnnnnnnnnnnnnnnnnnnnnnnnnnnnnnnnnnnnnnnnnnnnnnnnnnnnnnnnnnnnnnnnnnnnnnnnnnnnnnnnnnnnnnnnnnnnnnnnnnnnnnnnnnnnnnnnnnnnnnnnnnnnnnnnnnnnnnnnnnnnnnnnnnnnnnnnnnnnnnnnnnnnnnc

SEQ ID NO: 3331 - DNA, 845 bp, Homo sapiens
  misc_feature 3, 4, 8, 387, 388, 390, 403, 413, 416, 422, 431, 437, 439,443, 448, 453, 454, 456, 457, 458, 470, 472, 475, 477, 479,480, 483, 484, 490, 491, 493, 501, 504, 507, 525, 537, 543,556, 558, 571, 572, 587, 592, 603, 632, 634, 664, 667: n = A,T,C or G
  misc_feature 671, 674, 680, 683, 730, 736, 752, 753, 770, 772, 780, 781,784, 787, 788, 830, 832, 835: n = A,T,C or G
agnngggngcgcgtaatacgactactatagggcgaattggagctccccgcggtggcggccgaggtacaaaatactttcatcaagaaccaaacgttttatttcctatttagctgaagaattaatacttttacagaagcaatgagtgagcacaaaaagcttattttcccattctccatgttctctcctgaaacaatgatccaagtgtatttagaacaaagaatcctaccttcaaatgagtgtagaccctctacaggggtatctaccacgttccttcatgtccccaaaatagctcatagaccttgctagaagagagtgatgtgattttccttacctaccaccaaaatgaaagagagagagacagagagagaaaaaaaaaaaaaccctccnnancaaaaaacccccntaaatccccnttnggtggngggcccccncccccncntaantaaancgggnncnnnggggcccccaancngancngnngtnnaaaccnnanttcagttnttnggngggcaaattcaaaagggnagtttttttttnaaaatntcatttcaataananaaaaaacggttcnntacggtcccaaacanaaccntgggggaaagnggttttccaaaaggcttcctccccaaaantnctgccaaacctggggcgggaaaaagggaanctngganagngaaaanccngaaatactttttgacctaatttttttttttttaaaaaaagggggggngggggnccccccccggtattcnngggctgggggggggggntntaaggggnnggnaannaaaaacttttggggcaaccaggggaaaccccttttttttaantnccnaaaaaattgc

SEQ ID NO: 3332 - DNA, 908 bp, Homo sapiens
  misc_feature 3, 14, 37, 465, 486, 518, 569, 580, 604, 612, 631, 677, 681,693, 712, 729, 751, 758, 760, 768, 775, 782, 787, 792, 794,801, 803, 813, 822, 829, 830, 831, 835, 839, 840, 841, 844,845, 850, 851, 858, 859, 860, 863, 867, 904: n = A,T,C or G
ttntcgcgtatttnactcactatagggcgaattgganctccccgcggtggcggccgaggtaccaaaagaattctgtgttttaaaacaccatccaaaagcacagcccagtggtgggccacctccccaccctgaagttctgcgttacatataacctttcaggcacaaacaagaagggtgtgggatagggtggaggaggctagagatttgtctgcaagggctttaccatccactaaaagctgtgtgcaggacagaagcatctttctctcctcactttttgcacgtgttgagtatcattttgctgtgtgcccagtggatgtagcgaggatgcagaatctccaagcagcttagagtcaagaaggctgcttgtcttcctttctgattcttcatgtagttcttcctgtgtttcttagcattctcaagtcatctttggattttactctgctgtttattcccatatatgcagantcagattaccagaagtcttgnaagactcttttcagaatatgaaaagacctttnggtagcaaaagaagtgaattctctaagggccgaggttgatgttttggagantagtcaccttntaaaaatgaggatgggccttttgnggaccacnatgaaaggggtcctttaancttaccaaaatccagaactttaatagggtggaaaggcttaccattntctngaaaggtagacntttcctttaataccaattnattttttttcagaactnttattacttttaaattgaaatngggaaangncttaaccntaaattntccagtnttttntgganantcatgtngnccacctaagnttctttttnccttatnnnaatntatnnnccnntttcnnttcttannntcnaaangggttccttcctcgggcggcctttttataattaatgngact

SEQ ID NO: 3333 - DNA, 872 bp, Homo sapiens
  misc_feature 1, 5, 13, 386, 387, 388, 389, 390, 391, 392, 393, 394, 395,396, 397, 398, 399, 400, 401, 402, 403, 404, 405, 406, 407,408, 409, 410, 411, 412, 413, 414, 415, 416, 417, 418, 419,420, 421, 422, 423, 424, 425, 426, 427, 428, 429, 430: n = A,T,C or G
  misc_feature 431, 432, 435, 436, 438, 441, 442, 445, 448, 449, 450, 451,452, 453, 454, 455, 456, 457, 458, 459, 460, 461, 462, 463,464, 467, 468, 469, 471, 472, 473, 474, 475, 476, 477, 479,480, 481, 482, 483, 484, 485, 486, 487, 488, 489, 493: n = A,T,C or G
  misc_feature 494, 495, 496, 497, 498, 499, 500, 501, 502, 503, 504, 505,506, 507, 508, 509, 510, 511, 512, 513, 514, 515, 516, 517,518, 519, 520, 521, 522, 523, 524, 525, 526, 527, 528, 529,530, 531, 532, 533, 534, 535, 536, 537, 538, 539, 540: n = A,T,C or G
  misc_feature 541, 542, 543, 544, 545, 546, 547, 548, 549, 550, 551, 552,553, 554, 555, 556, 557, 558, 559, 560, 561, 562, 563, 564,565, 566, 567, 568, 569, 570, 571, 572, 573, 574, 575, 576,577, 578, 579, 580, 581, 582, 583, 584, 585, 586, 587: n = A,T,C or G
  misc_feature 588, 589, 590, 591, 592, 593, 594, 595, 596, 597, 598, 599,600, 601, 602, 603, 604, 605, 606, 607, 608, 609, 610, 611,612, 613, 614, 615, 616, 617, 618, 619, 620, 621, 622, 623,624, 625, 626, 627, 628, 629, 630, 631, 632, 633, 634: n = A,T,C or G
  misc_feature 635, 636, 637, 638, 639, 640, 641, 642, 643, 644, 645, 646,647, 648, 649, 650, 651, 652, 653, 654, 655, 656, 657, 658,659, 660, 661, 662, 663, 664, 665, 666, 667, 668, 669, 670,671-781, 789-863, 866-871: n = A,T,C or G
ngagnccgttatncgactactatagggcgaattggagctccaccgcggtggcggccgaggtactgggggtcaagacttcagcattcttttgcgggggaccacaatcagtgacaccctgactcgcaagcctcaatcacctgttccagtgagaaacaggactgagatcagaaggaatgaggcagagctgccctcgattggttctcctctcctcctcacctgcccgggcggccgctctagaactagtggatcccccgggctgcaggaattcgatatcaagcttatcgataccgtcgacctcgagggggggcccggtacccagcttttgttccctttagtgagggttaattgcgcgcttggcgtaatcatggtcatagctgtttcctgannnnnnnnnnnnnnnnnnnnnnnnnnnnnnnnnnnnnnnnnnnnnnnatnncnggnnaanaannnnnnnnnnnnnnnnnttnnncnnnnnnngnnnnnnnnnnngggnnnnnnnnnnnnnnnnnnnnnnnnnnnnnnnnnnnnnnnnnnnnnnnnnnnnnnnnnnnnnnnnnnnnnnnnnnnnnnnnnnnnnnnnnnnnnnnnnnnnnnnnnnnnnnnnnnnnnnnnnnnnnnnnnnnnnnnnnnnnnnnnnnnnnnnnnnnnnnnnnnnnnnnnnnnnnnnnnnnnnnnnnnnnnnnnnnnnnnnnnnnnnnnnnnnnnnnnnnnnnnnnnnnnnnnnnnnnnnnnnnnnnnnnnnnnnnnnnnnnnnnnnnnnnnnnnnnnnnnnnnnnnnnnngggggggnnnnnnnnnnnnnnnnnnnnnnnnnnnnnnnnnnnnnnnnnnnnnnnnnnnnnnnnnnnnnnnnnnnnnnnnnnncgnnnnnng

SEQ ID NO: 3334 - DNA, 856 bp, Homo sapiens
  misc_feature 1, 3, 9, 20, 30, 509, 510, 511, 512, 513, 514, 515, 516,517, 518, 519, 520, 521, 522, 523, 524, 525, 526, 527, 528,529, 530, 531, 532, 533, 534, 535, 536, 537, 538, 539, 540,541, 542, 543, 544, 545, 546, 547, 548, 549, 550, 551: n = A,T,C or G
  misc_feature 552, 553, 554, 555, 556, 557, 558, 559, 560, 561, 562, 563,564, 565, 566, 567, 568, 569, 570, 571, 572, 573, 574, 575,576, 577, 578, 579, 580, 581, 582, 583, 584, 585, 586, 587,588, 589, 590, 591, 592, 593, 594, 595, 596, 597, 598: n = A,T,C or G
  misc_feature 599, 600, 601, 602, 603, 604, 605, 606, 607, 608, 609, 610,611, 612, 613, 614, 615, 616, 617, 618, 619, 620, 621, 622,623, 624, 625, 626, 627, 628, 629, 630, 631, 632, 633, 634,635, 636, 637, 638, 639, 640, 641, 642, 643, 644, 645: n = A,T,C or G
  misc_feature 646, 647, 648, 649, 650, 651, 652, 653, 654, 655, 656, 657,658, 659, 660, 661, 662, 663, 664, 665, 666, 667, 668, 669,670, 671, 672, 673, 674, 675, 676, 677, 678, 679, 680, 681,682, 683, 684, 685, 686, 687, 688, 689, 690, 691, 692: n = A,T,C or G
  misc_feature 693, 694, 695, 696, 697, 698, 699, 700, 701, 702, 703, 704,705, 706, 707, 708, 709, 710, 711, 712, 713, 714, 715, 716,717, 718, 719, 720, 721, 722, 723, 724, 725, 726, 727, 728,729, 730, 731, 732, 733, 734, 735, 736, 737, 738, 739: n = A,T,C or G
  misc_feature 740, 741, 742, 743, 744, 745, 746, 747, 748, 749, 750, 751,752, 753, 754, 755, 756, 757, 758, 759, 760, 761, 762, 763,764, 765, 766, 767, 768, 769, 770, 771, 772, 773, 774, 775,776, 777, 778, 779, 780, 781, 782, 783, 784, 787-792, 794-856: n = A,T,C or G
ncnacgcgnactcgacttantatagggcgnattggagctccaccgcggtggcggcccgaggtacattttacttgcttgatctctgattcccctcactgggtcacccgcacctctgagtgccctcctcaccctgcatgagccttgacaccaggccctgagcctttcctctgtgtggttgtcctcacagtcctctgtgtgggatccagaactaggcaccaagctccccacgtaggagggtgccctccccattccctctgctgaggctcgaaccagcatgtcaggctgctcccccatgtggacacctgactctctttgggctcttactctacactggctgtacctgcccgggcggccgctctagaactagtggatcccccgggctgcaggaattcgatatcaagcttatcgataccgtcgacctcgagggggggcccggtacccagcttttgttccctttagtgagggttaattgcgcgcttggcgtaatcatggtcatagctgttccctgnnnnnnnnnnnnnnnnnnnnnnnnnnnnnnnnnnnnnnnnnnnnnnnnnnnnnnnnnnnnnnnnnnnnnnnnnnnnnnnnnnnnnnnnnnnnnnnnnnnnnnnnnnnnnnnnnnnnnnnnnnnnnnnnnnnnnnnnnnnnnnnnnnnnnnnnnnnnnnnnnnnnnnnnnnnnnnnnnnnnnnnnnnnnnnnnnnnnnnnnnnnnnnnnnnnnnnnnnnnnnnnnnnnnnnnnnnnnnnnnnnnnnnnnnnnnnnnnnnnnnnnnnnnnnnnnnnnnagnnnnnnannnnnnnnnnnnnnnnnnnnnnnnnnnnnnnnnnnnnnnnnnnnnnnnnnnnnnnnnnnnnnn

SEQ ID NO: 3335 - DNA, 858 bp, Homo sapiens
  misc_feature 442, 486, 524, 558, 650, 700, 770, 772, 774, 779, 795, 798,811, 841, 842, 845, 846, 847, 848, 849, 850, 851, 852, 853,854, 855: n = A,T,C or G
agcgcgtatacgactcactatagggcgaattggagctccccgcggtggcggccgaggtacctcacaatttaaaaaaacggggaaaaatagacatctgacaaaaataaaaataaaagaccaagaacacatgagctggaatgattaatatgttaaaccatgtgccaaactcaatggtgaatgtgaatgtgtattttaatcccctgagctagccagaataagaaaacttttctaaacacatggacaacttctattttaaaagattcaggggaagtctaaaaaagatatgaaagtttaaaagatataatttttttttaaaaaaatcaatagaatcatcatagttgatcagagtaggcatctgacccttagagaaaaaaaacaaaacaaaaatgtcaactctagagttggagtaagccctgacagtccccttcctgtatttaggtanataaaccactatccccacgccatgaatgaagcagaagcgctcanagtggactgcaccatccaagactgggagacactgggtngaacagcgagaaatcatgacgacttctttcccangtgggggaaagccagaaaaacgcaagcttcccatgccctggctgctccacgcattccaagaaccctgcggatggctgtttcacacgtgctgntaattcaccatgccaactgctgtgccctggtgttccctgacacaaagtancttgccggccggccgtctaaaactatggatcccccggctgcaggaaattcatatcaacttattgatccgncnanctcangggggggccggtcccnacntttgttcctttangagggtaattggcccctggggtacatgggnnaannnnnnnnnnnccg

SEQ ID NO: 3336 - DNA, 857 bp, Homo sapiens
  misc_feature 2, 3, 557, 564, 579, 589, 630, 633, 638, 665, 680, 681, 689,695, 706, 708, 711, 716, 723, 740, 742, 754, 757, 758, 762,767, 769, 771, 776, 778, 782, 785, 787, 800, 802, 804, 808,810, 813, 826, 828, 833, 836, 837, 838, 842, 843: n = A,T,C or G
  misc_feature 848, 849, 850, 851, 852, 855, 856, 857: n = A,T,C or G
gnngacgccgtaatacgactcactatagggcgaattggagctccccgcggtggcggcccgcccgggcaggtacataaatcaggggtcttgagaccatctttcttcccctggactgaaggaactcaaagctattttctcctgggattcacaggaacaagctctgaacagttgggtgccattgtggtctgtagacttttacagaaaaagctctaccagactgttgccttgaaactgttaatctgtttgtcattagtcattccacctggctggtggttttaaaacactaaatagtcgttggaaagttaggtagatttcattaaagcaagacttgaaaaatagttgcttcaggatccccaggaggcttttgcacttggggttggggtgaggaatggatattcataagttcagtgttgatattctgctgcttttggggaggggtagggagagagagggagcattaagctctccagactcctggtgtttgggcaggtctaggtctggtttgggcagttggttgtaatctgagtgcctggacttgcccggtaagttttgctganagagaanccaaatgttccttanactggaagangaaaagctgcgtttcagggtcaatttcataggtgcatttgntgnttctnatcgctatgggttaaaaaaactacatnggggtgctttgcacnntggtcctnggaaangctattctttntnttnttcancacaccngaatttccattcttttntnttcctggcttantannttanaaatngnantttangntttnttnanaggaagggaagcntncntttntnaangagggaaaagggntnaggancannntttnntaatnnnnnctnnn

SEQ ID NO: 3337 - DNA, 856 bp, Homo sapiens
  misc_feature 653, 676, 728, 731, 746, 751, 755, 757, 818, 823, 825, 843,847, 849, 852: n = A,T,C or G
gccgcgtaatcgactcactatagggcgaattggagctccaccgcggtggcggccgaggtacgcgggactaattttttttttcttctacttagaataaaattcatgtagtgcagtatccagagcacattaactgaagtatttggagactagatttaatctcagatctcacccttggtaaaatcattaagcttctgagcatcagagtctcaaacttttcatgagaggggtaagtgtagttttcaaaggacagaaggaggaagactacagtttcttgagcttctccgatgtcgtaggtacctgcccgggcggccgctctagaactagtggatcccccgggctgcaggaattcgatatcaagcttatcgataccgtcgacctcgagggggggcccggtacccagcttttgttccctttagtgagggttaattgcgcgcttggcgtaatcatggtcatagctgtttcctgtgtgaaattgttatccgctcacaattccacacaacatacgagccgggagcataaagtgtaaagcctggggtgcctaatgagtgagctaactcacattaattgcgtttgcgctcactgcccgctttccagtcgggaaacctgtcgtgccagctgcattaatgaatcggccaacgccccggggagaggcngtttgcgtattgggcgcctcttncgcttcctcgctcactgactcgctgcgctcggccgttcggctgcggcgagcngtnttaacttacttaaangcggnaatncnggtattcacaaaatcaggggataccgcaggaaagaacatgtgagcaaaagggccacaaaanggccngnacccgtaaaaaggccccntttntngcntttt

SEQ ID NO: 3338 - DNA, 839 bp, Homo sapiens
  misc_feature 614, 620, 659, 709, 714, 731, 762, 775, 777, 780, 787, 811,835: n = A,T,C or G
agcggcgcgcgtaatacgactactatagggcgaattggagctccaccgcggtggcggcccgcccgggcaggtactttttttttttttttttttgtagagacggggtttcaccatcttggccagactggtcttgaactcttgacctcgtgatccaccctcctcggcctcccaaagtgctgggattacaggcgtgagccacataacagcagttctcaccaagcatctgacagccgaaaaactgaaagcattagagaatgctacaggacaggctttggcttagtagtgagttctgagttcaagctgaggctctgcacttattagctagaactttgcttaatctctcacaggtctcctctaaatgattaaatggcgtaacggaggtaagcggattagcacaattcccggcaaacagtaagcactcaattgttactactgaattgccagttcacaggcacaaccaaccgatctctctcatctcctggttcctctgttgccaacttcctcgttgaggtccaacaggatacctgtggggtaatgtgtcccaaatgatatcccaagtcctgacaccaagacaaaggcaccaaccaaaaatggcgacctcaaagccatccganggcgtnaattacccgcatgctaccgatagataaataaacacgtcnggaaaaaaagctagtgaaagaatcttaacgcccggttggaatacccaaancttgnttatgccggcccttaancacaagcagttaaaagcccaagcttgaaggngtaccttggccgntntanaactagngggatccccggctggaggaattcnatattaagcttattgataccgccnacct

SEQ ID NO: 3339 - DNA, 873 bp, Homo sapiens
  misc_feature 9, 636, 685, 704, 706, 710, 711, 712, 714, 715, 716, 717,718, 719, 733, 739, 751, 756, 762, 794, 799, 816, 841, 854,856: n = A,T,C or G
gcgcgtaancgactactatagggcgaattggagctccccgcggtggcggccgcccgggcaggtaccaggctagccttcctgatgactgcagcagcaaggctgcccatgggccaccccagacagcctgcttagaatctctagaagagctgcttgatgtaagacattaagacattcttaaacgaagccagtcttcaaggactagaataaatccttaattcttccaatacatagacattaacgtaaagcaacaagaaacaaggaaagtcaaatagacatagcactccccaaagcatataataatctctaagttgatccaaagatacaaactgcctgacaaataattcaaaataactcattaaaaaatgctcactaaacttccataggatacagggaaacaattcaatggaatcaggaaaacaataaattaccaaaaagagatatttaccaaattaccaaaattaccaaattacaaaattaccaaaagagatatttaacagacagattgaaattttaaaacaaacaaacaacaacaacaacaacaaaaatcaaacagaatttctggggcagaaaattagagtggaacgaaataaaaaaccaccagaagaaaatatcagtaacagaatttgatcaagtagnaaaaaaggatttattcatgaatttggaagacagttatttgaaaaatttnccgtccggaaggaaaaaantntaannncnnnnnnggtccctcggccgntcttanaactagtggatnccccnggctgnaggaattcgttatcaagcttatcgataccgcngcctngagggggggggccggtncccagcttttgttccctttaggggnggggtaattggcncncttggggtaatcatggg

SEQ ID NO: 3340 - DNA, 854 bp, Homo sapiens
  misc_feature 590, 683, 718, 735, 760, 763, 771, 780, 794, 819, 823, 853: n = A,T,C or G
gacgcgcgtaatacgactcactataggggcgaattggagctcccccgcggtggcggcccgcccgggcaggtactaaaaatatagcaatgtgggtgggctccaaggactgttccttcagacctcaaatccacatgcttatagaagaccacataggtcagagcaaactctctacacctgtctttgtcaactgtcacccagttgaagatctctgaagctgcatgccgatttaggccaacaatcagactatgtagcatttacatttacatttgtctgtgtgtgataacatgaagccagaaggaaggaaaatttgtggctgctggtttccctgacaagcagtttgaaggtcaaaagaaaccaaccctggaggaactcgagttatgacagagcaatgttaagtgtagacctaggagggaagcctatagggctaggataggggtgctaacagataaagtggcaaagcaagagaagaagggaaagacagcagatgaagaaaggtgccctatccatagcaggatgcaatgcaaagacaaatctaaggtttctgtttcttcaccactcctggcctaaggtctggctttgctatttcctancagtgtgactttgtaccttcggccgctctagaactagtggatccccccggctgcaaggaattcgatatcaacctatcgataccgtccaccttnaaggggggccccggtcccaacttttgttcctttantgagggttaattgcgcncttggcgtaatcatggcatagcttnttnctgtgtgnaaattgttntcccttacaattcncacaacatccaaccggggcataaantgtnaagcctggggtgcctaatgagtgactaacnt

SEQ ID NO: 3341 - DNA, 898 bp, Homo sapiens
  misc_feature 85, 344, 352, 394, 436, 460, 484, 511, 549, 565, 570, 586,615, 617, 623, 627, 632, 636, 645, 668, 690, 705, 721, 749,771, 777, 784, 785, 788, 795, 796, 814, 816, 822, 835, 839,841, 844, 854, 876, 881, 883, 889, 890, 897: n = A,T,C or G
gtatacgactactatagggcgaattggagctccccgcggtggcggccgaggtacgcgggggagacacattcagaggtgagcccanagcgggtaaagtggactggggagaacttcggaggatgttcatgtccaggagcagccccacgccctgtatggtcggtgtctagagcctcacagcaactaagaccaacccagctctcagaagaaggaatgtcaaaatgtcatgttcaattttacattcagtgcctggaatcttttcttcacaattgaaatgaaatgtgctgaaggaggtgaatccatgcattaatcttcagctcacaaaggaaatactacataagaagcangaccacanactcaagacggacataattggattttttttgccctggcctgnaaagaaaggtaccttgcccgggcggccgctctagaactagtngatccccccggctgcaggaatttngatatcaagcttatcgattccgtngacctcgagggggggcccggtacccanctttttgttcctttaatgagggttaaattgcccccttngccgtaaatcatgggncatancttgttttcctgtgtnaaaattggtaatccgcttcacaattccancncaacantccnagccngganacataaaanttgtaaaagccctgggggtggcnttaatgaggtgagcctaacctnaccatttaattgcgnttgcgcctcacctggnccgcttttcaattggggaaaaccttgtngtggccaccttgcaattaatgnaattcnggccaannccnccggggnnaaaggggggtttgggtantngggccntttttccgctttnttcncnttnctgaaattcntgtgcttcggtcatttcggtancaggnanccggtnnaacctcnt

SEQ ID NO: 3342 - DNA, 844 bp, Homo sapiens
  misc_feature 584, 610, 643, 681, 737, 741, 752, 761, 773, 789, 828, 837: n = A,T,C or G
agggcgtaatacgactactatagggcgaattggagctccacccgcggtggcggcccgcccgggcaggtactgttgatgagcactccctacccacactcctttgctgctctccctctctcctccactctcctggcactgacatgggctagtctgctctctctcattggcacagcaaaatctatttgattcgtgccaccacctcttttacctcattctttcagtggcaggcagatacctcggccgctctagaactagtggatcccccgggctgcaggaattcgatatcaagcttatcgataccgtcgacctcgagggggggcccggtacccagcttttgttccctttagtgagggttaattgcgcgcttggcgtaatcatggtcatagctgtttcctgtgtgaaattgttatccgctcacaattccacacaacatacgagccgggagcataaagtgtaaagcctggggtgcctaatgagtgagctaactcacattaattgcgttgcgctcactgcccgctttccagtcgggaaacctgtcgtgccagctgcattaatgaatcggccaacgcgcggggagaggcggnttgcgtattgggcgctcttccgcttncttgctcactgactcgctgggctcggtcgttcngctgcgggcgaagcggtatcaacttacttcaaagcggnaataccggtattcacagaataaggggataacgcaggaaagaacatgtgagcaaaanggcnacaaaagggcngggaacccnaaaaaaggccgngttggtggcggttttncataagcttccgccccctgacaagcattacaaaaaattnacgcttaanttaaagg

SEQ ID NO: 3343 - DNA, 880 bp, Homo sapiens
  misc_feature 4, 21, 613, 638, 642, 643, 676, 699, 715, 727, 773, 788,799, 827, 838, 851, 856, 859, 878: n = A,T,C or G
tagncgcgcgcgcgtaatacnactcactatagggcgaattggagctccccgcggtggcggccgcccgggcaggtacaggcaactgagaatcagaatccacccatggtaacagcaaaagcagcaacatctaaacgtcgctgctaacgtttacctctgatgaagttgtcaaagtcatcctgccagaaaccccaaaagtttgaattactaatgtggcgtaactcacacatgaagcaaaatgggagaaaatatcagttatttgagcatggaaactgctgtatttgtatatactcagctcaaccaatgctttctgataatcagaggaggtgagaagtaacttagagaagcacaagttcaagccaacacactgaacctttatcacacctgccagaaagcattaggtagatacatgtaagggtgactgtggagctcatggacaggaactcctcaatctgcggaaacccatcaagacgagagaaagaccacagacgtatttgagggttgggaaaatccaagaggaaagccaccggacagaagaaaagaagaaatggaaataaaagtttctggatttcctggtgctgttcaagttcattaaaatggactgggtctcatcggncttttattttttaaaaggggtcttnttanntctggtattaccttttaagtggttgagtcttanaataaaagcttgggcaccctctnggcttcacattaattnccgccagaaccnccaaggttaggggccaacccctttggtcaacagttttccaaatgtntactttcaaaaactnttgaggaaaangggaaaagccccgtgaacacttattgangggccggggcnatttttattcttnccttnccntcccccaaagggaaaccangg

SEQ ID NO: 3344 - DNA, 850 bp, Homo sapiens
  misc_feature 3, 4, 6, 8, 647, 649, 672, 701, 770, 788, 796, 797, 798,799, 800, 801, 802, 803, 804, 805, 806, 807, 808, 809, 810,811, 812, 813, 816, 823, 838, 842: n = A,T,C or G
agnntngnatcgactcactatagggcgaattggagctccccgcggtggcggccgcccgggcaggtacgcgggatatattcaaggtataccgatgtgatgctaggtggggatgtagggtttgggagagaggagacagcattgcttagatcagtcacgttcagagacctctttacataatctttacttccatcacaggtgcagataggtggcttcagttcatatctcttcaggaatacacacacaaactggtggagaagagcaaaggcatgctgagctggagcccagagcaaggccagactcactgtccagctcttttctcctttactcagagaggtctaagagaggtgtggctctttcatgattgggcagaatgataaatgttcagatgccatggactttcagtatggttcacaaagagtggaaaccacaaatgataatctgtgaattccaagctactgtattatatggatatatgaatatagtttatgaatatatattaaacaaaaatagggatcatacaatgatgatgttttacagcttgctctttctcaattaacagtatctttccatgtcagcacatacagacctaactttttttttaagtattccattatatagatattccacaaccttctaaactatgcagntnacctgtgaacaacctggatttgnactgcatggggtccactttacacattggntttttaaaaataaatatatttggaaaatttttttgagaattttccaacaattttgaaaaaattcttcanatgaactttgtaccctgnaaaaaaannnnnnnnnnnnnnnnnnggnccctggnccgtttaaaactaanggtnccccggcc

SEQ ID NO: 3345 - DNA, 880 bp, Homo sapiens
  misc_feature 2, 7, 8, 253, 534, 546, 547, 556, 557, 558, 559, 560, 561,562, 571, 607, 609, 637, 643, 653, 669, 686, 694, 699, 761,769, 772, 789, 791, 796, 797, 799, 804, 806, 815, 821, 826,836, 847, 848, 861, 866, 869, 879, 880: n = A,T,C or G
gnccgtnngacgcgcgttatacgactcactatagggcgaattgggagctcccccgcggtggcggcccgcccgggcaggtacacggggggctgttgccatggatacgctttgtgtagcggctatgggcgctgtcttacaacaaagccaaggaatctcgctgctgagggcagttctgtgctttattatgaagaataatggacgatgatgatgcaaagctcaaagcagaaatagaagctgaattggataaactcancatttcctccttggaaaaagaagacaatgagagtgatgcaaaatcagaaacccagagtgatgatagtgatacagattcagttgaattaccagaatcagttcttcactgtattaacatcataaagaacgggagtaaagctgttgaagagctcattcttcaggacctggaagatctgatattttaaagctataagttatggagcagtttctaataatcatatgcatttaagaacagggactatcaactgaatatgaaagaaagttcagagcaattaattaagnatattatccccnnaaaaacggnnnnnnnggttccttnggccgttttagaactagttggatccccccgggctgnanggaatttccaatttcaagccttatcganacccgnccaacctttnagggggggccccggtncccaaccttttgtcccnttaatggngggtnaatgcgcgcttggggtaatcatgggcaaaggtggtttcctgtgggaaaatgttttccgttancaatttcnaanaacataccaaccggggncntaaanntntaaancntggggggcntaatgngttgncctaactccntttaattgggnnggcctccttgccngtttncangtgggaaacnn

SEQ ID NO: 3346 - DNA, 862 bp, Homo sapiens
  misc_feature 3, 10, 12, 174, 291, 522, 617, 642, 645, 650, 669, 694, 697,706, 710, 726, 737, 739, 774, 776, 782, 793, 795, 796, 799,804, 824, 829, 859: n = A,T,C or G
gcncgtatancnccgtatacgactcactataggggcgaattggagctccccgcggtggcggcccgaggtacaaggtctgaggagaaggttgaggtctccccaagacttctctagaacacttggtgagaggcgccatgaggacaggtgatgcttgggcttatagctctgactcangacatcactgctcaacagcctgaagcccacatccaaagctcatgtcatgctggcaattgaaggggtagcagagcccaaaagtccagaggggctcatcacagggagcagatgtctgtnagcaggagagacagcggctgtagggatcgatgagacttggtaagcatgatgtgctcttgtcagcatagcatctttgagctcacacaataattgatgtataattgtccatttcagtaaggagtttccacatccactatcttccacgattctcacaagggccttgagtaaatattacctgcatgttatgggtgagaaaggggtagtttaaaaagctgaaaggatttggtgaangccacataatgagttaacctgaaatcaaggccagacccccaggcttttaaatgttagtcttgggcttcttggttcatggggaccattatcatccntgtacctgccccgggccggccggtntanaactnagtggatcccccggcttgnaggaatttcaatttaaacctattcnatncccggccancctnaagggggggcccggtncccacttttgntncctttaatggagggtaattgggcccctggcggaantnatggcntaactttttcntnnggnaattnttttccctttaaattttccnacaanttacaacccggaagcataaatggtaaaccntgg

SEQ ID NO: 3347 - DNA, 842 bp, Homo sapiens
  misc_feature 599, 645, 648, 650, 658, 666, 674, 700, 720, 761, 762, 782,784, 795, 823, 827, 829, 840, 841: n = A,T,C or G
gcgctaatacgactactatagggcgaattggagctccccgcggtggcggccgaggtacagatcaataagcaatctgcactacttcgcagagcattgcgtatttatgagcatggtgaggaggttatataggatttgggaaggagggactccaaaccacaaaggtaaatggttgggcctgcactgacattaagcttgctgtggtttttctgctgatgggacccatgaatgtagttttcctcctttggtggttttaatgctgaatgtgtaaaaccctaggcagattgtgtaacatcccccaggcccagctgctggtcctgcccattaaaggggaacttcaaggcccgattccttggctggcagctgcactgtggagggcatcccaggagaagttgttgggaaagggtggtgttgctttgtaagtcggttcaagtttttgtaaagcaagtcaggaagccccagtgaccttttttgagcttatactggagcaattccagttcctttttttcttccaacttacctgtgaaaaggcagggctggaatcctatgttggccaagccatttctccagggctttgaaggtgacagacccctggagccttnctgtgagccccagcttgggcctggcaacctttctgcctttccagtnaangnatgcagtnaacctgantcctgccnggcgggcgttttaaactaatgggatnccccgggctgcaggaattcnatatcaacttatcgttccgtcaacctcaagggggggcccgnnccacttttgttcccttaatnanggttaattgcnccctggcgtaacatggcatactgtttcngggngnaaatgtatccnnt

SEQ ID NO: 3348 - DNA, 888 bp, Homo sapiens
  misc_feature 7, 11, 16, 19, 34, 89, 100, 104, 629, 659, 660, 668, 705,738, 752, 762, 767, 810, 826, 830, 852, 859, 862, 864, 888: n = A,T,C or G
atagtantttntactntcnggcgaattggatttnccccgcggtggcggccgcccgggcaggtacatgttatctgcccttggctgtatgnaaaagctcaanttancaaacaaggagagagataaaaaggagtaaaatattttgtttggataaagctctgtcactgaatgtctttgaacccaaagaagacaccagaaagtctccaaacctctaattcatctgtaaactgggaactcatactaagtcatgctgactgtaggaataaaaagatgaagaggaagggggggctcactagcaatatcaggcactacccagaattagtgccagttgatccctggtcagggtgcataggcttggagaagagtaaatttgcagggcataatggaccatgctctgagatgcaattttcttaaacttaattggctctggatgagtgcattccaatgtgacggaggaggtatttgcttcctgggaaggttttctttcacaacaggcaagaaaaattgctctttaaaatatacctcttcggggttgaaaagacaaaatcctcatggcttaaaattctaaatgggctagccatcatcaaaagtacctcggccggtctagaactagtggatccccccggctgcangaattcgaattcaagcttattcgataccgnngaccctcnaagggggggccccggtcccaactttttgtccctttantgaggggttaaattgcccgcttgggcggtaaancattgggcattagntggtttcctngtgtnaaaattggtaattccctcacaatttccacaacaacataccaancccggggccattaaantgtnaaagcctggggggccctatgangtgagcntantnacattaattggcgttgcgctcacn

SEQ ID NO: 3349 - DNA, 870 bp, Homo sapiens
  misc_feature 3, 8, 38, 45, 70, 72, 102, 104, 358, 372, 409, 458, 507,599, 616, 624, 626, 628, 634, 638, 640, 642, 644, 645, 646,648, 649, 650, 651, 653, 654, 655, 656, 657, 658, 659, 660,661, 662, 663, 664, 665, 666, 667, 668, 669, 670, 671: n = A,T,C or G
  misc_feature 672, 673, 674, 675, 676, 677, 678, 679, 680, 681, 682, 683,684, 685, 686, 687, 688, 689, 690, 691, 692, 693, 694, 695,696, 697, 698, 699, 700, 701, 702, 703, 704, 705, 706, 707,708, 709, 710, 711, 712, 713, 714, 715, 716, 717, 718: n = A,T,C or G
  misc_feature 719, 720, 721, 722, 723, 724, 725, 726, 727, 728, 729, 730,731, 732, 733, 734, 735, 737, 738, 739, 740, 741, 742, 743,744, 745, 746, 747, 748, 749, 750, 751, 752, 753, 754, 755,756, 757, 758, 759, 760, 761, 762, 763, 764, 765, 766: n = A,T,C or G
  misc_feature 767, 768, 769, 770, 771, 772, 773, 774, 775, 776, 777, 778,779, 780, 781, 782, 783, 784, 785, 786, 787, 788, 789, 790,791, 792, 793, 794, 795, 796, 797, 798, 799, 800, 801, 802,803, 804, 805, 806, 807, 808, 809, 810, 811, 812, 813: n = A,T,C or G
  misc_feature 814, 815, 816, 817, 818, 819, 820, 821, 822, 823, 824, 825,826, 827, 828, 829, 830, 831, 832, 833, 834, 835, 836, 837,838, 839, 840, 841, 842, 843, 844, 845, 846, 847, 848, 849,850, 851, 852, 853, 854, 855, 856, 857, 858, 859, 860: n = A,T,C or G
  misc_feature 861, 862, 863, 864, 865, 866, 867, 868, 869, 870: n = A,T,C or G
aangcttntttactatccggcgaattggatttttaccngcggtgnccggccgccgggcaggtacaaatcntnatgcatatttgacacattttttggcttttntnttggggaccagcagaccaccccgcagatacaatgcacggaatctagcaaacaataaagagcagtgtgctcgcgtggcagatcgttcgcttccttcctttttcgccttcatttttgggaagtccttgcctcgttagttccataggccatgagacatagcaatataaaatgccagaggatgttcaaatgggcgtgtggaggaagagggaaagcaggaattctgggccaaagagcagatggccagccagtgacctangaagggaagctcangcttttaaacaatggcaatgtttcttttatgtgcagntttcattaaaggagcacccgagactccaagttggagggattctgaaagngggcatagagtccctgccctcgagaattaatatccaaagaagagacagnggttttaatataatgaatatatgcagaaaacagcccggagacaatagaaacactttggcaccttctgtggcgctgctaaaaatgggtgctgnaacttaaaggcccatangggttaangnanggggtnattngngngnnngnnnngnnnnnnnnnnnnnnnnnnnnnnnnnnnnnnnnnnnnnnnnnnnnnnnnnnnnnnnnnnnnnnnnnnnnnnnnnnnnnnnnnnngnnnnnnnnnnnnnnnnnnnnnnnnnnnnnnnnnnnnnnnnnnnnnnnnnnnnnnnnnnnnnnnnnnnnnnnnnnnnnnnnnnnnnnnnnnnnnnnnnnnnnnnnnnnnnnnnnnnnnnnnnnnnnnnnnnnnnn

SEQ ID NO: 3350 - DNA, 884 bp, Homo sapiens
  misc_feature 4, 11, 252, 360, 379, 382, 424, 462, 467, 472, 474, 478,481, 482, 528, 537, 544, 559, 573, 587, 588, 593, 624, 637,639, 648, 661, 669, 672, 685, 724, 751, 770, 780, 789, 799,818, 856, 858, 867, 870, 879, 882: n = A,T,C or G
attntcgcttntaatacgactcactatagggcgaattggagctccacccgcggtggcggcccgacgtacatgtgacgacgtccaggatagttttgaaatgagaaatgagagcagcatttccttggtgtcgtgaaaatatattatacatttattaaatattgaagaagtgtgggctgggcgtggtggctcacgcctgtaatcccagcactttgggaagctgaggctggtggatcacctgaggtcaggagttcnagaccagcctggccaacatagtgaaaccccatctctactaaaaatacaaaattagccgggtgtggtggtgcatgcctgtaatcccagctactcgggaggctgaggcangagaaccgcttgaacccangangcagaagttgcagtgagccaagatcgcgccattgcactccangcttgggcaaaaagaacaaaactctgtctcaattgaancaaanctcananctanaanngttcctgccccgggccggcccgctctagaactagtgggatcccccngtcttgcangaattcnatatcaaacttatcnataccgtcacctcnaggggggggcccgnncccancttttgttccctttagtgagggttaatcgcncgcttggcgtaancntgggcatanctgtttcctgggngaaatgtnatncggtccaattccncacaacatacggacccgggaacataaaattttaaagccntggggggccctaatgagtagctacttnacatttaattgggtttgcnctaattgccncttttccancccggaaaanctggttgtggccaacttcnttaatgaaattcgcccaacccccggggaaaagcggttncntatttggcnctnttccccttnctncc

SEQ ID NO: 3351 - DNA, 857 bp, Homo sapiens
  misc_feature 3, 6, 380, 388, 419, 427, 454, 465, 494, 528, 554, 570, 586,642, 660, 672, 690, 702, 707, 714, 724, 725, 729, 738, 746,748, 750, 751, 756, 757, 771, 778, 787, 788, 801, 804, 809,810, 823, 832, 834, 836, 837, 840, 844: n = A,T,C or G
agnatnttctactatagggcgaattggagttccccgcggtggcggccgcccgggcaggtacaagctcaggattctccgaatgaagttaaggtcccttgcccatccggagaggcctcagctgtgtcggtatgatcttgtcctgatggaaaacgttgaaacagtcttccaacctattctttgcccagagttgcagttgtaactgttgccaggacacatggccataaataatagaaagaaagctacaaccacaggctgtttgaaagcttcacctcacctttctgcaaggcagaaaaagtatgaaaaaaaccaaggcttttttcagtagcgtcctatggatgtcacattgtacctcggccgctctagaactagtggatcccccnggctgcangaattcgatatcaagcttatcgataccgtcnacctcganggggggcccggtacccagcttttgttncctttaatgangggtaattgccccttggcgtaatcatggncatagctggtttctgggtgaaaatgttattccgntcacaattcacacaacatacgaaccnggagcattaaagtgtnaagcctggggtgcctnatgaagtgagctaacttacatttattgcgttgggcttactggccccttttcaatcnggaaacctgtcgtgccancttgattaatgnatcggccacccccggganaaggcggtttgngtttnggggctnttcccttctnnttantgatccttngctcgggngntnnggttnngggagcgggtttancttaatnaaaaggggnnattccggttttcncanaaatnngggggttaccccngaaaaaacntntnnccnaaangcccccaaaaggg

SEQ ID NO: 3352 - DNA, 864 bp, Homo sapiens
  misc_feature 571, 603, 669, 679, 720, 735, 771, 790, 795, 807, 808, 817,834, 839, 845, 856, 858: n = A,T,C or G
tattgatacgctccttagggcgaattggagctccccgcggtggcggccgaggtacagaacttaaacaccactatttgttgagatgaaaaaaagcatatataggaagccttcagaatgaaatggtcaagggtgagtttacacagatagatagatttaggtctcttccttttgctttgtgaaagcatctagtgttttaggtgtcagagagggagatatccttacaaagcagagattatcattacaggtttacatttcttacaaagagtttcaaaataaacaggtaaatgccaaaaacgtatattttggagacggattaattcactagttggtctattcaacttaacttgtttcctaatgagattaaattcatgcacaaataaccaaaccaaaaattaaaccaaaagaatactcaccagaaaggatgtcctttacaagagcagatcccccaaaatgtaagagttcactgaaaaggtgggagctcaaaccaagagaggacttatctcgcagcataaagacaacttgtacctcggccgctctagaactagtggatcccccgggctgcaggaattcnatatcaagcttatcgataccgtcgacctcganggggggcccggtcccagcttttgttccctttagtggggggttaattgcgcgcttggcgtaatcatnggcatactgnttcctgtgtgaaatggtattccgtcacatttccccacaaantccgagccgggagcnttaaaggtgtaaagcctggggggcctaatgaggganctaactcccattaattggngttgngctcactgcccnntttccatcnggaaacccgtcgtgccnctgcntttatnaatcggccacncncggggg

SEQ ID NO: 3353 - DNA, 875 bp, Homo sapiens
  misc_feature 2, 5, 8, 14, 15, 26, 101, 104, 393, 406, 524, 585, 596, 608,702, 707, 708, 713, 721, 728, 731, 740, 765, 792, 797, 808,821, 838, 856, 858, 872, 873, 875: n = A,T,C or G
gnaanggnttttanntccgactatangggcttttggaactccccgcggtggcggcccgcccgggcaggttccagttgagaagctgaatgttggtgttgtgnttntgataaactcccaacatgaaaactgaggaccaccagcgttttcagctcacctttgactcacgctggcagctccaggaacactgaacaggagtccccactgaacctttgctgcgttccgaagcagcacagccatggttaggcactgccaggcagctcttggaaaccacagggagggaagttttggttccttctttctgtctttgtttttgagaggaatgagcttggaataaaagaacgctagtaatgactgatttgcaggttaggtgtaaacattaaatcctcataacangctaatgagaggngggagaaattatccccattttacagatgaaggaacagaggctcctagagactaaagaacttgctactcaatgaggtcaggattcacacctagggtgacctgaggatagctgctgcaantgctcaccctttctaccttcccaagaaacaatacgcaagagaatttctttctaaatattgngtgcctagaangtgctttggggntatcgaaacagatatatatgtgtatatctgggctctttaaaaatctctttaataaaaacaaaaaagtgatgctagtggtaaaataaaaaaaatnttttnnaaaantggggggncctcganaantcttctttncggaaagatattatgcatatatgcncgattagttttgggtttttataaaaangggancatgctattantaatggggaatanccttatatagctttcgnaaccatttttactttttntngggggatggatatnnan

SEQ ID NO: 3354 - DNA, 873 bp, Homo sapiens
  misc_feature 4, 8, 19, 21, 29, 36, 43, 295, 355, 432, 490, 527, 631, 637,665, 673, 698, 728, 767, 768, 781, 788, 789, 793, 824, 853,856, 858, 862, 873: n = A,T,C or G
atgnactnctactatatgncnatattggngaatcgnagctgcngcggggtggcggcccgcccgggcaggtactaagttgaagtaaagctcaccctttacttccctacttgaaagttctactctgagccttgactcttagccacagtgaggcatgttgaaggttcctgctggtttattcttttttttttttttttagacagagtctcactctgttgcccaggctggagtgcagtggcacgatctcggttcactgcaagctccgcctcccgggttcatgccattctcctgcctcagnctcccaagtggctgggactgcaggcacccgccaccacgcctggctaattttttgtatttntagtagagacaggatttcaccatgttagccacgatggtctcgatctcctgacctcgtgatccgccagccgtggcctnccaaagtgctgggactacacgtgtgagccaccacttccagccaatccccgcgtacctngggcgctctagaactagtgggatcccccgggctgcangaattccatatcaagcttatcgaatccggcgacctctaaggggggccccggtacccaacttttggttcctttaatgaagggttaaatgcgccccttggcgtaancatggncatagctggtttcctggggtgaaaatgntattccgnttcacaatttcacacaacatacgancccgggacataaaagtgtaaaacctggggngccctaatgagtgaactaacttcacatttaattgggtgnncttactggcccgntttcaanncggnaaacccggcctgccaacttgatttaatgaantgcccaccccccggggagaggcggtttgnttntnggcncttttcccttn

SEQ ID NO: 3355 - DNA, 859 bp, Homo sapiens
  misc_feature 7, 12, 188, 222, 295, 375, 492, 511, 513, 582, 601, 639,651, 658, 686, 696, 720, 742, 750, 757, 766, 774, 782, 797,806, 814, 818, 819, 820, 821, 822, 823, 824, 825, 830, 831,832, 833, 834, 835, 836, 837, 838, 839, 840, 841, 842: n = A,T,C or G
  misc_feature 843, 844, 845, 846, 847, 848, 849, 850, 851, 852, 853, 854,855, 856, 857, 858: n = A,T,C or G
gtggacncgttncgacttacttgtggctgattggagctccccgcggtggcggccgaggtacagactagccttcatctagttcaggactcctaccatacccacacctttttacctactttctagtcacaaaataacttttcatcattctgagcacaccacgtccttccatgactccttgcctctgatgncattctgaggcagggctgaaatgagagacaccanagtgagaccttgctttaatttattttgatgccaaagctaccaaattctattctaagagaagatcaggcatgtnacagtgtttttaaattgccggcagcaacccattagtggatcatggccatcatttaaaaacgctaatctgaagaatatcancacatatcacacagagtgaggtcattactgctttatgaaacttctgttacatgaacatatatgtgatgaaaaaaacttatatgtcactaaaacaaaattggaaatacactgacattnataaaatgtattgaggaananaaacttggcttaagtgtgtggagaggggaagatggaataggacgattagggaaaggaaggaagttatanccaccggggtctaaaaagngttattgaagtgggagtcacccaaaacctcaactgggnccaagcaaccangaaaaanaacccgcgttcctgcccggggcgggcgntttaaactantggatccccgggctgcgggaattnattttaagcttattgatccgtnaaccccanggggggnccgggcccnccttttgntcctttangagggtaattgcgcnctggggaancatgggcnttannnnnnnntctgnnnnnnnnnnnnnnnnnnnnnnnnnnnnng

SEQ ID NO: 3356 - DNA, 872 bp, Homo sapiens
  misc_feature 469, 484, 520, 555, 564, 565, 566, 568, 570, 571, 572, 573,574, 575, 576, 577, 578, 579, 580, 581, 582, 583, 584, 585,586, 587, 588, 589, 590, 591, 592, 593, 594, 595, 596, 597,598, 599, 600, 601, 602, 603, 604, 605, 606, 607, 608: n = A,T,C or G
  misc_feature 609, 610, 611, 612, 613, 614, 615, 616, 617, 618, 619, 620,621, 622, 623, 624, 625, 626, 627, 628, 629, 630, 631, 632,633, 634, 635, 636, 637, 638, 639, 640, 641, 642, 643, 644,645, 646, 647, 648, 649, 650, 651, 652, 653, 654, 655: n = A,T,C or G
  misc_feature 656, 657, 658, 659, 660, 661, 662, 663, 664, 665, 666, 667,668, 669, 670, 671, 672, 673, 674, 675, 676, 677, 678, 679,680, 681, 682, 683, 684, 685, 686, 687, 688, 689, 690, 691,692, 693, 694, 695, 696, 697, 698, 699, 700, 701, 702: n = A,T,C or G
  misc_feature 703, 704, 705, 706, 707, 708, 709, 710, 711, 712, 713, 714,715, 716, 717, 718, 719, 720, 721, 722, 723, 724, 725, 726,727, 728, 729, 730, 731, 732, 733, 734, 735, 736, 737, 738,739, 740, 741, 742, 743, 744, 745, 746, 747, 748, 749: n = A,T,C or G
  misc_feature 750, 751, 752, 753, 754, 755, 756, 757, 758, 759, 760, 761,762, 763, 764, 765, 766, 767, 768, 769, 770, 771, 772, 773,774, 775, 776, 777, 778, 779, 780, 781, 782, 783, 784, 785,786, 787, 788, 789, 790, 791, 792, 793, 794, 795, 796: n = A,T,C or G
  misc_feature 797, 798, 799, 800, 801, 802, 803, 804, 805, 806, 807, 808,809, 810, 811, 812, 813, 814, 815, 816, 817, 818, 819, 820,821, 822, 823, 824, 825, 826, 827, 828, 829, 830, 831, 832,833, 834, 835, 836, 837, 838, 839, 840, 841, 842, 843-872: n = A,T,C or G
agtcgactcacttagggcgaattggagctccccgcggtggcggccgagaatctcttaaaccgtaagagaatctcttaaaccaaaggctgcagtgagctatatggtgccattgtattccaacctgagtgacagagtgagatcctgtctctgaaaaaattttttaaattaaaaaagccaaaggacatgaaacacaccattatccaaatgtattacccaaatatcttcaaatgctaagaagtaatttttggattaaaggtctcttcggagtctacatgcctacactctccttccattagtgtgaataatcaaaaactaaccggatttcaagtggaacatttaaactgacatcttctgatgttatttcatccaaattactttgagataaagaaatgttgcagacaattgtacctcggccgctctagaactagtggatcccccgggctgcaggaattcgatatcaagcttatcnataccgtcgacctcnagggggggcccggtacccaccttttgttccctttantgagggttaattgcgcgcttggccgtaatcatggncatagctgnnntngnnnnnnnnnnnnnnnnnnnnnnnnnnnnnnnnnnnnnnnnnnnnnnnnnnnnnnnnnnnnnnnnnnnnnnnnnnnnnnnnnnnnnnnnnnnnnnnnnnnnnnnnnnnnnnnnnnnnnnnnnnnnnnnnnnnnnnnnnnnnnnnnnnnnnnnnnnnnnnnnnnnnnnnnnnnnnnnnnnnnnnnnnnnnnnnnnnnnnnnnnnnnnnnnnnnnnnnnnnnnnnnnnnnnnnnnnnnnnnnnnnnnnnnnnnnnnnnnnnnnnnnnnnnnnnnnnnnnnnnnnnnnnnnnnnnnnnnnnnnnnnn

SEQ ID NO: 3357 - DNA, 860 bp, Homo sapiens
  misc_feature 1, 3, 21, 22, 352, 372, 386, 485, 546, 556, 563, 565, 566,568, 574, 575, 576, 577, 578, 579, 580, 581, 582, 583, 584,585, 586, 587, 588, 589, 590, 591, 592, 593, 594, 595, 596,597, 598, 599, 600, 601, 602, 603, 604, 605, 606, 607: n = A,T,C or G
  misc_feature 608, 609, 610, 611, 612, 613, 614, 615, 616, 617, 618, 619,620, 621, 622, 623, 624, 625, 626, 627, 628, 629, 630, 631,632, 633, 634, 635, 636, 637, 638, 639, 640, 641, 642, 643,644, 645, 646, 647, 648, 649, 650, 651, 652, 653, 654: n = A,T,C or G
  misc_feature 655, 656, 657, 658, 659, 660, 661, 662, 663, 664, 665, 666,667, 668, 669, 670, 671, 672, 673, 674, 675, 676, 677, 678,679, 680, 681, 682, 683, 684, 685, 686, 687, 688, 689, 690,691, 692, 693, 694, 695, 696, 697, 698, 699, 700, 701: n = A,T,C or G
  misc_feature 702, 703, 704, 705, 706, 707, 708, 709, 710, 711, 712, 713,714, 715, 716, 717, 718, 719, 720, 721, 722, 723, 724, 725,726, 727, 728, 729, 730, 731, 732, 733, 734, 735, 736, 737,738, 739, 740, 741, 742, 743, 744, 745, 746, 747, 748: n = A,T,C or G
  misc_feature 749, 750, 751, 752, 753, 754, 755, 756, 757, 758, 759, 760,761, 762, 763, 764, 765, 766, 767, 768, 769, 770, 771, 772,773, 774, 775, 776, 777, 778, 779, 780, 781, 782, 783, 784,785, 786, 787, 788, 789, 790, 791, 792, 793, 794, 795: n = A,T,C or G
  misc_feature 796, 797, 798, 799, 800, 801, 802, 803, 804, 805, 806, 807,808, 809, 810, 811, 812, 813, 814, 815, 816, 817, 818, 819,820, 821, 822, 823, 824, 825, 826, 827, 828, 829, 830, 831,832, 833, 834, 835, 836, 837, 838, 839, 840, 841, 842-860: n = A,T,C or G
ntngtcgactactatagggcnnattggagctccccgcggtggcggccgcccgggcaggtactcacagctgcatcacactgaatatcatctccctgcactgccatttcatttgagcagggctttgcctgtcaagaacattcatatcttttgataaacagtgcattttttccctgatagtctgtatgggacagcctccttgtttgcatctgaaggacagggacttcaggacctcctgctgtggtcaccaaggaatcacattcaaacttctcagcaaggtgttatggtccttctcagtttgcctacgatccattgaggcaaaggtttccttctctcaatacaccctctgctttanccagggggacctcccactgncctctctatgtgtnctatttgttcctgactgttagtacctcggccgctctagaactagtggatcccccgggctgcaggaattcaatatcaagcttatcgataccgtcgacctngagggggggcccggtacccagcttttgttccctttagtgagggttaattgcgcgcttggcntaatcatggncataacntnntnccgggnnnnnnnnnnnnnnnnnnnnnnnnnnnnnnnnnnnnnnnnnnnnnnnnnnnnnnnnnnnnnnnnnnnnnnnnnnnnnnnnnnnnnnnnnnnnnnnnnnnnnnnnnnnnnnnnnnnnnnnnnnnnnnnnnnnnnnnnnnnnnnnnnnnnnnnnnnnnnnnnnnnnnnnnnnnnnnnnnnnnnnnnnnnnnnnnnnnnnnnnnnnnnnnnnnnnnnnnnnnnnnnnnnnnnnnnnnnnnnnnnnnnnnnnnnnnnnnnnnnnnnnnnnnnnnnnnnnnnnnnnnnnnnn

SEQ ID NO: 3358 - DNA, 905 bp, Homo sapiens
  misc_feature 2, 3, 4, 6, 7, 8, 21, 54, 58, 78, 105, 132, 143, 170, 177,186, 201, 218, 225, 238, 305, 367, 370, 371, 380, 443, 461,473, 479, 537, 546, 579, 580, 599, 601, 602, 605, 637, 646,647, 650, 662, 674, 693, 694, 700, 710, 726, 734, 738: n = A,T,C or G
  misc_feature 754, 759, 767, 772, 776, 789, 790, 791, 793, 801, 802, 805,806, 811, 812, 814, 826, 836, 840, 842, 848, 849, 854, 860,861, 862, 872, 874, 879, 888, 890, 891, 901, 902: n = A,T,C or G
tnnnannngcgactactatanggcgaattggagctccccgcggtggcggccgangtgnacggatcacaaggtcagganatggagaccatcctggctaacgtggtnaaaccccatctctactaaatacaaaanagtacccgggngtgacagcatgtgcctgtactcccaantactcangatgctgangcaggacaatggggngaacccgggaagcagancttgcantgagcaagagatngtgcccctgcactccagcctgggcgaacagagcgagactatgcctcaaaacaaaacaaaaacactanagggcaattttgcatgcaaattatgctaaggcataatttttagtattatcttagtatttctnaannatgtagtcntctatggatttactgaacaaatttgccatatctgcttataatcatacactacttcataatttntgacaaccataaataatntaattaccttgncatgtnaatggtatgattgtaattatcatgtgatgctttggagactgattatcatactatgtgnagggcttcnaaagaaaatcaagactcttaacagactgggggnncatgttttctttccctaantnnatntgaagagaaaattactgcttgatttttctggngaaaaattnnggntccaaaacctantgttccttcatnaaggaattcaagaaattcnnaaaatntgaagcccgnaatggaattttcaaanccggatgncctnatggctattgcaaaangaatnttgagggntagtngggnaattggattaccnnnantttggttnnggnngcaanntncatttttttttngagggggganaatngnggttgnncaaanttgttnnntttatccccngnggaanttggggggnanngttaaaaacnnggg

SEQ ID NO: 3359 - DNA, 477 bp, Homo sapiens
  misc_feature 322, 384, 423, 448, 467, 468, 469, 475, 477: n = A,T,C or G
ggcgaattggagctccaccgcggtggcggccgaggtacatttcacggaggtgggaccaaaagaggaaagaacaaaatcccctaagtgccagcatgttgggaatgcatcattgcaataaaattgtgaaactaatactggcaggcaaacaacaaaaaacaacaactgccacaaactgcaatatgcttatcaggggtcttgaccaaaaaagaaaggcccccgatcttccacagaggacactggcaccagtcccaggtcctgcaactcttgaatagctccatgtgccgtgttctcttcaggtaccttgcccgggcggccgctctanaactagtggatcccccgggctgcaggaattcgatatcaagcttatcgataccgtcgacctcnagggggggcccggtacccaaacttttgttcccttttaantgaggggttaatttgtgcgcttggncgttatccatggtcataannntgtttntn

SEQ ID NO: 3360 - DNA, 474 bp, Homo sapiens
ggcgaattggagctccccgcggtggcggccgaggtacacacggtaaccacatttagatggactgggatgttgccacacatacaagcattgataactggcttctcattacctgaatacattcttctgtcagagcaacagactcagctatgcttctggcaaaattgttcttaattctctattgattaatttattcgggtaagtattttattggggtattttctgtctgaaaagtgcgattccaggtgctttatgtgtctctgtgtgtgggtgttatataaatacttataatactgtatccatactcttgaaaagcttaagttgggaaggcaaggcatgcaataaggaacacagaattttagtcattccacaaccatctgtttgaatggctgctattgttagtatccggtggttggaaactgagaagcaaaagatgactataatagggatctcttttctggagaatgccacaagtgg

SEQ ID NO: 3361 - DNA, 467 bp, Homo sapiens
  misc_feature 55, 250, 255, 328, 342, 348, 359, 407, 452: n = A,T,C or G
ggcgaattggagctccaccgcggtggcggccgaggtacatcactgtgtccctaanataacccaccccagtgaaaaactccagcccagtgaactggagggtgttctttttggccacggtaaactgagggattatgatgaagctgaagttcaggatgaatgagaaaatgttgaacttcaaaagccatctcagaaagttgaaattaggagaggacgctggttccaaacttgcctccaatgatcttcagcgtcnttctngccacaggcttgatggaattcagaatttcccgacaggctgttcttggatctccgataagcccgggaaatgganttcaaacactgaantacaancaaattgagcntgaaggatacgatgggtgtgatttgcttttttctttggcaactatttncctaaggtttccttttctcttccatggcccttggctggttcctgntggctttaatttttg

SEQ ID NO: 3362 - DNA, 477 bp, Homo sapiens
ctaatacgactactatagggcgaattggagctccccgcggtggcggccgcccgggcaggtacccaagcttcacagccctgtctctgccatggagagcaggcccacgcactgctgcctgctggagcaaccgtgctggtcacagggccagaggcagagagccctaacaagcagtcagggcgctaatgaggaaggggggggacaacctgtcctctacagaaaaataatgaagattaatatgttcaacaactcccatccagaatccagcaggaagttaaaccaaacgacacatgattctctgacgaagaaataagaatacggttgactggttttttatatttatttacctgaaagcttctaatgtttctaactagtgacatatttcaggccaggaattctgtttgcctagaatcatgatgtctaaacactgcacacttgaccaactttggatccaaataactagctttggtatgctcttgg

SEQ ID NO: 3363 - DNA, 458 bp, Homo sapiens
  misc_feature 344, 405, 413, 443: n = A,T,C or G
ggcgaattggagctccaccgcggtggcggccgcccgggcaggtactggtgactcaccattctgccagcagccactttgcactgggcaccagcacataccagcccccatcaggaaatgtgcacagtccatctcatcttgtttcatcttcattttattaatgaggaactgagagtccaagaaggttcaatcatttgctcaagggacaaagaagtgcatatcaactcaagatctgagcgactccaaagcccaagctctgtgcccccgataacactaaagggctctggaaccttccctcactgtgccaaattctggtcgccacactttaggaaaggtacctcggccgntctagaactagtggatcccccgggctgcaggaattcgatattaagcttatcgataccgtcnacctcganggggggcccggtacccagcttttgttcccnttagtgaggggttaa

SEQ ID NO: 3364 - DNA, 870 bp, Homo sapiens
  misc_feature 3, 5, 7, 13, 15, 16, 18, 19, 22, 23, 25, 28, 30, 41, 42,50, 53, 57, 79, 80, 81, 84, 88, 89, 98, 101, 103, 105, 110,116, 118, 125, 127, 129, 134, 313, 327, 371, 372, 392, 403,410, 422, 431, 436, 450, 453, 465, 473, 483, 485, 487: n = A,T,C or G
  misc_feature 496, 505, 508, 509, 519, 525, 528, 542, 544, 545, 551, 556,561, 564, 573, 583, 603, 642, 652, 657, 665, 666, 667, 672,673, 681, 693, 702, 705, 708, 709, 714, 728, 732, 740, 743,746, 759, 769, 772, 781, 783, 789, 790, 792, 798, 807: n = A,T,C or G
  misc_feature 823, 833, 840, 842, 846, 852, 860, 861, 864, 870: n = A,T,C or G
ctntntnattcantnnannttnnanttntnttacctttatnntttacttntanaatnctatacttctacaatactttgnnntantagnntctctcttnatncntnaacanttttantntaagtcntngncgctntacgatcactatagggcgaattggagctccaccgcggtggcggccgaggtaccgcgggactaatttttttttcttctacttagaataaaattcatgtagtgcagtatccagagcacattaactgaagtatttggagactagatttaatctcagatctcacccttggtaaaatcattaancttctgagcatcantagtctcaaaactttttcattgaagaagggggtaaagttggtannttttttccaaagggaacagnaaaaggggagnggaaaantaccttaccagntttcttccntttgnaaggccttttcttnccngaaattgttcanttaagggntaaccccttngncncccgggggncaggggctncgnnttccttaagnaaaacntangggttggggattcncnncccctnggggnccttnganaatgggganaatttcctgnaattaatttccaaaaaggcntttttaattccggaattaacccccggttccggtaaaccnattagtaagnagggnggtggggnnncctcnncagggtcntcttccccaacngcatttttnttnggnntatcncccttttttaagcnttgnaagggggnatnttnaaattaggcctgncctccttttnggnccgattaanantaatanngncctcanattaatgtnctgttattctcccctngggtgggtangaaaatnanacangtcttnattacccnnctnttcaan

SEQ ID NO: 3365 - DNA, 521 bp, Homo sapiens
  misc_feature 65, 95, 137, 153, 157, 176, 201, 280, 287, 292, 309, 329,336, 347, 363, 374, 398, 399, 404, 428, 431, 432, 434, 443,448, 450, 452, 457, 465, 479, 480, 481, 485, 489, 493, 494,499, 501, 502, 503, 509, 513, 516, 519, 520: n = A,T,C or G
ggcgaattggagctccaccgcggtggcggccgaggtacgcggggacattcagaggtgatgcccanagcgggtaaagtggactggggagaacttcngaggatgttcatgtccaggagcagccccacgccctgtatggncggtgtctagagcctnacancaactaaagaccaacccanctctcataagaaaggaatgtcaaantgtcatgttcaatttttacatttcagtagcctgggaatctttttcttcacaaatttgaaaatgaaactgtgcttgaaanggaggtnaattncattgcattaatctttnagctcacaaaggaaatactncataagnaagcaagaccncagacttaagacgggncatatattggnattttttttgcccatgggccctgnnaaaanaaatggttccctggcccccgggcnggnncngctttttanaaacntnantgggnattccccnccgggtgcctggtnnngcantttnaggnntgggngnnncccttnttcnccntannc

SEQ ID NO: 3366 - DNA, 544 bp, Homo sapiens
  misc_feature 157, 176, 180, 210, 282, 283, 284, 290, 291, 294, 295, 304,314, 315, 322, 328, 331, 332, 336, 337, 351, 356, 368, 386,391, 397, 427, 440, 443, 445, 451, 484, 488, 489, 491, 501,508, 519, 520, 528: n = A,T,C or G
ggcgaattggagctccaccgcggtggcggccgaggtaccacaggacacgcccaggatgttgggttcctggtgctgaccacagtgctatggtcactccacagtccagcactgcagtgcacaaagggtgccctttgacaaaaatgctgcagcaagagtntgaccaacttgaaaagcancaanatcagcaagataaaagattcctgagaagtnctaagtagccctctacgaagatacaaaacatgcacactcacacaggctactgacatgttatgaccagagtannnttgacnnggnncctctcctngcacttgtgnntttttcnccttgncannatgnnaagttggttatatnataantgcctaaaaaanggcatccagttgggtccntttgnaaaatnggaagccccgtagggttcccgccggttgcnggtcccaattcanagncnagggtnggccaccccgggggacttgggggcgttgccaanaacnngntggggaccgntttccantattacccccnncccacccnagttaggcaaccttag

SEQ ID NO: 3367 - DNA, 837 bp, Homo sapiens
  misc_feature 2, 6, 8, 9, 10, 15, 17, 18, 19, 21, 32, 33, 35, 38, 40, 42,43, 47, 49, 50, 51, 52, 53, 54, 57, 60, 64, 65, 68, 74,76, 89, 92, 113, 118, 122, 298, 325, 328, 346, 360, 382,387, 396, 399, 406, 412, 417, 426, 449, 451, 459, 469, 470: n = A,T,C or G
  misc_feature 471, 474, 485, 487, 502, 506, 507, 508, 520, 522, 524, 526,537, 542, 561, 563, 564, 568, 576, 588, 590, 594, 605, 607,608, 619, 624, 629, 633, 634, 639, 640, 647, 651, 654, 655,658, 664, 674, 677, 682, 683, 688, 691, 697, 700, 707: n = A,T,C or G
  misc_feature 717, 720, 722, 723, 724, 733, 737, 738, 741, 755, 756, 763,772, 779, 783, 794, 808, 812, 819, 823: n = A,T,C or G
tntatncnnntcttnannntntatggtatatnntngtntngnntctntnnnnnnttntcnattnntcnaatttngntatggtatctatnttntctatttatatatttatatangtggncccntatacgactcactatagggcgaattggagctccaccgcggtggcggccgaggtaccataattcatatatcctgtttttatttgtataggaacctaggagaaagagaaggaaaattgaaaataaattaagtcaaatgcaatacttgtgctaaaaatgttgtcaaaagttgaggccancttctaggcaaaatgttcggtaggcangantttgccttttcagtcttnttttctcaatttanccaaaaagttttttcctttttnctgtnctttggccngtntgttgtnctttcnaatgnattggcccnttcccaacaattattcttggccncntaacacanccttaagaannncancccctcaaccntntttcccgtaattacntggnnnctttaaggaagncnancnaccaaaccatntcttnggaataaatcccaattctnanngggngggccctncaaatttccccnanaggnatttttaaaanannggcccaacttnaaatnggccntaannggggnnttcacangttntannacnttttanttcttatttnttnggagnnaaaanacnttatantanttattgncctttaagcntanannntttaaaacnttcnnctnttcccgcccttccnnggtgccncttaaaaanggtcttntttntgtctaaaaangcccgggaaaatancaanctctttncaantttacaaaaaaaag

SEQ ID NO: 3368 - DNA, 490 bp, Homo sapiens
  misc_feature 215, 216, 243, 285, 313, 323, 325, 358, 382, 403, 410, 420,423, 424, 436, 442, 447, 450, 462, 471, 480, 488, 489: n = A,T,C or G
ggcgaattggagctccaccgcggtggcggccgcccgggcaggtactttttttttttttttttttgtgggcaaaatgaaatctgagtggaccaatgacctcaccatgtccagtgtttggttgctagtttgagatttggaaatggctgttcaggtgaagaggtaaatggatccaaatgccttgttataaggcatttgacaatgcttacagcaagtanntgtgaatagagggccattaaattctanccataaacatttcccggggctactggttatttttttggttgnaacttacacttttgaggtttttcacaangagacaaggntntacaaggataccctacatgtctaaaggactaanaattggagagccctgacattgaantaggacgtagttttttcaccncaaaagnaggcagtatngtnnaggccaccggtngcttancgccntgntaaatcccagcnacttttggngagggcccntaaggccnng

SEQ ID NO: 3369 - DNA, 870 bp, Homo sapiens
  misc_feature 4, 5, 7, 14, 15, 20, 21, 22, 617, 663, 674, 691, 719, 723,744, 748, 808: n = A,T,C or G
aggnntntcgactnntatannncactactatagggcgaattggagctccaccgcggtggcggccgcccgggcaggtacgcggggagtggcatcctttgaactcacggatccagtcataactgaagttccatctacacctggggtcttcagacccaggctctggaaaagatcctgttacttacaagcaaaagaaattctgcctcttaccctcagcatgtgagtacctcggccgctctagaactagtggatcccccgggctgcaggaattcgatatcaagcttatcgataccgtcgacctcgagggggggcccggtacccagcttttgttccctttagtgagggttaattgcgcgcttggcgtaatcatggtcatagctgtttcctgtgtgaaattgttatccgctcacaattccacacaacatacgagccgggagcataaagtgtaaagcctggggtgcctaatgagtgagctaactcacattaattgcgttgcgctcactgcccgctttcagtcgggaaacctgtcgtgccagctgcattaatgaatcggccaaccccccggggagaggcggtttgcgtattgggccgctctttcgctttcttgctcactgactcgnttgggctcggtccgttcggcttgcggcgagccggtattaagcttancttaaaaggcnggtaataccggttaatncacaaaaattaaggggataaccccaggnaaanaacattttgaaccaaaaaggnccancaaaaagggccaggaaaccgtaaaaaagggccgcgtttgctggcgttttttccataaggntccgccccccttgacgagcattaaaaaaattggacccttaaattaaaagggggcgaaaacct

SEQ ID NO: 3370 - DNA, 472 bp, Homo sapiens
  misc_feature 344, 362, 384, 386, 408, 409, 411, 461, 472: n = A,T,C or G
ggcgaattggagctccaccgcggtggcggccgcccgggcaggtactagacatctctctgaggtcatgtcacactcaccatgccaccccatcatgtccttatagatgggaccctcctcttctggttaacacatcatctgaagatagccagagagccatctctaagctgtgcaatgacaaggagtcatccttcatagaagacatctgccccccaaacaggtcgtctatacttgatggtgacttgttaagaagttcaccctgtgctttatttccaactcaggacacctggaaaaggtaaaagaaccaccatagttgtacctcggccgctctagaactagtggatccnccgggctgcaggaattcnatatcaagcttatcgataccgncnaccttgaggggggggcccggtnnancaacttttgtttcccttttagtgagggtttatattgcggcgcctttgggncgttaattcan

SEQ ID NO: 3371 - DNA, 492 bp, Homo sapiens
  misc_feature 20, 29, 38, 300, 327, 362, 395, 405, 448, 453: n = A,T,C or G
gtcgagcggccgcccgggcnggtacagtntatttgctngaaaagtggtagtaatgctgaagagtttcaaattatttgagcctctctctcacctctctcagtttcctcatctttgaaatgggaatactaatacatacctcagttgattatgagggaaagagttaaatgacgtaatatgtggaaagggcttagccaactgcttaataggcatcgctcagtaaatgttacctaagtactccagcctgggtgacagagcaaagactccgcctcaaaaaaaaagtgcgaatccaaccgtctaccnttatttgtttgtttatatttgctattnctttcttatttatggccatatttcctttgctgctntgcatggtccattaatttatttttaatactgcntgtcaatggnatttgggtggtttttaacttttgttcttggccagggcagttanatttngcttggaaaaatcatttttggatccttttcaaggttttg

SEQ ID NO: 3372 - DNA, 828 bp, Homo sapiens
  misc_feature 2, 14, 16, 19, 21, 25, 28, 31, 37, 46, 48, 53, 54, 59, 61,62, 63, 66, 68, 69, 72, 73, 78, 80, 81, 86, 92, 94, 101,103, 112, 117, 120, 126, 263, 279, 292, 297, 305, 317, 318,321, 322, 326, 329, 331, 333, 334, 338, 343, 348, 354: n = A,T,C or G
  misc_feature 355, 356, 367, 370, 372, 376, 383, 384, 394, 399, 403, 404,411, 417, 418, 420, 421, 424, 427, 434, 435, 437, 440, 444,445, 451, 470, 476, 486, 487, 494, 503, 515, 519, 526, 528,531, 538, 543, 546, 551, 558, 565, 567, 571, 577, 606: n = A,T,C or G
  misc_feature 609, 615, 616, 629, 650, 651, 665, 668, 673, 677, 682, 687,689, 698, 719, 722, 726, 729, 737, 741, 748, 749, 753, 754,758, 763, 766, 771, 773, 777, 780, 789, 797, 804, 805, 807,809, 811, 817: n = A,T,C or G
tntactattactantntantntatnttnttntatatnttaattttnancttcnncctcntnnntantnnatnntattntnnatacnataatntntttttantntcatttttnttagnccnttattnggatcagcgatcatatagggcgaattggagctccaccgcggtggcggccgaggtactctctgagccgagtgcagtggctcacaccggtaatcccagcaattttggaggccgagatgggcagatcacttttgaagcangagtttgagaccagtntggccaacgtggntaaangctgtctntactaaaaaggnnaannaatnacncncnngggnctgtngcctnaactcnnnttgacactttnttnangggngggtttnncgcactttgnaatcntttnncgaaacnaaaaanngnnagnggnaccattnnanatngccnnccgaanatccctttggaatgaaatntttcgngccaaccctnnacccttnttgccaaantcctaggaattngggngagcccncnaanaagcagnccccnaanggggnaaccctntgggaangnaaantgtttntttggggaaaaaaaaaaaattgaaccccnggnggggtnncccctttgggggnccttgggaaagccccccaaanngttttcccggaatnttnggcgngggngtaantttcncnatgggggcntttggatagagaaaattttcnaantttntcnaaaattcnttanaatcccnntttnncccnttttntanaatcntnttanctnggggggggngggccccnttgtggnnancncnctaaantcttttttttg

SEQ ID NO: 3373 - DNA, 655 bp, Homo sapiens
  misc_feature 10, 29, 43, 44, 85, 93, 97, 238, 239, 240, 250, 435, 453,524, 568, 570: n = A,T,C or G
gagcttttcntaataacactcactatagnttttgaattggganntccaccgcggtggcggccgaggtacatactgagctcctccntcactggngcanacattcactgcctgtcctcttacctgtccagatgggtgttagggccccaaagaagattcagctcagggctttgtctgcaggatgtttctaatgtggtaggagacaaataacgcctgacattcaaccaaggtggacaaaggnnncgggctcagnggctcacggttgtattgccagcactttgggaagctgtggcaggtggatcacctgaggtcaggagttcgagaccagcctgaccaacatggtgaaaccccgtctctacgaagaacacaaaaaattagctggccgtggtggtgcacacttgtaatcccagctacttgagagactgaggcaggagttcncttgaacccaggaggcanaggttgcagtgagctgagatcgcaccgttgtacctgcccgggcggccgctctagaactagtggatcccccnggctgcaggaattcatatcaagcttatcgataccgtcgacctcnanggggggcccggtacccagcttttgttccctttaatgagggttaattgcgcccttggcgtaatcattggtcataagctgtttcctg

SEQ ID NO: 3374 - DNA, 928 bp, Homo sapiens
  misc_feature 1, 2, 3, 4, 6, 12, 20, 22, 31, 32, 34, 36, 37, 38, 304, 465,478, 489, 506, 552, 579, 590, 595, 598, 620, 622, 634, 642,677, 698, 712, 735, 737, 751, 757, 761, 793, 809, 811, 853,857, 861, 864, 865, 868, 873, 877, 889, 907, 915: n = A,T,C or G
  misc_feature 916, 924: n = A,T,C or G
nnnntntcactnctatacgncnaactgtagnncnannnggatctccacccgcggtgggcggcccgcccgggcaggtaccgtaagttgaagtccaggagggttccagacacagagcttctggtgtcttctccctgtggagtcaggactcattactctgctgtctttgatgtgtgacaacaggcaccaactatcgccaactagagaagctcaccagagctctgatgttggaagtttttattggggcctcagcatgtagacatgattgactggttggtggattaactgtctacatggttaatcttantgtccaggtcagctgatactgcgtgaccaaaagctcctaccccgaatcccttgattagtatttctggcatagcaagcccccatcagaaacaaagacattcctcttagaggtaatatagattacctttcaacaccagagggcaaaggccagactacttttangcaaagtacctcnggccgctctanaactagtggatcccccnggctgcaggaattcgatatcaaacttatcgatccgtcgacctcganggggggcccggtacccaacttttggtncctttaatgangggtnaantgcgccccttggcgtaatcatngncataactggttnctgtgtgnaaatggtattccgttacaaattcacacaacatacnaacccggaacattaaagtgtnaaagcctggggggnctaatgagtgagctaacttacantnattgggttgcgctnacttgnccgntttcaatcgggaaaactttcgggccacttgantaatgaatcggcaacncnccgggagaagcgggttgggtattggggcttttcccttcttgnttanttanttnnttngcctnggcnttcggttggggnagcggtttaaattaattnaaaggggnnataccgtnttct

SEQ ID NO: 3375 - DNA, 922 bp, Homo sapiens
  misc_feature 3, 4, 6, 14, 169, 173, 178, 261, 360, 389, 487, 502, 508,518, 612, 613, 642, 649, 680, 684, 695, 704, 716, 727, 729,731, 732, 743, 745, 756, 760, 767, 786, 789, 794, 803, 835,848, 849, 875, 884, 889, 890, 901, 908, 909, 911, 915: n = A,T,C or G
  misc_feature 916: n = A,T,C or G
atnncnctacttanggcgaatcggagctcccccgcggtggcggccgaggtacacagcctggcacgtagcaagtgttgaaatatctcttggagagagagaaaaaaaatgaatctattaaaatgtctctatgatgcactgcggaagctagacttggtagatcgagtttaanggantgaanagggggtgaatgtttgctacttccgtatatttggagtatttgataaaacagaagaccagtttctcttcaaacttcatgtcggnttgtaggtcaggctgccagggtttagggtacctgcccgggcggccgctctagaactagtggatcccccgggctgcaggaattcgatatcaagcttatcnataccgtcgacctcgagggggggcccggnacccagcttttgttccctttagtgagggttaattgcgcgcttggcgtaatcatggtcatagctgtttcctgtgtgaaattgttatccgctcacaattncacacaacatacgancccggnagcataaagngttaagcctggggtgcctaatgagtgagctaactcacattaattgcgttgcgctcacttgcccgcttttcagtcctggaaacctgtcctgccanntgcattaatgaatccggccactctcgganaaaggcngtttgcgtatttggggcgctttttccgcttnctcnttactgactcncttccctcngcggtccgctgngccaaccgttntnanncttactcaaangnggggaataccnggtnttcacanaaattcagggggataaccncangaaangaacatttnagccaaaaggccaccaaaaggcccggaacccntaaaaagggcgcnnttgttggcgttttttcataggctccncccccctgncaacnntcaaaaaatcncctcaanncnaagnngggaat

SEQ ID NO: 3376 - DNA, 937 bp, Homo sapiens
  misc_feature 2, 3, 5, 6, 608, 652, 707, 722, 727, 771, 784, 805, 817,826, 827, 837, 855, 868, 874, 880, 893, 902, 917, 922, 928,933, 936: n = A,T,C or G
tnntnngcgactcgtatacgactactatagggcgaattggagctccaccgcggtgggcggcccgggggccattgagactgccatggaagacttgaaaggtcacgtagctgagacttctggagagaccattcaaggcttctggctcttgacaaagatagaccactggaacaatgagaaggagagaattctactggtcacagacaagactctcttgatctgcaaatacgacttcatcatgctgagttgtgtgcagctgcagcggattcctctgagcgctgtctatcgcatctgcctgggcaagttcaccttccctgggatgtccctggacaagagacaaggagaaggccttaggatctactgggggagtccggaggagcagtctcttctgtcccgctggaacccatggtccactgaagttccttatgctactttcactgagcatcctatgaaatacaccagtgagaaattccttgaaatttgcaagttgtctgggttcatgtctaagcttgttccagctatccagaatgcccacaagaattcaactggatctggaagaagaaagaaactgatggtgttaactgaacccattttgattgagacctacacanggctgatgtcattcattggaaacccgcaacaaacttggcttttnccttgcccgtgggaatattggtttttgagaagtctttttggtaccttcggcccangtacccggttggaangcctncctggtgtaatctgagatcttgcacaaacccatccactggggangacaagtgttaanaaggcctgccccccccaggangaatgcctttgnccttaaaannacctggggcntttttttgaaaacaggancctaattgttttnattttncccaanttggaaccctaanttaacttgngggcccagggaaaanaaggngaaggngggcnaant

SEQ ID NO: 3377 - DNA, 718 bp, Homo sapiens
  misc_feature 5, 6, 10, 92, 275, 301, 370, 404, 430, 447, 456, 494, 501,505, 509, 517, 527, 530, 533, 540, 541, 544, 545, 546, 552,556, 562, 564, 565, 567, 571, 576, 580, 585, 586, 587, 588,589, 602, 608, 618, 624, 625, 632, 636, 640, 642, 650: n = A,T,C or G
  misc_feature 660, 661, 662, 663, 664, 670, 676, 684, 685, 690, 691, 693,694, 695, 697, 700, 702, 703, 704, 705, 706, 707, 710, 714,717: n = A,T,C or G
gagcnncgcntaataccgacctcactattagggcgaattggagctccaccgcggtggcggccgaggtacggtggggcacccaggtagtaatntgcaggaagtagaattggcaacaaaggacacagaatgaaatggtgagatggctagccggaaacatagggagaatggcatcacaaaggcaaaggggggaaagaatttcagtttagtggatagtcaaccaaggcatttcacttagcagtcaggaatgaaaaaacgatactgaatttgaacattangaaagcttggtaaattttcaagagtntaatttctgcaaagttggaacacagtgaattaaaaaagtgcttaaaaattgaggacaattgaaaagttnaccaatgttaaaaccaaacccaaaaaaatttttnaatttttaggccccccaaattcattngggggggtttttttggnaaggccccntttttttttaaaattttttgggggaaaaaccccttttnccaattnaaanttcnttgggggnaaaacttaanttnttnaaaaacnnggnnnggggcntttntttttntnntncccnccccnaaanccccnnnnnaaaaatttttttncccccntttttttccncccccnnttttttncccncccncntttttttnaaaaaaaaannnnngggggnaaaaantttttttnnccccnnannntnccntnnnnnnccntccnccnc

SEQ ID NO: 3378 - DNA, 900 bp, Homo sapiens
  misc_feature 4, 7, 27, 570, 582, 605, 610, 612, 642, 657, 690, 716, 731,757, 782, 786, 788, 840, 850, 863, 878, 885: n = A,T,C or G
attnttnccgtatcgactactataggncgaattggagctccacccgcggtgggcggcccgcccgggcaggtacgcgggtagggatgcagaactggccacagtcagggctggccaacaagggatgggatggcaagggaaccagtgggagactgtttacacctttgacttcctcttcacaggtcaaggcaggactgtagcattaggtctcagagatgcaatgaacaggacaaatacacttccccttcatctggacctgaggctctgggcaagtcagtacctcggccgctctagaactagtggatcccccgggctgcaggaattcgatatcaagcttatcgataccgtcgacctcgagggggggcccggtacccagcttttgttccctttagtgagggttaattgcgcgcttggcgtaatcatggtcatagctgtttcctgtgtgaaattgttatccgctcacaattccacacaacataccaacccgggagcataaagtgtaaagcctggggtgcctaatgagtgaactaactcacattaattgcgttgcgctcactgcccgcttttcaatcnggaaacctgtcntgccaactgcattaatgaatcgncaacncnccgggagaagccggttgcgtattgggcctnttccctttcttgctnactgactcgcttggctcggtcgttcggttcggnagcggtattaacttactcaaagcggnatacggttttcacanaataagggataccaggaaaaaacatntgaccaaaagccaccaaaaggccgnaccntnaaaaggcccggtgctggggtttttcataagctcccccccctgacaagcttanaaaaattacnctcaattaaaggngggaaaccccccggnttttaanatcccgcgtttccct

SEQ ID NO: 3379 - DNA, 913 bp, Homo sapiens
  misc_feature 2, 675, 697, 700, 744, 750, 755, 761, 765, 770, 792, 794,813, 825, 833, 902, 908, 912: n = A,T,C or G
tnatatcgctactatagggcgaattggagctccccgcggtggcggccgaggtacattaaacctggggctaaatcctgtaaataatttcagccaagaggcgttttccccttctcattcaccaaatttcctttcccgttttaggaagtcacaaaacggtaagaatttcagtccccttccttgtctgtaactgtcaatcaaattacagaacggaaaaatgtcaagaggatccaggagacggcaccaggaagcagcagagacctgggcgatccacaaaggagcaggagaggcctgagcaggcagggatggccagaacacagccctgcactcctctaccagtgcactcagcctgcagcaagctcagcaaaggcacagtaaaaaaagtgagccatgccaatttaagtgtgtgccttctgcgtgcaaagcacaccaggggttacaaaaaccctggcgttcttcatggctaggcagctctaccttgttctttcttcccttcatcaaaagtcaacaatatcctcttatgtttttcatatagctggctgcaagtatatttttcaaatcaaatctcaaactctaaataaaaatgaagttgggtagcctttgacatgtatagaaatttacaaagggggaaaaaaaaccctgcttcaattaaaacaaaggaactttaagacagagccncttattattagaaagaattatnttncaattaaatctgcgagtggctcactattttggaagtattttagngggtantattncaactnttangcacnaaactggcaggagagatgtgangnggctcactctggttgacgnatagggaggttntcatactntagaacatttgggatttaacttttttccaatttatccactgaattccgcagccttccagggcataagcngggtcnccant

SEQ ID NO: 3380 - DNA, 903 bp, Homo sapiens
  misc_feature 2, 3, 5, 541, 549, 589, 626, 637, 655, 708, 765, 775, 786,793, 796, 812, 819, 822, 847, 851, 853, 859, 867, 872, 873,875, 882, 883, 886, 887, 892, 894, 897, 903: n = A,T,C or G
tnntngcactactatagggcgaattggagctccccgcggtggcggccgcccgggcaggtacgcggggagggggtaaagtggactggggagaacttcggaggatgttcatgtccaggagcagccccacgccctgtatggtcggtgtctagagcctcacagcaactaaggccaacccagctctcagaagaaggaatgtcaaaatgtcatgttcaattttacattcagtgcctggaatcttttcttcacaattgaaatgaaatgtgctgaaggaggtgaatccatgcattaatcttcagctcacaaaggaaatactacataagaagcaaggaacacgcaagagatctacagctctgatctccaggatagtgaaatgaggtggtgaatgataagggtataatttagccagctcagtgaataaataatcattgcaaatgaagcagtagcaccagaccacagactcaagacggacataattggattttttttgccatggcctggaaagaaaggtacctcggccgctctagaactagtggatcccccnggctgcangaattcgatatcaagcttatcgataccgtccaccctcganggggggccccggacccaactttggttcctttaatganggttaattgcncgcttggcgtaatcatgncatagctgttcctgtgtgaaattgttatccgttcacaatttcacacacatacnaacccggagcattaaagtgtaaaacctggggtcctaatgagtgaacctactccattnattgctttgncctactgcccnttttcantcnggaaacctttctgccnactcttnatnaatggccacccccgggagaggccgnttgntnttgggncttttccnttctnntnattaatnnttnnctcgncnttnggttcn

SEQ ID NO: 3381 - DNA, 631 bp, Homo sapiens
  misc_feature 83, 520, 527, 585: n = A,T,C or G
ctttcgtaataccactcactatagggcgaattggagctccaccgcggtggcggccgcccgggcaggtactaatcgttcctgtnggattacttttaaaccaggtgagaaaaattaaattatgtattctaacaaagtaatatgtgagattttgcaaatgattttatagaaatacacaaaataactctttagcttgctctgagcatttttttcttttctgatagcaactttttaacgttgtggatccacagaacttactgctttgctttctcttttggggtcataattcctctccccttggagtgtccactccatgcatgtgcacttaggatgtgtggctgtgtgtgtgtttgggaaccctcacggacacataaggttctattgtcatcaagtagaaaacctatctcattatcattataatgtcttcagatgctttctaaggttcacctcttttttaacattagaagtcagtgaatgcagctttcattataatttttaatactttaaaatgtttttgtattanctgccanaatgctcagcagcaaaagttatgactcacttctagcaagtgtggtagttctttgcttnaagcatttgggtttcatgtagcttttcttcttattttttctttggc

SEQ ID NO: 3382 - DNA, 880 bp, Homo sapiens
  misc_feature 479, 550, 590, 628, 641, 642, 645, 655, 661, 664, 666, 678,683, 696, 699, 701, 707, 737, 759, 765, 768, 778, 781, 784,786, 788, 789, 792, 802, 807, 818, 820, 822, 826, 830, 836,839, 845, 847, 853, 856, 859, 864, 871, 872, 874, 875: n = A,T,C or G
  misc_feature 877, 879, 880: n = A,T,C or G
atgtcgcttatacgactcactatagggcgaattggagctccccgcggtggcggccgcccgggcaggtactgccaattagttgcttaaaactttttgtcattgttaaaactgtttacatggctttttaaaatgggggaaaaacaatagaaacatgctgtggtgcaacgaatgaatacagtgtgattaacaacttaattttttttttcctgtttcaaacatccacctatttttagcattttgtatacccataggttaaaaatatttacatttttcttagaaaagtaacctgtttaagaacaaaaaaggccaagcgtggtggctcacatctgtaattccagtacctcggccgctctagaactagtggatcccccgggctgcaggaattcgatatcaagcttatcgataccgtcgacctcgagggggggcccggttcccagcttttgttccctttagtgagggttaattgcgcccttggcgtnatcatggtcataggctgtttcctgtgtgaaattgttatcccgctcacaattccacacaacatacgagcccnggagcattaaagtgttaagccctgggggtgcctaatgaantgagcttactcacaattaattgcgtttgcgcctaactncccgctttttcanntcnggggaaaccntttctngcnancttgcattaatnaaatncgggccaaccccnccngngaggangccggttttgcgtttttgggcgctttttcngctttcttgctcaattgaactngttgcnctnggtccttttnggnttngngnnaancggtattaanttctnctctaaaggcngntnatanccgnttttcnccnaaattngnggggtnacnccntgganaaaaacnntnnancnn

SEQ ID NO: 3383 - DNA, 943 bp, Homo sapiens
  misc_feature 10, 573, 670, 756, 770, 776, 793, 806, 811, 823, 845, 884,886, 901, 902, 905, 908, 909, 929, 938, 943: n = A,T,C or G
atacgcgcgnagtatacgactactatagggcgaattggagctccaccgcggtgggcggcccgaggtacttttttttttttttttttttttgtagagacaggagtctccctatgttgcccaggctgttcttgaactcctgggctcaagcaatcctcctgccttggcctcccaaagtgctgggattgcaggcgtgagccaccataattggaaaaagtaacccctcacgcatccatcttttctactgttcttgataggagttctgtttccctagtcagattcccccattcctcacaacaagtcccccgcttcaaagcaggcctccttccactgccctgagaaaccggcagtgggaacacgctctacttcctgcctcaagcccctaaagccgccctcctccctagctaagaccagtcattctacctgggccctaatctacgtcccacgtcctgaaggatcgcatccaatcatctgctctcctccactgtgtaggcaagggtcttcttccactggccctgctgggagagatctctcccatctgaaatgccctttgatccttatttctctccagtttgntcctcaacttttttaaccactgggatctgggttccaattctcaacttttgcacctaaactggggcttcacaagaaccaaatgtaccttgcccgggcnggccgtttttagaaactaagtgggatcccccggggctggcaggaattcgataattaaggcttattcgatacccgtcgaccctcgangggggggccccggnacccancttttgttccctttaanggagggttaaatngcgcncctgggggaaanaatgggcataagtggttcctgngtgaaaattggtatccgttaaaaattccaaaaaaaaacnancccgggagcataaanngtnaannccggggggcctaatgagggncttaccccnattan

SEQ ID NO: 3384 - DNA, 900 bp, Homo sapiens
  misc_feature 573, 678, 703, 705, 708, 720, 789, 791, 803, 808, 814, 816,823, 825, 848, 850, 851, 853, 857, 858, 859, 860, 863, 868,869, 871, 872, 879, 881, 882, 884, 885, 887, 890, 891, 892,893, 894, 897, 898: n = A,T,C or G
tcgcgactactatagggcgaattggagctccccgcggtggcggcccgaggtacctctcataaactttgttcattcagccacttgaaataagccacgtgggttatgtgccacgcaaaatttcagtaatgggttttgggagtgtttagatagcaacaacttcatagactgaaccttttggttttttttctttctctccaactcagaggttaaaaattaacctgaaaaatcaatgctgcaatatgaatgcgctgtatgtttcttgcatggacttgcagacactctgtaacggtgtttccagtctccagcagttcatattggaaggtgagctttcacatggacaagccctttgcgttgccaagtagtagtgatattacaagtttgaaagacatttagatgataattccaaaggccctcttatctccaaatccatcagaagctacctataatttcagtgcaatgagtgctgggcataggtggccattcaagtgagtgagtacctgcccgggcggccgctctagaactagtggatcccccgggctgcaaggaattcgatatcaagcttatcgatccgcnacctcgagggggggcccggtcccagcttttggtccctttagtgagggttaattgccgcttggccgtaatcatgggcatagctggttcctgtgggaaattgttatncgcttacaattccacacaacatacnanccnggagcataaagngtaaacctgggggtgcctaatgagtgaactaactcacattaattgggtgcgctactggcccctttcaancngggaaaccggcnggccnctggantnatgaatngnccacccccgggggaggcggttgngnntngggnnnnttncgttnntnntaatgantnntnncnggnnnnnggnngg

SEQ ID NO: 3385 - DNA, 920 bp, Homo sapiens
  misc_feature 1, 2, 3, 6, 504, 565, 608, 610, 725, 732, 742, 774, 779,780, 791, 798, 799, 807, 810, 812, 820, 821, 830, 842, 860,864, 867, 871, 879, 882, 898, 905, 911: n = A,T,C or G
nnntangcgccgcgtaatacgactactatagggcgaattggagctccaccgcggtggcggcccgaggtactcagaggtttcctggctccagccattgctctcgacctcacagctacccattgggccaagccacctccagctctcacctgacttgctgcagtggtctcccaagaggtctctccactcagtccctgccaccttcagcctgttctcagtggagggggccagagtgaccctgttaaaacatgagacctttcacgtccaacctcagctgagacttccccatggttcctatcacactcagggtcaaagtgagagtccctaagatgaaacacaagtagggagaatgcccttctcagctggactgggacagctccagggtatccctattgtccttgtacctgcccgggcggccgctctagaactagtggatcccccgggctgcaggaattcgatatcaagcttatcgataccgtcgacctcgagggggggcccggtacccancttttgttccctttagtgagggttaattgcgcgcttggcgtaatcatggcatagctgtttnctgtgtgaaattggtatccgctcacaattccacacaacatacnanccgggagcataaaagtgtaaaacctggggtgcctaatgagtgagctaactcacattaattgcgttgcgcttcactggccccttttcaatcgggaaacctgtctgccacttgattnatgaatnggccaacccncggggagaggcgggttggcgttttgggcgctnttccnnttcttggttantgaactnnttggcctnggncnttcggttnngggagcggnttaacttaattnaaagggggaataccggtnttcncanaatnagggggtnacnccgggaaaaaattttnaccaaangccccnaaaggccct

SEQ ID NO: 3386 - DNA, 879 bp, Homo sapiens
  misc_feature 412, 512, 545, 557, 598, 604, 610, 631, 632, 635, 640, 649,651, 663, 664, 668, 678, 710, 711, 736, 750, 755, 759, 763,767, 775, 790, 794, 796, 801, 806, 814, 815, 826, 840, 842,848, 861, 862, 876: n = A,T,C or G
gactcactatagggcgaattggagctccaccgcggtggcggccgcccgggcaggtacgcgggactataaaaaataacatgttcatagttttaaaattttaaccagtgaagaatagtataaaacgaaaaattagtcttctgtcctgctaatatttatgctcattctgtttcttacatatgcttacaaaaatgttcttgcatatataaatacacgtctttgtctattttttatgtttatgaaactaggatcatacttaagattctgctttttcttttttcaatatatctttgacatcttttttttttttttttgaggcggggtctcgccctgtcacccaggttggagtgcagtgatgggatcccaactcactgcaacctctgccttcccagttcaagtgattctcctgcctcantctcccgagtggcttggactgcagatgtgggccaccatgccctgctaaatggtttgtacctcggccgctctagaactagtggatcccccggggctggcangaaattcggatatcaagctttatcggataccgnccaccctcggangggggggggcccggtaccccaacctttttggttccctttangtggangggttnaattggcgccgcttgggccgnnaantcatngggcaatangntgggttccctgnngtgnaaatggttantccggttcacaaatttcccacaacattacganncccgggagccataaaagggtaaaanccctggggggggcntaatngggnggancttnaccccaanttaaattggggttgngccnanctggnccggnttttcaannggggaaaaccntgtcgtgccccctngnattaantgaatcgggccanncccccggggggganggg

SEQ ID NO: 3387 - DNA, 861 bp, Homo sapiens
  misc_feature 3, 4, 5, 6, 7, 8, 9, 10, 633, 644, 645, 675, 701, 714, 747,770, 773, 778, 800, 810, 814, 834, 840, 841, 859: n = A,T,C or G
tgnnnnnnnnccccgtaatacgactcactatagggcgaattggagctccccgcggtggcggcccgaggtcgtagacaagaggtcctccatcaaccttctcaggtggaagtcttcttttagaaggatgtttgtaaacccttttgcatcaggaatgacagtccaattcttttctgtcagttcttgttccagaacaattagggtgagtcatacggagtaaccttgccataaaaaatggaattcgtatgggaattgtatgaaggccttcttactgaaagtcattgagatcctttagatgatgtgtttgtgtattcttatgatttaaatacatgcagaaatgaaaggatgcaacgcagtgctagaaagcaatttctctctgcgtttcactcagggtttcctgtagccactgcttctctccatccatggacattctccctcttctggtgagtcgttcccctctatatccctcagagaaaattctgaagacagggaatgatttgactgctttagggaattccctctgccttcgtcactgtgttgggcagaagactttcatgcctgaacatctcaaaaagaaaagtcactggccagcctgcacgcaagccatttttaaaccagtgcccgatgtttgttgcngcaatgaaccnngccattgccataaaatgggccaagttcttntttcacaaaaggcaacccattatgtnccttttgctaganggccacaaagccaggggattggcaatgttgccncattcttccacaagggattctanagnttgcntttttttttaaaaaacaggttnaaaaccaaanggcnttcattgactttggaaactntttttnnaatgaaacaaaagggagnct

SEQ ID NO: 3388 - DNA, 891 bp, Homo sapiens
  misc_feature 4, 5, 6, 7, 8, 9, 10, 11, 13, 15, 282, 304, 339, 346, 368,373, 399, 408, 416, 422, 439, 499, 502, 547, 560, 578, 633,635, 646, 647, 651, 665, 676, 678, 692, 694, 696, 706, 707,718, 719, 727, 729, 737, 759, 766, 772, 785, 794, 798: n = A,T,C or G
  misc_feature 800, 804, 808, 810, 818, 819, 820, 823, 825, 835, 843: n = A,T,C or G
gtgnnnnnnnncncncgtaatacgactcactataggggcgaattggagctccaccgcggtggcggcccgcccgggcaggtacatcccactgagaaccactgagacagatcctgtatggccttgtggtcataaatatgattttgttctaagtgtaaggaagaagccagtagagagctataaacagaggaaatggcatattgcctatttctagaaggccatgatctaatttcctatttttttttttttttgaaatggagtcttgctctgtggtccaggctggantgcaatggtgcgatcttggctnactgcaacctccacctcctgggttcaagtgattcnctgtatnaaaaaaaaaaaagtacctcggncgctntagaactagtggatcccccgggctgnaggaattcnatatcaancttatngatacccgtcgaccttnagggggggcccggtacccaacttttgttccctttaatgagggttaattgcgcgcctggcntanatcatgggtcataacttggttctggtgtgaaatttggtattccgnttaacaaattccncaaaacattacgagcccngggagcctttaaaatgttaaacccctggggtggccttattgagtgaacctaactnanaattaatttgnntttncccttaacttgccngcttttcaaancngggaaacccagggngngncaaacttggnnttaaataaatnngcccaacncncccggganaaaggcggttttggttatttgnggggctntttccnatttcttggatanattaaattngttngncttnggtngnttggtttnnnggnancccgggtttnccttactnaaaaggcgggaaattcgggttttccaaaaaaaaaaggggggaaaccct

SEQ ID NO: 3389 - DNA, 921 bp, Homo sapiens
  misc_feature 1, 2, 3, 4, 717, 726, 731, 756, 797, 859, 864, 873, 882,888, 902, 908: n = A,T,C or G
nnnnccgcgactactatagggcgaattggagctccccgcggtggcggccgcccgggcaggtaccccaaaaccaggggctgcagctccagcaattgggaaggccaagttttcttgcacgctccccagaaaaggggccaagtccatggggctgagcagtgatagactgcagacctcaccaccactgaaccttgtaggataaggcccactagcctgggatgctagtgaggccaccctagtcctcctgagttctccagctgggagcagctctacacttctccggcatgcagctcccaaagagagaggcagtccacctttttgctgtctcgcaaccctccctcctgctgctctcaggcttgggagggtgcacagcaattagggactatcacagaaccccagcacagtgcatctggtgaacttaaaaaaatcaacaagtgaaaaacaaacaatcccatttaaacgtaccagcagaggttcagctttccaggaatctcatcatgatccatactactgacacagacctttgtcacctgaagcattcttaaaataaggagactgacattaaacaggacaattgtgaactccactttgtaagcatcatacatatcttacaactcattctgaaagactcctttattcttgctcttccaaaaagctactgtgtttaagtcatgctcactgcactcacaagagaaaaaagagtaagtggcatatttgcangggttgatnggtancaagaacatttttacttttttcctncatgtttgttctgcaacattttcattggtgcatgcttttgnagaatttttaaggttgacctggccgttttaaaactagtggatcccccggctggaggaattcnatttnaactttttngatcccgcnaccttnagggggggccgggncccacntttgtttcttttt

SEQ ID NO: 3390 - DNA, 959 bp, Homo sapiens
  misc_feature 2, 3, 12, 13, 14, 18, 624, 627, 667, 673, 675, 685, 726,737, 738, 740, 744, 749, 752, 759, 762, 770, 787, 803, 813,828, 834, 841, 869, 871, 872, 884, 908, 922, 929, 939, 943,947, 955, 956, 958: n = A,T,C or G
tnnatacgcgannngtantacgactcactatagggcgaattggagctccaccgcggtggcgggcccgcccgggcaggtactttttttttttttttgcacctccaaaccagctatggtatgtgggagtgcaaagcctttgacaacacagagcttaggagcatatgccttaccactgttcttggcagccttggcaatgtgtctagtgagaggaagggggacaggagggatggctttcgtcctttgggtaagaactgtgcccagccagaggggaacatcatggcttctgcaagcagagtccaagccccgctgtttatagttcagccataatggtacctcggccgctctagaactagtggatcccccgggctgcaggaattcgatatcaagcttatcgataccgtcgacctcgagggggggcccggtacccagcttttgttccctttagtgagggttaattgcgcgcttggcgtaatcatggtcatagctgtttcctgtgtgaaattgttatccgctcacaattccacacaacatacgagcccgggagcataaagtgtaaagcctggggtgcctaatgagtgagctaacttacatttaattgcgttgcgcttactgcccgcttttcantcnggaaaccttgtcctgccaacctgcatttaatgaaatcggncaaccncnccggggagangcgggttttgcgtatttggggcgctttttccctttccttgnttaactgactnngnttgnccttnggnccgttcnggnttgcgggnaaccggatttaagcttnattcaaaaggcggganataccggttnttccacagaaattangggggntaacccnaggaaaaaaacattttaaccaaaaaggncnncaaaaaggcccngaacccttaaaaaggcccctttgntggcgtttttcatnggtcccncccccttgcngggnttanaaaaattnncnt

SEQ ID NO: 3391 - DNA, 863 bp, Homo sapiens
  misc_feature 486, 501, 502, 532, 545, 556, 563, 564, 567, 569, 576, 583,586, 592, 593, 595, 599, 610, 622, 628, 630, 648, 652, 654,659, 663, 666, 672, 674, 676, 682, 686, 690, 692, 693, 696,709, 716, 722, 743, 747, 758, 759, 768, 771, 783, 786: n = A,T,C or G
  misc_feature 803, 817, 827, 830, 835, 839, 840, 845, 846, 848, 849, 850,852, 860, 863: n = A,T,C or G
cgaattggagctccacccgcggtggcggccgcccgggcaggtacccagggaacaaatgctactgggactccacacctacctaagaagcagctctacccagactccacatggctctctgttttggtctggagaccccagctggggtatctcctgagcccagggattcaaaggttcgtggcagaaatatgcatcccacgggactctcactcactcaccattttcttgtagggggattcccctgggtctgtgccactcctgggtgaatggttgatctgtctcactcttctccgtgatccgaaggtcacactatgtcactgatgaatccttatgtgtccacctggatgttccggttgaagagctagtgtctcaccactctttctgctatttgtgaagagtggcacacactagcttgttttagtcaaccattcttggccccaccctaaacttactttttctcaaagtaatccaaagacccagaaagggatntgcttttacaaaganncagatccccccaaatggtaatgagttcaantgaaaaaggtggnaagccttaaancccaggnnaangnccttttntttgcancantaaaannanaacnttggtaccctncggggccggttntaaaananaagggaatcccccggggngtgnanggaantttngantttatngngnttatantttnccgntnnccntttaagggggggncccggtncccacnttttggtttcccttttagtgngggnttaattgcccnncttgggcgnaantcatgggcaaanctnggttcctgggggaaaanggttttccgtttcnaattttcccnaancatanccgnnccggnnannntnaatggtanaan

SEQ ID NO: 3392 - DNA, 958 bp, Homo sapiens
  misc_feature 4, 8, 9, 569, 578, 580, 590, 637, 654, 671, 691, 693, 707,730, 745, 782, 827, 830, 841, 847, 867, 875, 891, 899, 917,925, 927, 942, 957: n = A,T,C or G
atanggtnnccgtatactactactatagggcgaattggagctcccccgcggtggcggcccgaggtaccctgctgaaagattatttctaacaggcttgtagagaaacgtcggttcatgtaaattagaaattatggggccactttgccattcttcacacctgcaatgaacaggtgtttatctgcagttctgacttatctcttgaactccatttgcatgttatagtgggatgcagctgatgccctgtccagatcttcttcaggccactacatctatatatgcattcatattccagtggctgtgagtgttggctgttggttgacagaggagctgcatcctcctggaggaaactgaactcagctgatgaaagccacctggtcctggaggtgaagcatcttccaaatgacagcctgcagtcaatgactgatgaatatgacttcattgcctcatgacaggacctactctggggtatagatcatgcttctaagctcctcctggggtcctgctgaggctcaatggccagcttgaaaccatacccttgctcacatactttccctctcttttcctttttnccttgcttncntagaagattncctcctgcaatggctttcctcaaaaaaagcatttttcataaaccaancctcattgttaagcctnttgcttccacaagaaanccaatctgaagtttaagcancntggtttaacttaancatggtcccaacattaaaaatcnttggtttctttttantcccctggcccctgaaaggttcttcctttggccggcntttctttatttcaattggaaggtaaccaccccaagttttcaaggnggnaaaataaaaanaaaccncccctggattcctttctttncaaaggantaattaaaatctaacngggttttnccaatttttttttaaaanccaacctngnctaaaaacctttcantggggttttaaaatnt

SEQ ID NO: 3393 - DNA, 908 bp, Homo sapiens
  misc_feature 658, 682, 755, 758, 785, 797, 803, 812, 818, 850, 866, 878,899, 904: n = A,T,C or G
acgcgcgcgcgtatacgactcactatagggcgaattggagctccccgcggtggcggcccgaggtacttccatcaagtcgagggagtaacgcaaactagaatagtagccatctattaaggatagttctgaggtttggaatttgtaactgatttttaggagctacgacatgaatatcatatcaggtagaaatactcagagtgatcaccttttatgaaagttagttctatctttcatgtctaggaaaatataacagtgaatgtttgctttttgtatgttttgtctccaagcagaggaaactgacagttttatgttttaggtgccgaaagttgtttttggctagacagttccagagttaatcactgggatgctaacttgaatttttgtctttaaaatgttttagatttttaaaacgaaatatgcttccgttatttccaaactgacaccttgtgttctggattaagtttttagagaaatgttttccaaattctcttggattacttgaagtccattgattttgaaatatttagtttaagtttttttcttttaaagcttatcagaaagtagaggaagtacctgcccgggccggccgctctagaactagtggatcccccgggctgcaggaattcgatatcaagcttatcgatccgtcgacctcganggggggccccggtcccacttttgntcctttaatgaggggtaattgcgcgcttggcgtaatcatgggcataactggttcctggggggaaaatggtatncgntcacaattccacacaacatacgagccnggagcctaaagngtaagnccggggggnctaaanaggggacctaactccattaattgcgtgcctcnttgccccttttcagcnggaaaaccgccngccacttcattatgaatcggncaccnccgg

SEQ ID NO: 3394 - DNA, 937 bp, Homo sapiens
  misc_feature 2, 377, 560, 573, 672, 743, 751, 772, 828, 849, 853, 858,865, 867, 872, 879, 880, 908, 917, 936: n = A,T,C or G
ancgcgactactatagggcgaattggagctcccccgcggtggcggccgcccgggcaggtacaatgggtgttcaaaatttctcttgtagggttgaaaattttcaaaataaaaagctggggataagatgatttgggtgggtctggccagaaataataagagcaggattctcagctctccttttttggccactgtgcttctgcagtgggactcaaaaagaagtacctcggccgctctagaactagtggatcccccgggctgcaggaattcgatatcaagcttatcgataccgtcgacctcgagggggggcccggtacccagcttttgttccctttagtgagggttaattgcgcgcttggcgtaatcatggtcatagctgnttcctgtgtgaaattgttatccgctcacaattccacacaacatacgagccgggagcataaagtgtaaagcctggggtgcctaatgaagtgagctaactcacattaattgcgttgcgctcactggccgcttttcaagtccgggaaacctgtcgtgccagctgcattaatgaatcggccaacgcnccggggagaggcnggttgcgtattggggcgctctttcgcttcctcgctcactgactcgcttgcgctcggtccgttcggcttgcggggaagcgggattcagcttcacttaaangcgggaattccggttatccacaagaaatcagggggattaccccaggaaaaaacttgttgaccaaaagggcnaccaaaanggccagggaacccgtaaaaanggccccggttgctggcgttttttccataaggctccgcccccctgaccagccataanaaaaatcgacccttaagtcanaagnggggnaaccccncnggatnttaagannccaggcggttcccctggaaactcccttnggccttttntgttccaaccttgccgttnt

SEQ ID NO: 3395 - DNA, 900 bp, Homo sapiens
  misc_feature 623, 631, 683, 698, 760, 779, 793, 796, 801, 816, 822, 840,873, 876, 879, 886: n = A,T,C or G
cgcgactcactatagggcgaattggagctccccgcggtggcggcccgaggtacttaatgaaacattctcacttatgttatgctacttgagactcagaacaactgtgggagcttgggacagatgacttctcattttccagatgaagaagttcgaatccagagaagtctaggataaataagaaggaaaggaagaaggaataggaagtgagaaagagggaaaaagaaaaaagtgtaagagctagtagagaagcagttagagtccttccaaggtcctgagcatgtttagtttaggatggagggaggggagttctcagaagagaaagcagcaactccacaccataggttgaggtgggtgggcagaagaggacatgcaggatatgactcctcctctccagtaagcactgagcgactctactgtcctcttgccttcttctgctcctttgctctgggtcaccagaagtggactcttgttccagcctcccaccctgacaaggagctcgtaatcatctcctccttttccccacgttcagaagtccaatctctgaacaaggtcagaggttttcaaatggtaatgtgtctaaaactcactcggggatcttggtaaaattcaaaagtttcattcancaggtctngggagaagaataaaacttctggattttaacagaccccccaaggtccttgccnggccggccgttttanactagtggatcccccggctgcaggaattcgatatcaagcctatcgatcccgccaacctcgangggggggcccgtccccacntttgttcccttaangangggtnattgccccctggcgnaacatnggcatagtggttcctggngaaatgtttcccttacaattcccccacatccanccnggncctaaangtaaaccgggggct

SEQ ID NO: 3396 - DNA, 920 bp, Homo sapiens
  misc_feature 12, 13, 17, 45, 53, 76, 625, 636, 657, 663, 664, 669, 703,707, 708, 723, 745, 750, 754, 755, 756, 760, 772, 790, 798,799, 816, 820, 829, 835, 839, 848, 851, 855, 856, 857, 867,870, 871, 875, 876, 878, 883, 888, 890, 895, 919: n = A,T,C or G
aatttaaacgcnntttngaactatccggcgaattggattttcccncggtggcngccgcccgggcaggtacgagcantattgcttatcagaacacaccaacagtctttttttaatattcgcttttcccctttggttcagccgagcctgctgacagatcattcaaattcaattgttttatgtctaagccgaacagctaattaaagtagggatgattaacctgactggcagtgccgctctccctctcgcgctctctctccttctccttttctctctctctccctcctgttccaatcaagtctttttctcacacactctctctctccgtctctcctctctctccctctctctctctctctcccccccctctctctcttccccctctctcttcctctctctcagtctctctctccctccctcggttggtgtctctctctctctctctctctctgtctcttgctctactggttttttttcctctctctctcctaaacgtggtctgcttgctgatggcagaatggcactcggagatttgtgcattgtgtctggtttcctacgggcaggctgacccaagtgcctccagggacttatcaatagaccactcagaagagaccagacaggaagggangaagaagggtngggggagaaaaaaaaaaatcnatttcnngaatngaaggggctccgaaccattttttttttaaagaantatnnggaacttgggaagangggggacaaaaaaaggtttttnaaaanaggnnngggnggaggttctaanaaatttggaaggaaacanttccctgnnttgggaaaaaggaaaantccngattgatancattcnaccnaggtttganaanggtnnntcccccttanaanngggnngnacccnaaatngnaaaancctttttttttttttaggaaaacng

SEQ ID NO: 3397 - DNA, 996 bp, Homo sapiens
  misc_feature 2, 3, 19, 21, 232, 260, 266, 314, 316, 325, 335, 388, 393,401, 408, 409, 411, 422, 426, 428, 449, 450, 451, 452, 456,459, 464, 470, 475, 476, 479, 481, 490, 494, 495, 498, 500,515, 516, 519, 527, 533, 535, 537, 554, 555, 572, 576: n = A,T,C or G
  misc_feature 578, 583, 584, 600, 608, 609, 614, 616, 620, 632, 633, 634,636, 645, 653, 660, 661, 662, 664, 665, 668, 672, 673, 677,683, 685, 687, 688, 691, 693, 704, 708, 709, 717, 721, 724,725, 729, 738, 739, 745, 751, 754, 760, 761, 767, 771: n = A,T,C or G
  misc_feature 774, 776, 777, 786, 787, 792, 794, 798, 808, 809, 810, 817,818, 825, 834, 837, 838, 843, 844, 848, 849, 863, 864, 867,868, 869, 873, 876, 878, 882, 883, 885, 887, 896, 906, 911,912, 915, 916, 917, 918, 921, 923, 927, 931, 932, 936: n = A,T,C or G
  misc_feature 939, 942, 945, 955, 968, 971, 981: n = A,T,C or G
tnnaaggtgactactatantncgactcactatatggcgaattgggagctccccgcggtggcggcccgcccgggcaggtactgaactgggagggttttagtctgatagccacaattttgacctaggcaggaagctttacagcttgaggcagtttcatggtctgaagacaaacttcttgtgacttgctgccggtgttggactgcaggagagagcctcactgggtcaggagcacnagaacaaagtggatcccactaccacatnccaccnctcctgtttcataggcagatcatgggaccaggactactgagagctccntngccctcccnatcattatcnaatagccctaaaacttttcccgattaacaaaggtcaagcataaactctattgncaccnccacagcntggttcnnanttttaagtctncctncntgtccttaagggttgatctannnnagtnccngttanaacatnagggnntantnaaagagcanatannttngntaaaggaggcagagnnttngaagttgnctttantnancatcatgtgaccacgcnnaccccaagctttttcangatngnctttnnatccagataccccacnccattttnnatgcncncccngtcatggttccnnncnttttggggnatctgtanattttgnnntnnttnacanntccnggtttnanannaantnttctagttggnatannttacctantttngtnnaatnttcctctcnntaatanagtgtncanttcttnnaagatncctnttncnnccttccttnnttttntncatnctattatacnnncttaatnnatttatnattataaanatnncatannctannagtccttattattnntannnacantantnattnnananttatcttantctcgccatncttannctnnnnttntntatntttnnttcnctnttnagncacccctccnccggccccccacnccntcttttttcncccccccccccccct

SEQ ID NO: 3398 - DNA, 940 bp, Homo sapiens
  misc_feature 2, 3, 7, 18, 77, 81, 125, 208, 239, 345, 359, 448, 501, 524,526, 559, 565, 580, 588, 613, 621, 630, 631, 635, 656, 662,665, 673, 689, 702, 706, 716, 733, 746, 772, 778, 786, 789,797, 798, 806, 816, 828, 841, 842, 845, 849, 855: n = A,T,C or G
  misc_feature 859, 866, 868, 883, 885, 888, 901, 905, 908, 917, 918, 923: n = A,T,C or G
tnnatanggttacttatncgactactatagggcgaattggagctcccccgcggtggcggcccgcccgggcaggtacncggnacacttctctgatgcctcttgggcaattgctctgttttctgttnccttggaactatgtatatacctctactatagctatcacattttattgtaactttttttcctcaccagcctatcgagcggccgnccgggcaggtactgtccggacataccccttncaagaagaagcatctctttggcccagatgtttgtaattaagggtctaacaaataattcacctgaaatccatgttgtgtgtagtggtgtagccactacatggacagngctgcacccatggncacaaagaagcaaaacagcgcattccaaccagcactcccctgagggattctctcctggatgtggtggaaagccacaggagctgcctctnggccaggaactggagtcccagtggtggtgcaaagaagtgtattctttttccancagagacagtaccaggggtcaananggggccagcttaggacacacagacccagctggnaactcnagcctgccttctggnacctccgnccgttctagaactagtgggatcccncgggctgnaagaattcnntatnaaagcttatcgatacccgtcnaccttnganggggggcncggtacccaagctttnggttccctttaantgangggtaattgngccccttggcgtaaatnatggtcatagctnttttcctgtgtgaaattttaattcgnttacantttcccancancatacgannccgggagnataaaagtgnaaagcccggggngcctaatgagtgnngcnaacncccatnaatngggttgngnttaattgccgttttnangcngggaaaactttcnggcnaantggattatnnaattngccacccgccggggggg

SEQ ID NO: 3399 - DNA, 861 bp, Homo sapiens
  misc_feature 2, 3, 7, 9, 10, 15, 20, 22, 23, 36, 54, 278, 306, 451, 470,505, 578, 596, 602, 610, 615, 626, 668, 678, 693, 732, 739,753, 777, 792, 794, 800, 804, 810, 821, 842, 844, 852: n = A,T,C or G
tnntcgncnnctttngactncnntgctccccgcggnggcggccgaggtacagancttaaacaccactatttgttgagatgaaaaaaagcatatataggaagccttcagaatgaaatggtcaagggtgagtttacacagatagatagatttaggtctcttccttttgctttgtgaaagcatctagtgttttaggtgtcagagagggagatatccttacaaagcagagattatcattacaggtttacatttcttacaaagagtttcaaaataaacaggtnaatgccaaaaacatatattttggagacngattaattcactagttggtctattcaacttaacttgtttcctaatgagattaaattcatgcacaaataaccaaaccaaaaattaaaccaaaagaatactcaccagaaaggatgtcctttacaagaacaggatcccccaaaatgtnagaagttccttgaaaaggngggagctcaaaccaagagaagacttattctcgcancataaaagacaacttgtacctgcccggctgcagggattcgatatcaaacttatcgatcccgtcgaccctcgangggggggcccggtcccancttttnttcctttnatgangggttattgcnccctggcgtatcatggcatactggtttctgggtgaaatggtntccggtgacnattcccaccacattncagcccggtgcattaaagggtaaagccggggtgcctatnagtggcntaccactttattgngttgggcttattggccgttttccngtcgggaaaactttngngccagnttanttattnatcccccaccncccgggagagggggtttgccnantgggcgcncttcccctt

SEQ ID NO: 3400 - DNA, 905 bp, Homo sapiens
  misc_feature 1, 2, 3, 6, 20, 25, 27, 31, 32, 522, 531, 666, 679, 714,741, 758, 761, 762, 768, 769, 776, 781, 784, 786, 809, 826,845, 859, 867, 870, 884, 889, 893, 894, 897, 898, 905: n = A,T,C or G
nnnatngcactactatacgnctaantntagnncgaaattggagctccacccgcggtggcggcccgagagtctcccatggtgactgtggcgggagatggaaccatgctggatgtggagggtttgttctacctaggaggcctgccctcccagtacctcggcccgctctagaactagtggatcccccgggctgcaggaattcgatatcaagcttatcgataccgtcgacctcgagggggggcccggtacccagcttttgttccctttagtgagggttaattgcgcgcttggcgtaatcatggtcatagctgtttcctgtgtgaaattgttatccgctcacaattccacacaacatacgagccgggagcataaagtgtaaagcctggggtgcctaatgagtgagctaactcacattaattgcgttgcgctcactgcccgctttcagtcgggaaacctgtcgtgccagctgcattaatgaatcggccaacgcgcggggagaggcggtttgcgtattgggcgctcttncgcttcctngctactgactcgctgcgctcggtcgttcggcttgcggcgaagcggtatagcttactcaaaggcggtaataccggtattcacagaatcaaggggataacccaaggaaagaacatgtgaaccaaaaggcaaccaaanggccggaacccgnaaaaaggccccgttgctggcgtttttcaaaagctncccccccttgccagcattaaaaaaatnaaccttaaataaaaggnggnnaaaccnncaggatnttaanaancnagcgtttcccctggaacttcttnggcccttttttttccancttgccgttaccggaaacnttcccccttttccnttgggaanggngggccttttaaaanttacnctgnnggnnttaaatn

SEQ ID NO: 3401 - DNA, 868 bp, Homo sapiens
  misc_feature 7, 34, 434, 449, 538, 581, 587, 590, 594, 595, 596, 599,600, 601, 602, 603, 605, 607, 608, 609, 611, 612, 613, 616,617, 618, 622, 624, 625, 627, 630, 631, 635, 636, 637, 638,639, 640, 641, 642, 643, 644, 645, 646, 647, 648, 649: n = A,T,C or G
  misc_feature 650, 651, 652, 653, 654, 655, 660, 661, 663, 665, 666, 667,671, 673, 674, 676, 677, 678, 679, 680, 681, 682, 683, 684,685, 686, 687, 688, 689, 690, 691, 692, 693, 694, 695, 696,697, 698, 699, 700, 701, 702, 704, 705, 706, 708, 709: n = A,T,C or G
  misc_feature 710, 711, 712, 713, 717, 719, 720, 721, 722, 723, 724, 725,726, 727, 728, 729, 730, 731, 732, 734, 735, 736, 737, 740,742, 743, 744, 745, 746, 747, 749, 750, 751, 754, 755, 756,757, 758, 759, 760, 761, 762, 763, 764, 765, 766, 767: n = A,T,C or G
  misc_feature 768, 777, 778, 779, 780, 781, 782, 784, 786, 787, 790, 791,792, 795, 798, 799, 800, 801, 802, 803, 804, 806, 807, 808,809, 810, 812, 813, 814, 815, 816, 818, 820, 821, 822, 823,824, 825, 826, 827, 828, 829, 830, 831, 832, 833, 834: n = A,T,C or G
  misc_feature 835, 836, 837, 838, 839, 840, 841, 842, 843, 844, 845, 846,847, 848, 849, 850, 852, 853, 854, 855, 856, 857, 858, 861,862, 866, 867: n = A,T,C or G
gtactcncttatgctactcactatacggcgaatnggagctccaccgcggtggcggcccgcccgggcaggtactgaaaatatgaaaattgcttaggccaaagaatgggcttttcaatagcacactgcaaaactgggcccaagtatttaaaacatctctaaaaaatatctaggttggcaggtttttatccctagttttaacagtctgaaagagggttcgttactgagcactggaagtgatgaagacagagtagctacaacataggggctggtaggcagcagagcctcaccaacagccttaatttgtgtggtgtcttcacagggcaaccctgggaacgatggtcccccaggtcgcgatggtcaacccggacacaagggagagcgcggttaccctggcaatattggtcccgttggtgctgcaagtgcacctggtcctnatggccccgtgggtnctgctggcaaacatggaaaccgtggtgaaactgtaagtttgtgaataccaatcccttcaatgcaacattcttcgtggggctttactttntgactttcccacactttgggatggtggaagaattgggaagggntttttnggncctnnnttnnnnngngnnntnnnttnnnatgngnnanggnncctnnnnnnnnnnnnnnnnnnnnnggggnntntnnncccntnngnnnnnnnnnnnnnnnnnnnnnnnnnnntnnnannnnnngatncnnnnnnnnnnnnnnannnnttntnnnnnntnnnttnnnnnnnnnnnnnnnggggggccnnnnnncnannttnnntcnttnnnnnnngnnnnntnnnnncntnnnnnnnnnnnnnnnnnnnnnnnnnnnnnnnannnnnnnccnncccnnc

SEQ ID NO: 3402 - DNA, 883 bp, Homo sapiens
  misc_feature 15, 29, 37, 387, 500, 553, 582, 629, 645, 655, 683, 686,696, 698, 725, 738, 741, 742, 743, 750, 753, 755, 760, 763,768, 776, 777, 782, 785, 786, 788, 789, 790, 809, 812, 815,818, 829, 830, 832, 833, 842, 846, 847, 848, 850, 856: n = A,T,C or G
  misc_feature 864, 865, 871, 875, 877, 878, 880, 882, 883: n = A,T,C or G
atatgtttgccgtanacgactcactatantgcgaatnggagctccaccgcggtggcggcccgcccgggcaggtaccaccacacccaaagcctggctcagaatgaattcagcacccattccttgctttttaaacctcaaaagttcccgactcagtgaaaggcttccattttgctatcctcttctctgtctgcattttactctgtaatttattgacatagaagaggcctcgtgcaggctttcattgcattagtccacttggaagtcttttctccaatccatttgacctcaagctgcttttttgctgctgctgcatgtaagctagactgatccagctcaccttatgctgcttttgaaggctgaaaagccctgtgaccaaatgtttagcangctgttcaaacagtggactgatggtttgatctaaagtccgtttcctggcttacacacacctcccattccccaagggcaaaggtggaaaacccagcaaggttacataaagttgntggaacaagcccaaatggctggcttgctagcccaggcaaactcgctttggaanactttggggatgcctggactggccaatgnaacatgggctcattttttaatgagaaccaatcattttggtcaactgnattaaatccaataagnggagtgagancaagggctggggatcccctaaacatggntgntgggtttccntntggggcaaggacaaggggtgttttggnatggggagggggnctnnnctactgnttngnatttnccnaaacngaaaggannggccnggnntnnnaaaaaggaattttccattnttnctnggnccgttttaaannannggatccccnggcnnnanggaatnatttaaannttttanaccngnnancnn

SEQ ID NO: 3403 - DNA, 879 bp, Homo sapiens
  misc_feature 3, 13, 17, 623, 632, 641, 644, 662, 713, 718, 726, 737, 751,758, 779, 792, 795, 801, 828, 829, 843, 853, 860, 870, 871,873, 876: n = A,T,C or G
tangcgactcctntatncgactcactatagggcgaattggagctccccgcggtggcggcccgaggtacgcgggattccccaacaagatgaagtcaaaattccttaattatagaatctaggagggctgtgatttctctgagtaatggattatagcagaagcggtgctaagtcgtatacaagtctgggtaataaaagatgatgcaacttccactttgttcactaaaacatttacacttggagctctgagccactgcattagtagtttgactactatgaggccatagccttctggcaatgctaagctgcacagaaaggcctcaggtacctgcccgggcggccgctctagaactagtggatcccccgggctgcaggaattcgatatcaagcttatcgatacccgtcgacctcgagggggggcccggtcccaacttttgttccctttagtgagggttaattgcgcgcttggcgtaatcatggtcatagctggttcctgtgtgaaaatggtatcccgctcacaattccccacaacataccaaccgggagcataaaagtggaaagcctggggtgcctaatgagtgagctaactcacattaattggcgttgccctactgcccccttttcantcgggaaanctgtcgtgncanctgcattaatgaatcggnccaccccccggggagaggcggttggcgtatttgggcgcttttccctttctngttantgacttgnttggcttcggncttccggttggggnaaacggnttaactcacttcaaagggggnaatccggttttcnccnaattcnggggatacccccggaaaaacctttttnnccaaaagggccccnaaaaggcccngaacctnaaaaaggccnngntgntgg

SEQ ID NO: 3404 - DNA, 882 bp, Homo sapiens
  misc_feature 2, 3, 10, 11, 546, 556, 647, 655, 681, 719, 721, 729, 735,742, 748, 773, 804, 809, 827, 846, 876, 879: n = A,T,C or G
tnntacgcgnnccgtatcgactcactatagggcgaattggagctccccgcggtggcggcccgcccgggcaggtactaattagatctgcccatccgttacttggcagaggaatgggctggaaatgggaaagggtcaacctttcacctgctggacactcaaggtgagaagaaaaaggaaaggggccaagaactaactgtctggctagacagtaatcatggactcaggctttaggtatttgatcttttagaattccaatttctgaaaaataaaggtgttatatgtaattaaatggttggaagtgggaggaacttcacatttaaatagaaaactataaataagccaatgaaaagaaaacactcataattatccaatataatttttttatagttcatagattaaaatatatatatatatctgctgcatccttccaaacatattacttttactcttaaaccagcaccactacttattttctataatagtgtattcattttccatgtttctgttcagaaagtgtaggtagaaaatgtatgaacctatccttanggaaaaattncattctctaaaccacatgacaattctcagtggggatattccactgttccaacatgaacaaaatgcccccaggaaattataggtacctcggncgctctanaactagtgggatccccgggctggcanggaattcgatatcaaacttatcgataccgccaacctcnangggggggnccggtncccaacnttttgntcccttttagtgagggttaattgcncccttgggcgtatcattgggcatactggttnccggngggaaaattggttttccntcaccaattccccccaacntaccaacccgggaccttaaaatggtaaaanccnggg

SEQ ID NO: 3405 - DNA, 888 bp, Homo sapiens
  misc_feature 1, 2, 4, 304, 369, 381, 406, 522, 572, 606, 656, 662, 670,695, 704, 709, 736, 765, 768, 775, 776, 777, 778, 782, 786,803, 817, 821, 869, 879, 881: n = A,T,C or G
nntncgcactcctatagggcgaattggagctccccgcggtggcggcccgcccgggcaggtacccactctgtgccaggcaatgaacaacatgggcaaatagcctaccctcatggagcttacattttaatagggagacagtcaataaagcaaacgaacatgcaaatagataatggactgtcagttggtgacaaatgccatagagtaggctaagatgctattttagaagggcttggaaagtcttctgcatagggtaatattggagcagagactaaatggtggaggagaggaatatgggactgttcanaggaagaatatccctggtgagggaacttcaagtataaacacactgaggcaggagcatgccagatncaaggatgacangaagggcagtgtaactggagcgcantgagcagggcagagagtgggtagatacatgtttatatatctgcatctctagaagttcaagggagcaggttggggtggaagatagaaatttgggggtcatcagattatatatgttgnttaaagccatatttaatagacaggttattcttgagaccgagttttgatangaggaggggagggctgagaactgaaccctggggnttgtcaaggaggcaggtgccacccaagaaaaggtaaagtggaatgacctncgaggnggggaaanaaagatccaccataccttgttttanaagccttgnaaaanaaacctgttaacagggaaggcctaatnaactctggttaatgccggctgggcctaanaanaatggtnnnnaatnaaanccctgttcaaccggaanagcttccataaganaatnggggggggaaggaaattgggaattgcacttaatcaacttcttttaaangcctttggantnaaagggg

SEQ ID NO: 3406 - DNA, 882 bp, Homo sapiens
  misc_feature 2, 84, 415, 442, 473, 477, 498, 518, 535, 555, 562, 587,600, 606, 611, 612, 625, 630, 649, 660, 667, 683, 695, 715,732, 735, 740, 741, 751, 759, 772, 790, 791, 817, 819, 824,826, 829, 831, 838, 856, 858, 859, 877, 881: n = A,T,C or G
tncagcactactatagggcgaattggagctccccgcggtggcggccgcccgggcaggtactttttttttttttttttttttttnggcgatggagtctcgctctgtcaccaggctggagtgtggtggcgcaatctcggctcgctgcaagctccgcctcccgggttcaagtgattctggataatctgtgctatctgatcaaactgttagctccaagatgtagaaagaagaacctgtggtatgaatattaagtcagccaaacagctttaccctttgtatgggagtgctttttgcttcctgtaaatagccttgtaaatggttgttttacagagaattattcagtaaggagaagccatggaaaaattaagaggaaatgattttttcccaatagcttcttttcttttttcctttttctttnttttttctttttttttttttttgaganggagtctcgctctgtcaccaggctggagtgngggnggcgcaatctcggctcgctgnaagctccgcttccgggtttnaagtgagcccaaatcgngccattggaagtctaacctngggcganaaagcaaaaaactttttcttaaagnaaaaaaaaaaggngggaangattnnattgggaaaaagncccgnggttaaaggtccctgggtnacttgtttganccccgtnccttgggccgttttanaaacaaggggancccccgggctggaggaattngatttaaagctttttgnatncccgnnaacctctaangggggggncccgtccccaacntttttttccctttatggnngggttattgggccccctgggggaaananggggnanaantngttcctnggggaaaatggttttccntnncaaatttcccaaaaaaanacana

SEQ ID NO: 3407 - DNA, 968 bp, Homo sapiens
  misc_feature 2, 6, 13, 30, 64, 109, 132, 217, 339, 372, 375, 403, 417,421, 431, 442, 443, 463, 476, 480, 487, 497, 500, 502, 541,544, 550, 564, 579, 580, 594, 595, 608, 619, 621, 634, 637,638, 639, 641, 644, 656, 660, 661, 671, 672, 674, 676: n = A,T,C or G
  misc_feature 683, 686, 687, 691, 695, 702, 705, 706, 718, 726, 730, 731,736, 740, 749, 757, 761, 762, 772, 777, 786, 787, 788, 792,800, 807, 808, 817, 820, 821, 822, 827, 831, 832, 841, 842,853, 860, 869, 872, 873, 879, 886, 890, 895, 898, 902: n = A,T,C or G
  misc_feature 907, 909, 915, 925, 926, 928, 936, 939, 942, 955, 960, 963: n = A,T,C or G
tntttntactatnctgcgactcgctatttngcgaattggagctccccgcggtggcggccgcccnggcaggtactatatcagctcatccctggcatgcacaactgctcantctggccaaggcaccaactcccngaaggataatgtgctgcttcagctcatgcccagggagcatactcttttgggtgggccaggcaccatttccctgtgatgctggganctgcttcagcttaggtaccactgcactccagcctgtgtgacagtgaaattgtgtctcaaaaaataaataaatgaataaagacacagaatctgcaggatggctcagtcagttggagacccaanaaagccatgctgcatttgcagtctgaaggtctncangccagacacctactgtagcaggatgagncaatacaagtccanaggnggggctgctnggagagttctnntttgtaggaaggaggctggnctttttgttctgntcangcctttnaaaggaattnggntnggcagcacttcacattatgggagggcaatcttgcttttnctncagagntttgcagaccgtanattgttaattctagnnccaaaatagccccnncccataaacaccnaggaattcttntntgaccaaacagtnctnnncnccntttggacccaancaanncaaggtggcnntnanataactntcnnactntttnaattttnggnngaaccccctttnaatttaangaannaacangaanaccctaggnaagccttncaannatttgggcantcctntttttcccnnntaantaaaattnaataccnngggccaccnaannngggancccnncctcttgcnnaaaaaaaaaanaaaaaanctccctagnccnntttaanaatttanggtnccccnggntttngggantntttatnaaagttaatnnanccccgganctntangggggccccggtnccccnttnttttt

SEQ ID NO: 3408 - DNA, 947 bp, Homo sapiens
  misc_feature 2, 6, 8, 12, 40, 110, 388, 414, 454, 465, 469, 491, 492,495, 502, 552, 579, 584, 617, 622, 661, 682, 686, 698, 700,705, 727, 750, 751, 753, 767, 776, 810, 828, 836, 855, 857,886, 896, 909, 925, 928, 937, 942, 944: n = A,T,C or G
tngttntncttngggctaattggagctccccgcggtggcngccgcccgggcaggtacgcggggagagctccagcatttcatctagggggaggtggaagtgtggcttttanagataaaaggacagggttgttttggggtgctctgagaaggggaaaaggagaccagtgtataactttgagtagctagaacgggaagatttgagggggctgaatgaattgatgagagtgatttaacttaaaggactggggcattatctgtgggcccgggtatactagcttcacttttgaggaaaagtgaagctgggaaatgtgagatctactcagtgggtccggggaaatgtgagaggagtaaggaaagtgaagacacagatgtgttggaggctccaggntagcatggtaaagagaaagggtttcntggattctgattacagaatggacctgtggggggtcttcanattgaggcctnacangcatttaaaaggagcaacctgnntanaacagangtttggggaaatatttattgggtagaagaagaatgataagtgagctacanaaataggtaggagggcccatctaaatntcatnttcccggaatgaggactccccattccatgtgcngcttnaatgactacgtggaccttcatctgtccccactattgaanatcactcttttgggcataccncttnccatggaagcantncctcngcccgtcttaaaactagtgggntccccccgggctgcagggaattnnanattcaagcttattngatacccgnccaccctcgtaggggggggcccctgttcccaacnttttgttcctttattgangggtttantgccccccttgccgtaacntnggcttagcttgtttcctgtgtaaattttntcccttaaantttcccaccatcnttcaacccggaccctnaanggtaatgcntgggngncct

SEQ ID NO: 3409 - DNA, 928 bp, Homo sapiens
  misc_feature 16, 419, 428, 439, 469, 484, 497, 576, 580, 583, 584, 604,611, 618, 620, 643, 671, 672, 675, 691, 692, 703, 706, 707,711, 716, 718, 722, 723, 727, 728, 729, 730, 731, 734, 745,748, 749, 753, 756, 758, 759, 760, 763, 767, 774, 775: n = A,T,C or G
  misc_feature 780, 782, 783, 784, 785, 789, 790, 795, 796, 798, 802, 807,816, 821, 822, 827, 833, 835, 840, 841, 842, 843, 844, 845,846, 848, 849, 850, 852, 856, 858, 859, 860, 863, 864, 865,866, 867, 869, 871, 872, 873, 876, 877, 881, 883, 884: n = A,T,C or G
  misc_feature 885, 887, 893, 894, 895, 897, 899, 902, 904, 905, 906, 913,914, 917, 918, 920, 922, 928: n = A,T,C or G
attttttgacgcgtcntcgactactatttggcgaattggagctccccgcggtggcggcccgggggccattgagactgccatggaagacttgaaaggtcacgtagctgagacttctggagagaccattcaaggcttctggctcttgacaaagatagaccactggaacaatgagaaggagagaattctactggtcacagacaagactctcttgatctgcaaatacgacttcatcatgctgagttgtgtgcagctgcaacggattcctctgagcgctgtctatcgcatctgcctgggcaagttcaccttccctgggatgtccctggacaagagacaaggagaaggccttaggatctactgggggagtccggaggagcagtctcttctgtcccgctgagacccatgggccactgaagttcctnatgctactntcactgacgtnctatgaaatacaccagtgagaaattccttnaaatttgcaagttgnctggggttcatgngttaacttggtccagcttatcccagaaatgcccacaagaatttcaactggatcttggaagaaggaaagaaactgatggngttnacnnggaccccattttgattgganacctacncaagggntnatgtcatttaatgggaaacccgnaccaaactttggctttttccttgccccnnggnaatatttggtttttgnnaagtttttttnggnncccnggccntntttnnaaannnnnggnatccccccggnttnnaggnatntnnnatnctanctttttnnttccntnnnncttnnggggnncncgtncccantttttttcnttaannaaggntatttngnccctnnnnnnnannnangtantnnnttnnnnngntnnnaanntttntnnncntatttnnntngnttntnnnttatttnnaannantnaacccn

SEQ ID NO: 3410 - DNA, 1004 bp, Homo sapiens
  misc_feature 2, 172, 279, 310, 320, 357, 365, 367, 369, 370, 372, 374,375, 379, 387, 393, 399, 400, 402, 411, 417, 434, 435, 439,440, 443, 452, 458, 460, 462, 463, 468, 473, 494, 499, 500,501, 507, 508, 514, 525, 529, 538, 542, 548, 549, 552: n = A,T,C or G
  misc_feature 555, 558, 565, 567, 570, 576, 578, 582, 583, 584, 586, 587,590, 593, 595, 598, 603, 604, 609, 610, 612, 618, 619, 622,625, 627, 639, 649, 666, 667, 671, 678, 679, 685, 689, 691,692, 696, 699, 705, 718, 719, 721, 723, 724, 731, 733: n = A,T,C or G
  misc_feature 750, 754, 768, 773, 775, 792, 798, 799, 809, 813, 823, 824,825, 828, 836, 838, 839, 841, 853, 854, 868, 873, 877, 878,882, 888, 907, 909, 913, 916, 920, 927, 928, 932, 934, 937,946, 951, 953, 954, 956, 959, 968, 974, 975, 982, 986: n = A,T,C or G
  misc_feature 990: n = A,T,C or G
tnatgtctctcactatagggcgaattggagctccccgcggtggcggcccgaggtacaatgcccttggagggagaggggcttcatggaaaatggttgccatgataggatttggggagaacctctatgtttgagggagtttgggtcaggacctatccgtggaagcaaaaactantgcccaaatattcaaaacatagtttggtgaaagatcacctatgattctgaacgaaatagtgtagataaagacatctggaagttttcctattgaaaaaaagaaagtgngaaatcagatacttttgtttttaaggctctntttcttaaanttcctaacttggccaaaatgtcaatggtccttctagnattcccantncnnantnntttntctctttntgtaangggaanntnccccccttnctccanaaggtgtattaagcctnntttnngtngtaaaaatnattttncncnntaccnatgtnaccagtacctttcctagtccnaggannnattagnnaaaggntatcttactanattnccatgtaanttanttcccnntantcnttntattttncngtngtctcncnctannngnnctnttngnaantactnngattnngnaggtannatnctnantattttattaanactctcattncaacttctatactgaanncagnattagtnnctatcntttncnncttntcntcttcntacctatctaatnntncnncttacgntnttacttccttatacctntctntatttactatttancgtancnatctaacttctattctngtttcnnatttacctancttnactttcaatnnnttntattcttntnncnatttgttcttannttcttctctcttcnttatnttanntttntcttgntcttttacttctgtaaatnantatnttnttcnattgtanntcantnacncatttctcntaatnanntnaanttatctctnatattnnttattcncgtnatgntatcttatttatcc

(The sequence listing continues in the following parts.)

What is claimed is:

1. An isolated nucleic acid molecule comprising SEQ ID NO: 1, or a complement thereof.

2. A vector which contains the nucleic acid molecule of claim 1.

3. A host cell which contains the nucleic acid molecule of claim 1.

4. An isolated polypeptide which is encoded by a nucleic acid molecule comprising SEQ ID NO: 1.

5. An antibody which selectively binds to the polypeptide of claim 4.

6. A method for producing a polypeptide comprising culturing the host cell of claim 3 under conditions in which the nucleic acid molecule is expressed.

7. A method for detecting the presence of the polypeptide of claim 4 in a sample comprising:
a) contacting the sample with a compound which selectively binds to the polypeptide; and
b) determining whether the compound binds to the polypeptide in the sample to thereby detect the presence of a polypeptide of claim 4 in the sample.

8. A kit comprising a compound which selectively binds to the polypeptide of claim 4.

9. A method for detecting the presence of the nucleic acid molecule of claim 1 in a sample comprising:
a) contacting the sample with a nucleic acid probe or primer which selectively hybridizes to the nucleic acid molecule; and
b) determining whether the nucleic acid probe or primer binds to a nucleic acid molecule in the sample to thereby detect the presence of the nucleic acid molecule of claim 1 in the sample.

10. The method of claim 9, wherein the sample comprises mRNA molecules and is contacted with a nucleic acid probe.

11. The method of claim 9, wherein the sample is isolated from breast tissue.

12. The method of claim 9, wherein the sample is a tumor sample.

13. A kit comprising a compound which selectively hybridizes to the nucleic acid molecule of claim 1.
